United States Patent Application Publication US 2011/0014706 A2 - sequence listing, part 12

SEQ ID NO: 24549 - DNA, 1358 bp, Arabidopsis thaliana landsberg
gggatccgaagttcataaataaatgcatatataccaattcattactgtcccaattttcataacaatcttcgtatctatttgaatcagattctgacattttcccacgttgatcactctacaaaaacatcagaaaattaaggtacatgaaagatcaataaaaaagaaacttttcaataaatatcatcagctgataaagtaccaagacagcatcgaaggtacaaaagtgtaaatcaccaccagttccttccatgtcttcaatccagtcgacatggcagaacctgcagaggacatttcatgaaagagcatactagtaagatcatactaattaaccacaagatcataagagctaatagtagctagaagaacaagtatattaccaacagaaaacatagttacaaggtaagcatttcatcttcagtgaattatcttgatttcgggggatccttagcttacacttgggacaaggcaccgcattttctagtagcctaaaatcataatccaaaaagactgaatcatttcataaatgggaaattccccgacgtcccgggtttttggatatcaaaaacgtgtattgctaaccatttgcagcagttttacagtccacaggactgggaccgtctttcttgcactgaagcttagattcaattatagtaatagaaaaatgttttcaaacaaaaggattcaagctaaaaaaaactcacattccatcagattttctaaccaaacggtgacaggagacactggcatttccagaacctggactaagatcaatggcgcatctagacccctggataggatgccatttcatctaatgaatgtcaaaaaaagaaaaagctaaataaaaccttttaggcaacaaatggttcaaagtgatctctatgatctatctaacgttgttttctttaattccttgtcattactgtttctctgttgccaacgtaagatctaaggagatattgattgtaattgaacttctctctcttggaagcaaatctctcaatcgtttctagaccaacagaagctggacaagaagcgtggagaccaacacgaacaggacatttcagccaaagattccattcagcagctggcttttcactgatgattttgttgatatggcctatacattacatgtcatttatctaaataagaaggagtgatcagaaaaaccattttattcaaacgagatattaatgcatacttgtccagcagcgagtgcatatacgatgaccacaagagaccgatgccaagttcttatgtgggtgtgattcgccacaggctccgcaaaaatactatccgaacattaagggatcttgtattaacttaaagttggaaaaagaaagaaagtagaattaacagaa

SEQ ID NO: 24550 - DNA, 1407 bp, Arabidopsis thaliana landsberg
tttacatgatccatcctgattgtaatctcgattatgaattagtgcaatacaaaagttggtagccaaacaaatggtttcaataagtctggtttttggatagtgtcgtgacttggtaaagtaacatttcactagatttgcttgtccgaagccaatgagaatgactcacttttacatttctgttcacaccatcattattatcaaaatctcgttatcattgttactaccattccatacgtacctttaatccatacgaccaaaataatgcataaactccctgcagggacaaagagacgtcggaaagtacgagattagaccactccaactgccaaaagaactacgcgggctaagacgtttcatttggcagtgacaaaaacaacgtcaacggtgaacagtgccaccatggccatcgtcttagctttttgaagacacgtaaatcctccttatcaaaaattataacaaaatataaacataagctaccgatctatagtgggctttttaaaaaggatgggccgactattcaagttatcaacacgtcgtcgtataatcatagtagctctttgtgtttttgttccggacatgattatcttagtatccaaacacgtcacattcaagtttattgtaaagatttttctctccggagacgttaagagaagaaacagccaacggattagggatcttaccgttctgcgattcgccggtgagtgtttttattttatttttccgatttcatatcggcttcttactctttaattcgatttccttatatgttatcgtgattaccttcccgagaattcatggtaaaattgatcggtatatattttgataatcgacttcaatttggtttatccctccttatgcttaattgcttcacttaccggttttgattctgacttgtattgatttgatatcgattatccggtttagtagcttcaagtgtttcccctgtgtccatgtatcgtcttggtcctgatgattctgaaatgttctgttttgtttgtttatgtcaagaacagagtttgaagctttttttagagacttcaatggggagccaaggaatggtatctcttacaaagtctctatgcactatgactccaagagtccgtctcaagaaaccgaatatgttgcagaaactaaagactggatcttgtaatttccggtgcagaaacctccgggtcgcatgcacaacaaagctggctcaatgggaaccgtgacctttcattcatgcttgggcagaagaagctgctgatatagtattggacaaaaccgcgaatgtgttcgaatctattgtctccgagagtgcagaggaagagaaagtagatatgtcagcgcaacaacgaactaatactcaagggcaggcacctaaatggccaatatggctcttgggtccatcagatctccgcacaagcg

SEQ ID NO: 24551 - DNA, 1238 bp, Arabidopsis thaliana landsberg
gtaaacgagacgaccaagaagaataccaaaactatttgattttcaaaattaattttaacttcttcaagttaaatagtgtcatcatcagtgagtcaattgatacagttgtagaatttacaggaatatacttttagcagttaatattaatagtttgtcttttagaatgcttcctaaacatcgatttaaaataattaaggaaagagatgtgtgcataagaaggcacataaagctaaacaaaacaataccaaatatgactaaaccaaaatttgccaaataagcagctatttctagttataacatcataacatcacgagtcaccagtcgatacattaaatttaaagttgcaactagaaatatattgaaaaacagaagcagtcacgagcgaaatctctcatgcttccaccttctgagatttgttccagcgaccacccggtgaatctgatcccctctttctcccgaatctccctcctcttcttcctcccctgcatagaccaagtatattattatctgaagaaccaaacaaaaacttcatttgaaacaaaatcataacaaagaaaccagaacaaaaacatgaactcaccttcctccacggccacccttgtcaaaccgatctttgcttcgtaggagagtccaatactccttttcagcttcgcctgacagagagcaatataaacaagtgaccatttaactaaagcagaacacaaggtttagttataagataagattgaagttgaaaaggtgtttttaccaataacaggttctaggacagcaataaaattcttcacggctagtccaccttcattggctaatactgctgctgcacgggctttctgggatgcttcaggttcatcaaacctaagataacccgtctcagatcccatcttgaaatcaacaaacttcacaacaaaaagaataaaggaatcagtgaaaatgatgtcagttatatgagatattgaatctgattcatgttgacagacagctaagtaaaactcaagtagtaccttgacatcaccaaattttccgaaaacagccttaagatcttcacgtaagacaacatccttattatctttatgggtggctagagcacccttttcttctttctcatcatcttcatcctctgctccctcggcctgaacctcaccagtgttttctttatcagcatcaggagtatatgctggctttgtttcactttcttccattgtcttatcagttggctcctcagaacttttttgtgcgct

SEQ ID NO: 24552 - DNA, 685 bp, Arabidopsis thaliana landsberg
tcacataaaatcatatgttatatcgaaagaggagctagtaacactaaaagaatcttgtgatatgtattttctttatttattttcttaaagataaatgtcaaccttatcatggaagaaggatattcaagttgaaggcggtcaagatcgtgatcgaggccatgtcccacgagaatctggcttttccacctcttggacgaatcttccacatgggttctccattacaaagaaactcttgaatctttctttgtacttgtttcaacggcattgcgtcccttagattttccggacgtatccccgtcgtctcgtacctatagctagtcacggtcatcgaaggtttcacatacgtgtgaaagataacgttgtcactctcatccgttatgcaaaccctcgcgcatagatccaacgacccgtcacttcctcctcctaccatcttgcaagagagtgcaaccactcttggagaccgtgatgacgtgtagtcgatcatggccttatctcttaagcctaaagctgccattcgagtcgtcaatccctgaaaatgagaaaatcatatgatttgaataagtatatattcttgcgttcgattcatataggttaaaagtttaattatataaatatgaaaaagaggattacagagttgacgctcgagaattggcatctctcttgatggattctaaggagaattcgg

SEQ ID NO: 24553 - DNA, 1316 bp, Arabidopsis thaliana landsberg
atgtggcttctcacaatcttagtgttggagtcaaacccatggagaggagattcgaagcctgtatatgtattaacacatagagaaaaccagatatgtaccatgaaaacaagaacaaaccacaggttccaactctattccactcaagttttttttttatagttttagttttcttctccctatgacattagcaattcttataaacagtgaagtagaaaaagagcttggactgttgttccctagtaggatcagcaaccagacaaagcaggctagacccaaaactaaattcgatatgctcgtagaagacattcgagatggagtactggtaagtattctcactgaatcactttcaagaccttatgaaacccagacaacgtgatatgcctagtttttatctcaaaggttttcgaagatgtgaatgaggctgttagatactgtgacctattacaagggggagggaaagggtgtgaaggtgtcgctgagattgaggcctcctctgtaagattatgagacaaagatatcatctaattctagaacttgttgcctttaaacatttgaaatgatctgctttttttttttttgaataggtttttgatctttgtcggaaaacaaggtctctggcagtgctcttccgccgtggaagaacaccacctacacctcagacgctggaacgtaatctcggatcccggaagcgttctcttgaggacttgagggataataaatagcttgtgaaacaatgtattaattttacttgcaataattgaaaatactttgtatagactaaacagtaattaaccgagggtgaaactgtgtatatatataaaatgcatgttacttgtgctccataacttttttttggtccttataattctcttgaagctgcgctcttttctttggaggctttaaagcttacactaggagggaatggattacctgggcaatcaacctgggaggatttattggatctatgattaggtggccaaaaagacccttggattttggacctcctaaccagaaaaatagggagctttttttggttaaaataaaatagattaggctaagggctaaggctggggattaataaaaaaaatcaaggggataaagggaatccctggtattccgatcggtgacctggcctaagaccccttacggttaataatataatcaatatagaatttaaggatggcaaaattaattttattccttaggatgacctattaggccaaaaggccaggtaaggccacttggttaactaatccttccttacctaaaacctccaaagggtaaaaccagggggaccattcctctttaagttcaaa

SEQ ID NO: 24554 - DNA, 1623 bp, Arabidopsis thaliana landsberg
  unsure (1)..(1623): unsure at all n locations
gaattggtttgagaagtcgtttttggttcgggttgtttcgatggcttggtgtggatgagtgtattgtgaagggggggtggagtaaggtgtctaaggagactaagaagaggattgaagagaagatgaagatggtggaggctaaggaacttgagttgttgtcgcagaagatagatgttttgaaggaggtggcttctgtgattgctgaaactatctaagaagaaggacttggattgtttaggtttaatggagatgtaatgcctcttttgtaatttatcgtaggatatatgtttctcatctatgtttctggttcttattagtcttctttttttgtttcttgtgtgagaattagctaaggaacttaagaactttggactttgtaagccttttggtcgatgggtgtaatgaacttaagactttgtaagctatggctccgactggtaaaggtgttttcaaggtttgattgcagtcgaagtttatattatgtggtataaactgcagtttgatattgccctattcttttcgttatcgttgcgttagcggtccgcggccgaaaattataacttatttgcatgtaatgtatatggaaactaacataatcgttcttgtgaaaaaagccgcagagtctataaaaatggtcgccgctttttcttagcgatgccgacgacaccggtatcccctgtaaaagtggccgcaacgacatccttattattttttttctgtttcttttgctattgttgacgtttaaatttcaaccgcagatccctggcgcagcgttaacgtgacgaacattgcctataataaatttgctatagaaaattagaaataagagttatgtttaaaacaagtgactcttgtgctttaaattgaaaaagttgcagtatatgtcactaagacctattaaattaaatatcagtaacaataataagatttattataaattaaataataaaatgatatgatataaatttaaacatattatgtaaaaacaattgttaaataatgattgcggaaactgttatcggataaacttctctcttctctcatctctatcctttagagagaggaaacgatcgaagcttcttaatctgataacgattgctacttcagcatctgttgatcgttcacgatggcttctgaacagaatcctatggctttctcagcatagatgtctggctcttgtccgttaacgtttgtcttttcgacaacgtttgatcggctctcttctgacaccatcttgtttctcttttacggtggtggttggcttgtgtctggcttccgnnnnnnnnnnnnnnnnnnnnnnnctagctaagttctagaaattcaccatatagctctggtgtttcttttagcttttggccagattgtttttggttcaaaattatgctttctttgtctcgatttccttattttcggtctgattagactcttttgcaattcgatttgagtactggaatcgtaattccttgaatcccaggcgtttaaagagctcgatttgtgttccaagtttatcaatttcaatttttaagaacaaatcggagttaggggttaaggttttttttcgtgactttggattgaattatgcaattgtggctatttctttaccgatctatggaatcgagtttg

SEQ ID NO: 24555 - DNA, 1395 bp, Arabidopsis thaliana landsberg
gacattcaatcaaacttatgcttgaatcctttgattttatgccgtcatggctagcattcgcaaggcattcttcgatcccatcattaagcaaaagaagtcacatataggtaagcttcatcactcgaagatttttggtgttttcaaatatagaaataattatttaaagcaaatccaattgtcgtatatactatatacacccgtatgtgtgtattattgcgtttcctttttgtaacacttttataggtaaagatataaagatggattaaagaggaaaagtttttctttcgtgtgtgattcatcaatttttatgtctctcctttcaaacttttctcctttgctttgaccaccaataagacataagcatccacaacggctattattaggagaccgacaatcctagtaccacggtcctttcaatgctcaatacaacaataaccgtatgaacacattctctctacctccgtttttttatagtttcgacttccaagactcgatgctccgttttaaaacatttatgtgaataaacacacataaaaagatacaaaaataaaacatgtactatctttttatcttcgacttcaaaacaacacttaattatgataaaacatacgtaacaatttactgctaaaaaagaagcttagaattctaatacacaaattgttattgaggtaaagtgtaaaatataaatttatcaaaatcaagataaaagaggaaagccaagcccatatttcaacaaccataaacaaaaagtcttaaaccgtacatttacatatgttttccttttacttgaatcatagggacaaatttttcaattataagtttaagaatctgacataagaaaactttaagcaaaattccatataactactatgtcttcattgatgttgcactaggtgattttaatatttgatacaattattgtataggtatacaaatagaaataatgacttcatggcccaatggataaggcgctggtctacgaaaccagagattctgggttcgatccccagtgaagtcgcattcttttttacactatatccttaccttcaaatttgatctggaacaaggagaataagtagatatatagcctttccaagctgtactgtgtgaatccatggctaaacctttctggtctggaacaatggtctttaccttccaagtcttcttcattgctcaacattgtcgtcacgttatgtgcaacgaatcaaaaaatgtgaaatctcactttaaccaaaatgacacaagcccttgactataaaacaaagctacacaaatttgaaatagaagatgacaataagacacaattagaaacagtagtggtaaatagaatgtttaaacagagaagaaggaacagaacagagtctctgtcttcaaaaattctgaagacacatcaat

SEQ ID NO: 24556 - DNA, 2460 bp, Arabidopsis thaliana landsberg
cctgtccatgaatctatacatttaatttttccacatccattcactaaaaaagccgcaaccttttttctcatgatattacagtatttgcattgtgaaccacatatgctacctgtgtgccgcttgagacaggccgcagaatcgccccagcaccagccacttttgctttcgcgctggctatagaaggcaaacgagatcctatagcagttgcagaccgataaacaacactaaggaccctggtgtgttcaacctgatcacgtaggtcatttgaccatgaggacgaggttacctgccagtaaatagaccaaacaaggatcttatctgtgtcaaaaatgggtgtacgtataatacttacaagaaaatttgaaccatggtttgcaaaagtggatataaactggagaaccaggatgggaacaacccacagtaagagttaagaccatagtttcccttttccattgaacacttgtgggagaaacttttgtcaactttgccaaagagtgaatatatctaagttgtctggaaagactgaatcatttagcaggggaaagatcatatctctatacattttctctctacagaagtaccaagttaaaattgcaggcttgtatccactatttgatataccaaggttagcaatatattgtaccactacagaatcaggaaaatttcttctaatggtggcagagataaatcctgtgaatgtagcttcacatataagcaaagcaggtcatatacctcagaacgaaggtcatcgactgaagaagcagagaatgttgggactagatcagatccattgataatagtagtaatgaagtgcttgcctgattctgctaaatcccaagtcatacaagcagctgcgagttgttcaatttgaaattcagtgcatattaacaatttttgacccagagaactaattgacatataaagagttgagcatcacaattaagggagaggagcagataactgaagacaaaaaaataccaccattaatcattaaattgggtgtacctggtgcaaaagtgaaacaggtagccgaggcaaactctttttgctcccgaagaatatacgttaaaagtgaagctgtcccacctccaagagaatgacctacaatctgaaacaaagatgctccttagattcgatacagtagataaaggacttcctatttcaacagtgcaattctcaagacaaaatgtgtatcatgtaaaaagtatcaataatctctccaatacggatctctaaatgaattaagatttgcgcgtttacctgaaccttgaaactaggattctcatcaagggccttgaggaggcaaggaacactaagtttagcaatccatcgagctgcagcaaccattccacaatgtgcataacctaaaactaagttgcttagtccaccatcatgcaaaactgaatgatggaatgggacaactgcaccagttgctgctgttaatgtatctttaatgctatgagtgccacggatcaatagcaggatacattttgaattggtatctcgtataatcgtgaatgcaggctgcataatctgcagggttcccaaattcaattgtttatggttccggatataaacgaaaacaacaaaacagagctcaaaagtataaaatattcaaccactgagctctaattaagcgtcctaaccgtatcctaatcaatctaaccatagtctcgtatcaccactatgataaccattttatcaaatttacaattcaactgataaaactctttttaacaagttacgtccaatctttaatacaagaacagcactgaggatcaatcattatggggaatatctactgtcattcaaatatctatgtgagacaaactctttttagcctcccaaaacatatgttcctaagagaagctatccaaaaagtaagaatatataatgcttcaaaattggatttctagtctaacaaagtatctagtcactataaacaagctaatcacaagttatagcacgaagaaaatcacattaacatgacctacccctgctttaggcttctgaagaaggacatcttcgtgggtataaccagcactctccagaaacactgcaaatggctttttggagaagagcatacagagggtcaaaaatctcagtaactctgtcaaatccatgataatctctggtccttttaactctatacaattacttccagcataaacactagcagttggaaagtttccctggaaaaaaaaaaaagaaaaacgcaagcaagcaatgtcactagctacacacaaaattgtcccatgaatcagaaaaaagaaactctgcattggaacagcaacacacacatgaaaagagtagataatgaccgcatcactattcactagtcatagattacaagtgtaaatttttttccacatgcaaaataaccaaacaaccatcctacactgaaatgaacagagcacatatatgtcttatcaggaaagtaaacaatataggactcataat

SEQ ID NO: 24557 - DNA, 807 bp, Arabidopsis thaliana landsberg
ctggtgtacatactacacacagaggattaataacatttgtttgtcgatcataagacatcaataaaatacataatgattagtcgagaataaagtgagaagctcttcattcttcttgatatgttcatgtatgtctccctgtgttacctgaacgtatttttaaaagtagcttaaacaaaggagattataagagaaagaagcaggaacgaagtaaaacacctcccagtaatggttagattaatgcattgtcgtaccttcaaaacagttaagagagttcaacatttgtcatcacctacacaacttcatatataatcaagcataaggagtaacacagtaatatataatcaagcgtaaggagtaacatagtaatatataatcaagcgtaaggagtaagttaaactgaaataaggaacccaaaacaattaatataaaatgaaccattcattgaaaaactaaaccttagtagattgtagataaggaacccaaacacaatgtttaaactagcttacgagatgataacactaaaccctagtcaaggactagtgaacccaactagattaatgtaaagtgtatcatctataaagagtttatcatcaatcctcttatcctcctagacttgctccacctcttgacacgacaagttctgattctgcaaggaacaaatcaggtcatgtattcactatcacaaaggaagcagacatgcataatcactaataaaacacttgtgaattacaatgcaatgaaatctttcgaaaaatacaataaaacaacaaatgtaaattgcagttaatgataatagttgtgctgatt

SEQ ID NO: 24558 - DNA, 713 bp, Arabidopsis thaliana landsberg
atatgtatgaaaaaaaagagtcaatatatgtaatcatttttcccaagaagaaaaaaagcattaggagaatcacttgattatcatttatgaagtccaatctattacaaatcgaattaaattttgtcaatttaatgaaatatattgttagaactatcaaaagttgagttgaaagtttgttagggatgaatataaaattaatttaacgtcgaggatataccctttattcctccattaattcacatcgcaaattttattcaaagcttcttttaaattttgttcggtttattattatattaatctatcaacttttaaaaaagaaaaggttgatcagcaacgtactgaacaaactatgcagttgcaactgaacatgacacgtggatttatatttcatttaatttgttgggaccatcgcatgattcatgacgccttcacttgacccatcctctttctttttttttttttataatactacaatttgttttttctgtcggtctactctgaatttttgcgaatgaatctgttgggaacttgggaccattgtgttgcctgattcatgggcgcatccaacttttgccatcctcgttcctgtttagttttttcggtctgcattcaatttttacgaatgtacagagagagatcataaaggatgtaaaaaacaaaacaaaagagactatagagaacccaagaaaaagaggcaacttaaaagagttgac

SEQ ID NO: 24559 - DNA, 913 bp, Arabidopsis thaliana landsberg
cataatcctctgtcctcaaacggaatttctcatgtaagatgagatgcaagaactcaaaaatgcgcgtataagggcacaagaggaaacatttggatcgaggaccaaatggtgcatgttaatgttagtaatgttgtttgactaagtgcgcaaagctaatctacaaatattaatacaagttgtggcaagataagacaagggctttcacatggccatccctccaatggtggcaacaaactcccacatttttttagttatttcacaaatttttgcatctatgtttttccttgcaagggaccacatgcacatgttcttctcttctgattgtctattaacaaatacaataacgagtcttcatcatttgttttggatgaaatgagcatgcatctaccaatgcacttgtgttgtagcaaatgggcaatgttatcagagttaggttcatgtacaaggaattgtttatgcaggtgtgtcccattatgaccccaagaccaattctatataacttgaactcacccaataaacttcttcagttaataatcgatcttatctaatgtgatatattagtattttgaagacctaattttgtaaccataattcatttcttaatatatagtgcaataaataacagttgagggtcgctaggcgacacgttcaattactatgtgttaatttggtggctaaaccaataatcaggagactggtcacatagtacatttgtttaaaagtgacatgttcgattgcgtatataatttatatgctcaggattattattaccgccagatcacatgttcaatcattcttttgagcaacatttcaattatacgtgtttccacagcccacacttaaatctagttatgtacttgggtatacatttgctacgtgtatatctattggtgcgacatcgaagctagtgaaa

SEQ ID NO: 24560 - DNA, 1900 bp, Arabidopsis thaliana landsberg
tactcataactcgagagttttctccaatttgtttttgttttggcaatcaaacatgtcaactttatatttgatgagggaagtccataagtacgaaaggagattttgttttcgattttaatagcatcaagtttctaataagggcttaaacccaagactggggctagtgtgagcccggaaggtttcgcttatctatgtaaaacccctaattttcaaatcagcgttgaatctaactactaatggcgtctccagtcaccacgaacgataaagagccattggttaggaagcagaaaaagagtttgtcccttcctgatgatgtgttagtaagcttcttagcccatgtctcgagattgcactattcgattctctccttagttttgaagaacttccgatcactcattgtttctacggagctttacaagactcgctcactcttaggtcgtatagagagttgtctttatgtctgcttacgtttccccaatgaatctcatccacgttggttcactctctacatgaaacctaatcaaatcgtagccaataacaagtcaaattgtaatcttttggtcccaactccaactataagttcttctcctgcgcactggttatgtctcatagcggttggttctaggatttattaactcatatgtcacccatagagtgttcatatataagaatatctttgtgctcatgcatgaattagattataaacactccatatggaattatcgtctaaaatacaaaacctaccctgttaatgaaaattacatgtctttacactcactatttcaatccctaattatttatattcaaaccaaagcagctaaattcatctagaatgtgatttataccatattaagctgtaaattcaactactatatcttttgatttaatttatgggcttattgtcctctaatatcatatgtttagctgcttagggtttctaattatgggcttaagcccaagactgggattaatcttagagtttcgtttttctttgaataaaacctaatctcaaaatttcagcggaaaatctatgtgctaatgtcgtctccaacaacatccctgaccaccacgaggggcgaagagccgttggttacgaagtagaagaataattgttggggtcagatttcctatttcccccaaataaccgagccgaacagagtcataagcgcctaggtaactaggttcgtcgccgtcaaagggtagaaatgattcgagagagtccttatccggctcaggtgtcattccaagcaacacacccagagccagggaaagcaatacttcgggcctcaagaaaacacctctttaatccctcaaacggttcgagtgttattccaggaaacacgcccgagccaagcttaagcatgcctcggggatcgtctaggatcggctcagtgaacgtcctatcaagcagtattcgtcccaagccaaaatccagcgttccccagaccatatacttacttgaggaaaagacttgtacaaattctgtgaaggacccaaaaatcatttcctaaaaacccggaagtgatattggagaatctctgaggatattgtcaaatctgaaagtttttctgaagctcccgaagaataaggaaaatctctttattgcaaagatcctttttagccgacttagagataaatggaaatcttccgagaatattgcaggaggcggtcacttggcctataaaagggacctcaaggacttcgcaaaaggggacacaaaaaatgctctcaacttcagactatcaaaaaggctctgactttgaaggctaaacacttttctaatcacatttctaaacacttgcatgatcaaatcatcgtttccaattaataatatcaaaaacaccatccgtggttacttatcgattgttgatctttgagattctcgcgaagactgtgttct

SEQ ID NO: 24561 - DNA, 3894 bp, Arabidopsis thaliana landsberg
  unsure (1)..(3894): unsure at all n locations
gctttgggaggatctgagaaaccaaacgaagtcgcaacctcctgcacattaacaaagactttcggttaacgtttaaattgcagaaaacaaaaacaaattgtattcctgatttcatgacgtttcgtattgttatatgtatgctgcagatttggttaccgtgagattgagttggtgaacattaaagacatctttcatagagtgagaatcatatcctgaaatgtaagtcttgtatgcttcttttgctgactcctttaatgcatagttttcagatatcaaattctcctgcaataacattttaaataaatctctcaacttttgtttcttcagtgtagtaaaacttttttgaaagagcaagaatgttttaccacaaaaggtttcacatcgagcaatttcttttcttcaaattcatgttcctcaacaggaattttcgccgcctgcaaattatacagttggaaacagaattttttatcaaaatttctttatcaaagttttttattgaatgaaaacaatttaccttgagatactgtataaacttcaactcctgtggagttaggacaagcagagcctttacttttgccccttctccacgagctgttctaccaactcgatgaatataatcctaaatcaaaagtaacattcaagaatttgagtgatttcttatcccttattcttccgcgtgcttgcataaaaactctaaattataagcaacatactgtcgggttatcaggaggatcatactgcacaatccagtcctaaacaagcagacaataatttgtttaaagaccaaccattccagattattaaaacgtttaagttggtaagaaagcataccacatgaggaaattcaagacctctggcagcgtcattagtacacaacaaaataccggtttccgcctttatgaattgcaaaaatgttggagttcttttgctctggtctatccctccacggatttcaaggcaatcgaatttgatatatcgaaagagctcggcgtggaactttgtcgacttgcatgtagagaaaaacaccataattttctttttcccttggaatctcttcaagaaggtaagtaaaaaaagtaaccgcatcgcacttggcacaacgcaataaccttgctccaagccttcatttgtaacctgcattttccagttttcttataatttaaaaaggccggttttggtcataaagtaaaatgcgagaaaagataatagaaattgtgataatagctacctcttttcgtccttcatccacatcaatataaacaggtgaggtaagtgacacccgagcaagatcctcaacctgatggtttaatcaagttccagtaattttaataaactgacagtaataaagaattaagtgaaaaaactatactgattggtaagcaaacctttgcgctctgtgtggctgaaaatagtgacgtctgtctagtctgcagcaatacaaaaagacggtttaccattatcaacaacacattgacatgaaaagaaatttacatctctatgattcagaatgttgcggtattgacttcactatgcaagccacgagaatacctttggtagaagcttcaaaatcttcttgaggtcttcttcaaagttctgttccaatatcctatcagcctcatccattacaagaaactgcaaattaacgaataaaaaatgttgcattaactcaataccatgacaataccagtatacccaaaactgaaatcagaaatttgtgtttacctttaagttcttgaaaataaaaccattagtattttcaaggtggtcgagaagtcttccaggggtagctactaataaattaacacctttcgcaagaatctcagcttctgtctttcttttctcaccgccaataacttttcccacagtctgtgaatgatactttagaagttcttttgccactccataagactgaaacattaatgacgtataataagtatcactcttagcagattctaaagactatatagaaaagtgtgagagaattagaacctgaatagcaagctctcttgttgggcaaataacaagaacaccagttccattgcgaggagtaaacttaacacggtaaagaagctcaacagcaggaataagaaaagctaaagttttaccagaaccggtccttgcagctccaagtacatcttctcccatcatcaatggtggaattgctttagcttgaatctgcaaaagtgttgaaatccaaccaaattccaaactgtaaaaggttgaatctttgctatacaaaaacataaagattcaattccaaaaacattacctgagtcatgcgtgcaaaacccatctccatgatagatttataagtgttatcagataatgacaatgactcaaacgttttattagtcattatgctagtttctcccacttctttttcttcttcttcagacttcgcttccgcgtccttcctctgtttcttcttcttcttcttcggctcttcttcttctgctatcacttcgtcctcttcgtcattagtatctccacgctgctgtagcttcttatttttcttcttcttcttcttcggctcttcttctgctaccgcttcgtcctctccatcatcagtatctccacgcttcttatttttcttcttgttcttcttcggttcttcgtcaattaacgcattgttctcttcggcatcaccatcttcatgatcgggttcttcttccattgctggctgctttagtttcttagctttgtctctcgctcttttcttatgcttcttcttcttaatctcttcgctttcggatgaatgttgctccatatccaaattcgccatgttttcttattcgccgccaaatccaaagctcttatcggattttggattaagaaatcggaattcgtctgaaattcaaaaataagggttttgctacgtattttcttcgaattcgagagtgttctaatgtgttactgtttaccgtcacattagggtttatgaagatctctctattttcatttcaatatttaaatttcccgtaatgcccttttattgacttgttaattactgtaaagtaattgttctttatccatgccagctgtcaaattcaatagctaaaccaaaccgaaattgggtctataatttacaatctctcacaacttgaataaaacggtatataatgtttggtctctcatatttgtaaaaaccgaacaaattccagttcaattaagacggtataatgtttggtttgtgagattaagattcattcgaacaaattaagacgataagtancggttttgattgatagaatcttatctcattagatcacatctaaaaccaataataattcgaatttcaatagaatctgcaaatagtcctagttcatctatatatacaacgatcgataatcacgagaaccagagaggcaaaaaccactaatctaacacttcacaacgatcttatagacgttgacaacctctctaatttagaccaaaacattctcccaatagacgacttagctttgtcctgctccacactatcactcgtcgaaccaatcctcctcggcatcattccaaccgctttaaccgctccacccaattctcgtacaaccgcttcaaccgcactaggacccgtctcaccaccattcacatccgtaacataaaacgagccaaccgcaacctcaccttgcgtgcacatctcagctctcgttatcgataaaccgttttctctcacaactctagtcacatccgacaacaaacccatcttgttctctgtccgaatctcgagtttcaatccttgtgaagcacgtctcgaaatcgcagcaaccaaacaatgccttagtctctctctttgcccttccgtttctaacgtgcacccgttcttctttcttatgaaatattcttgctctgcagtggagcctttagctccggcgacggcgtgaaacacaacgaatt

SEQ ID NO: 24562 - DNA, 683 bp, Arabidopsis thaliana landsberg
agagttttgaaattggttagttgttgttgttgatgatgcaaagcaaagattttcattttttttcttttgttctgttaactgaattggattaacaagtgaactatctttgtttgagaagttggttttgcttggatacatttgaagctcttctttttggaatgcagggagcatgtaaagaagaaagggagaaaagatgttacagtcgatgaactgatccgagtgatcactcctaaaggcagaggtaaaatatataacgaacaatccgtttctgtatccgttaattcgttgttagtaaccttgactttgtttctatggatgtttgtcgtgtatgtctgcagcttcagtaccagattctgtgaaggcagagctgttgaacagaattcaaaacttcattgtatcagctgctctttgatggtgttttgacaattttactacgaacatggtgtcgttggctctatgttgtggtttttagttgtatccaaacactaaccagatagcagcccaattttttttatcaaatgtatcatctatgctgttgtagaattagcttttttcctgctccttcaggtttcaactcctttttgtaccaaatcaaagcgttgccatcctcaagaatatgttgtctcaattgtggattgatcaaatacattgtaagcactaacgaaatttagttcatacttcat

SEQ ID NO: 24563 - DNA, 1206 bp, Arabidopsis thaliana landsberg
  unsure (1)..(1206): unsure at all n locations
gatatccaaatgagaaagatgttaatggactggtggtgaaggattgcaagataagcggtacgacgaatgggataaggatcaaaacttgggctaattctcctggtctaagtgctgctaccaacatgacttttgagaatattattatgaacaatgtgactaatccaatcatcattgatcagtcttattgtcctttctcttcttgcatttcaaatgtgagtcttctttaacactcaaataagatttttttactgaaatgggtatgagagatttgtttttgatatattttgttgttgtaggtaccttcaaaggttgagctgagtgagatatacttcaagaatataagagggacatcatcttcactggtcgcggtgcagctgcattgtagcagaggaatgccatgtaaaaaagtgtacttagagaatgttcatcttgatctttcttcgtctgatggaggaagaaaacagagtagtaacagaggaaatgaagctgtctcttcttcttgtagaaacgttagagctaattacattgggactcaaatcccacctccatgtcactaatcatcatcatcatcattactatcgtcaattcatcattttgaagtttatctagtacttaaacttttgtgctttctttttggacacgttatcttcatatggtcatattaagtatgctacttttgttgtctatagataaagtgctactacgctaaggaatatttttggctaaataataaaagaaatatgacaagaaaaaactggttggtaataagaatgtaaatttggttcgtgtttaacggttgataatactggttggtaagtttgatacttttgtctatagataacttgctagtaccctaaggatttgttttggctaaatataaaatatggcaagaaaattctggttggtaataaaatttggttcgtttaaagataggatcctacaaaaatggagatgattcattccaagagtgccatttaacaattcacgggaaatggttagtaggacaaattataacgatatatgtagtacttataattttaaaaactgaaatcttaatgtaaactaatactaactttatttattaaagaataatatatgcatacgcatttgcctgttatataagtaagcaacaccatctntatttgttccctgacatatttctccttcaggtttctatgatggaactagaatcagaaactcaagaac

SEQ ID NO: 24564 - DNA, 666 bp, Arabidopsis thaliana landsberg
aatatatcaagatactgatagcttttactaatctttaattattcacataaacatcatgattataccctaaaataaaggtttctctagttactctacgttagactgttttgttgattttatttatttatcgtccacgaaaataatggtaaacacaacaaggatattattacaaacttattattttttttggtctcgtttagtatttctgccgtttacgtttaaattttgcaaaacaacataatcaaacatcgatcctaccaaaaaaatatataatcaaacatcgtaagtgaaaagttaatcacaggcccatatagttgcaaacaaaaaaatcacaggcccaaacaaagtccgtgtgctatttgggactttaaatgtggcggtagtgaaaatttccgttggaagcaacgataagtaagaagaagaagatgatgctctcgtgttctcctctcaccgttccttcttcttcttacccattccatttccttccttcgtcttctgatcctccttacgattctatacgaatatgcacccttctctttctcatctccacaattgcaaaactcttcaatctctccgcatcatccacgctcaaatgatcaaaatcggtcgccaatagcagccatgaggctgtcagtaagcttaatgagttatgcattctctcttcac

SEQ ID NO: 24565 - DNA, 1204 bp, Arabidopsis thaliana landsberg
tcatcattaagcgccgagccacgcataggcgccgttgccacactttaaccatagggcaactcattatggtaactcaccttcttacctgagcgtaggtgcgtcgttacaagtacattacacttctcagtattcccatgtctgtatacccatacacatccatggggtactgaattcccgaaaaagtaaatacgccacatcgcagccttcatatatacatatgtggaacatgtatataatcaagcgctacaattaagcacttccctagaccgacggttgttcggtcatgctctcacatctcaccttaccttgagcgtcgatccattcaaaactgaatggccttaaaaataacaatacacatgtatgcaatacccccggttgtgggttagtggtttttaaataagccacctaatagtccttaacttagggcttaatagaggatgtcactagcattatagtttttcaaaactgtttttcaaaaccaaacaatgtgtttagttgaaaataggtttttcgataccaaaactttgtttttaaaatacgtatgtgaccgtattatacttaatcctgctctgataccagctatggcagaacctcccaagttattgggcccacatgcacctgcccttgtctcaaagacctcagacggctgtgcatgtgcaccagataacttaacaggatctgtccgagtgccccaaggaccccggataaaccacttaccaccaggatcgcggtattaagtaaacacaaaccacacaccaacattagcagcggaaataaattatttattacaaaatgctaaagtctaaagcaagcattaagaaagaaaagaacaaccatatgcaactataatacttcattaatcaagacaagaactaaccaaacttaggtatctcacaaaagaaaattccaaatagtcattttaatacttgctgaatttggacagcagaatagcaactatttgtttagttcataactcacaaaataggcatccaaaaatagtaaactaggactttctggaaagcttataaagtcctctataatttttgtattatcatcataacaagattcgacctttagaaaggtcaaacagaactaaacataaattttgtccagatttggacaaaattcgactactcactttaaaaatccataactagaatgtcagccatccaaatcaggtgatcctagactttttagaaagcta

SEQ ID NO: 24566 - DNA, 5350 bp, Arabidopsis thaliana landsberg
agatgaagaggcgtgcggtgagtgcaaagagtcttaaagcctttttatgttttacgctaaggaagacaaagagtttttcttgtacatgaaattcgagagggtacactagtcattgatttctcacttacattgcatgcattacttttttaattaagtggataattattggcttttgttgtagattaactgcaatagaatttagtgggtagattgaagtcgaagagactaggaattcaaacgagagaactaggaattgatctgggaattcaaacgaaagaaccaagactcatgaggctttgctattctgtcatggtcgatcaaatatcaaattcttcaagtttcaaagaaaagccaatagagaattggaacttccttttttgtttatatttttcgttttcttgtttttgaacttgaaaaatattactatgtttgttgtattgtaagattttgaaattcagttagaagttagtgaaccttcgaggaatctcttgcattttttcatactaaaagcttccaaaatatatgaactaaaagccaattttctcattttccaccaatcataaagacccaactctgatagcttaaaagttaaagccaacatgtgtcaaggttataaaattgctttactaaatgtattaaagataaatccaatcttatcgcttaggccttcgccttcccgcttgctcttcgtttactatgccaggctcggttcctttctccattgatggggttcttatgagcagcaatggagcattggtcaggccttccattctttgcgttcatctccatttgcattctccttcgtctcatcctattctcatgcctcattcctttcagagctcgggtccttcgctctatctccaatgcttgtgtgaagttccatatccggactgtgccttcttcacctccacacactatacggtcataacccacgtccacagagaacaagtttgacccgaacccgtgcagcattcgttgtggcggttccacagtactcgaagaaatccttttggaataggcacaacggttagtttttaacagtttcctaacgtcgataagtgcgagtttaccgtcaccggatgctgagacaagccaaggaaactcaaaagaaagagagtagacaggactagtgtgaggcatccattgagatataagtacaacgcttgtttcactaccgtatcttctgatctcaaacattttaatccctccatcttctccaccagtaaacaggaaatccccagtatggcttcttgccaaagagtaagtggtaccctcatgagcatcagggatgatcgccaatggagtctcactgctaacgtcccaaatatatacatcagaacctgacgtgctagcgagggtggcttcatgaggtgcaagtccccaaacccaatcactatgcctcaaggttttgacacacttcattgagatcgatcccatatacgaacagacatatcccatgaaccgctaaagatacttgtcatgtccagggcaagagatgtaataggaccctcatgtccccatagccgaaactcagtcttgtctttctgaatacctgagagatcaaacaggttccggagaccatccagtgatttccagcaatgaatgaatccatcagtaccgcggctgggttacatttttgtatcagccgcaagtgccctaatcgtacaaccgagaggtttagatgccgcaatagacaagccttcttccatgtcccacatccgaacaatggaatcatatccagaagtgaaaacgagcttggcagaagctaagagaaaaacagtccggactgcttcagtgtgaccatacagagtatcaatactataacgtcctaaaaaggtcctactcctaaattccctttcaacaaacagatctttccatgatctctcatcagaaagccctgaacttgcagctccgaaaactacagggagtccccatctctcacgatagaactccttccaagcgtgatgctcagatgctaacctatgcagataagttgaaacacaagacactagacccaactcttttgggtcaaggcaattaagaatctcagatatcaatgcctgaggtaaatcaataatggtagtagacaaatccttgtcagagagtaactgtttcgagccactgggcactaaagttcccttctttttctgacaacacaacttcacatttggaatctcaacagacccatcattacctattctcaaatcggtattcaaaagaccagactcacttctttgatcgttcgcagcttcaagtctctcttggcactcaaattccatgaaaagccagtcagcgtccgatgtagcccgtgacacttaaacaaggagcttttcacgaacgactctgaccggatctcgaaaatctacagcaccagagacgaatccagctaagcttgaagataaacgagaaaaacgattcatcaatagaaccaaaccagattaaacaaaatacaaatttttacccccaaaaatcgataacaatcagaccaacacatcataaacaaagaaaaacgaagagattcgtaaatgttagctaaaacgaaacagaggaacaacgataaatccctagaaacagagatgaaagctaaaacaagcaagcggaatcgagaaaagttagtacctttagtaatcaaaaacaatctattcgtaacagagagaggattttcgccaaaattacgttgccctaatttctctaatcggattgatgagattttgaagatggagaaccaaaaggtccaaaaccaaccaagcatcaaacaatgtaaaaaaaaaaaacattattgccaatttgttttttttttatggtccccggacggtgctatactaaccgtccgatcgaaaaacaaatcaagcgtccagatcgtacgatatgagcagctacaacacatgtatatctttgttttattatataagattgatcctatttttgctgcgttatattctcaaagttttcaaaattccacaataagtgatttttagttgtaaatacgctttttctagtaagagtaagattttgcatggagatcatatatcacatgttcttccatgcaaccatgaccttgaagcaatagcttattcttgtccaataatgctattggcgccagagggaagtggacaaagaaagagtttttgtgagatctatcgaacataatttgttccatggcttgttgccgcctgaagaatctaacgaccatatcacttgggttagcccctttgtctccgatacacacaagcgactattgaggatgcacagatgtctttgaaacggtcacgttcatgagataacttgaaaagtttcggtgtgaaatgacccatctaaatacacgggataaagatcaaatttaatttgggcttctagccccataactatcaagcccataatttggtttacttttatttgattctatttttgctgcgtaattttctcaaagctttcaaaatttccatatttttcacctctactctctcagaagcgatcatcatcttccccaaaatgtctgattcttcctcaagccatgactcaccatcttctccggcgatcaccggtgattcagaaaccacagtgaccaacaacgaatcagaatccaacacataatgtcaaacagcaatccaatccttatccacgatcgtcacaaacacaaacattcgttccacaataaccatcctcctcgacgatgaagccgtctccaccgcgatctcctctctcctcctacgtcccgattcaggcgccggagataacaacctctgccgttggctctacgacacattccaatccgcggaaccatcgcttcagcttctcgtcctccgattcgttcctttaatcgctggtctctacctctctcgtgtccctctccgtcaaccacaagccggattcgaagccgttttactcgctctctacgcgcacgaaacaacctcacgtgccggtcaagcaataaccgtcaacattccagatctctcatatccaagcatttaccatgaatccaaaggtctcacaaggaacaacaactcaacgtgcctcaacatcgctgtgatctcctccacgttagatccacacgggacggttagatccacgcgccgcgcgaggatcgtcggagtcgcgttggagctttactatagcaaaatctcgaaaatgccacgcgaatctaagcttaatttctgtgaatcgtgtgagaaatgggcggggcaaaacggagaaacggagcaatcttcacgggcagtgattccgactttgagcgatgattcgtggagagaggaagagaatgttgctattggaggaagatctgagagagatagtggaaggattccattgccatgggagcttctccaaccgattttgaggatcttagggcattgtctccttgggctcaaaatggaagatagggagttatctgaggcggcgaataaagcttgtcagagtttgtatctccgatctctgcatgatataaatccgaaggcgattttggctaccggaagtcttcttcggctccgtgagatggctcttgatcccaagaatcaaatcgatcacactgagctatcaaacgacaccgttctctccgtttgaccccgttttgttatttatttagtcaacgctttcttttaaacaaccagcaaaaaaaaaaaaaatctctttttggtaatgttaaggagaggccacgttcttgttggctaattttctgccttgacaagatcagagaagagatcaattatgaattgtgttattattattttgataaaaactaaataccacagcctcctctcagtgaaaaagatcctgcaagtcgatgatgtctgcaagaacaccggctgcagttgtgtcgttcccggctccggcaccttgaatcaccaaaggctgctccttgtagcaacggctatatatctctacctgcagttttccaatcatatcactatatcagttattcttactcacaagacaatctagaggcaaatattgtgcttgcgttcatgagataaagtgagcaaatgaatcacaatcaatatatgacaatctcatatgagctaagtctgcggagaagggcactgataagccgttgaaaaccgaagtattagcagtttcagaaaggtttaacaaacagaatattataacaaacttactatattgtcactgcctcttagccgtcccaatggtgaatcttttgaaacttctcgaatgccaacttgaacgctgcagagagaacgtgaaattcaaaatcagaagattccgacattgtacactagcatttgcatgtaccaatataattaggaaacaattgttctctctaactacatcaaattagccttgaacatatttctttacgttattgattattgactgtgagagtaaagggaacccg

SEQ ID NO: 24567 - DNA, 2286 bp, Arabidopsis thaliana landsberg
gaatattgtttagaaacactgttgatagctcattgaagttgctgatctagcccgattccaactaggtgaaccacatcagtgcttgtccgcacagattttcagagaaaagcttgcagtatcctgcatcttcgtcggcttcattcaaatcgacccgtctagaagcaattagaaaagctacgagatagcctttcagatcttccaagccgttgtacggttctaggttaagctttcgagaatctctgattctcaagctagcaatttgcaggacgaaaggtgttcgcctagcttctttcatgacccggtttatatccggttccgagcttgtacctgatggaatttcgacctcatttctttcaatttaaggcttacttccctcatggtttcgaactggttgaaattttcttgctcgtgttgattcacgaactgatctttgtctcctggatgtgtttctccatcttccggttggacttccgcatttgcatcatccggaattgtttgttcatttgttgcatttcgcgcaagggagtttggagaactgaagatagttcttcaaactctgagacattgcctgcattcaaagaacgaacacaagattgtatagtgctatattttgactgagcgatacctgggctgtttgtagtgtttcgacagtttttccacagtcgagaacttctgcgacatttccgccatagtttgctgcatggttttgagagtttcggctattgaagctttggtagcgtcttctccggatattgttgcttacctcggaaatgtagtatatagagaaaatctgacgtctcaaaaatcctccgtccccacagacgacgccaaaatgtggaagtcggattcacatactcaagtatttatttatttattgagaaggattattcttgaggacaaatgtgtgagaaaatgaactaatgattatagaaaaaactatgagttttgtaagaaaatatgtatagtaggtttgcacaaaaaatgtgtgtctctttacatggcctctaccccataatttatacttcagaaatacatttaattctcatttacacacaattagtccatcttaaatgtgtccgttttggtctttgaattaactattcaaacgttcaaattcgaatggatttcggtctccctgggccctgtcttccatcccacttggctcttcagtccggatacctttgatctcgtcgtcgcacccacctcgcggtgtgatcacttcactcgtattcatctcctcgctctgtgaagcccgtgggcctttcctcttttgggcctctcctttctacatggcaatctttggtaggtcccgaacccgtgatgcgggatctgataccaacaatgtgtaggccactataagaccaaatattggaataccatagaagtccaacaaaacctagagatcattgatgatactccatggctttgggtttgtgatgggaatcaataactctagtcatgtcgctcgagtcggattggagtagcaacgaaaaacctcttgttatcgccaaatttggaattggtgtcggtgctgccgaatatcacccttttcagatttcttatatatgttgattagggttttttccattttatgggtcgtttgaccgtgtaaacctatcattgtatttgatccatttaaacgaaaattaatataataataaaagaaaaaattaatgtgcatttgattgattagttattttttttttgtgtgtgaaaatagacatttgattaattagttggtttgaactttgaagcatatgtcgtctatagggcctttaaactatgtatgtagccttaaagcccaagctttccttagttgtgcacaaggcggcctttgattttttttttacgtcaaaataattatattaatcaattagagtcattacaaaagtatcgatcaagccaaataggtaaagaaccagaaccaaaataaaaataagaataggtacaaccatatttcgctaagacatgtgctaatttgtttctctttcttctaataaaaccaaactgaatgcttgccaatttattcgcccaaaaacggatgtcctccaggtgatttgctaaggaactgtgagacgaagtcccataataaaaagtgacggtgtatttagataaatagcaagtgcttcaattaaaaaatgataaaatgctacataagtacatataagaatgtggtcgaaaatgtaacgtcttattttctgaatacataaaaaaaaatatgtttgttttgtatcaccatacttagatataccaatatttagcgttccgaataataaaacaatatag

SEQ ID NO: 24568 - DNA, 3554 bp, Arabidopsis thaliana landsberg
acaagtccatttcgtttagtgcccaaaataaacaaggtccatatacccgataaaacctttaattggactttcatacaagttcaattagtttgaatattatcattcgtgaagtgaataccagtttaaagacctttcatagttcaaacttcaaagtaaatataaccctttttgtgtagataattaaggttctcttttgttgtgcccaaaatgtagaaaaaagctcttttgatacgagacaattgaatgttatgttaataaaactgcttatataattagaagtattgattggtcatataaacctaatgaagcatgaataacgcctcgtgataattattatattaagagtcgaacgtctgtctttttcagtaacaagaagacaatccttatattactaaaaccaagtcttgaccacagaaaatcataaatatggatgaatatagttagtgtatactactctctttttccgcatatataaataccataaaatttatgtggccattcaaagacatgaaaaattatcacgattttaaaatgtttcgagtgaagtgtttcgatttgattctaaaattcttgaacaaatcaaccaccgccctagaatatagtgaaataattcttcgaatatccttatttacgctaactgattcgcataatgaacaaaaataaccccaagttttttcaagaatataggtcccattgtttcagacttttacattttacaccttaagtttctgcatttaggtaaagtcagctctctggctctctctcttgtctcgccaataaatagtcgcttaacaaacaaacaatttttctttaaacctaaaactcaccaaagagaaaacacttggctgaagtaggaaatggccggccttcaatatagtttcttcccgaccgacttcttctacccacgagcttctcctccggctacgacaagccttgtcgccaccaatccaaaactggagaaaacccaaaagagagatggtttagtagtgattgatgaaactcgtgcttctctgtctctgtttatacgtgaaaagaagactaatcagtcacaaacatggaagaagcagccactttggatcgaagatgacatgtgatacatctggtttttgtcatagcttcatcaattctcatgtcttttctttcgttaactcaataaggtcatttatctatcaagtttcaagggtatatcaggattggctgttatttaaggctgaccttaacccaaaaaacagagtgttttctagattttaaaaaacctctaatgtgcctcgtgtggatctttgaattcttgtaattccagcgtaatttcaacgcaaatatcactgtcctagctctttacaatttgttcttatttctttctatcgttgccttatataaaagcaagttctttaagttggctatgaaggtgttatcagttttacaaattgttgaattttggtatcaaaatgatcatactaaataaatagggtgcaatcattagatgaagctaggaagaaaaagcagagggtaaaagccaataatgtgcaacatgaattgggtcacccaaccatttacattcccatttggcaaaatccaaataatctaatagtaactaagataaaatgcttagaagagagtcaagtctgtagagaaacgaaagagaatgagatgagatcatcggtataaaccaattttgcagcttcaagcggagacctccactcagaagcaagcgtccaagacacagcaacagcacagagcagcaatactgcaaaagcaaatcaccatactcagtcatatccagtactgaacacaacatgtattagccagataactccacaaagtgagaaagaaaacaaacttctgagtaatgaagacatgacacacatcttttctaataaccttcggttctgaggtttgaattatatcttacactcagatcagcactatcagattcaacatcttctatgcattactataaggtgaggaccaaatccatatgaaaacaaacttatgaacaaacgtgacatgacatggaactaccgattcaatcaaatgatataaaaaaccatgaattttctctaaggatcaacaattctcgaaccagaatctgaaaaaacattgaaagaacaatttaaagtcgagcaaataacttaccatcctataagcataccaggactgtgtttctgttgctgttgctgctgaggtggctaaccttgctgaggatatccttgttcaggatatccttgctgaggataaccttgttgaggatatccctgaggtggatagccttgctgaggatatccctgaggaggatatccttgtggtggataagcatcttttggatatccctccggtggataacctattgatacaatttcagcacaaacaaaattcagatccgtcgtacaaaaacaataatcagtaccaaattaagcagatctaagaaaaaattacaaatctaaaaaccgaaacttctaaaagtaatcgaaaatagaaggaaagaggaccttgaggaggaggaacaccaacgggaggttgattgtactggctcattgtttcctttgaagaaaaagtgtaaacttcgtagagaagaaggagatcacgaaccttagatcgaaaaagtttatagaagcgatagagaaggacaaggaaaagaggagagtgttttaagtataacgcgttttgcagttatttgatttttcttgtttttatccataactttaggctagcgttcaatacgatgaattaaaatgaaactaccaataaaaaaggttaaattaaaacaagattcacgcggtttctgccttttgcagcgatattatttctgttttttttttgtttaatagaacttaattaattggagaacaaagattattgattggttgtttattctgttgttttttctaatgttctgtatgaaatctagtgatgcttaatttctttttgtatcttacttcaaatttccttagaatatagaaattcattttgttttatcgagtcgattgacttaagacacattacaacatatgataaatagatgtacacaatagataaagtaaaagtgtctacattctaaaccccacttacctacttccaatgtatactaaaaaagaggagatattcatgtacatatatacattttaaggtttccaatctcttgaaaaggcttgctgaatcacattgtgaaagtagcaatggcctggacttcactacaacattttccttcccgccaattacacatcgttctctttgagctacttcatctactagttttgccactgctattctaaaactgaccgtaagtggttgatgcaaagaagaaaatatgatcagtcattccgttttgcaacataacaatgaagcagaaaattatgtatgttcatttcgataatcctagttgttcgacaccttaatgatcttggcgtccttgtatagattaccttagaatttggttcttcattgtcattggttagcttttcaaacttgatgtcctataaaaatgcacatctcagacattacgtaaatcctagaatctacttttggtacttacacgatacaatacccaaaacgtaagt

SEQ ID NO: 24569 - DNA, 1349 bp, Arabidopsis thaliana landsberg
atgtattcatttatttgggtgaaaaaaattaaatagagaattttcataattaacataattttaaagttttttttgataaaaataccaagttttgcgaacataaataacactcaaataattatttaatttttaattattacaactaacatttaaaaaaatacaaaaattcataccaaaaatttccaacaatatttttctacaaaaaagtttccgtcaaaatttttccaccaaaaacaattacgccgcccacattttacctacaaaaaaaaattcagaattttttttacaaaatataggaaagattttaagcaattcaggaaaggtttcacgaaatttgtaatttttttcttttgtaacccttcctgaattttgtagaattttcctgaattcccgaatttttctttttcgaaattcaggaagaattttacgaaagttttttttgtaaaatctttcctgaattccgtgaaatcctcacgaatgtcgtagttagtttcctcaagtttttttacaagaaaaatttgacggaaatttttttttcctggaaaatttattaccgaattgttttggcagaaaatttaacgaaaaatttttagcggaaaatttttgaccaaaaactttggcctaaaatatttatttttatttatttaaataaaattaattatttatatttaatatttaattaaaattttgaaaggtacttgtgaaatttttcaaaaagttgttatttttggaagaaaaaattttgtcggtcctatttttgtcaatctcccaaagatttgttatttaatattaatatgactaacccaccatgttgctgaatatgttgcggtggccaaccatgttggtgcattcccatggcttgatatggtggtggctgcctcggacaaccaaaaccttgttggtgatgaggaaactgaggaggtggtggttgcgactgcataccttgaggcggacggaactgcataggtggtcgaaccgctaagccgtattgttgttgtggctgagatggccaagatggtggctgagtttgatacacttgtggttgtggtggtggacgtggacccgggattggtacaggttgtagaccgttaactttaggagcattatgcgtagaagggccagttgcgaatagcttatggggtctgcttctttgggaatttgcagccaaaagcctctctgtaattcacaaaagtaatttgttattgttccaatgatggaaagaaactgaatccacaagttaagacaactacaagagtaagagcctaaccttcaggagtaccgtggcgctctcctttggtgtctttcttgtatgcataagtgactgttatttgacgattactcagatattg

SEQ ID NO: 24570 - DNA, 1437 bp, Arabidopsis thaliana landsberg
aattgaagtcagattaggtcgaagttttcatgatttcgttaagaactgcaaataagctacacttctttttcttttcttttttgagcaactgcatataagctacacttataccatgctcagaaactgtgtatttatctagaagacgtttgtgaatttttggtttaatttagaactcttgtaagatatcaaaaaaagatagtttcataatttttggttaatatagcaagtttgtaattaagttttgctacttgaaatatttttaaggttgcatcatacatatgactagttcatgagaaggccaatcatccaaaattacaatgaccccacacagatagactatataacgataatgaaaaaacccaaaacacccttcccccaccactaaaaattacgatcgtggacgcaaggcttcaaaattcagcccatgagccacctgaccagcacaagcaatccacgggttaatcgaaaccggcctgtgattgtggtgatggttcgatgatgatggaccagctacacgctcgcacgaaggacacatgatgagtgtagttggtggagtcatctgaccgtagaattgtggagacagcttgagagttcgaagctccatagcctctttctgaagtctccggttctcttccgttagcttctctacgcaccgtttcaagtattcgcaatctacctccgtttgctttaacttggttctgtaaaaccaaatcggaccttgtaagtaaaaacttctacacaagggggtataaatgtaattttacaattttggtgttaagacaagaaaatctcacctagctcttctgttttggaaccacacttccacttgtcttgccgtcaagttcagcttcttagccaaagctagcttctgtttctgtaaattatgataataaccttggttatttcaaagtaattacgataattatcatttgattcctctgacttttttacacttacgggattgagagtgttgtgttctttgaaagtctcttcgagaaaagcagactgatcttttgataacctgagcttcttcctcgacgtttcgcccccgtcttcttcttcatctgaggttccacgtgagtaccctcgatccggagtgatctcgtcgtgatcgtcgccggagccaacgccggttccggagattccttctctctcacttctcttcccgctaatggtgcttgagatcgtactgtttggtgacgaaactcctgtgtcttcctcgcagttaaccgttgatggaaaactgttcacgtctatcttgcgaagatctgcaaagagcaatcaaattttaagtttgagatctgtttttattttacttggaaacgaagaaaagtctcatccttcaattctgaaatctgttctgtatcttttaaaaaaaaagcagagaagatttaagtatatacctgatgtaggatcgaatgtttggttccatggagt

SEQ ID NO: 24571 - DNA, 1506 bp, Arabidopsis thaliana landsberg
catccggaaagtcccgtccctctctttgtgaaggaaaatctggttccacagctttggagttttactttcactcttgcaggttaagatggattgtcaaaaaatggaaaggcacgattggttcagctcccaagcatttaaggattgtgatgttcttctgatgatttaagacttacaaccagcttggggaagatgcattgcttcgacgcaggttatatgctttggatgggaaccttctgcctatttatactgatggctatggtggcaactgtggctgaaagtttgatgcttgctcttacaggtgaagaaaactcggatgaatacactttcacccatgttggtgagagctggaatctttttaatcaaagctgcttaaatagataaatacctaggctcaagaatctctctccttgttgatgggaggtacatttatgcttgcattgttttataaattgtcatttgcatttacatttgtcaaggatcgtaattaattaattatgatggcttcatatcaccaattcaattgctactgagtttaaccgctgggtctggtatttgcactgtagtctctgaatgtttcatggtttaaatcgtgagaatcatatgccattgttcattctataatgttgccatctcaaatagatgagcatacggcttgcaaggacccttcccttctccttcatactgagtgtcttctgagccatccttcctttacgactgttaatctcaaatctttattttttgacaagtcaatttttactcatcgtaacatctctatcattatgatttttgtattaagcaaatgaaagcattattgaaacgttcaagcattcagcttctgaaaacattgcgactaggattcattcagtttattattatttatcgtttgtgtcttttgagtttttacagccactattgtgaaaccacttttcagccgtggcaattggcgtccacatactcattagcataaacttagtagagaagagcatcgaggtttcgtttaccctcaggacctttagagtaccaggaagaaacatattgaccatacacaacttccttgtaagacggtggggagagttgagaaactggtgctatccttgcagtcttggagggatcatgaaaggtagcgactgataaccgcgcccgattcgcattagtcacagctctatgttgagcacttttgtatcttccattggtaatgatctgcacaagaattttaaaagagcatgtcagaatcttctctctagcttgcattctctatcaaagagagaatagaaacctcggtttgatcggcaataagaacgagaatagcatcagagataggaggaacagtgagccattgagcatccttgtaaagctgaagaccttcaacatcatcttgaatcaagagagtaatggcaccaaaatcggaatgagactgaagaccaagagtgagctcaggctgaggacaaggagggtaatagtcacagtaatgtctgatagattcacccacagttcttctatagatga

SEQ ID NO: 24572 - DNA, 2379 bp, Arabidopsis thaliana landsberg
  unsure (1)..(2379): unsure at all n locations
aattaagcttctagttttcaccagtgcgtgtactctgtacatctgtatttggttctaatagttgcaactaacattaatcatgtgtttttaatattacgtcatacattatgcatggagaggagatgcctaattagtcacctaaataaaatttatatcgattagattcttctaatcagtcacctaaataatgttttaaaacaactcttatggatataaatataaataggtcccccgatcggcactcgacaggtatagatcaaattcattaagttggagcacaatcagattcaatcttaacctctttctgatacaatcattttggatttctattttaataatatatggttaacgtcatgagaaaatctatatgccaaaaaaaatataagttttcaacaaaagaattcgcaattcagaaatattcattcatagcccttctatcattctaacttatgttcatatacttaatataattagtattcccataaatagaaatactaacaaaaacatgttctctatttttattctaaactctggcaccggttaatttggaattgtcttatcaacctagtttaattcaaaactctagaagaaagaaaaaaaactaacaaagttgtatactattttatatactataagagtcttttttcttcttcttctatatatgtcatgattcacttaagaatgtatgacgtatatatatggtgtatgaacattcccgtcgaatgtgtaatatgattcctcctaactaatatgctacgagaattaaataaccaacagaacccactttccaattctattggaaggctaacgaatatacaaaacaatgtatgaagtcataatttctttttgataatcttatttaaaaattcttcattgtgcagtgtatctcctcttctacaaataacaacactctccctccttctcttacacatcacaaatacatacctcaattagcttatatggttatctagtgatcagttcgttgtagaatcatgtcgggaacgatggtttgtgttgcatgtgttgaggaaaataaagggtgtgaatgtgagcatgaaaaaccggttagagagttggtgttggaggcggcgtctgaaaatagttcatttcttcactctgttatcaacatggttggtatgctcattggtacgtacctaatattatgaattatgatgcaccaagtcaatttatacatttgtggagctattttgctgtgaaaacatcccttggtatgaataaacataactagagtgttgcacatgagcaagagtgtgttataccaagtttttttttttgttttcttgtaaatatgcatttttggaaatatttctatactatatatgtgctaatcctaacaataatttcatttacttatattttcaagataatcatttttcatacgtcgtaatgatttataagcttaagctatacatgattaacttaaaacataaacttctctgattttataaccaatcaataagcaaactctgacgtcatgtttgtcccgtaacacaggacttggccaactatctatgccatacgccgttgaaagcggcggttggatgtcaatcttcctcctcatatcattcggaatcctcactacctacacttcccacatcctcggaaaatgtatccgccgcaaccccaaatcaaaatcctactccgatatcggctactctgccttcggccgcccggccgcctcatcgtctgcctcttcatctacctcgaaatcttcattgcctttgtgtcttacaccatctccctccacgacaacatctccgctgcttttcccgccactttttctaaccacggccatttttccgcggccaagctgacggctgtggcggtggctatcgccttgccgagtttgtggataagagatttgtcttcgatctcgtttctttcttccggtggtattcttatgtcggctataatatttgggtcagtggtttacacggccatctttggaggcgttattgatgatggaaagattccggtgctccggttagagaatattccgacggtttcgggaatctatctctttagcttcggtggacacatcgtatttcctaatctctatacttccatgaaagatccctccaaattcacaaaggtacgttacaaatatgaaatatccttttttaaattattattgcgagtgttaatataaaattttatttatacatataatttttttttattatcatataaatttcatgcgttgccttgtatataataaaacattatgcatnnnnnnnnnnnnnnnnnnnnngtaggtatcaatagtaaggtttgctacggtaacggcgttatacggagcactagccatcacaggagcgaagatgttcggaccaagtgtnaattcccaaattaccctca

SEQ ID NO: 24573 - DNA, 4154 bp, Arabidopsis thaliana landsberg
acggatccggttagaaatagtcactcaaaattatctatagtttcaaaatatacattattttttctctatttcctaataaattgttctttttagaatttagattgtctacaattattcaaaaataaaaaattctgatttattagttaattggttgatcaataaaagagatatagaccattacttatcatgacatgtggcaaaaaacataaaatggtaagtgtttcccaaagatatttttgaagtggtgtctcaagttttaaagacaccctcaattatcatactagtattattgttaaaatatttagtttttttaatctggaaagacactcaaaggtgtgtttgtccgatgtagatgacaatcattttgagagtaggcaccaatgccaccatcaagaattacattgttgaatctagggtctgtccttttgtactccaacacactcatgccatgagccttgttgaatggaatcccaccatcaattgcatcctccaaatggtacctgcaaaagtctctttcccatgagacgtttcgagtgaaaaaaaaaacaaaactagagacgttgatttaggcttctatatccttttcaaatgtgtataatatacttttctactacataaaatggtatagtctacgtgtccatcggccttcttcgttttatcttgtacactctcatggctctctctcatttaccatatcaattgcatataacatcaaccaagaagcataacttataaacgtacgtaccagctttgcatgattgaagaccttgtcttgggtcatgagacaaagaggagcaatcgattgcaattcgccctggaaagtatcaaaaatacggtctataaataagcaaatatttgtttttctcttggagtcggagacccattgatatgaaaagtccgacgttgacgaagacaacgtgttgataggttacagggagagtttcgtgtatcgcaagaaacagaaacagaatggtaattcctttggaagtatgacttcttggttcatgactgagtattcccgttgcgatgatcacagctgggtcttgtgcaggatccgacacagaccgccaccagagaagatagatagaatagaagatggtgttaagggtttagctgattgaatcagcctgattcgtttgatacgcttgtgattggtttgcttttcttcctaggattgtttttcctcttagattcagtaatgttaggaccacatattttattgtccattgccagtttaacttatggaattaaaactccaactctcgatggttggattcatttaatttagggaagtgattgggccattgtatttggtcctaactcctattaatcagacgttgaaaagataccctttcttcttcaacttttagctaaaaactgacagaagttggtaagaagaaacaactcactctctttattttcatatacaatcatacactgaaataaactttcaactttgctcctattctaatatcaaatgtccatcaaacaaaaaaactcccacaacaccaagaaaccaaaaaaaaactcaaatttccaagtcattaaataccaaagcgacatacatttttcgattgaaaaacgagagtttaacaattgaatatgcatcttacaagtgatcatctatcgccatatttcggggaaacaaaaattttgatttcaatctgacctcaaaactcccaaaaaaataaaaataaacaaatcattttattgcttcaaaagcggctcacggctctcttcccactggtccaatctgctcgaagctttctcaacctaaattacaaaattaatttagattaataccacgattcattgaatccattcccatcattatcatatctaccaaaaatcatacaaagatttgtgcataaaacttttcattataaacctaaaaatgctcctagattaaaaaaataaaaataatttacctctttgtcccaatcagttcgtaaagtgacaatcactaagattattgtttgcattaaagtaccaccaatcatcccagtccatattccctgcaccatatcaaacacacacattaaatattacagctattataatttaataaggtacaattattgtaaccatatttacatgagaaatatttaccttagctcccatatcataagtgaagccaagaacgaatcccactggaatccccacaacgtagtaacatccaatgtttacgtacgccacaaatgcttgccatccacatccaacagccacacctaaatatttgtacatcaaattaatttcagtttttagtacgtttatttatgatgtatataacgatatgtgtgaaatgtggggtttttttttataccggacaaaacaggctgaattccattgaggacaattgtgatggctaaaaagggagataaatccgcaacggcctcagccactgctggactatctgtaaacgcatagctgatgacgtgacgccacgataagaccacgatggcttcgaaaaccgatagtaagaatgatactcccgttgtcacgaccgtggagaacgcggctgctctcgggtttccggctcctagctcgttgcttactctcacactacacataaattgaaaaaactgtattattagtaaaccataaggagcaaaacaataactatagtttggagtgaataatgttagttttgttaccaaccttgcagctgcgttgaatccaacggacaccatgaatgagattgcagaaattgacatgctgcaaaaacaaaacaaaacaaaatgagtttttgacaactggtttgtgcaagtgtatgccgtttctagtcaatggaaacgacatgcggttaaaactctaacaaaacgacaaagtgacgacaaaaacttatagatcttctactgaaactgaaaaagacgtaacgaggtgaggagtcgtcattttcgacttcttcagaaagaaagaaatcataaagcactttaaatacttaaccactacaataattacatttgtgtcacaccataatgcgacaaatgatttgtcatatgtcagattataacaaacatggaaataaacaaatttacagctaatattcatggacaattttaaatgaaaataaatttctctttctgcaatttatgttattaagtctcaaaaggtaagaaataaaattgttaaaccaaaaaacagaaagaaatcaaattgtttttaatgaaaaaaagttaaatttaaatttgaatactacttgaccactacactagttaaatttgagtcaccttaatacgacaaactatattattgtttttggctaaagatgctacaaatgatttgtcatcatagttaattgtagtattaaaatggaaattgttttgaaaagatacactttccgactttaaaagcaaagtttcctgctaaatttcatagacccttttactagattttagacgttactcaattttacttttctctttttgcaatttatgtccttatgttattacgtctcaaaaggtaaagaatcaaatcactttgaatgaaaaaataattagaagttagaaaattttaccagatagcaagagaatccaaagcaagctcagggttcttgagaagtccggcgagtaaaacaagaatctgagagtaccaagattcaagacaaagcatgacggcagaagcagctgataatcggaaaaaatcccaaagaccttcaaaagctttccaactaaaaccttcccaagtccgacgacatctcggactcattttaatataaacaatctgagccacaacaatgatccaccacgagaagctatgtatcaaagataaagccaaaagaccgtaaccaagacgatacacagcgatccacgaaagaataagatggatcacaagcgttgcggcggatatgtaagcacttggagtgactatgctttgtgattggagaaacttctggatagggaaattgactgcgtaagcgaagatcaccgggatcataccgtagacgaatactgaagccaatgttgccacttgctctggctctcctagtgctgtgaggatcggatttgagaagaggaagagaagtgacatcggtagacatgttaggattagaacaactgttgatctttggagataaactcctagcatttcgtatctatgagctccatgtgcttgaccacataacgtttccactgcactttccatttcaagctatg

SEQ ID NO: 24574 - DNA, 904 bp, Arabidopsis thaliana landsberg
aagctaaaactagatttatctctatccaactgtttttctttcaatagaaatggagtgaaaggttaatagaagttgtagatttccacgtggttcatgtggtgaaatgcgtgaacgcgtaacgccgagataataacaacattgaataaaaaataccaacacgcacaaagaccacactgcaacaacattcctatccatccacgttatctcccaccccccactaccttctcctcttttcttatccacccaccttccttaagcctttccaatgccatcttattttatatacataagtaataagaaatgacaacattcggtcacaatcacattcattcataacaattggatatcattatataaatatttatttatttggaaaaaagtgtcatcatctctatattgtgtcccaaatcatttcacattactatacaaagttaggtgaagagccggtcaatttcgaatgagcttttctaccctctcttttactatttttatatgatatatatgtaaaagggacctctctccttgtcccaaaaccgaacataacccgactaaaccgggactgtaccgaaagtctcaagaatgtagtaaagaacacataaaagaaacaataattggtatccctatcttgctgcaattggggaatccaacacacaacaaaacagaggagtaaacagctagttcaaagtaaagttatgttggattctggtccttctcctctgcttgtttctgactccagctttgtggaactagactctgtttacctttattgcaccagagattgcgagatatgtgtggtaagtatggagtaatgtcttttgccgagagttattcaccatttgaacaaagcagaaactattttctcccgttagcccaattcctgttgctcattccaggtctcttgagt

SEQ ID NO: 24575 - DNA, 4178 bp, Arabidopsis thaliana landsberg
tactacatctctaaccttctcggagagttcaacgtcacaggtaaaacattttatatacatgtttaagtcttacacattaattatgaatgaacaagactacaatttttggtggcaggagtaaccggggatctcggtaaatacgcaagaaaacttttgtcggcggaagacggtataccaagttgggttggaccaaacactagacggctcatggcaacgaaaggaggtgtgaaagctaacgtggtggttgcacacgacggaagtggtcagtacaagactatcaatgaagccttgaatgcagtgcctaaagccaaccaaaagccatttgttatctacattaagcaaggtgtctataacgagaaagttgacgtcaccaagaaaatgactcatgtcactttcatcggtgatggaccaaccaaaactaagatcactggtagtctcaactattacattggcaaggtcaagacataccttactgccactgttggtgagtccaattctgtttctaatccctaaaaattcccacatttcaaccacaaacataattatcaaaaatttgataggacttaaattttatatccaagttggtaaaagtgatatgaagacatttagtttgcaaaatacccctatgttgatgaaaattgcgagctttatatttcatggtttcattcagtgacacttttttcatttttaacatgctatttttcaatatgtctcccttaattactattttgcgacttgtttttgtgcgatctagttaacccaatttaacatgcatactttgttacagcgatcaatggtgataacttcacggcgaagaacatcgggtttgaaaacactgccggtcccgaaggacatcaagctgtggccctaagagtctcggcggacttggccgttttctacaactgccaaatcgatggttaccaagacacactctacgtccattctcatcgtcaattcttccgtgactgcacagtctcgggcaccgttgacttcattttcggcgatggaatagtagtcttacaaaactgtaacattgttgtgagaaaacccatgaaaagtcagtcttgcatgatcacagcccaaggccgctccgataaacgtgaatccaccggactcgtgctacaaaactgccatattaccggagaacctgcgtatattcccgtaaaatctataaacaaagcatatcttggaaggccatggaaagagttttcaagaaccattataatgggaacaaccatagacgacgttattgatccagcgggatggcttccttggaatggtgattttgcacttaatacgctttactatgctgagtatgagaataatgggcctgggtcaaaccaagcccaacgtgttaagtggcctggaattaagaaactatcgcccaagcaagctcttcgatttactcctgctaggtttttacgtggtaacttgtggattccaccaaatcgtgtgccttacatggggaattttcagtagattccaattggtgaattttccactttctgtgtgctctttaaaaaaaaaaatgaaggtgaataatttatatgcgtgtcttgtcttaaagtcctgacttgccgaatctagtatcttactctcagccaagttactacattgaagataaaaggcttgtcgtgtgctcttaggacaaaattggtcaggcttggatctatgtttttggtacaaataagttgatcagtaaaactcatatagatttgtggttgatcattggccttatcattgtacctttattactaattggtaccggttcctcgaggtcaacgtgaagaaccagcagaattacaagcttgatgttattgatttttaggttcttgtttcttgtaattttttgatttgttttgttttattttagtacagattctagtttaatcatttatttttcgggtgcgcattctttaagattgagtttgaatgtatttgggaatggactaaccgaaaaagaaggtggaaagtgacaagagagtaaagactgaagagagtattaaatcaagcaaagcacctttactcttggaacccctaaccgatgtctaacaacaaatatcctagtttctcgatatccaaatccactactttcagtttcatggttttttatcttcttcttcttccactaataaatcaatgtaactatattacttcagggaaccactaataatataaacttttttgataaaagtattatttaacttaaaagaataaaagaaccatttaatacaaagttctagcatcctgaattttaacctagttcttgtattaaagaaccactcgtttggagtaaagtgtcatatgctttttgtgaaagtcatctcaaattcttaatggttattacataaacatagtaaatgtgtggaagaataaatgatgagaaggacccatgcaaattccttggtagtattaaatgttcaatggatcttaagattttcaaaacaaaagatatagtattacttttccgtttctagtgggtcatatatacaaaagcaaaacaaaacaaaaatcgtcaaaattacgacaatgttttgtataataagaaaccatacccatgtgattggttacagaatacaattctaactttttattatttttaaatacggatctccatttttttttttaaatagcttgaaagtattagggatatagattatagactaaccgaaaagacggtagaaagagacaagagagtgaagaagcattgaatcaaccaaaacactaacactagaacaccttttctcttgaaacactaaaaactaaagtcacttcaccaatgtctaacaagagcatatctccaattttcccaatgctccaatctcaacattttagcgattatggcttcgatccccagatccattactttcaggttctcttcttcttcttcttccacattgttcctagggtttcgatataaagctaactctgtttttttttgtttttgtatatcttaaggttttggaagaagcaaagaaacacaagtcttcctccattgacacatttcagttcaaacttcaaaaacctatctcgaaagacgatttgatccgaaccactctccacaacaagaacaagaacaagaagcgttggttatggtgcaagaacgctttgttcttctttaagtggcggaaatggccaatctcctctgccgtcgttggaagatgctccggcgaaaacgacggagacaatgagttcgacgatcgtagcgatgttcattttgctagagctagaaattttcgagctggttcgatatcaggtccggtttacgtgacagagagttggagcggttcgagtacaccataccggccgatgactacgacgtcggcagttcagtatttgagtctacgggagcttaatatggagcgacagcagaggatcactacctcttcttctatgtccggtccaatttacttggtcacgtgaataaaaacatcaatttgcagaattatccttttataggatcaaaaaaggaaaaagaaattaataagatttgttttgggaggtgtggaagataagtttagatttggtttgtgggcctaatgggcccaattgttttataggatatgatgagtccattacataagtgtgactgggtagcttaaggtaataataaccagctcccgttatttgttgtttctttccgttggttgatgcgagataattataaactgttttaggtgttttttatttacctaatttttataatattgaagtttatattattattaactgttgtacagtgcatttttcaagagtctaaaattgatagatgactgaaacctttacatgttctggacaaactttatttcgacgcaatatcattgaaactgtctctcatatctttaaattttcgacgcaatattatttcaacccaattcacaaggcaaataaatcatagtctatagacatcattgcttgcttgtataatgagatttttcaatccgaatacggaatatacaaaaactcttcgtaggctttctttatcaaaagtatcagcaccaatgagtttcattcaagacaaggatcataatgactaatattattgaaaaaggaaatgccaaatttgggtggttatctagggatggtgttgaggagacttcttgagatgtagggcttctttgagcttacgacctagagcatatgccaatgggggagggacttgattcccaaatctgcct

SEQ ID NO: 24576 - DNA, 2565 bp, Arabidopsis thaliana landsberg
  unsure (1)..(2565): unsure at all n locations
tattgtcagaatacaaagcagttgaagataagggtgtggaatacgagagtagagtcagaaccaacaagaccaaacatggacttccctttggcctgtagaatccatatgataataaattgatacacagcttgtcctaagatgtttctccacatcgcattggtaatgaaattccctcttcttccaacaggcatacgtttcatcagctcgttgttcggaggttctgtagctagagcaagagctccaagtgtgtccatgatcatgttaacccaaagcagttgaacagcagttagaggagcacttcctgtgaattaatttagaaacaaaagtaaagatagaaacgaagacaatataattgtaaaaaaatgaaaatttgaataaaaacagaatcagctaatttctttaacttaccagtcaagcaagctgaagagaagttaacaataagggcaacaacattgactgttagttgaaactgcacaaatttctgaatgttaatgtaaacagaacgtccccatttcgctacggtgacgattgtgctgaagttatcgtcgagaatgatgacatccgcactctctttcgctacctaaaagagtttaaaaaaatgtttgagtcgtttgcataataacattagacttatttggatatatgatactcacttcagtcccggcaatgcccattgctaatcctatgtcagcctcgtggagcgctggtgcatcgtttgtcccgtcgccagtcacagcaacaacttcatcaaaagtagtcctcaactgcttcaccagtgtatgcttgtccattggggaagaacgagccatgacctgtcaagaaaaaaaaaagttatggtttaaagacttatcaagaaagcaaaaaatatctaaatcttgaaaagttacctgaatcttgggaatgagttcaagcatctcttcttgattcttctctctaaacacaggaccttcaattgctataccatcatcagtgagaattccacattctctagcaatagcctttgcggtgttaatgttatctcctgtaaccattctcaccataatacccgcacggcgacaaagttccacggactcccgaactccaggacgaacagggtctttgataccaacaatccctatgcatgtaaaccctttttccggaataccttcatcagccgaaaacccgctttcgatatccatataagcaaggcaaagagtacgaagagcttcatttgcaaactcatcgattgtaacattcaagaacttgatggattcatcatcaagcggaacaacttcaccacttgagttgatgactttatcacaagccgctaaaactatctgtgaagctcctttcgtgtgagcgcgaatgcgtcctccttcaggcagctcaatgactactcccattcttttctttgttgagttaacggctcaactttaataacttgttagattgtctctcttcttgaaacttacctccaagagatagtcctaactccaatatagcagtctctgttggtgtccccaatatctcagtcttgccacgttcgttcacaacaacttctccaccggtattattaaaaatcgactggagaagtagtttcaaggcagcttcagggatatcagattgtaaactagaacttttgctagctacatcttgaacattcatacaaatgcaagatttcacaacagtcatgtgatttgttgttaatgtaccagtcttgtcactacaaatggtagttgcagatcccattgtctcacaagnnnnnnnnnnnnnnnnnnnnnnnnnnnnnntcatcatcttcttcatcgcaaacgcgagactaagtgtgacagctaatggtaaaccttcaggaaccgcaacaacaacaattgtgacagcaatagcaaaatactccaaaagctctaatgcatcatctccggaccaccaccaatgagtgcctaatgaaagcttcctcataaacattccttgtaccaaaaccgcaaaggtaacaatagcgaagaaaagaccaattttcccaatgatggttgcaactccattaagtttcacctgcaacggagtttcgtcatctcctccttcactaagtgttgccattaactttccccattgagttctcatcccaactgttgtaaccaacatcttacatgacccatcttgaactttggttccagagagaaggaaagggttctgtgcagtcaccatcacaggctcactctctccagttaaactcgattcatcgataacaacagagaatcccgagaggaaaagaccatctgcagggacttgatctccgatagcaagatgaacaacatctccagggagcaaatcatatatagacatcttttgtctaaacccgtttcgcgtaacttgaaccgtgatcttcttcttctctttatccaaatcccggaactgcaaagattgtctatagtcactagttgctgtcacaaacacaactaaaagaatactagcaacaatgccaagaccatcatgcgatccttgaggccatccttcagttgcaatcccaacaatcaaagagacgaaagcacaaacaccaagaatcataagagtcacatccccaagtgcttccca

SEQ ID NO: 24577 - DNA, 746 bp, Arabidopsis thaliana landsberg
gaacttgcaaaagaaaaaagtggctgtgacactcttaaatcttcctaaggacagtttttgaatataagttcacatctagtcgattttcctctattgataactaactctagactacctcatcaagcaaaagaaaaagatgctttgatgctgatacttacaataacagcaacggaatcttgatagctgcgtctagactccaaaaccaggaccaaactgtatttttggtactctggagactttctgctttccgaatttctgtttcagtttcttgcttcgtcgtttgtggaacctgttctcctcctaaagtctcgtcaatcacttgaataggtgactgtgtgcgcaacaatgtcaaccatttcttgaatagtttctgaatagcgggttgccctgtcatggaatcctctgtttccgaggtatatgaaaacgaagtgttctgtgcctttggggagccattcacattattttcgtcatcatctgaacggtaagatagtttgacagagttattagtaactttcttcccaccctcacttcctcctgattcattattttggatgccacctttaaaagatgtaactctgaaaggttttgctctcaatccaccgttgcaaggggaccctaaactgcaaaagagtttcacaacatattatgattcggagaatcaattgcaaagggaatatatgaactataactttttagtatagtttcctatatgttcatacgtctcagtatctaacaaggaatctctt

SEQ ID NO: 24578 - DNA, 913 bp, Arabidopsis thaliana landsberg
  unsure (1)..(913): unsure at all n locations
cgacgaaagccaatgaaatagtcgatttacatacaggtcttggacatatattgggccttatatcatttgagcacgacagtttattaccgcttcagtttattggacatatattgggccttaacgattaggaacggaaacaaacggacgttttctcncggcattgaagggagagtgataaccacgcgcgagcgtaccgcgtcagagttacataagaattccattattatcccagcaagcattatttagcgttccttgatgattcatcattatggaaatatatttatattaggtcagagattatggctaatgtccaacattttatgatgtgtcgcctctcttttatcatgttcgtgttactttatttatttttattcttactctgaacagaaatacaaggtaaaagtggtgagaatttacccatatataatgggctccccaatattaataaataaaccattagagtggtaattgaccgacacttggtttgccctgctagttgctagatcatacgttaaacccttttactttgtttgttgtcttacttttttgttccttctcgtcacaccacctcaaaaattttaaaataaattaagtttttgatatatattaagtacaaagaaacataaccagcgaagtcgatgaggttatgtttctaaccatctcaagaaactaataaccctcaaaccaattttactagatccatttctaaccgtctcaagaaactaaaagccctcaaatcaattttcaatataggaaattgtgtaaaacgaaatggataagtaatcttggttattaggtgaaatgttagcagccacaataatgtttcttttgtctcatagcgtttcttactgaagacaagtacctctcacatatagtaggtaaaccaaatttgaattacagacatagtcaaaga

SEQ ID NO: 24579 - DNA, 4393 bp, Arabidopsis thaliana landsberg
  unsure (1)..(4393): unsure at all n locations
ttacatctcgatcgagttaaatgtattcgtttttaaatttgtaagttttgtagattctttggccaagaataagtataaaatattttgtgatgttgtaatgttgctatatgttggtgtacctaacgtaccgtatagggctttagaaaatttgagcatggtcaagtaatgcaatnnnnnnnnnnnnnnnnnnnnnnnnnnnnnnnnnaacttatggagaatattgatgaaggctacctacaaaggctgaaagatattcatgcatccgatcattttcgcaagcacacggctccggaacttcgcaaacttacttatagacgggtgattttcttttgctttaacttaatcattttaagttaaaccatatcactgaccatcttgaaaatgttactgttataattgaacgagactaatactaaagatttgcaaaaatggctcaaccttttgaatgatgtcgacaacattcttagcaattggaggatgatcgttgaaccatattgatcaaatatcatctcctcgttgaacaactttcatttatcgtccttatgaataatcatgtgtgttagcgtctgtggtttacataacgcagttcttgatgcatctacattaataaagatctctcttacgaatggttttgaagagttaaattaatccatttattttgtggtaagaaagattaaaaaatgcaaagaaaaaagctacattgattgaaactacagtaaatctgcgtatgatcgatcagagaattaaagcctttatcttgttggagatctcgtagacaggcatttgccgcacgacacgagcttaagtaacgtatgtggtcttgcccttcttgttctcaccttcaacctcgtggcctataatgtcaaagtttccatcttttcaattactcataaccaaaaagttttgattttcactgaagataaagagggttttgatgttaccttgcgacgtgtgcctcttgaggatttccagcataacaagcttcttgatcttggttcaagtctcctgtaagaaaaaaaagagtcaacatttttacttttatctatctttgaaatgatgtttgattaagtgttagagattcttacagattttcttgttccagcttctcggcgatagacacggccttgcgtttagaccaaccgttctggagtgagcatccgtcagcttgctgaatcacatgagccaacgagaccttacctctcacaatgctttggctctggttctgactctggcttgcttccaaatgtttccttctagctcgggctaacgcagaggaaccaactggctctgtcctctcctcttcctgttgcttctgttgttgtcgtctttgtccattagattcagtaacttcaactatctcacttcttccacttccatcgatgttgtaatcatggccaatgagtgctaaagattgtggcaggcttttgtctttcacagttgggtgatgatgatgatgatgcacgttgtttctcgggtctttttttgtctcgcatctgatctctattgtgacaggtgactcaagaactgcctcaaacgcttgcataatatggcttcggaatttctcagccgtggatttggttaacggagaactgaacattagatgcacagtaggagctgccataacaccagaaagaagttggcttcacagaaactttgaacataataaagattcaagatttgtctatacgaaatgcattacctgatccgagattaagagagacgattcttccttctttataaagaaactctctcaaaccgttaactcgaagcttctcaataacctctaaccaaatttcttcaacaggggtcggttttttctactatcacctcttcttctgtccaaaccagaacttgttgcaccagctgcatcgctagaaggatccagatggtgatctgagctttctctacctccagtgtctgcagtggacgaacgttgaagcagatagttctgatcaggagccaattgaagcaacgcggctgtgagccaagtcagtttatcgtttgatactctcagctgtttctctgcctctgataacgtcttaagtgcctgtctcagtttctccatatcttctttaggtactataacaaatcaaaagttggattagaacaaaagactaaaacaaagctattgaaatttaggtaggctggaaaatgtcgaaagtcacatggttgtcgtcgaaaaaactttcttttatgctgatctttagtgaaatcataactaccagcaagaatatcagttatgaccgttgcaagctgagacattaaagccaatggttctacacttgtttccattattgttctcagattcttcacagtatttacagtatctgcagataaagctaaatcaagaagatccactaatttttcatcagaaacaagcccaacctgaaagaattaaaaccaattcgaaattatcttcaaaaaaatatactttcaattgttttatatggtggtgggacagaacaatgcttaccagttcctgaactaaaggaacagagatcctctgtcctaacaaactcagctgttcaagagtcatctcagcatctcttaatgaaccatctgatcttgaagcaataagcttcaatgcatctttatctatctcaatctcttcctttgatgcaatccattgcaatgagtaaactatatctgcgtccttcagtttcgggaaaaagaatttctggcacctagatatgatcacatgaggcaaaacatcaagactcgaacagacgaggataaagactacatgacgtggcgctgctcgatccaccactttggacaacgcattccaacaatcagatgacaaagtatcacaatcatcaaatatgaacacccgaggggactgagatgaaaccatcacattaccatcaagtaaatccattattttctcaaagtcatagttcccaacaggacccacttcccgaatgttccagcttttacccatatcatgtgaaacacaagaactgcaagtgccacaaggctttggttgttccatggaatgacagttcaaagcccttgcaaatatcctagcgcaagaggtctttccggttccatttggaccgtggaagacatacaaaagtccaagctttcgtctagcaactgcattagaaagagcttgtaccaccagattctgccccagaagatcccggaatgttttaggtgtgtatttttcagtaagactctgatgctgttgccgatgtcgatgccgagcatttacatggctcttctttttgtgttttttctcccctgaccttccttctgaagcaaggtcagaatcctcatcgttcttgagcagactgtctgcaaaaatacctagctcccccgagtaatcgtgcacccaaccatcattctctccactatcaactagtaaaggaagtgcttcaccatcagagcggataaaagagcttgagtcatcatcagattgtatcatcatcttatcagaaccatttctctcattagtttcacctttcctaccacctttcgaatcagacataccacaagacaaactcctacccgccttatcaagaaaagttttccctcggtgatgaattcttgaccaattaaatggaatcccacaagcctttgtcatgttctgttccccaaatccctctttttctccatcatgcttctcaacttgaggcaatgtgttagaagcaacagacatctcactcttaccaccaccagtatctctactcttaccccgaactctcctcgtccctctaaacttccgtcttttagggggactcattccacccgcacatccccgagtattaccaccaccaccacctcctccatacctaacccgtggacgaacattagatgaaaccacatcatcactatcaccaacaacaacctcatttaactgatcagacaatgtcttaaccatagcatcattaaccctactaagcctcctactagcttttgatcccgaaccatgagaaacaacctcattaacattttgataatcatccccaattctataactctttctactagattcctctctcttaactctcctaccactatccctttcaccactaacaggaccagacctctcatcagaaggagtcactttagatgtcccaaagttgacaacaggtgaagaaccactcaaagcagacaacctacgactagacttctttaaatcaacagatcttcttcctccttccacaagatctcctttcttcggaagcaaatccacaacagaaggaggcgtgttccaagcaggagggctcgcagatggatctctaagagaccgtgacctttggagaacaatgaggtctctcattaaggcacggtcagttaaaacaggactctgctcatgcatatggttcttcaaatgaatacaattcagataaatggatatggttacgaagatgctcaccgatatctccat

SEQ ID NO: 24580 - DNA, 4354 bp, Arabidopsis thaliana landsberg
  unsure (1)..(4354): unsure at all n locations
tgtgtttgtgacagtggttgcatccatacaatacagagtcttagctgacaaggcaagtgatgctttttacagactcagcaatccaaccacccaaatcaaagcctacgtctttgatggtatatatatctcctcttcatttctcaatacttagggaaagtgatgatttatccggtcaagttattgattttcgttttgttttttcagtgatcagagcatgtgttccaaagctgaacttggacgatgtgttcgagcagaagaatgaaattgccaaatctgtggaagaagagctagacaaagccatgactgcttatggttacgaaatccttcaaaccctaattatcgacattgagcctgatcaacaggttaaacgtgccatgaacgaaatcaacgccggtaagtcctcaaaatcgtaaaaccctaaatcaaaatctaaacaaacaaatggtcaaaaccctgaaatcaattgttgttacagcggcgaggatgagagtggcagcgagcgaaaaagcagaggctgagaaaatcattcagatcaaaagagcagagggtgaagctgagtcaaagtacctgtcgggactcggaatcgctcggcagagacaagcgatcgtggacggtctgagagacagtgttctagggttcgcaggaaacgtgccagggacgtcagcgaaggatgtgttggacatggtgatgatgactcagtactttgacacaatgagagatatcggagcaacttctaaatcctctgcggtgtttatccctcacggtccaggcgccgtctctgacgtggcagcgcagattcgaaatggattattacaggccaacaatgcctcctaatcactcaagtcaaattgtcttggtcgtctctttatatatttttgtatcttcttattaaaaaggtaaatttgacttttaatataatggtgtgcttattgtgatttgtcattatgtttgtacctatctcttttgtgagttgtgtgatagatatactttgtattttttcttaaaagtcaatataaatttctgtttgcgagagaaaaatcgaatctttgaatagtgaactttgtggcgataaactaatataatgattaatgaagagaatgttgcgatataggacactttcatataatgaagagaatgaacctgatcgataaacatgtgggcctaaaatgaagcccatctcattcaactctctggacacaggtccacttactcaacacacaggcccatctgaatatgcaattttcattatgacacggcaaataaaaagagaagcagaagaggatcttaagagtttcatcaccatctcaagatgatcattttcaacctttttattcttctacaaatccggcaggaaaatgggaaagatcagtagttgcccactcaaaccatgaaccaagcagagaaaaaacagagtacgcagaaagaaactagtttaaaaaaactattgcaacttcttcttccatctcagtttcaaggcttgagtgcgagagccaatccaactttagcactcttgtcaattgactttgtgtcgacttctccagagattgtgaagaatgacttgggtttccactcgtgttgaatgagagcacttgcaatacccgcactattgacacgagccttcacagaggtcaaggggtcaagcgagtgctgtgttccaacagttatggtgctgtccttgctagataacttgtggctcacttcggctccaaccgcagtgttgaacagcgggttcacaatgtgatagtaagatgcattcaatagatcgcccttgtcgttcctaacaaacaacaaaatcaaaagatattaaatggaaacattgagaactccatctttcatccagaattctcactaaaaatcacttacacagtaagggaggcaattaagtcctccttggtgaannnnnnnnnnnnnnnnnnnnnngtgaaatttccagacttggtgtcaaatgaaacatcagtaccaacagccaagacattggagccaatcacaccagagaagttgacagttgggttctgagtcaatcccatgcttgtgctgataccggcgtactcatgcaagtattgcagctcaacctgtttataagacgaaacacgataaaaatgagaagtcaactctcaactgatgaaactttaaaacaatacaaagaaatgttgttgaattaataaaatataccttgccagaattttggtcaggaaccttgaagctgaagattgacctcagtccgggtgcagcctcatcaacggtagcggtgatcagaaactgaaaccaatacacacaaagttgtaaggtaagtagcccaacaaacaaacaaaaaactataactcaatatacaagaaaaacaggagatgaaattgagtacacaaatacacttacagtagaatcagtgcaaactttcaaatcagtagtaatgttctttcgcctcgactgaaaagcgacatctcccaacaataagtcacctttcttagttccggttgaggtgatggcctaaaacaaagaaagagccagattatgagcaacgatgcccaagatagaagaaatccaatgtttaccatcacacgaaacataagaacaaagtaagaaatccgttacataagataacaatgctaattcgacacaaacctcagaagctaatgaataaagcaaaagtggaaacagaatacagaagacgacattccataaaccctaatcatctataatgaaatgagaaacttacaacaccggcaggagagaaagtggtgatactgaatttctggtcactgttgtggtctttgtacagaagatctgcaaatacacagagcagagcaacagttttagacagcttattaacaaaatattctcaaaggggacttaaatggtgagaaatgctaaacatgaaagagaatcacagcattcaaattggctattccagatcaacgataaacaaaacagggtctattgagaaaggaagagagcttaaacgagagtgacggagacattgaacccaggaattactcatattagcaccaatgattgaaatccattacttatgaatctctacccgattgaatactcgaaatctacgcatgcatctatgatctatcccggtagccaaatcgggaccgggaaaaggaaaatctaagagatgagcaaaagaatcaaaaatcctaaggaatcaaaagaaagtccagattagaagacagaacgggacactaagtagcaacaatcagatcgtctacgccataaacagattcaattgaacgaaatgaaagagaagaagtgagggagataataaaaagatacctctggcctttttgccgatttcggtgtagagaccgggacctttcaccattgttgcttatctgagaaagttggaggatgttctgaaaagtcttctctgagaatcgaaagaacaagagctggaaaacgtggttggcgtctataagagagagagactgaggaaaaccctaattttattttatttccgaatattatcagagaaagaagagttttcctgtttatcaagcataattttatcagccgttggatggagactcgcttgcttcagtattccttatccacagccgtccatatatttattccccactcaccaagaaatttattctcatttattacgtggcaactaaacggcgtcgtttaataacacatttttctttccacgcctaaaatgagaaaatcgtttttttcccttgatgattagtcgcataaacttagctgtttcatcctttattttagtcatgaataattcgaatgtgatagtatcgttattgtgaaatcgaaatcttgattcttacatattttcatatatttatcaaacgattttcagaaaaatatcccgactagttagcggctgatatagtaaacgattagtcaagtccgttatggtagcaatttatattacaagcagtctgacattttcactacttttagatgcatcatgagaatgtaaacgtaattgtttcttgttgctaaaattgatcgaaatcataatgttagtctctccatagaaatatccaaatataggaaacgaacaaaaaacaaggagatgtaaaattaaaaagaaaaaaagaaaacaaagaaagctgtccacaagtaaattatggtggcctttccatacataacgggaaaattttctaaatatagtagttcactttcttcaccagttttttttatcattatttaaacaccaacattcatgtttgtcaaacttcgcaatacgattcatctaccaaaaaagggctttaggtcaaacagaaataacgaccctaagctatgtttaaagcttagcagttcttcacatatatttcaatatataaaaagatataccccttttacaaaataaaaaagatttcttttc

SEQ ID NO: 24581 - DNA, 1108 bp, Arabidopsis thaliana landsberg
aaataaaacaaatgaattttaatctcatgcaaaaagatgatacattacagtcaacggacagaaatacacttttacaatccggactccagaaaactactcacaagctacaaaaaagagacaagaacaactaaaccatgctcttgaagaaagaatcccaagagaagcttttaagattgaccacaaaagtgtatgcgaagatctctacctcattgtttttttttaggtgttttttttcatgtctgaaactatgaactctgctttgaatactgaccaaaagctaagcactctgttttttcatggatcttcttcttcttgtctggtttttgatgaaaagctaagtaagctcagagtctgaagcatgaccagtctgttgtctacgtattccaggggttaaaggactcattggactcaaaggcaatcgattatccttccttgctttaatgcttcttccaaatggactcagtggtgatacttttggcgatgatcttgcttttaccgttgaagttcctgccgatctcaacttttctgaacctgcattgataatatattaacataaagatagttgtctttttgatgatctatcaactcaaactctgtcaatgtagagataatggtgaagaaactaacctaagcttggacttcttctgagctttgccatttcgccgcttttctttagagctgagacctttttcatgggagcttccgagtagactgatcttgtatctgagtattcagatattgtatcaagacacaatgactttgtatctcttgtaatcatggcattaggtggatcttcaaccactgaaacgctttcagattcactagtctctgagctttcttttgagtttggattcatcttctctttttccaaaacccggtatgagtatagttggaacggtatttgattcactgacgcggtgtgagaccctgcatcacctggaaactttctcaagaaccttgcttctaagtcccaacaatcaacaagtggagtttgcatttgaggatgaccatgatctggattcacaactaggaacttcttgatgtagcgcagtatccgacatatcgaagagaagttaggacgctgactcggttctgagagggaacatcg

SEQ ID NO: 24582 - DNA, 2975 bp, Arabidopsis thaliana landsberg
gagcttttttttagcttatgttggcacgataatctgtgtatgtgttcataacaggttgcagctgttgttttcacggaagacctaaagagattgtatgtgaccatgaaagaaggtttccctctagaatatattgtaagtaaaaaaattatagttgcaagtatttggaaatgaatgatgtacattcaccatgtcatatcctttttatttctaggttgacattcccttagatccttacttgtttgagactatttgcaacgccggagttgaggtggatcttcttcagaagaggcagatccactacttcatgaaagttttcattgcacttctgccggggatactaattttatggtttataagagaatctgccatgcttctccttatcacatccaagcgctttctctacaagaagtataatcagctgtttgatatggcttatgcagaaaattttatattggtaatcatcgttactgtataccattaacctcgttacttctttgtttagttgccttcttcccacatattcacacttctattgatgagtttaaattatcatacagccggttggagatgtcagtaagacaaaatcaatgtataaggaagtggtactagacggtgatgtctgggatcttcttgatgagctaatgatctacatggggaacccaatgcaatactatgaaaaagatgtggcttttgtcagggtaaattacatcttgacccaaaaactaacatgtggatattggtttattccatttaactgtctaagctaagctcaaactctcctctgttttcatttttgagtcagggtgtgcttctttctggacctcctggaactggaaaaacactttttgcgcgaacacttgcaaaggaaagtgggctaccatttgtgtttgcatctggtgcggagttcacagacagtgaaaaaagtggtgctgcaaagatcaatgagatgttttcaatcgcgagacgaaatgtaaggttcttagttatgtgttttaaagctcatacggtatagttgtcttctactcacactattattgtggatctaattttatatactatctccaggcccctgcttttgtgtttgtggatgaaatagatgctattgctggtagacatgctagaaaagatccacggagaagagcaacttttgaagctttaattgcgcaactcgatggggagtaagagaatctgcacttgtttataaatcttagtgatatgtacatgttttcatcgggtttgtatcaaggctttcatacttaatattgtaccacctgcaggaaagagaagacaggtatcgataggttttctttgagacaagctgtgatatttatctgtgctaccaatagacctgatgaactcgaccttgagtttgtccgttctggccgtattgaccgtcggctgtatattgggttgcctgatgcaaagcaaagggtgcaaatatttggagttcacagtgctgggaagaaccttgcagaagatatagactttgggaaggcaagttgttttcctgctatttttcaatcccaataacatgtttgatataggtgtttgctcattcataacaactatatcctttttcacatccagcttgtttttcgaacggttggcttttccggggcagatatccggaatcttgttaacgaagcggctataatgtcggtatgtcatattcttatgtggatctcaatttcccaatttagttataccatttctagaggagcgttgttgatcgtaatccaattttacaggtaaggaagggacgttcttacatatatcaacaagacattgttgatgtgttagataaacaattgctcgagggtatgggtgtacttcttacagaggaagagcaacagaaatgtgaacaaagtgttcgtactgacatcctttgtactatttatctcaaaacatactatgctccacagctaaaaaagccctaaccgttaaagcttatgtaatattaggtatcttacgaaaagaagagacttctggctgttcatgaggctggtcatatagtgttggctcatttgtttcctcgatttgactggcatgcattttcgcagctccttcctggtggcaaggtctgtttcaaatatatatttttcagttgtaatgatagtggtgtttgaacactcaacagtcaacacagtgtaagaatggattaaataaacttttctctgaatcttacaggaaactgctgtatcggttttctatccacgtgaagacatggtagaccaagggtataccacgtttggttatatgaaaatgcaaatggtggtagctcatggtggacgctgtgctgaacgtgtggtttttggcgataatgtcactgatggaggaaaagatgacctggagaagataacaaaagtaagtactctccctttctcgtttaactaattactgtgccttgcttttcagcttctgattaaaccttcaactcggtagctaaaataacatctatgtaactgcatatctgcaaagtgcttgtgttttgagtaatattaatgtttagtcttccattctaaatttgacctgacattacattttcagattgccagggagatggtgattagccctcaaagtgcgagattaggtctcactcaacttgtaaaaaagattggaatggtggatttaccagataacccagacggcgagctgataaaataccgggtatatccattaatcagagactgatactatcccatttttgctgatcttacatattctcagtagttcctcacgttcttttcaacttggtgatgttatatcagtgggaccatcctcatgtaatgccagcagagatgtcggtagaagtatccgagctattcacccgtgagttgacaagggtaatttatcttcgactcagcacacctaatctgatttaaactctcccatgtggagcttgaacatatagatggtatttgaatgttggtgacagtatatcgaggagactgaagaacctacgatgaatgctcgct

SEQ ID NO: 24583 - DNA, 3778 bp, Arabidopsis thaliana landsberg
  unsure (1)..(3778): unsure at all n locations
actgacatcagtggaagaaagatacaaatttgtggcacagggagtgaacttgcttccctgatgttaaatctgaaatcatggcacatgcttttagaacacatcacattatgttgttcaacatagcaacaaggagagaagtggcattttggtaatcatccattgcaatacaggctatacagctgatgataacaattgcagagcaacgaaaatctctgtagggcatttattcaatatgtggcgggaaaggtccaggcgcgcccacatgatacacacatcaaaattaaaagacgcttgagaaactgcaaggttggtcttaccccagatttcaaaatgtgaacttgcagctccaaaagccccagcagcgatcacgtgtcagttgatttctgagccagagaagagtacagctcttctgttccagacggaaaaagacaatccagtaacccaagaatgtcggaagtcaagcaacaaggagttcgattctctggatggcgttaataacggcaggttatgttttggattcatgacaagaagttgaccatggacccagttccagaggttttatctgaattactctgcagatttcaattaaagaacatattgaaccaaacacagccacaagagcttttatatagatgatggcttcagagttccaccattaaatcagggagcaatctgagacaaaattgaagtcatcaacaaaagagatacaattcagagaatttaagagcttttctatcattttgtggttctttataattctgggagacaaaacttaagttatagtggagaaagcaccaatggacatgacaagtaataaaattaacaccttacagacaattctccttagtctaaatattacataaatgtaaatttaagatcttctccgagctttctaccatgactgataaaacctgaactcagcaagcaaaatgttgtttcatctctcatacctctgcatcactggattctgaatcttcgtcttctccccaagacagaattggattgagtgaagatgacttgtatgataaagattgcaagaagttgaaataagcatacttgatgtcaaactgcatgtcataccctgcaaattagatgcatacatagcttattagaggcaaggagagtcgaaaagtactggcttgccacctgaagacaaacagatgatggaagcaaaactaaaactcttacaatagttcactgcaatggtataaccaccatctcctggggtttgactaacatggtgaaaccacatgcttggcctgcaatattcagaaccattatgagtcagaatcatgactagaaaatccaattgtgtagtaggtctatcacccatttctaatctttgtttcttataaagcaaaggtaagactgaagtagatacattagtgatccaaattaagccaaaaagtttctgagaattttcaatctgtggagctatgggatttaaattcttacaggtaaagaacctcgccagccttgacagtacaatgaaacggcttcgggccatcaaagaacaacggaaatttcaatctctcgcttgcttccttctctggcgaagggtatggatcaacactagaccaaggtacatgcctaaccggctcctcaacctcaagcttgaacgcatcagtatcctataaagattcaaactttatctcattcaacatcacttaacaagaaaccaaactatttaatctaaaaatctcacagactcggtggtaagagtaattagctgccggatactgttcgatatagagacggtgaacatcagtcggaggaagaagaaggaaatgtttctcccctgaaacaacagcgtaaagattctcatagtgatctttatgaaatgaagtcacggagtcatcagtaccaatccaaaggttcacagcttccggcgaacaaccaaatgcctccgtagcccactcaatatcaccgtcgcagtctaacgcaaccgtcgaatactccgttctaaaacaatcgttttgctgttgcaaatacccaaccttcagtcctttacacgacgattgaacaaccttaagagcctccgggaacagaactttctcaacatgagccgaagcgaaacaaagatcactatctccggtgacggcgtctgcgcagccgttaggagtgagatgtagcgagacaacgtcatctgacaaagctccggtgaggtaagccggatctgaccagagttttaacgccggccaatgagtaatagctttggagattatacaaggcttgctctgagacacgtagtttcggagaaacttcaccggagacggttgagaatcaaaacgatcgattttagttcctaagctcaattctctcacttctctccataaattctctatctctttagccattgacgaaaaaaaattggcgggacaaaaaatttgggggttttaacacataaccaagaaccctaatttatatttaaagaaaaaaaaaaaaactgtttttgttataaaaataggatttttgaaataaacttgtttcgaagaggaagaagaagatgagttgttcttatctactttctggtgacgcttccgtcgtcgcttcacggcggtggagtgatgtttcttcccggcagcgtttatttctcccacggcaattactccggcagccatcgggttcttcgttttcccgatgcgtccgattagtcgctaatgtaaatgatcatttcagtaaacaatcactcgcgacgagaaattgcttggcttcagtgtttagtgcagacttgggtggaagtaacggtaataatgataacggaaatggcggcggtggcggaggagacggcggcggcgataactctgatgattcttctttcgatttgagatacctctgctttcttttattgggcttgtcttgcttcttccatttccgattatcagctgcgtccgccatagctaaagatcaaaattcggatagtaatggagatgctgtgaaagagacggtttgggaagtgagaggaagtaaaaggaagagactagttcccgattttgtcaaagatgagttcgtctctgaagaatctgcttttgaattatcatcttctctaactcctgagaatctcctagctcaatgtagaaaccttctcactcaattccttcttcctgaaggttttcccaatagtgtaacttctgattacctcgattactctctctggagaggtgttcaaggtattgctagtcaaatcagcggcgttcttgccactcaggtagacgactgagcttatcatctctcttaggcattttcacaaacacttggtgttcattatattgtgttggtagtctttgctttatgcagttgggttaggtaaaggagcaattcctacagctgcagctatcaattgggtgcttaaagatggaattgggtatcttagtaagataatgttgtcgaaatacggacgacatttcgatgttcatcccaaaggatggaggctatttgctgatcttcttgaaaacgctgcttttggtatggagatgcttacgccagtcttccctcagtttttcgttatgatcggtgctgctgctggtgctggtcgatctgctgctgcattgattcaggttctgttcttgtctctgaaagctctaagtgcagcatttgttatagtttagtattttctattgaacttatcatttacttgtctgcaggctgctactagaagttgcttcaatgctggctttgcttttcaaaggaactttgctgaggtctacaataatttttatatggccttagtcttgatcacttatcaacagctattnngttttctcaactattctgggtc

SEQ ID NO: 24584 - DNA, 2286 bp, Arabidopsis thaliana landsberg
acctgttccgcgctatcaaatgtccaaccaagatccgtttcactatagggatcaaattgttgagctgtatccctcaatcctcccacggcatggaccaccggaatggttccatagttcattgcgtaaagctggtttagaccacacggctcaaatctagaaggcatcagcaatatgtctgcaccagctgttattctgtgtgctgttttaaccgagaatccaacccatccccgtgctttatctcgatattgatgctccatttgtctgaggacctcttcaagatccggtcgccctgtgcctaacataaccagctgaacatcctgactcatcatccatggaaccgcctcagctatcaaatcaacacctttctggtgatccaatcttccaataaaaccgatcagcggaacatcaggccgaacaggcaaaccgagctctttctgtaaggcagctttacattggggtttaccaatgtgaagattctccaaggaatagttggtataatcatcagagtgcaagtaagtatcaaattctgggttccattcttgtgtatcgataccgttcacaattcctctaaatttccagtcgttttcatttatgatgttatgcagaccccaacctccttctaaggtcttaacctcccaggagtatccatggctaacagtgagaactctatccgcagcttttagaccagctgcaaaaatattgaagtgctcacctcctactgggtcatataacttgaagctatccaagtaatggctcggtaaatccacgtaggagaaatcatctaccggtccccgcccctaattttccaccactaggttatgcatacttctcttggatagataagcataaagtaagtcatttctactgagtgaagaatttactaacctgatgagcaatgttatgaattacaagaacagatcgtgtgtatttcattattccgtgatcccggtaataggccttcaggtacaccggtagtaacgcagtgtgccaatcatttgctataaaagccaaatttccatcaccataacacacacctccacaaggaacataccacggaacctgaaacaaatctccagaaaccaacattagtataagaagaaagctaaatatcgattacccgttcacaatcttgacgcagaggtttacctcaacagcagccttgcaaaataaaaccatccgcttcaagatatcctggattcaattataacaaacttagtacatgtaggcagaaattgatttttcggtgaagaacagggagaataagataagtcttacaagtcggtttccaccataaatgttatttctcagatgccgaaattcagggctatcaatgaaaacaaaatccacaccatctataaatgcatggaagtacattacttccatatcctgcagcaaagtgtgctccacatgaagttttctctaccttgtcaaggaattttaaatggaaaagaagaaactttgaatgttgatacattaacagcttttatacctgcccggccaccttatatctcttccgtacccctaaatctttggcttcagcatactcggcataccgaggaaccacaacctaacaagaaaatcaaagaaaatgattgactaacaggtttgagttacaatgtccacaatcaaccagagagcttatctgcacgaaaaaaggcactctctaataaatattaccataaccctgtgtccacgcctagccaaagactttggtaaagcaccagctacatctccaaggccacctataaaagttattggtattcagttttgtgtactccaagagaagactacttatgcaaacatagcccgcacaatcgatcaaagatgataaaggaaataattacctgttttcgaaaatggagcacactctgctgctaccaatatcacattcatgacatttgctccagccagtggaggcggcttctcttcatccttgccaggttcgttagtttcactactagctacgtcaggtgttttttccacgtacttctctgtcttcatagttgatgtttgaggagctttagtcagataagacggtagtggatctgaccaaaatgcaccagcgcgagatttacttggctttccaggagaagttacaggatcagaagttttctcaggagaggtcataacagatgaaggtttataaggaggatctacactagacgctactacgctagaccaaggcttcccattagtggctacatcggatggtttctgaggagaggttacaggggaagaagatatcacagaggccgagctttgtttgcggttcttcaaggattcagt

SEQ ID NO: 24585 - DNA, 1975 bp, Arabidopsis thaliana landsberg
ggtttacatagatttcataattcaaagagtacaatagagttacaaacaaagtgttttcctaagatagacattggtggacaatggcatgtgggatgatatggttgctatttagatagaaccatgcaattcattggttatgattagacatatgccatatctcttttgacatttacttaactttttgcctttattatttagactaatccatcaaattactttgtgttaaatactaaaaaaagaatgaaagttacaaattttgtgtctaattataaaaactagcccaaacgataagagtagtaacaatccattctttatttgaagatggaccacacatgaagatatggatcatacaaaggaaaataaaacattatattgacgacatgagggacacattgaaatgctataattcactggacaagaaaatgagatatcaacaactaacacaaaaaacatttataagaagataagccaataaatgacaaattgatcaattagaaaatgataagagtatataagtaaaccattagaaactggaaagaataaaaaagagtatgctgtggtgtgcttcgtgggggtccatttactaaagtgggatatataaacattatgagaagaaagaaagcaaatagttatattttgaattggtctaatttgacatattcaaaattgttgtattcatcagggttaattttattaacaaaataaattcaacatttatctatgctattaagagaagaaattgttaattattgaaaattattaggaatacttcaatcgaacatgtcccacaaaggccaaaccacacacatggaatgaccaattctctctcatacaaagacattgaaattcagaaattatttatgaaaaactatatagagaattcaaattacgtaaaacaaaaagaaaaagcagcgggaagagacgtgagcttattgcatcatttagaagttgtagttctcgtcttcgtggagcttttcatcgtgacaacaagagaagctcatgtacttctccatcggacgctgacactcgaagcaattcatcttctccggaatccgaccgctccgagcagtgatgtggaaatcaaagtggccgcaaggttttccggtttcacggaggacctcatcgtggtggtggtcggacattgctttggtgtaacctttggtcgggacgtgggttttccaggtccggtcgtaaacactcatagtcctctctatggcaccgtgagcgatcatcactatctcaggtcctttgctcagtagtgcccatcctccaagcttgtcgtagcttagtatctttttgattccttgcatcacctaatcaacgttttcaaacacacaaaatcattcattaaccaattgaaccgaaccgaaccgaaataattgaaaaccctagctagtcaactcttacatcgtcgtgatcatcggctttaccgagttgaatcttggagtacaacatgctctcgagcctagtccagaagaaccacatcaaggcaggttcggcccagctatggctcaggttttcagacctgattacttcactgatacgcctgatctgttccctgtggctatggtttcgttttccgacgtaagccatctcaaggttcacgttggaatctttggccgttgctttggccgccattgtgaatctccttatccagtccaagtcatctcctccgtacaggaaaatgtaattatccggttttatctgcaaatcagacccatcattgttcattaatcacgcctcgttcttgaatgaatgtaatttaggtcaaaccctgcctgctctgttttctagagtttccaggccaatcataaaaagaaaaaaggatgagacttttgaaatacccagttgaaaatgacagagtcgatgccgtcgacgatgaggttaagggaaaaggtctctctcctccagagctcttcctcacgagatctagtgaaagggaaagcttcagtgccccaaatccagatcatatgaa

SEQ ID NO: 24586 - DNA, 5169 bp, Arabidopsis thaliana landsberg
tatatatatatatatatcactcaagaaagcatgctattaacaacagaaatatccgttgttaaattttgtcgtttataaattatagcgacatatccataaaaaaaaacactttgttgagtaataaactaacaacgaatttcaaatgtaatatggcagagaggaataaaagacaaactaattgaagatattggtttccatatcctaagaggctaagacatatttacagtgttcctaattaatccaagtgttagaaaaaaaaaattatttaaaaatatagatttttttaaaaaagaattattttaagttcctatgcattttattaattaataatgatgaattgtatactccaagacaaataattgaatactattgaaatgatgcatctgtaatcaaattttaatttgtttgcttaatatgtgtgaaaatcttagaaacttggatttatatggaataaaacggattattagttttctcatttattaatagtttcatagtttgtggtatttgaagaaggataacatatattatgtgctctttgaatatagtttttgaatttgtggtattttgaccaaaaaacaatttgtaatatttttacagtaatcttcgttatttttgattttacaaaaacctataaaatactatacgtaaaaagaataaatagtgaaaaatcttccgaaatgaactgaaataaaaaggtctaaatatgtgacgcaaggactagtggtgtttgagaggaattgctatttgcaaagttgtatttggagcttaaaaccctaaacccagaaatccccaactcggaaacttgagaagatgatggctgatgacactgaactcgtcagtaacactgaccagaagatggaagacgcttcagccgaaaaccctgcccgagctgatcccccctcatcggatgattccggcgattctgattccgactcagaagatgaagccgagtcgaatcagcagattgtaaccttggagtcggagctctccgctaatccttacaactacgatgcttatgtccaagtaacaatcactctctctaccttcccttttgctacaaaatgtcgttttagctcactcagaacctagcaggaaagcagaatttgctaatcttcatttcagatttccttgggagaaaatgatattgcttgtgtatttggaaaacctttgagttgtgtcttctctcttgttggaagatggatggttttctcttggctacatttgtttctgacttttttgctttcttatttcagtacattaagcttctcaggaaaacagccaaccttgaaaagctaagacaagcaagggaagctatgagtgccatatttccgttgagtccttccttgtggcttgaatgggcaagggatgaagcgtctttagccgctaggtaaattttttcttgcgcttctttggctcatacttccggttttattgtaggcttcagatggtttcctttgatcattatttgttacagttcaagcatgcaatttttaacacaccctctgaaactgttgttatatttatccttgcagtgagaatgtgcctgaaattgtgatgctttatgaacggggactttctgattatcaggtatgttctcttctgtactggatccaacagcttgaataaaaaagcttcgttaggcttatatattattaccattttgttagagatagatagactgaataaatactctggtatgctatatcgatttgttctgttatttatctttgtatttcaaatttcttcctcaattgattataaagacagtgatactttataatcgatcattcaactagtaattcgttccacattgaattaataagctaatagcttttcttttatgcagtctgtatctctttggtgtgactacctaagctttatgctagaatttgatccatcagtgcgtggatacccatctgaaggtatttccaaaatgcggagtctttttgaacgtgctattccggctgcgggcttccatgttactgaaggcaatagaatatgggaaggatatagagaatttgagcaaggtgtcttagccactatcgacgaggctgacatcgaggttggatccatttcttgattttgttcatctacattcgttcactgtagtctagcagcatgttagcaagaattgtattctaggatgattcctttactaagtgaaatagaagtatggtagtgggttgctgcgcatagttttcagtggaaagaactaacatcttgttattaacgagagatagtggttgctatgtaaatatcatttaggtctctaggctctaaagtagaaataaatcagtttatgcacatctctttatagttcttttgtggcatcatgaatttttagttttattttacaggagagaaataagcagatacaaaggatcagaagcatattccaccgtcacctgtctgttcctctagaaaacttgagctccacccttattgcttacaagacttgggagttggaacagggcattgaccttgatattggatctgatgatttgagtaaggtttctcatcaggttgctgttgcaaacaagaaggcacagcagatgtatagtgaacgtgcccatcttgaagaaaacatatctaagcacgatttatctgacacggaaaagtttcaggaattcatggtacgtattgtttatcgtgcagttgatatatatcataaatgttgtgtagaagttggattccatatgcctaccattagtgctcatattgtgtgaaagattcggaatctgcagacttgggcatgtttttttgctactgttgcatcctttttgttcttgttattggctttaccaagtaaacgatgttatctatatgaaaacgtgatgattgtaattatttctttgtagaattatataaagtttgagaagacttctggagatcctacccgagttcaagctatatatgaacgtgctgtggctgaatacccggtttcaagtgacttgtggatagactacaccgtgtatcttgataaaactttgaaggtctgtcaagaacttgttgtgtagcgtctttttggcattttatctatcatcttcttgaaattgtctttttatggtgctgtttcttacaatttttacttgatctgtacaattgactttctttcttcaggttggaaaagctataacgcatgcctattctagggcgactagaagttgtccatggactggagatctttgggcacgttatttacttgctttagagcgtggttctgcatccgagaaagagatttatgatgtaagtctcaacttgttaaaattgaaaaacaaaagaaatatagtgaaggaaaggatacttgccctaacattgatttatgtctgtcatcttcctcttaccatatccgatgcgttatgctatgtgattttcagaaagttatgctgagaatattctattattcaaattgttgcgtacaggtctttgagaagtcattgcagtgcacattttcctcctttgaagaggtacacctttgctttcatgattatttattcagtttctagcatgtatatattaatctctatccacgtatttcttacgagttgtttcttatcagtacctggatttatacctcactcgagtagatggcctgagaaggagaatgttatcaactaggatgctagaggctttggactattctctgataagagaaacttttcaggtttgtctgctgcctttaccatcaatagtattctcaaattcttgttctcagctttcaagatattggtatccttgcagttcttttagttaattgcattctcttcgtagctttccatataagagtctatataggattatcttttctgtaagaatagtgttcttttgtgtagcttttctcctgatttagatatcttctgaaacactcgaattaactcaatgtttctttctgtcagcaagcatcagattacctaacgcctcacatgcaaaatacagacagtttgctacatttgcatacttattgggctaacttggaacttaatattggaaaagatctagctggcgcacgaggtgtttgggatagctttctgaagaagaggttttgcaagctctaccctttatattgattacttacagatttaaacttgaaataattcaggcaaattatagcatttgtcagcataaggcaatctggttcactttggttcatcttaccttgttctctccagtggtgggatgctagcagcctggcatgcatacattgatatggaagtgcatttggggcatataaaggaagctaggtctatttaccggaggtgctatacaagaaagtttgatggaactggctcagaagtatgcactcgattctttcttgtttaatgtgttactgtaacttcttttcttgttatctaaggaggattatttgactcgaaacacattctttagcttcacttgcaactgaaacgaccgtctattaaatgaaaagtagagaaactgagaaacagtgtataaataaagcaactgcaatgcaagcgcgtttaatggaggggtttttctgtttttgatggtttaggcatgtttacaatacatgacattttctttgaaacatgagaagcactgtatgcctgagttgtcatctctaatttctaatgcctatactcacttcctaagaagagcaattttccaggacatatgcaaaggactgttgcgctttgagagggagcatggggatttggaacattttgacctagcagttcaaaaggtattgtttactgttttgcatttccagaatatgatgaatattgatatattttgttgggtttgaatttttttgttaactcttatgtgataaatacattagatcgatctgttaacttaatttttgattcatagctactgtgatgttcttggcttcttatgttcagtttccctatatttgaccctgatgggcagttataagagcgatgcattgtttgctaaaaaagaatgcaaaaaaagttgtggaagctgtaaattatacgagttgcttgatttttattctgcaggttatgccacgcttggaagagctacaattgatgaggttacaacaagagtctacaccagtcaaaccgtcagctggtctgaaagagcatagctcacaaaagagaaaagcagaacagaatgtagaagaagagtctttggctaagcggcagaagaggaaaagtcaaaaagaagtggacctaggtggtc

SEQ ID NO: 24587 - DNA, 1171 bp, Arabidopsis thaliana landsberg
tttttacatacctttcgttcttcttgttttcagtgaatcgtggaaaggggaatctattatgtgttaagacaagaaacaaatcctctcttggcagttctgaaatctttcgtgacagcctttgtgaagttttggtcagagtaataatacattgtagagatccgttggttaaacttttgtagttttcattagtgagagttggtaagcttaatatggtttgaaatgtgctgtacaatttttgtgttgaatgtttaggttacatataatggtttgagtcaaatatagtccaatcagggatgaaacatcagaattctgattatcttcttgaacatttcaacggagatgatggatttcagttgtatgaatttatcgattattgcttggagaatgagagattacttctcattggtcaaaaaaatggtaattacctgaaccgagcattggtttagttacaccacaccaactgaatgatgcagcaaaacccgccacttcaacggtaacatgcagcaaagaagccatctttctgttacactgactcatatttatttgattatttattgagagaccacaaggttttgatgcttagtgaaaatggaaaaagaggcaacaaagatggtgaatggtggagttaagtcaaagtcacctaagggcagtcctgatttcctcggatataatttgagatatgtcaagcttggatacatttaccttctctctctctcacgtaccttttgtttcttccttcctcctcttcttcttctcttcatctttgtttctcgatttctcccaatcttggctttccctttgtctaccttcttcatcctcctcatctatcattatcttactccttcctctgtttttcttctcgatttctcctgttaccgcccacccgatcatctcaaggtcatcatgtctcttccatccccacctctcttctctctttctctgtcttctcattgttgttttgtggatgtaaattgtacagatcacaaaaagcgacttcatcgagctggcaatgaagtctggtaacttcaacgagactgccatcgagcttcaaagaaaagtgctggaccaatcagggataggagaggagagctacatgccgagagtggtcttcaagcctggtcacagggtcaatcttcgtgatggtcgtgaagaagcagcaatggtgatcttt

SEQ ID NO: 24588 - DNA, 3214 bp, Arabidopsis thaliana landsberg
  unsure (1)..(3214): unsure at all n locations
ctctgctcgcagtctctatgttaagatctgatatgagtgtcctgtcggatgttggcattccttagtttctaattttgtctcaatcttagggtttttaaatgtttggcttggaaattacttagggcttttgttttgtctggtactgtatacgagatctgttaggtttgatggttttgtgtctttaggcctctctattaagaaatgtgaatattttggtggaatcgattttgttttttggatgtagaacaagagctctggggataagcgtggatggagtttcaggaagaaatctgggaaacagcgagggttgattactagtgtagtttctgaaactactcctgcttctaggactagagagactcttgaatctgctctccttaaatctccgtctcctgataataacaatgtttctgaaaaacagcagcagtctttctctgttgatgaaaagaagagtcagttacctgttgttacctatgtggctgagcctgtggatgagaaaaaaacacagtctgttattgaggagaagacggagttgttgtcagtggaggaacagattgaccatagaactgaggtgtcgcctgttattgtggaatcaaaagggactgaaactgaggaagatgatttgattggaactgaattgcaaggaccaagtgctgctgatgcagccaagatagaggaagatgttacttccgaggttgaaatggctagtaaggttgagccggaagaatctgaatccgatgatgtgattatagttagaaaagaaagtgatgaaaaagttgatgagaagctggatgagtctgttatcgttgtcatccaagctgctgttcgtggttttttggtatgttcttctgtctcttcttatatagtaagattatttaggatgtgaagaagctttctttaactctgtgaacttgttaaagatcttaacattttcccaacctgttgctgaggatctgtcttgaaaactattcttactggagtgttgttaaactgcaggcgcgaagagaacttttaaggagcaagaaagttattaaacttcaagctgcagttcgtggccacctggttaggagtcaggccatgggatcactgcgttgtgtccaagctattgtcaagatgcaggcgatggttcgtgctcgtcattccacaaaagatggtagtcgtgtttcagcaacctcggtaacgtttcgctgaattatgtttcggtatcatcttgtatcccctataaaatctgcggactgaaactgtttcttgtttcaggataagtcggaaccaaatgcagctgcacaaaaacttctagaaaacacgtttgctaagcatgtaagttttcagacttcgttctagtgcatcactactggctagtcaagatatttactgtgacatctaaactcagtttcttgtttatacttatttctntgtatatttggattatagctaatggagtcaactcccaagacaaaacctatcaacattaaatgtgatcctacaaaacctagttctgcttggaactggttggagaggtggatgtctgttccaaaacctgagaagacttctaaagcaaatttgacaacggaagagcaaaatttggaagaaacacagaatgttaaaatatcacctcaagctgactttgtgaattctgactcaacggtagagaacaaaactgaaactgatatgccaagctatgaagcaagtaaggtagaaggtcagaatgtggagctatctgagacagagaaaatgagccaatatgattcaccagaagcatcagcggaggtttattatgactcaatccagtctcagccacttgctgctaaaccagattctttgctcgaagagcctgaatatgtggatggacagattaaacattctttgaagcgtaaggttagcaatccttctttcattgccgcacagtcgaagtttgaggaactaacttcatctactggttcaaacaaagcaatgacgctgtcttctaaagatgatgttttgggtgaagaaggcaaaacagatatagattcaccagacactacaaacactataaaggatcactctttggaagatgttactccagctgagcttagtggatccgagtgtggcaccgaactctctgtaacttcttctcttgacacacttgagaagaagtcagacgctgagggtgcagagcccagggtagaagctaagcttttagaggatgacacttttaaaacagaccaagcagagttgatagaaattgatgttaaagacgcaacgtcaatgggtactgtagaggaccctaaggagaaagttgagaatgctaaggacgaagttgaaatttcagcgacacatcatgaaccggtcattagtacaccagattccaaaaagagacgggctgaagatgaatcagggcctcaagcttacgccttatctgagggagctttaactccgatgacaatcactgaatctcaggcaacaccggcaagccaagcatcttcttcagtgaaagcaagaaagggaaaatccgaaaagagtggttcatcccaaaagaggaaagttagcaagaaaataacatcaagcccgaaacaggaaattggtaccggtgaggctacagaacaagaggaagggaaagaacagaaaagcgggagaagaacttctttcgggtatgatcaagaagcaagagaaagcagcggaggcaagaactctcttcctcggttcatgcagccaacacagtcagcgaaagccaaggttcaagaacataactcaccaagatcaagccctgatcttcaagaaagagatgttgtttcggctaagaagagacattcgttgcctggtgttaccaatgggaaacaagtttctcctagaatccaacggtctgcgtctcaagcacaacagggaacaaagggtaaaaacaatctcctccaaagttttctctgcaatcattcatcgcagttttaaacaactgaacaatgtttgattttggttttacttattacagatagaaaatggcagaggtgaaagtcgacccgattgcgacagaaactgaagaagacaaaaagcttaggagactttcggtgttttcgctaaatttgattattggtatgtttttttcaagacaacaatccttaactctagtttcaaacgaccaaagtgacagaagtgcagaggaagaacgaagagtggaggatagtctctcttgtataggatagttttttcttctaacataataccccccactgtttcatttttg

SEQ ID NO: 24589 - DNA, 1863 bp, Arabidopsis thaliana landsberg
tctcgtggacatttgacctagacgggatcgctgaactttaccagtcctacgaagacacaaatctatggtaatcttctaacctccctgtgtttagtggaacaaacttgtatgagctcttacctaattatacgcaaacttgcttctacaaaataaaggaactttgttgagaatcttccaagaggagtacatgtgaattttctgaaagcggaaagaagcttgcaccgttgggccctagaagaccttcagcgaatccacgccgctgaagagctagcctctgaagaaggcggtggtgtagaaatgcatgtcttggaagatgccggtcattgggtaaattaaactaactatgcatctgcttctacattgcttcatctttgttattctattactgaacccgtaaaccagtattcgggttgtgtccgttcaggttcacacggataacccggatggtctcttcaggatcttgtcatcttctttccaggttctcagagcctagaggtgctgaacggtcttggttcggctctttttctgtgtaatacttgtggagaagttaggtctaaaaacagttgacagatacaatatcatatacatcaacactgtgtccgtgtaatgttctgtgtgacataagtaattcagaagtaacatcatatggctgtatcatccggtattattcttgacttgatgtcctttacattgcttttctttttttgtggttcacttagtcagagaaagttctaaagctcaagttcactctacactctacacaccaaaccgacctcacctcttgttcctccatccagtttttattacaactcttggatattaaactgtgaaaaccgaggtgggctcgcaggataccgaggtgggcttgcaggataccgtggtgggcttgcggtataatgaggtgggcttgcggtatacctaggtgggcttgcaggaactcgaggtggtcctccttcaagcataagtttcatttgtgaagaggattcatccacaggcatacctgacccgaccccaacaagggagcttctacgtgtaccctcagtagacagtaacaacttgaatgtccatctcagtacattcggtgtgaagactcgatagaggagaaagacatcgtaccagtttgggaacttcacatatgcatctcccctacaagctcctgccacaatcatctttgcaaattcctctagcggtccaccatttgcaggtacctacagataatgtaagtaagtctttgggatttttaagttaatgcaatcatatttatggttgtaaaagttttacttctctctcttccttccattgcatctcagcaccttcttctagcatgaactttcctccactcatctcactgccaatccacccgtgagtcgcgatagttataccaacgtctccatttagctcgaaacgcagcgtctcatagaagttgactaatgctgcttttgcagcctacacaatgataattaaccttacgtaagctcttacgagatagaagaaagaaggagcggtgaacatttgaagtactaacagaataaagactcatccgtggtagaggcaaccagttttcaaccgatgcattcacaactatccggccattcgtctggtgaaggtatggcaacgctacgtatgtcggataaacattcccccagaagtttatgtcctactcaagaatctcaaactttagtatcgttgccattgaaatgtgatcaaatcacaatacaaaccccgaagatacacataccagcaaatgcggaaacacagtcgtgtcactcacttcctcaaagtaaaaagtgtgtccaagactcgctgtattcactagatgatccactgcatcgaattcatcatcaagcacaaacaacattttcg

SEQ ID NO: 24590 - DNA, 1496 bp, Arabidopsis thaliana landsberg
aaaataacaatatatttaaaataaataatattttgtgtaataagcccccaaattccaaatatctaatccgttctaaatatttcccaaccttagggccccttagacacaataaaaaaaccggttagcaagaagaaaaaaaaagatcgaaaatggaatatcaaactaacttcttaagtggagagttttccccggagaactcttcttcaagctcatggagctcacaagaatcattcttgtgggaagagagtttcttacatcaatcatttgaccaatccttccttttatctagccctactgataactactgtgatgacttctttgcatttgaatcatcaatcataaaagaagaaggaaaagaagccaccgtggcggccgaggaggaggagaagtcatacagaggagtgaggaaacggccgtgggggaaattcgcggccgagataagagactcaacgaggaaagggataagagtgtggcttgggacattcgacaccgcggaggcggcggctctcgcttatgatcaggcggctttcgctttgaaaggcagcctcgcagtactcaatttccccgcggatgtcgttgaagaatctctccggaagatggagaatgtgaatctcaatgatggagagtctccggtgatagccttgaagagaaaacactccatgagaaaccgtcctagaggaaagaagaaatcttcttcttcttcgacgttgacatcttctccttcttcctcctcctcctattcatcttcttcgtcttcttcttctttgtcgtcaagaagtagaaaacagagtgttgttatgacgcaagaaagtaatacaacacttgtggttcttgaggatttaggtgctgaatacttagaagagcttatgagatcatgttcttgataatctctgcttctacaatttttatgtaatttgagtgagctctgtttttaaaaaaaaaaatccgttgaaaagttttggaagagatgtgatggccgtgtatagatgtcaactatttgcgttactgttggaaacatgtatagatgtgtatttctttatcttggtgcttaattttaatatttatttttgccataattctacaaaaccgatccgagaactttaacttaatctactaaaatttctcttaaacttcaattatccgagaaaaaaatagtcaaaagaaacctatgtcaaataattaaatgtaaagatactttaaaagttcttatgatgaagtcaaaattagaaacaaagtttaaaatagtcattttctttataaaattttttaaggacgcaagctcttcgcccatattttcttggttattgaatgggttaaaatttaatcttcgaaagtattaaaaacgtatatttgagaaaaaatatgattttgtgagctaagtttgttaccgtctgcagcatctcaatggactatgcgtccacgtgcagaatttataatttgtaatcagaaattttaataagtagttgtccgtacaacgtttttttatatacaaatat

SEQ ID NO: 24591 - DNA, 3893 bp, Arabidopsis thaliana landsberg
agaccaacaatagagacttaattctgattatattgtggggctaaactcaatagcagaaacagacaatatttggtttaccttttcgaaactaaagtaaaattcaaaggttcttatgccatagcaagaactacaaggtgcgacgcatagagcaaagattcatctgctaatctattactcagccagccattaaccacgttcatagcacttgaattttcttagcacataatatcccaataagggcttttctctatagtgctccttcatgttaaaaagacacattgaggatgatgagtattgctttaggtaactgacatggttaaacagcataagaaagaaacaagaggggccttacaatggttgactatacgggtaaaagtaaacacagcagcttaagaggcaggaccatcttttttcaggacataactttttcttgtagtagtcaatagattttgaatcttcagattgcttggcattgcttaagacctggaaatgaagcgaaagggattgcaaatcgattgtatgatctcactgaatggtctcaataaggaatacaatacatacctgtttgagaccttcaaggtctaaatcccagtaataagaatcagaaaattcatcaatatcatcctgtaattttgtccttgaagcatcagtgaggtggaggaagtaccttcaaaagtggccgcaaaagctttttagttagacacgacaagcaaaagaaaccctaaagggttgaataccataagaaaaagttgataggactcactttggcagcaaaggaagcatcttatttcgtgaacaacaatctaagacccatgaaaagtggatgacatctcgctgacgctttgctgcctgatactttattcctgaaatagtatctcattgtcatgctcgtattattaaaattgttttgagactcactcatgtgtacaaaagggttggggaaaaatcaatatgtaatggtaagaaagtacgtaccactgctttctgctgcaatgcaatgagtcactgagttgtttaagttcattgaaaacttccctccgttttcaaccaccattttgtggaatgtctcaagagaatgggaccgaggcacgttaacaaaatctgttagatttgtcaaggtggtaaagaacaatatagtatgacaaagatatcaaagtttgtaagttaaagcaatttcagaaacttatccatgtgaaaaggtgtctaattctaatagagaaagacagctgaagatgcaatcagtaagaaaacggtacccatgtgataatgaaacagagagaagaaaactcattttaaaacatgtcaaggatacaaaatatcatatttgagaagattgaggtcttgcccttgatatccgatacatcagtttgaataaactgagagggaacaagagagacattctttttctctcctctcttggaggatttattgactttcggattgtcctgtgtgctttcagactccttctgtttctgtgtggtgccgttactcgaattcaccaattccacaaaagctgcaaagtcaacatcagtcggacatataaagtgaaagcaaatcggttatttcaactttcatgaaaatgggaacattggagaatttctttagttcttttactcaccctgcacatcaagacattcatgccaaggcttgtcatatcttactttatcaatacgaggaaacctcagactgtaaggtgcaacaaacacctgaaaagagcagagttttacataaaatagagcatatgcattttaagcgacaaatctgcattgcaagaattaaattaagaaatgtaagagttaactggctaatcttcacatcacatcttatagacatacctcagaccttatcgtcctgatatcactagtgattgaaagtattattgatctgcaaaaaaaggaagagaaaagatatgagcgcgaataatagtattcagtgatcccaattcttctgcttcagatgagcaaaaggaggtaattgacagaaaactgacttttccgggctgtcaatccaaacatccggtctctctttgaagtgattagtgacctgatagaagcttggtggagccttctttgggtgctcattttttctgaaagacaagtaaaatgaaaaaagaggcagtgttctcattcttagaatatcataccacaaaaacatattattttatatttcttttgttttaatgagatgagaaagcatgtaaatgattacgtctttcacctgaaataaggcttcagtttgcttacaacagtgttaagctcatcatcagaaagcccagtgccaactctacaaaaggacataaactctgcaaaaaagagaatagcttatcattgataattagatctggaatgtctaggcaaacaactaacaattccgataacatgaaaagccctaaggtcttcatggcgcatgttctctcatggctgtttctactgacaatctgatttcatcttatacgagaaatgtgaaaccatataaatacttaccgcctgggatatacatttgcctctgcccggtcagccaaggctacaagaaactgtgctacctctcctccacgacgtccggagccatagtatcctcctggcaaagatgtaaaattcccaataagatccaatggacatgaccttcatctttaaacaagtaaaagtaaacataatattaagtacagacctattataagaacatccaggtcagcaccagcccggatatattcaggcttcaatttcatccacttgccactacgatctccaggttcccattttgattccaggtctttaagcacaattccttcatctctgaggacaaagaagaaggattggaaataagaacgcgcatctgtgaagaaaaccatataatgtctctgtactagaggttagattctgtcaagcaagtatcactgttcacacgaggccaagaaggcaccatccaaacgttttgcacaaatcatgaatagtggatagagaaactttggctgcattaagaattaaaaagaaacctgttttcaactgtttctttgaaaaatcgctcaacatcagcagcagcatgaacaacaatagaccaactaggttcccctgcaaaaggattgttcacgtatccattgatttaactctgtcgcacttgtgaacctcgcacagtcaactagaatcttagtagtccttacctgaagggcggtgaacattgagaccaccttcaggtactaaaacttcgagccgaccttttaaaggtttgaccactttcttcagcagttcatgccgttccttcaaactctggtggatgacgctagtatcgccaacataaagaacatcaaaggcaacatctagtacagggtcaaggaaaataatatttctaaagtcgttttgtcagggaattcttaagtgtgggcattaacttctcctcgtaaggatacaacacaactgcattagcagataaaagaacatcagagtttgtagtcggatcctcaaacaacaaaagtaaacaggtgggacttcgcatatgaacctgtttatggctgtcaagaccctcccttgctgccttggctgtgaacaagagtacaagaatcaaatctactggaagcaagactaagcttttcaacataaggatattgattagacgccaaacctatttcctgattcgaaccaaactcagcaaaccgattcagagatgtatcccagaccaacatttcaccatcaaggatacacctatatggcaaacaaaaagaaaatgaaagattgtatatctcataattccaagcttctaaaaccttccagagcctaaaaaagagcagcaactggattcttacttgtccaccaatatattttgtacaataagatccgacatggcatgtgcgtattcagaatggtcaaggaagttcctgcacatcactaacaaaagtaagt

SEQ ID NO: 24592 - DNA, 792 bp, Arabidopsis thaliana landsberg
aggaaaaataacatgttccagcctgcaaacagaatcgatgtagcactaagcaatagactttctacaggggggatcaggccttacatttatacggaacgacacatcagtgaaacatttttgaaacttattagagagtgttttagcatgactaaagagccatatttgcttctcaatgggagaaatagatattaatttggtaagcaagcattgtaaagacagtgagattccaaaaacttcacatagaaagtttaatcgtaagaatctagttaacattcttacgctggcaatcttgaggaagctggttggacgcaaatatcaaaagctcaacgccctcgaggtttccctttagggctaaatctttctgaatcatgttatctaccagaggcttataatttttctcataactgtgtgtcacaataacatttaatatatttcgtcagtggattaggaaataaaacattgaaacgaccaaaaacagaataaccatgtgaaacaaaacacaattatatacagttacctctcgatgtccttggcaaagaagaaaagagccacatgctgttccttagcacctgtatcttgaaactgtgcaggccatgaactaagcctgggtacttcattcaaggtgactttttcaggaaattgtttcaccacttcaaccaccttaggtgatgctaaggttgaaagatacgcttgtattccactatgcattgctgacaaatttctgcttttctgcacctccaagtcccctctggtcaaaggaaatagaaagtttatctagaagtaattaaacaa

SEQ ID NO: 24593 - DNA, 3068 bp, Arabidopsis thaliana landsberg
atagttctaacgtctcatgtggtttttacatttttgtggcatctttatcttatacatccaaattccaatgttggtcaccgatcatctgcatttgtctttacgtcttatgacccaaaaatggtcaatcatagaaacatagtcaaccaactccttgccgttgagcaactcaaactcatctttttcgtgccggcgaaaacttcggttatgaaattattttcaacgtcaccttatctttttaccgtgtccaatttattttccattgatttgtttatggaagatcatttgactagccgtaacctcacatgtttcagaatgctcaatagtatttgttttaaagctctcattgatttactgtcgtttccccttatctatcatgttttgatatcgaggaatgtctcttttatttgcgttttaaactttataatctttgtgttattttttatatatttggtttgatttaaatgaataaaaacaagtctttatctaaacacaaaaggacccaaaaatggtcaaatttgggtaggtctaagagtgggctgtcaatctccaactaaccatgttttgatgtcccaacaagctcttgccttcagatttgctagtcctaattattctttgaaattataattcataataactaatgacctaccaacttcatcatcttccactaatctaccgagtaacatgttaggatttagccaaatgtcatttccttagttttggttacaaccacaataaaaattattatagtaccctatatatattatcattcaaccgtagaacatgcacaacgttgacaaaataccccaaaaatgtcatttcctttgttttactcttattttctaaacaggtgattttggattaaaggttacttaattttggattttattataatcgtcatgtaaattttctaatggtcaagagaagaagacttcaacgagaaacgacttttttggcattgaccaacaaaaaagtgccactaaactaccatcacgggagtaattacaaaagctttgcgtagtcaaacattcggacatcaaagacaaaaagtacacaatataacaattttaggtggaaaaaacaaccaaaaacaaaaatttgacgcgttttcttgttaacaggagtattggttaatacttaatagctttaactatgcattgtaaaaataaatcataaaaggatcaatgacgattttgattgtttagaaaaaaaaattatttcaaaaagattgattttttaggttttcaatgcaatagttattagttataattgataaattgtaaactttaatacaaattattgaatatcattggtttagagttattgaaaattgtaaatcacaaagaacaatacatttaaaaacaacatttaatatgttttcttaatatttgtgtttttcctaaaagattaaacaaaaaggaacagaaagaatatgaaataagaaaaaatgcactagctttttttgtttgagttaaaaaggactatatttattaagaggtaaatagtatatcatttttacatgttttaacgctatgtaaacgtgattaagttacttgttatcaaataatcaaaattttatgattttcatgtttttgaaaaatgatattgccgtatactgtgaatgtgtaaaaatataggtgaaaaaaacaaacgccaacaatctattatgcttaataatgactcatatataagaatagtttgctcatttcttatgctttgttaattgttgttgtatgctcagagaggattgatgtttctagtgatgtgctaggaatgttctcatgtataggatgtatcggatcttgaggttaagaaatagagattcacatttccattcttaacacaacataaataaggattaaggctaatgaaaaagagttcacatattacacattttactaattaatcatggtgattagataaaggtaacaactaaaagtcattttaaccgcactcaatattacgagcttgttagaacactgtaacacaagtgttctcttccagtttatcaatggaggaaactggtaaaatcccatggacgatcttcttctctcatcctctgttctcttgtttcatttcactctacactatatttcttctttatttccctcaagattctcttcgaattcttatttcccatgtccctctcctcatcggagctttcttaatctcctgcctccatctcgggtcgacccggaaatccattgcccgacccggaagcaatgaggattcgataggacctgaactcaaaacgggtctcggtttaaacccggattttatggaatggaactttaaattgggagctccattggaagttattcacaaagaagaagaagaacagtcgatgacgggtgtaaaagatccgacccggttcgtgatgatcaagaggtttccatcgttatcgatgtttaacccggaatctgattccgaattggaccgcgatttcccggttatgagtgaaaatgatccaacccggttcgtgaggctggaaaggtcaattaaaccggaatctgattggattacgactccgaattggacaacaatttggttattgatgtaaatgatcgaactcggttcgtgaaggtggagatattcccaccgttgtcaatctttaaaccggattcgaattccggttcgccggagaaattgcgttgtatatacgaaatcaaaacggaaacgctttttgtagttttatattcctggagaacaatattctaacaacttgttttggcagcaatattctgatttctgagtataatttgattcgtcaagtaaaatctaattttataattctcaacaaacaaactcgaatttgatgtctaatgtgtaatgtcgtcacgaattacgtataacatattaaaagttgtcgacaaagaaaatgaaatacatttccaccaaatataataagtaacaacatggtcagattcagagaggacgatctggcttggccaccaagattgtttgacaagtatttatttaactactatactttctcttccacaatattaataatgttttaaatgtcattattaatacgtgacgaaactgtagctcttgaataaatatattaa

SEQ ID NO: 24594 - DNA, 3313 bp, Arabidopsis thaliana landsberg
aacaacacttcatgaaattcgattattctggatttcttttttagaacatgtaattcatgtgactatttatgtggttagagtctctactatattttggagtatcccttaggtcttagctgtacatgactacatcatgttaccttggatagagatagctagagttttagatataaacattgtataatctttttatatgattctgataccgatcataaaccaattatgagaagtagcaaaaaaataaaattatctagtgattatatccatcattttaaaatttaaatcttcatttatgatcaaattagggcaaagatcttcactctcttttttttgtcaataaagatcttcaccctctttagtttcaaaactctcatgtaaaaccaaaatttagatatgagaatcgtgtaccgctaaaatccatcgttaggctccaatatacctcaaagctgaaaaaatcactggcccattgagtttacgacccaaaccaagagtcccaggtaaataaataaccaaggtggaataaagaataaaaatcatttttggtgacaccgacaaagcaccaaatttccaaccactacttccatgtaaacccatcataacaaaacaccaaagaagatcctacttcatatctcactcattcatttattaataccaaaattaattatacatggtattttgattacgaagacatgctgaatgaaagaaatatactatattgttttacaaaaagaaagaaaaaagactttaaaaagagttatgtaataccgaaagtgattgttgcatttgagattatcaaattatacactgaatactacttaattatcgttacaaataacatttggaagacctattggccggttttatttttgaatattccactcagtttaacaaatatataattttgacctttcgccggagaaaaaaaaaaaccaaacttacttagtaagaagcactttccattattattatctctgttcccccaccacatttcatattcacataataattatgttcaataatacaacaacctccttcggctccggccccggcatcgtcgtcgtcccaactcccgccacaacagttcccaccaccgacttccccggtaccaccatcacttccaactccaccttcattatcatcggacctccaccaccgttcccagctcctccccggagcatcgaccttactcctctcaaactaatcttcgtcgtcatcgccttcgtcgccgttcccgctttagtttacgctctcttcttcaacggcccatgttcttcctcccgccgcaactcctcttcttccgcgcaccagctcttcctccgacgatacacctcacgccaccgtcgacaccccgccgatcaccgagaccaccgtaacttcggaatccggagggaaattccacaaagatacacattctaaagagattggaaacgagtgctccgtgtgtctcatggtgttcacgacagcgatgaactccggaactaagcgagtgtaacacgcgtccacgtgttatgtattgagacgtggcttaaggatcatcctaattgtcccatttgtcgaactgacgtctccgttaaacaacaaaccgaagctcccaacgttcccgttaacgttaacggaaacgtgaatcgcagcggcggaaaccgtcgcgtttcggccactagtagagatgacgattggcgtcaaggtttacctgatgcttctagtttagtttgaattttttatttaataaaatttatttctctgtttttttccacagatttttaaagatattttgtaaacaaattacgtcaatttcgaaaaaattatgtccgttaaattaatttattttatgtaattggttgaatcgtaactccgtataagcaactgtgagtgtgtctgtgcgtgatgtgaaatctgacattgactcacagcaagctcatccaacggtgtatgaagatcttatactaatcggacggttattaattcatacacgtcttcccatcagaacgctgtcgttttggtgttcaccaaccgattttttcaaaattaaaaaaccaaactttcgtcttcttcccggctttactctctttctctctccaccgtcggctcagatctagacggaaatgtgccggtgaaatcgaatcatgaaaagatctcacatttcgtctcctcgttcttattcacgaccagcgatttcaatcttcggtgtcttcctcttgtttcttctggttttaacactaagctctcgaaaaccatcagattcatcctccggtttagctccaaatcgaaacttagccacaaaatcgacgattccgaggtttgcgtatttggtaacgggaacgaaaggagatgggaaacgagtgaagcggctgcttaaagcaatacatcatccgagaaattactatctgcttcatttggatctcgaagcttcagatgaagaaagaattgagctggcgaagtatgtgagatcggagaagaaaaagtttgagaatgttatggtaatgggtttagctgatttggttacggagaaaggtccaacgatgttagctagtacgcttcatggtgttgccattttgttgaagaaagctaaggattgggattggtttattaatcttagtgcttctgattatcctttaatgcctcaagatggtaaatgttcaatctttaaatcttttcttcatgttttgtgtcttagtttggtattgataagttcaatggagattcatagagaaaatgttcttgttctgttatccaaaatcgaaattaggagttacgattctgcttcttatatggattggctcatgtatattggttcatcattcttatgtatggcctggttggttttcatgtagaaaatgttgtacattgtattgtatatgaatcaagaaaatcttaatgcttttgattgtcctgtttgatgtgtccttcatatcaaagcaaggatttaaagtaaataaaagtagaagttgaacttcctgtctcttggagtattgacttgtataagaattaggaagagatatgatgtatatgatgtttaattgcttctgtgtattgaatttgactagcctccgaatactggacttatcgattcttattttacagtttaatgatcttattgtacttttggctctttttgtggtttcagatattttgcatatattctcatacttgccacgctacctgaactttatcgagcacacaagcaacatcggttggaaagagtgagggagctaatattatgtatacataccttgaatgttctctgttttatatttaggaacaaatcatttgagttgcttcttgtataacagctctaactatatattgtgtagga

SEQ ID NO: 24595 - DNA, 1183 bp, Arabidopsis thaliana landsberg
tctttatctgactcccatattatgctatctaaccatgactcatcccacatatccctatcttgcaatgcaagtccactcaagcgcccacgagcgtcactattaagctgctttaaattctcccgtccagcatcgccattttccctataatgatcctcatcccactgagattctaatctaaggagttgtggatgatgtctacttttgttagtggactcatttgtagactgggaacctcttgagccaaaagactccaacggatttacaaaaaaaggctcgagcatgttgttattgtccccttgagtttgccctccagagttcatcacatttaagctttcttgttcagtcactgaatttgaagccctcacctgtaccattatacctgctgactcaagtccagatttgaagccctcacaacaattagcactaaattgaggagaaatttcccagagtattagatgttcccattcttgctggtctagagggaaaacttccattgttaattgagactgacagagagatgaattatcgtcttttaagtcctgcttcaacagttcacccatgatacatgaatcccttcctagcttggtaaactctctcgattctgatgtagtatcccttactatgccagattttaccagctgtaaacgctctctgattggtaagggaacatccagctgaatcagatcagtttttttcccatgagtatcaatcctgccatggctcttcaggagtacctcctcatcgtcttcaacaagctcagatatatccatagatttgtatttgtctgtacgaaagaagtctatgatgtaagagttccacatgaagaagtgaattacaaaaaaaaaaaaaaaaaggaatgctgagacaacagaaacgataagaaaaggagaaaattggacaaaacatggaatttgcctggaaaattaaatagaatgaatcacttcatatttgtggcatcgaatacacagatctagcacattcttgccaaaaagagactgagccgcataaaaggaaaaggtctttttgtttcaacacttagccctttagaattgaaagggaaataaaaaatggagaaacgttttttgatggacagcaccaaaaaaactcaatagagagttaaagaagaaacaaaaagaggaagaacattccagatcacatacctctacaagtgacatatcatttt

SEQ ID NO: 24596 - DNA, 2059 bp, Arabidopsis thaliana landsberg
  unsure (1)..(2059): unsure at all n locations
aatttaatcaaggtgattactaattttgctaattatttggtttaaattaaaagtcggattatttttggataaagaaaggcgacgcgtgtcagacttaagacaatgtaagagatgaggaacttgtggcttcagatagagaatcaacactgtaaatatcttgagacaatttccagatattattggcaggattttataataacacaaaactagtatatataaacttttatatatccacaatggtttccaaatcaattaccaaaataaatgaagtctattaaaagaaacaaacaaaaaagataggaagaaggctttgtggtctcagcaatcatttttggcattatagtagccattgttgttattaagacaaggatttagagtagctttctttcaccattgtcttaacaaaaagctctcctgctctatatgaagatcttacctgcaaaaagtatatatccaatatcaaacaagtacatttctgtatcttctatgttctcagatattttttgacataaagagtaagaaatagtttgtggctttaccagtggaccacttgcaacataacgaaatcctattgattctccgtatgttttccagaaatcaaacttctcaggtgtgacatactctttcacagtcagatgcaatggagttggcttcattgtggaacaagagaaacggttttaaatcgtagatgttctttgaaatttgggatctttctatcttggaaataggaatattgcgaatgatgtggggaatgttgaagtgannnnnnnnnnnnnnnnnnnnngccaagtgttagaatatcaacatctatagctcttagatcagccattgcttccttcaactcttcgtctgtttctccaagaccaagcattatggatgtctttgtgatcattccaggtttgctgatctttgcatgtttcaaaactgacatgctctgctcatatctgcattctccacattatatccacattaaaatggagatttactacaactaaagatgcagaacaccacctatgtctcactttaggagatatttgactgtgtaatatgagattgacatcccggagcagaggatcaattcactgctcagcccatctatgccataaccaaatttgcagaacatataaaaaaatgaagaacaagaaacagcactcacccagccctaggatccctcacaagtcgctggagccttttcacagtctcgacattgtgagcaaaaacatccaatcccgagtgcacaagagtgtcgacagcctccaaatccccacgaaaatcagaagttaagcattctatcattatatccggcttatgtctctacagagatgagatatatattttcattttcataaatactctgaaacaacattcgagaaatgcacaaaaaggtatgcttaaataacataatgcataaacaaatagaatattaataaccttcatagctttgacagtctgcgcaaaatgtccacttccaccatcaggtatatcgtcacggtctacgctggtaataactatgtagtctacactgcaacaaaggaaaatgcaaaatagcatatcatgatacacccatcataaattaacaaagatgcagtagtgactgttgagagacactatttttaattttcatcccctctccatttatcctatctagttaaaaattctgaacacgaccatgaagagaatctaaaggacaatataagcagattactcagatcaggaatcaaataaaagttacatacccccaactggctatggccttggcagtgttctctggttccattgggtcaggaggaggaggatttctacttgttttaacagcacagaatctacagccacgagtacaagtatcaccaagaaccatgatggttgcagttgctacaccatcaccacctccattccaacactacacatcacataatctaattttcagaaaaaaatcacaaatttagagtaatgatggttgaactagcatgtagtttactcataatttctcatacccacaattcataaaaccgataccttttaataaccatcttcgagatcataaaccccaaaatggaaa

SEQ ID NO: 24597 - DNA, 2862 bp, Arabidopsis thaliana landsberg
ttaaatttgtcttttcctgtttcttgactgagccttaatgatctccaggtcccatctatgatcacaagaaaactcttccatcaggttttctcgtacatcaatgtgcagctctttaataggtacaaaaatatatcgcataggacacaagtacctatgtttggttatgacgtagcttgacttgtaaagtttatcttctggcagtttgttgcttcgccgagagtgttgttcagttagcaatggagaatacctaaaaatgggcttgcatgaattagagcaatggtgcctaaaggcagatgacgaggtaggctataaagcattaataaccaaatcatgcaaagatgaaaaataagacaaaagagattaacttacataattctgttcttttttgtctcctacaggcaacacgatcaccatgggatgaacttcaacacataaggcaagcagtgatgtttctggtatagcatcgaaccatatctgttggttaaagtacaaaactagtgaacaaaattcgatatttgatatacactatcactctacaggtctcacatcaaaagacacagaaatcattggacgaaatcgcaaaagagatatgcccggtaaagaccttaaaccaaaaatttctgcagagcatatagaaggatcttaatatgacacaattatctattagtggttactcctgaaacactatacagttggatacatgagcaaacgggtgaacgatcttatgaaagtaaaagcatctagagaatgacaagatggcataactaaaccatcctacatttctacttccagtcactgtcccctgatttgttgatttgttgctcaggtactaagcattccacaagtatatcgaatcgggactatgttttgggacgacaaatacggaactcaaggactctcccccgaggtaagtaatggatcaacctaactaactccagaaattctcttcaaacaccatgaaccaggattgtatccaaattacacaaaactaagattgggctcatgatccaacgatttgtgccgataataggtgatcaatcagatgaggaaactaatgacggaagattcagcgaacatgacttacccttctttcttgctagacgtcgattcaaggtacgcaaaaaacaaaattctcgctttcttctcagtttctctccctaattactctcaatgcatgtttcagcattcctttctcagtggaagatgtttcgcaatccttccacggcggtaacattagcctctccgacgtcgatccatcgccgcttctccgccagcgatctgattttcacttcttattccagacattgccggaataaaggaagagaaacgtcggagagaaacttctgtctcatagaaggttccaacagctgagaatcttttataatttattaattaagccacgaattttccatatattacagaaatggaagcttttcaattttttctttcaaattttttttttctgtcacatgaagcaagaagcttctactcttttatgattcctttaatttttcatttggtttggggttctttgctttttatcacttaaaatttacattgtgtatagatagagttttgattcatatcgtacatggtatactcgtttttgatacacatgatgtaatgaatattatatgtgttaatgtaattggatttgtaaaattttggatttgacacaaaaggaatatcaaaaaacaaatcattgttacatttggtccttattaggataatttgtggatttacaatttttttttccctttaaatataatttaacattaaaaaaaacactacttactaataaaatgatttgtattagtattttcgttgattcgttgtattaccatctgaatttagattcacaaaatgcatattgttgacaaaaaatgaatgttgaggtttgtgcacttcggattagtacttgattccatatgtgtatgatcaaagccgtcgacgagactaagctaataaaacttctgtttgcggctattttttgattatatataagatcagccatatttttagcaaaattattaatgtagattagtggcaaaaggcatgatggcatagtttgggcatggtggcatagtttgagagtttgagttttttacctctattttcattagttttatcaatttaaatcatgatagtaatatctaaaattatttatttatccaaacaaaacagtgggcatgttctataataaggcgatttttgagggatcactaagataattaatggacatcttttattagtgctttggtttgaaagcaaactcgctaagctagcaagagggtttagctaaaacccactctctgttaaaaatcacagcactgccattaaaatttctcagatagaagaagatggagtgtgtagttccattccggcgatgcttctgtctcaatccgccggagatacgccaccgtatcgttaaccacaaccaccgaaatctccatatttctctctcctcctcctctttcgcatcaggtcgtcatttcatttcctcttctcttcttagtcaatcaacccagctttatatcctgactcgctcttacgtcaattccagggattttgcctctttctaataataagtatcgatttgttggtcctctagcacagaggagttccttgcatcgccgtacggactctctcaagcaccttcctttttccgtggttagttctcagaaatttcgttttttttttttccttttcatttcagagatatttgaaattttcatataagtatgtgaatgaggagttgctgtggaccctcctcttggtacccacctcccatcgtgtggtctaccccaatgcgggcccgtgtatcttactctttaagggccttcccaccccccttttctcgaa

SEQ ID NO: 24598 - DNA, 1175 bp, Arabidopsis thaliana landsberg
taactcctcaactctgcttatttacataagaaaaaaaaaatcaattaatgggtaatttgacagacctgagaatataaccaaagcatatatatgacctgctttgtgctcatattagacaagtttcgggccatacgcactcattagaacgaaatgattgaatttggtggaatcatttaagacttatggatttcaaattacataactcacttgagtcattttatttactttttttttttgtttttttttgcaattcttgttgtaatgaaatagtggaaatggtttcaatttttaactgttccaaaattattttataataagtgttgttttaggttttaatataaaattttggtaaaagttccaaattttatttatactgttttaatgtgttaactagaatgaattaatcatagtaaaacaatttttttttaatttgtagtatttaaaaaaaacgaacacttgatctgaaatgcatggagtattttcttagttacgttttcataggtgagaggttccatttgacatgtttttttatatattttattgaaatataggaatatgcatttaaatcttcttctgccctcaatgcatgatcgatcttcttgatactagtaacaataaatgtatcttgaaaattaagaataaatcaaatagaaatgggataccagttgtgcattaactaggtgtgtagaaaaaagaaaaaaatgaacctcgagcaacacgttatcatatattcatatttaaataacaatatttttcaattgccaaattgcttttttcttaaaaacaatctttttgataaaaaaaattcagttgccaaattgtgtagtatttacaatataaatataacgtatcggtctacgagctaagacacaaaagcaatcttctactcatttactgttctgtttcactttctctctctctgtatactctctaaatgatggcaaaaaactgtaatttagtcagtgttctatgtgtatttttggtattgaccctctttaacaaacccatcaccgtcgccgggcagaatattccggcggtggccttgttcacctttggtgactccaacttcgacgccggaaacaaacagactctcaccaaaaccttactccctcaaactttctggccgtatggaaaatcccgtgatgatcccaacggcatattcttcgacggcctca

SEQ ID NO: 24599 - DNA, 3372 bp, Arabidopsis thaliana landsberg
agagtcagtattttctggacggatataagacgttgccgtttccgtttgagagcgtgggtttgggctcatttggaaagcccatggaactggagatgaagaaaacggtgtcgtttgaaggattcttgcggatgctaagatcgtggtctgccgttggtgctgctaaagaaaaaggagtagacttattgtcggacaatgtagtcaaagagctcgagacggcttggggtggttatgagctggttcgaaccattgtttacaagacgtttatgctcgcaggaaccgttccttagaaactagcttctttttaatttggtatggctaagtctgaaacttgatatcttaagggtatttgaaacctcatgaaataacaaaaacaggataaacataaaaagtttattttaccttttcatcgaacatcaaaacgaacatgtgaaaacgtttgtaatgttttcgctttatttcaacaaacatagattgtgataaagacgcatatgattattagagaaacatactttgcaccgatatatattactgaactggtttgcttatttagtcttatgagaagattaagggcatctgaaaccaagtgggggaattatacggcagagtctaagaacttggttaactctcacattgatagtcaagaaattaaagattgtgattctaacggcattgcagatgcaggcagatgccgtagcagcgtcaagcccagtcactagagtgcaacatggcaatactgattgattgttgatgaggattaagctgaggttaagcacgttggtacaagataggaattgggtcgagtctctgggacacaccggagcttgaggtggaggagcttgggcctttgtgaagacaaggaagacgaggttaatggtgaggaagagagctatagcgtttttcatcatgttctttgaagccatgttttgaaaatgttaattatgctctctctcttttgtttagttctgagaggagtattgagtatttagtttgggaggtgagagtttgtatttatagttgttagaacatttggttagattaccgtttgatatttcttttggatgaaagtttacaaaaataaaaaataatgccaacttttcggaaaattaatttgaatttcgcattttagccaaaagtaaaaaaagaagaagaagatactatataatcaactctcaagatatttaaaccttatctactcatctagagaagaggttaggcaaggaacaatttgtcaatgcccaaaacaatacaaactctatcaaagttgttattcttgctgaacgcacactattagtattaatttaacaaatgtcttacaatagagttttggtgaccaaggtgtaatttgaaaatttgccaagtctacgaataaaaggtttggcgatgaaattaatgtaaaacgtctacccaaataaagtcaaattccacattccataacgtacttaatcggtcatcaaaatttgcaatagaattagtgatttactcatattcatatccaaagttctattgaatatgaataaatttactcatatgagtcatatccaaagtcccatttagtcgataatttagtaaatttctataatatatatggatgaacatctcagtattattatttttaattctgattagttaaaaattgttatagatgctaactgcctactcttattgtgattgaacaaaataaacaattaacactggccaacgtcaattcttcttcctttgtttttttttcataactcagggttttgttgacgaatgagttttgttgaattaaaacatttattccctacgatactacccctaatcaggactttataaaggatacaatttacattcatctctttaaaatctttgttgaactcattgctgtaaatctgctaaaaaaagctcttagcatgggattattcagtttcttacttacatttaatgtgggaagcaatctctaggaagaggtatatgttctaattgatattaccaatcaaaattgctccagagacaacctagtggaaaaatgtattttttgccttttccacttctctcatcaggaatgtaattctcggtgactagctttttgagctcattatgctagcatgtagagcaattttcgacgtttggctggtacagtgatgtttgtttgtggtaggcatttggttcaagcaaatatgaaaaagatagtaatagaacagccgagcatgtgaaacacaatccaagattcatttatttcaaacataacataaagacataattacttctttttttaaacacatatagttgcaccatgaaccgatattacggaacttgtatacttattttagtgatcttattacatataagattctgcatattgtttacttataaaaggcagttgaaaccaggttgtaccggcaaacgacagagaccaaggagcccattaagcctcaaattgaggttgacggtgatgccgagaaggttaaggatattgagtcttacggcctcgcatgcacatacagacacaagaggagtattattaagaccagctaagatagaacaacatcgggccacgttgctggtggtgagggagatgagaccaagtacgttgacgcaaatccccaagtcagatcggttaagagaacacacaggttgggctgaggtgaaacccaagaagacgagtttgaaggtgaggaagagagccatgattgttgtcatattctttgaagccatattgtgtaaatgctaaataagaatttgatgattattgtagttggagagattgagatgtgtgagttatattagtcttggaggtgagggtttgtatttatactgtttagaagctttagttggtttacgtagaatattgtgactattataagttctctaacgtaaagtcatttttttttttttttgataaattctaacaaaaagttaattgacataattgcaagtacggttcaaacgtagaatagcgaaatcgtggaaaatgaggcacaccaaaagagatatttctcaaaaattctcaaaaaacatttggttacagatcgtatttattttttacttatacaggattgtgaaattgattaattaatgaaaaatatgaattaataaaaattgtgatcagaaaaaaagacatgcggaatcacaaattcattcattctgttaattgagtcagattgatacgaaatgtttgctcgcatcattaaatttactagccgaaccttttcctctagaatgtctgaaactgcaacttgggccacatgtatgtagagggaccaaaagctacaactgtggctaggtatatcattatttatatatgcttaggtctacaaaataatcaatatatccggttccttgaactagaatccgcattagttgttcattctttttgttaagggtggtcct

SEQ ID NO: 24600 - DNA, 1774 bp, Arabidopsis thaliana landsberg
  unsure (1)..(1774): unsure at all n locations
aacccatggttttgttggtgcagatctgtctgcactgtgttgtgaggcagcctttgtctgcttaaggcggcatcttgatcagagttcctcttctagcaatttgccccttgaagaagcacctattgctgagtcctcgtcaaatatgtcagacatatcatctgatagttcggattctgcatcgtcatgtatcacaatttcagccacaacttcaggggctcagcgttcatttagtttggatgagacagtttccctagtagcggatgatattcaaaacaatggcaactcttgttctgaacagatgcttagaaaacaaggagaacataccttaagtgttggatttgaagattttgaaaatgctaagaccaaaatcagacctagtgccatgcgagaggtatggactttcttttttcctcctagaaaattgagctgactttatgatgagctattcccaacacttcgcattattgtttcccctcattctgactcattgtctctagtttttctgatctgcttgagatgatgatctcttcagtttattcatatcatatatcaaattgcacggatgtaaacattatatcattatactgttatggtgcaaactattggctttgtttttatgtcacttcctccgatattctctggtttgaatagtaactttaacatttttcaggtttggatttttttataatctaacagtgcttggtctagtgtcttggtagttttcttttaagattcatttgtctgttgcctagagctttttatttagagatgttccaatgctaaaccatactttactcgatagatagtctaattgctggttggttggttggtgtgcaactctcaagtgatattagaggttcctaaagttaactgggaagatgttggtggccaaaatgaggtgaaaaatcagctaatggaagcagtagaatggcctcaaaaacatcaggacgcattcaagagaataggtacaaggccaccaagtgggatactgatgtttggtcctcctggatgtagcaagacccttatggcacgtgcagtagcttctgaagccaagctgaattttcttgctgtcaaaggtccagaactattcagcaaatgggttggtgaatccgaaaaggctgttaggtccctattcgcaaaggcaagagcaaatgccccctccattatctttttcgatgagatagatagtcttgcctccattagggggaaagaaaatgatggggtgtcagtttcagacagagttatgagccaacttcttgtggagctcgatggttagtaacaacaactctttggattgatatctagatgcagttgtgttgtcaaattgcagggagctgattgcttaaatgtggaactcaggtttgnnnnnnnnnnnnnnnnnnnnnnnnnnnnctgctacaaaccggccagacaagatcgattctgccctactaagacctggtaaattactttctttcactgattcttttgattttcacaaacaaatttgaatgctcgtttggtgaaattgaatgttataatgcttcagggcgctttgatcgcttgctatatgtcggacctcctaatgaaactgatcgcgaagcaatactcaaaatccatttgcgtaaaatcccatgcagctctgatatttgtttaaaggaattggcttccattaccaaaggctatacaggagctgacatatcattgatatgcagagaagcagctattgctgcacttgaggttagatatatactagtccttgtttccagcactaagcctgaaatttgttgcaagt

SEQ ID NO: 24601 - DNA, 977 bp, Arabidopsis thaliana landsberg
gaccaagcgtctcaggaaacttggcctctttccttaggtaagctcaagaagctagaaacacttctcgatatacacaaccaatgataagtggtgagattccttctgatttagggaattgctctgagcttgttgatctcttcttgtacgagaatagcttgtctggttccatccctcgagaaatcggacagctaacgaaactggaacagctgtttctatggcagaacagcctcgttggtggtatccctgaagaaataggaaactgcagcaatctcaaaatgatagatttgtctttaaacctcctctctggttcgattccaagctccattggtcgtttgtcttttcttgaagagtttatgatcagtgacaacaagttctccggttcaataccaacaacaatctcaaactgctcgagtcttgtccagttacagctcgataagaatcagatttcaggtctaataccgtccgagcttggaacactcacaaagcttactctgttctttgcttggtctaatcagctagaaggaagtatccctcctggtttagcagattgtactgatcttcaagcattggatttgtcgcgcaattcgctaaccggaacaatcccttccggtttgtttatgctaaggaacctcacaaagcttctcttgatctcaaactctctgtctggttttatacctcaagagattggtaattgcagctctttggtgagattgaggttaggtttcaacaggatcacaggagagattccttcgggtattggttctcttaagaagctaaactttctcgatttctcgagtaataggctacatggaaaggttcctgatgagattggaagctgttcagagttacagatgattgatctcagtaataactctcttgaaggttctttgcctaatccggtttcttcactctccggtttacaagtacttgatgtttcagctaaccagttttcaggcaagattccagcgagtttagga

SEQ ID NO: 24602 - DNA, 2408 bp, Arabidopsis thaliana landsberg
gtcataaatcacatccataagaaactgacaagcacaatacagtttcatgttctacttataagttgcatataatgtaaagaaggttttttctggttgaataaatttaacattcattaaaaaaaaaaagatactgactagttcatcagagagagaaacctagctcccattatttagatcagctaaaaatcatatctcgccatcccataattcttcaatagacttgtaagggcttagtgtctcatgaacaaggaaggaaccagtgactaacctagcctgcatttaatccaaataaattactatcaatacacgatcaagacgaggaagagcagaggcagatcaactaagtttatgcaatgaaatgttaagaacgtacctgttcaatctcagcaaacttagcgaacatgtaatcgggtattgaccagtcgaaaacattaaagttctctttgatccttccttcatttgtactcttgggaagcacactgtgacccatttggagtccccaacgaagggcgacttgcgcaggactctttccgagtttttccgcaaccatattcagtatcgggttcttcaaaacatcgctcttcagccatgttgtccctggagaacctaatggcgagtatgcctggaaaaaaaaaatcattcaatgaatgtataaagtagaaagtaaatggattggtgagacgagtaatgcttacacttaggtgaacccctttggatttgcagaattcttgtagcttagtttgtcgccaagaaggatgacattcgacctgattaacagcaggaggaacacgagctaactccaagagatcagctagtttcttggtagagaaattgcttacacctatggctcgtgccttgcccgaatcgtatagtgcttccatcgctttccatgtactaggaatatctacaggcaaaaggttctctggctttattccaacagaacctttctttatccgtgcaggccagtgtatcttcaacaagatcacaaaaaaaaactgttacacaataatctttccccacaagaagtagttttacaaggaagtgttacttgctctgcaatttaaatactctgttttaagcaacttcgatgaaaaaatgatatattgtaaacaaggttttttggttgaatagattttacattcattccaaaaaaagttacaaggaagtgatgtgtaccagataaagatcgacgtattcaagctgcagatccttgagagttctgttcaatgcctccgggacatcttgagggtcatgatcagtacacctacacaatttgagaatatatgtaagaataattaaagctacagtttttcacataatatgcatttgattaggtgggaaaaaaagataccagagtttggaggtgatgaacaaatcctcgcgtttcactactctgtcttcaaacaattttttcagaactgccccaatctgagcatggtaaggagtattcacttttcagtatcttacaacaaaacagaacagaggaaagccacaagataacaaataaagcagatcaaaagacacttaaagaggaacaagacagtcaagaattgaagggcaaatgtaatatcaattcaagatccacaaaactcataccaaaaagattgaacttcagattagctaatttaaacatctgtttttgttttacctctttttcgttgccatagatctgagcacaatcaatgtgacgatagccaatctgcaattagggttaacatcaaactagttaaaaagcattaaaaacctaagaaaaacaattgaaacagagtatggtatcatcaaaccaaagaatctacaagagatgggaagcaaataagttcaacctacgaaagacgaaccttaacagccgcggcgactgcatcaccgacgaggccaggagaagcttgccatgttccaagacccaccgaagggaacttagcgccggtgttgagcttgaaaaatgtgatcgcatttgccattatcagatgtggtggtggttgttcaacgcacactgcactcggcactagctattaaagggtgagaagaagtgagagagcgacagaggcgggagattcgtggccaaattgatttcttctttctgtaacactagtactttcttagttagtatattgtcacgtcagatattgatcattacatggaccaatggacggtggacgtatctgagttaaattcgttcatttagatttcctctttgctaatctcgagtgtgactgacacttttttgtgtccacaattcacacgtatcacagaagacagaactctcaaacaaccaagacaattcgtacatgatttataatcatttcatattatgaaaacagttttatatatttcataaataatgtagcaatagtagaatattatacattgtgattggttttcaaaatctttgtgataagaaattatgtggt

SEQ ID NO: 24603 - DNA, 2371 bp, Arabidopsis thaliana landsberg
catgcctagagtccctcttcaatgccaaggtaaataaaaccaaatcattcccctctaatcattacatttaataaacttgcttgaatctattatctaacaaatgttttgatcttccatctttttacagccaatattgctccagctgctgctcctggtaaacaatcaatgacattattatctcaattaatcacataattggtttcttggaagataaactgatataaaaaattctgttttggtaataggacctgctgctacatttggaccatcgatgtctccaggaccagagacggatccaattgttccagagccaactccggcagctcagacaccacagtctgatacaacccgaccatttacaccatccgtcgacggtggagctccaacatcagacgacggaggaagcaccagtcgaccttctgagactccttcatccgcctacgcactctcaccatctcttctcttcttcagcatcgccctcgtagctctcaaattctactgatgattccttttgtttctttgcattccttatgtgagttgatttatgcatcgttgattatagaaagaaaccatttatttggtcattgctttgtggaataagcttttgtgtatactgttctctgtttcgagtgagatttattttgtcttgttgaagtaatacatcatcattttaatggaatcgcaaacactattgatgctcaacgattaaaaagtgtcaaaacactaactcccgacttaaaatcaaaagcaaatgtcacagacacataacatctgaaaaccaaacacaaaaccaactcagacaacagcagttgtgacatcctttacggactgacgccaagcgtaatcacgagctccatctttgtcaacaatcttgatcacaaagtttggtggtgcaacaacgagtcttgaccggatctcaagtatgcatttgtcaactagttcaatggcttcttctacagacatgtcactgcggtaatgcctgtccatcgtggagagggagaagtaggagccgtaaccaaaagctcccttgtcgactttgtgaagagttgcaatgtagtcgatgtagtaaagtgatgcaccagactcatcgtcatagccagccatcaggatattcaccgaatacggattctgattcaatggagcataaagaaaacacacagagatatctcaaattttccgccatcaataataagtagccaatcataaacaaggaaatccagagcaaaggccatatgagtttatcagcaaccttaatgttatcataaccacaacatcacagagggaagcttcaattcaagctttacaatatcattcttacaaacttaaaattgctttaacattcaattatcacaggcacataaggcttaagataaaaaaacctaaattcataaatctcgcatagttctatgaccacaagaccaaataaccaaaaccgttccctaatggcagagctaaaagaagaagaagaagaagaggttaccttcctcaaagcagtagcgagctctccgcgagtgaaattggcagcagcggcggtagtcaacgggattccatttctgaatttgtacaaggacacattcttctgaacgtactccgtaaactgaaccctaatcaatcccaaaatccgaagacagtcaaaattactacctccaccgctaaattacagagctacagagagagagaagagtatcggaggaggaaattaccggtcaccaggctcgccactagcagcaacaagcttgtgtgagtcaagtaccatgatcttgtcttcgttgtttttgtgaagaaggatactatgaaccgccgatgtatcagcagcaacgatggcgaatccattcccaacaagaccgaatacacactccatcttccgtctacagatccggcgttgtgagagagagcttattaaaaagcgtcttggagaacaagccttgttcgttttttactcttacggagaagaaggatgattgggtaaattccacatgatctcaggggtattttagacataagctaaaaaatacgagctattgcatgaaatgggcttttgttataaggcccatttattgtccttgttttggttttaacttggtctgtttgatgagattagatattgtgatgtataccgttgctaccagaaacctaccagtcaaagttggggttggcttccctttgtgtcattagctaccccccgggcaggccaatttgtgcaaagacggctctttgtcactacgcgtcgtgctccaggttgtttctccctccagactctctccttggggatatcttcgctcccgttagttttcttgtccgtctacctcctcccttttggtcctttctctctagagttcctaaaccctttcgtttttcattcttttctgtg

SEQ ID NO: 24604 - DNA, 3538 bp, Arabidopsis thaliana landsberg
ttgagtttagacaatcatatttatcattttcttgaccaacacacaactatatgtatcaaaatacatgatgttcaactacatttattccaaccactaacaaaaccaaacacgaaaagctatgaagtattgattctgattactcaagttgtcatagataaaataatctgcactcgagtccattttaattttgatttggattcgaaaaaaccacatgtgcaccatgaagctgactgaacaaggacaatgggaattagaattagaatctttctttttaaaacgagaaaaggaacaaaactgaatataacttgtccagatgctttgaaggcttgaaagattaaaaagcaaaagccagtttatgcaatgaatacacgacatctaagcttttcagacaaccaaatcaaagtacataatctcttgtttgatgagttgcagaaactttcactctttcaaagtacaaaagccagtttatgcaatgaatacacgacatgtttctctaagcttttcagacaaccaaatcaaagtacataatctcttgtgtggttataacatgagttgcagaaactttcactcttcctcaaatccccacggcttcaaacaaaagatacgcttaccaaacatgcctaatcagagacagagatttaacagaagcctgtaaagttcccgaacaatcatatgactcaaagaacaaaaccaaaactcttcatcagaatcaccaaaaagactaccttgtattgtcttaatgagctaacatgtctgatcaaaaacaaagatgctgattttacgagcagcttgacatgatccagaacaaccaaaattatccagaaacaagaatcaaaagaaaccaataagttagaaacaaaccatttaataagaaaatatcagttacttttttatatgatcataacataaaaatacgaagacatagagcatcatcaacgcaagtttataatctcacatcaaaacaccattaaaaagaccacagatttcaaatcgaaattcgatacaatcccaaaccatcttcacttcacttcttaaggcttcctctgattccaggcttaggcttagatgattcagcaggagcagctaaagcctcatgaagattcctcggctcttcataagtcagctttggatgcttcgattcatgatggatctgcatcgtctttagatccggtacagtgatcttgcagtgaggacactcgtactttgcgtgaccacctttctccttaccggttctatcggcgagccctgcctttcctccaccgcgattggtcaacgctgcatcggctttagcttggagctccttcgctgtgtgcttctttggctttgctttgcctgtcatcgttgattgctgcggcggctacgagaaatgagaaattcgcaaggttggggaattgaaaaccctaaccctaattttgcgaattgagagagaacgatttgggggctacggagtttcgatgcgagattatttatctttagttaaaaaaaagtattaaaataaataaaaaaaggaatattttcctatttcctgaaaaggtatttatagagtgtagtacggtgcatattaagacttttgcgcccattttcctaatatatattcgttcaaatccacttgctttattctttttatcgctttgcaaattcaaacataaaaatagtaaagaattttatgaccaaatgtatgaattaaataataataaatagactgtacattttgtacattcatgcacgactagacttttttgtttcgtacatgatctctaatagagctttgacaaaaaaaaatgacctctaagagaaaattagaaacttattatatcttattgcaaaaagttaagattttaatccatttgggttttgatttttctggatcaattatctctattttccagtatgaattatacggaaaacaacattataataatatcactttactttgtaaactatactctataagttaaaaaaaaaatactatttttgttaatatgtgtttttttttgttaagggttttatttttgtttatatgttacatgatataacatgttaacatatgttaatgtagatacaaagagctgaataccggaactaaaatccagatccaacacttcaggataagctaatttacccatacaatttttttccttcatatgaaatgattctggtataatcactatgatctcattgcaccaacgtggcactactcaagaacacgaaccaacacgtatcaattttctcatgcaaatgaaaaacatattttatatgactctatgacagcgacttttatctatccatattttatcgatcatttcataaaacagaaaccgtatgagaatcctccaaaacaaaacaatgaaagaacaagacaaccaactcaaaatccctgaaccattacgagctgactggttcatggttctagtcaccatccaagctgatctaatctacaacgcactcgtggtattatcctcacctttctttctcctataccgctcttaccgccgcgcagtcgttaccgtctccgcagcagaaaaagcggttaaacgtgctccagcgcggatagctggtggtgcggggcgggttgttaggaggacatggtttggtatattgggtgcatgccacgtgtcaatggtaatggtgttggctttgattttggcggttgttattggtgttgggattgtgagtttgtatgtagaaaagcctgtggttgtgagagacagattgttctttgattacactgaagaaaaccccagtgcggtttttagttttgataagaagaagagatcgtttagtgttcctgttggtcatagtgttcatgtctctttagtgctttggatgcctgaatctgaaattaatcgaagaattggagtatttcaggtaattgtaattctttgttagttatatactaatattcgtgaaatggtatgatggttccataattaggatggaattttttaaaccaatcaaatgattctagctgttagtttatcaccaaatcagatttcatgaccaacagaattatattgaccagctataatcaaaagaattatattattcaatccaatgaatttgatgatttcattttgcagcttataattgaaattattatgtccaaactataatgcgattccgcaggtcttaattttttaaaatataccgttatttcactaaaattttattgatagcatttttttgtgatacattgtcttgtgtgtacagttgaaagtagagcttttatcgttgaaaggcgagacaatcgtgagatcgagccaaccttgtatgttacggttcagaagcaaacctataagacttgcacgaacatttgtgatgagtgttccacttatagccgggatagcaaacgaagcacaaacaatgagaatcgatgcattaaagcaccaagagaaaatgccaaggacaaaagccgtgagagcgactctgattccgcgtgcacaaactcggacattgcctcagttatatgaagcagagatcgttataaactcaaaaccgccctggattaaacgaatggcttataactggaaatggactc

SEQ ID NO: 24605 - DNA, 1295 bp, Arabidopsis thaliana landsberg
  unsure (1)..(1295): unsure at all n locations
tgggggttttttagcataactcctgttccgcaatttacgcctcaaagtcactaatctagatagaactcccctcttatctgcttctacttcagtatcaactacaaagcagaaaatgctgagaaacttcatcaaacagttccattactatagcttatagtaattgcaagcagctataaaccaaatgcatacacatggaaacacaatatgactaaataacaagaagaggagtaataagaacagaaccagaatctcctaaatgactaaaaatataaccccaaatgtcaataatttcaaacatatatagaaatcgaactaaggaattcaacacataccaggagttgggactctggggattgaattgtaagatgataaaccattggtcctttggtaataaggactgtttttggacacaggtctcgaggccaaaactggtcgaaatcttctagaaacggaagatacttgtctacttgaagaataagaaggagaagaagggtatgaggcaaaagaaggaagaagacaaaattcgaggaattgcttcgaacccatgagtacagacatcgagcacgagagtttccgaaaatgaatttgtggtaaacgaagcaaaaatcgcatctcgaagtatcgatttgagtaaaagctcttcagctattatccattcatagtggttgctcaagggttttaggggttcttctttccctcctctgtatccgtgtcttatggaggaagacgaaggaagattttgatttcgctctctttgagataaatgggcttcgaagcaaaaaggcccattaattgttactttaggcctgttagcatttatttcgacccattatttccttaagaaaaaccttggcaacaaagtcaaagcgtgtgtggcacgtagaagagcgattgggcctggcccatttttaattagttgagatannnnnnnnnnnnnnnnnnnnnnnnnnaacaacgtggaaccaccaatctcaacagttttagccgctaaaaccgtagtagctcttcttttaccgagtaaatcgcgccaccgagaaaaagaaaaacgctaaaatatgacacaaattacttacttaattcatttttcttaaattgttttaaaatagtaaaaaataaatgtaatagcccaatatgctattatataatactaagaactaatatacataatgaattttagatgttgtagaattaatgaattttaatatatgtttttgcgaatttatactactaaacataagttcatgaggataaactaaatgcggnttgtgaattacatttctatggtactagataac

SEQ ID NO: 24606 - DNA, 1648 bp, Arabidopsis thaliana landsberg
agcttcatgagttttttccagtttcaagtacagagaaacatattcatcagcaagttcttcagtcaaacagccagtttcatcagccttttggtacacgtttatgatatgtgaaatgatcggattagacaaagaggagatttcattctcgtcgccgtttgactgtacaatagcctccatcagaaaatttatataaatctcaaacatagaacttgacgtaacagtttgcaagccttcttcaaaaacctgcattcaggggacaagatttaagacctatcagatattgtactttctagtttctactactaagccgaaacagattgtggtaaagcaagttagtatagtcctaaagaaaagcccccccataaccaatgttccacctgtcctctccgacattattaaactaggcaatttgacttcaggttcaaaccaaaaagagtgagcgtaaaatcaagactaaagatttgatctatgttaaggaaatgcagcacaactatggccgccacattctttaacagatttcagcatttaataaatttctaacccctagtcataagttaagatttgtttacctgaatagccttttgcatttgaggatttgcaaactctaggcctgcctcattgctaatacaaccactcatttcatgtcttgcaagccaattccagtattcaggttcattgcaaaaatcacgcttcaggtcacttagaatggtattgcgcatttcatctgaatgcgctaagtctgttgcctctagaatctccaaaaaacgctttctcaagtcaaaactagatggtatagcctcaacggctccactatagatggtctgaagaacattggaccctttctcttttaagaaatcaactttctcattcacatcctcaacatcttcgacaatagaggcctcgtcattctcttctttttcatttccttctttctcatctagcgacataaataactctttgttctcatctttccattgctcatcctcaacggttttcgtgtcacgcaccaaacttcctttatcttcaccaagggcaactttacgagctttcagcttatttagaaaagtaagttccattcgcagatactcaacccacaggtcttcagagtttgaacacactctcagcccattcagcataagagcacgagctgctgtaacattcaagtttctatcaaattcccaagatgcagcatatatccacactccagccacttttggatgaaaccttattgcttgagccaatgcctacacatgtttcagataatataaacgcaattaaacatcgacatatacccaccatagacaaatcattaacaaagcaaccagcaaatttcaaatcttttacctttttcattcttccatgcctattctgtttacaaaactcgagatacctaaaccacagattgatatcacctttatacctcatcgtcgccaatctataaatctcaacaatcctagccacaccggcgaaatcagagactgatttcttctttctcttcttagtcacacgcgccaccgatttcctccgtagctgacggagctcatcgagcttaccctcatagtcaatataggctatgaaatcttctttgagtgggcttggacgcttgagccggtactcaaacttacgccgctgcttcacgatctcagct

SEQ ID NO: 24607 - DNA, 6244 bp, Arabidopsis thaliana landsberg
ttgaatattttagattacacatcaatcgtgtattggcttctagtacctcgacagcagcgcaaaatgtcaagggtccttctaaagcagaacaaattgcacaactcaagctgcagttcagaacattcctttcagaagcaactgggttttaccatgacatgatcttaaaaattagatcaaagtatggccttcccctgggttctttttctgaggatcaacagagtcaaaatttgtctgataaagatggaaaagagttagcagaagttcaaaaagccttgaaatcttgtcatcgttgcttaatataccttggtgatctggctcggtataaaggaatgtatgcagagggggattccaggagcagacagtatgcttctgcttcaagttactatttgcaagcagcttctctatggccagccagtggaaacccacatcatcaggtgattcccttgttttcccctctttctcatgttattttatatttcgtacaactatggaatacattttttctgactagattaacttaatgtctcagcttgcaatagttgcttcttattcgagggatgagtttgtaacaacatatcgttatttccgaagtttggctgaggagtatcctttcccaactgcccgtgacaacttgattgttgcttttgataaggttaactaaaaagttcctgtttcattattattttagtggcttggcgtaagagtgtgattattctttcacttttttatcatccaaatataatgtatctttctctctttgagcagaatcgtcagagttatgaaaaattgtttgtgccctccaaagactcatccaagaggctgactggtaaaggaagagggaaaggtgcagatatttcatcagaaagatgcgaccttggtagctggtcctgagaaggataaagtaactattgcaaatgagatgctcaaagcattcagcattagatttgttcatctcaatgggattctttttacccgaacaaggtaaatttttctgaattattttgttctagattctgataccggctctctggtataatacctatcacttgtcttcacagcctggagacattctttgatgttcttgcctccactagcagcagtttacgagaggtgatttctttgggctcagctaaagagctgactttgggcatagacaccagtgacagcgcacttttcattgttagagtcgtgacaatgcttatatttagtgttcataactcaaagaaagagacagaaggtcagtcatatgcagagattgtacagcgtgttgagcctgccagaaactccttaacagctagtttcgagttacttggactcgtaatagagaagtgtgtgcaactgggagatccttcgtcgagttactttttgcctggtgtcttagtttttgttgaatggttggcctgttgtcctgacattgcactgggaagtgatcccgatgatagacagactgctgtaagaaatagcttttggaaccagtttgttgtcttcttcaatcaagtcttatcgcttggacctacttttattgatgatgtcgaagacgagacttgcttctcaaacatgagcttgtatgatgaaagagaaactgaaaaccggcttgcactatgggaggactatgaactaagaggattcttgccactgcttccagctcagacgattctcaacttctcaaggaaacattcgtttggaactgaaggtcccaaggaaaagaaagctcgtataaagaggatctttgcagcagggaaagctttgaccagtgtgatcaaagttgatcagaatcatgtatattttgattcaaagaagaagaagtttcttgttggtgtaaaaccggcagatgactttctggattctcattcaagcccacctaaagcttgtaatgctttgcaagataaccaggtaatgatagatcataactcgccaataatgcagcttgatcaacagatttatatgggtgaggaagatgatgatgataaagtaattgttttcaagccgcttgttactgaaaagaggaaagaggcttctgaccaaatatatgttcctagtggaggcttcaggaaatctgatcaagttactactatgggggactttaaagctttaagtggatgtgatgtagcttttcatgaaaatcaaattctgcaagctagaggcaatgcgagtattcaagtgcctgcatctgttggtgctaaccttctgggacctctacagccatcaacccagtctcaagccatgcatccccaacaagttcagacgcaggcagtgaatcctcagccagcccaatcactagctgcttctcgacttcagccaatacaatcacaggtcgcacaaccactgccatcacgggttgtgcactttcaacaaactcaagctcaggtttcacatgtttcaccggcccactcgcaatctacttcctttggtggtggtagcaagtggtcacccgaagaagctgcttctcttgctagtagcctatctgggtttgctcagctgggtaatggtcatgtaatgaggaatgagatgcaaggaaatcatggagtttcctattaccctgcacactcattacccgtccaccagtcttacaatggcaatggtatgggtggtatgccatattctcagtcaagaacacctgaagctgtattcccaccgaaaattgatcctgttttatcatccggagttgttgctgatggcctgggcgtccaatcttcattagcaaggaaaaatccaatcagtagagccttcaggcatcttggccctccgcctgggtttaactctgtcccagctaagctgcaaaaggagccagcacctggttcggaattgtctggcaacaaccacctaccggttgatgattacagctggttggatggataccaagctcaatcttctcgaggcgttgggctgaacagttctttgaattacgccacctctgggaaaccagaacacttgggtagtactggcaatggactgaacgggcctgccaactttccgtttcctggaaaacaagttccaacatcacaggtccaagcagattttccttatttccagaaccctcagaaagataactttgtggacaaaaaccatcagtcaactcaactccccgagcaatatcaaggacagtcgacttggtcgagtcgtcactttgtgtgagatcagaatggaagagtaacacggtaagagcaaacataaagctcctttgcattatcaaatactttgtaaactatcttattgttattagtgttgatctaggtaattgggaatgatgcaggtgagtgttacgcaacgtttattgctacctaactccaactgatccttgttctgctgaagtctctagttggagtctttgtggccttggcttcttgcggggcacttcctacctgacggattcaggacacagctcatgttggtgaaaaaatatgtggtaacaaaaatgaatggttctgtggaattgataggagtaaagtgcctttctcgtgctacttgaggtggagatgttaaaccttatgaataagaaaggaacatacgtagcatgtggctcactctcgatatctgaagcagttgtttgctgttttcttttcttcttgcgtatgactgtgtagctgtccgtcctcttgcagctatctctctctctcttgggttgctttacttttatttcctctatattctatgcttgtctcaaacttgtctctgttttgctgtgtcgttttaagttgaaccatcataaggtgtgtgaaactttgcaatgaataaaaaagggactcatgtgataaaacatgatttggtgttgaaatacttcctcctcttgaagatctgtgagaatacctttgattttaaaggtcgaattttatacataatttcacttcatttacaggctcattttactcccttggcattttgaaatctgtaatatgccaatgctgctacaaatgaacttgataaaactgatgtcgaaaaatgttaaaaagaagttgtaattgtatatgaacatagaagactgaatacagttctctctatacaatgaaatctttaatgggttgacttggaagccttcctgagtagaataccccagcagaggattcgataaaaaacgaaaaaggcgagcatgatcccgacattgatccatctcgtatccttgtcaagccctctctccttcaacacatcctctccggtcatcaagcagcccatgttcccactggagaagcattcctctcgcatgctccagtactcattcaccaccatagactccagcgggtaacggtacaaggacacatagtacatgaacatccatggttttgggatcttctcttttgggataaagtagccggagaagaggaagaaggctccaagaacagtgcatatgagggagttaccagagatgaagtcaggagaaacagcgctgaggaaaagcaccagagaactggccatgagaatgatgagccagacgcagaggacaaagaaggagaaggcttgaatcgatgggtttaggcctacgatccagtagactgggatggagaagaggagagatacaacgaagaggaacggtacaaatgcgatggtgttggctatcatgtaggatgagattcggtaggatccacgagatgattctttcatcagaacgcgacgttctcggaggtaaatgggaagtgcttcgactgttgaagagaggaggaagcttaagctgaaggcaaagagtccaagccgctctgcaacgccttcttcgtcacgcttgagtcttgtgtagacgctacctagacctaatccagctacaaccgcttgcattgttcgcgccaggaacaactgctttgttctatagatgatcttgcagaatcttgagcagaggtatgagatctcggtgacgtctaggacacgaaacgcttctttcttagagataatcccatcgttttcgttgttttcaggccacattgatgatgattctacgacagctaccgagtttggcttaaaagttctcaaggactcaactatttccatggcgaattctataggattcagctgttctggaatctgaaaccctagtttcgctatcgagtcctcgagatgttcaagacttcccaagtggataaccgatccgcgagaaagaatcaggtaatcggagatgtaatcgaggatcctataacttggttggtggatggagaagaggacggttctctgtttggatttcgccatagtagccaaaagctcaacaacctgaagcgagtttcgactatccaaaccagaggttggttcgtcaagaagcagaattggtggatcacgaatcatctcaacggctatagagactctcttcctctctccacccgaaacgccacgatcctcttcgtctccttctcccacgaagctgtcttggacgagaacaagaccgagatcactcaacaagctctccactctctcttctctttccttagccgttgaatctctcaaactgaatttggcgctatacattaacgtctctttcacggtaagtagaggcagtaggtcatcgtcctgcgggacaaacccgcatagccttcgtagttggttatagtcagtgattttacgattgttcatcaaaaccgcggaagacggatctagtgccttgtggttcactcttcctgaaatgatctttaaaagagtggattttcctgttccactcggtccaaccacggctaggattttagaggattcagcagctaatgaaacggaattgagtattggggtgtgattgatggtgtaggataggttagtgacggttaaagagtagcggttaggggttgggagtggtgaagaagaaaaggaagaggaagcagaggagaattcatcaggagagtttgatgctgagaaaagaatgatggagtcttcctcgcggtggcttgtagccatagcagaagggtggaagcaggaagccatggtatgagtattgttgttcttcttcatatcaaaaaggtctactaatgctttttatgtatgagtaaaacttttttttcagaattggtcgacgaacaaaagaaacaagtgtttaatgtggtaggcagaggttggtgcaactcttcaaaacctgtgtatctaattctttttggttggtcattaattgtttgattttgctgagtttatcgtataagataaatttatcttacatatatgtaaacggtattagtggttgaccaggaataaagagtattggtgtatcaaacaaaaagaaaacgtgttaaattcattactaaaatgtactttccaatggtatcaacatggtaattgtattccgtca

SEQ ID NO: 24608 - DNA, 1866 bp, Arabidopsis thaliana landsberg
agatatcaaattccttatttaaataccacaatcacacagatacaacatattactaattttaaattacagagcatttggtccacatatgcttgaaattgatagtctaattagttttaatgaggaggtccatgtcaaataggcctgacccaccagctatatatataccatgcattaaacctatatataaaaataaaatctctataactttttttgggagttgttaatttccttttcgttaattatagaatatgctccctttctcttctctgacgatggttcataaacctattccttcgtagttgtttaacgtccataataattgtatacttttagttcgagatttacctaaacaaaacaaaaacagaataccatactgtatttcatgatttctgtattggaaaataaaagactgaaaccaaatgattggtgggcttttctaaaataatagtaataaaatacaattaagacacacaaaaaagaaaaggatttggtacatttattaacatcgatgatgagttgataatgccacgtaagccaaataccattttcccaagaagctcatatgaccttcttttttgtgcagcaaactccacattccacaactctctctctctctcatttcttcgtataaaaggaaatctatatcatctctctctctcattgtcaaaactcaaaagtatatacttttactagttttagacttaataaatgcgatcgccctttttttagtatgttgaacctcattgctttcctccgccgtcgtctccgccgtccccggaaagccagaatctccgtcaaccaccaccacctctcagttgattcttctcctgagactcatcatcatcaaaatggcttttcatcggcagccgccatccacccaaacccggacaaaaccatcacagtggccacctttaacgctgctatgttctccatggctcccgccgtccctagcaacaagggcttgccattccggtccaagtctacggttgaccgccccaagagcattctcaagcccatgaacgccgccgcatctcctactcacgactctagaaagcaacagaggtttgccaaatccaggcctaggagagtctccatcaatctccccgacaacgagatcagccgccagctcagcttccgggaggatccacagcactctcccctcaggcccggcgagatcggtctccggagcaccagaacggctctggaagttctgagtgagctagacgcagacgtgctggctcttcaagacgtcaaggcggacgaggctgaccaaatgagaccgctctccgatctcgctgcggcgctggggatgaattacgtcttcgccgagagctgggcgccggagtacggcaacgccattctctctaagtggcccatcaaaagctccaatgttctaagaatcttcgaccacactgatttcaggtctgtttttctttttcttgttttaagttattacccttatttataattagtgttaccaactaaaaccctcaaacttaaggatacaaattgtggttgatcaacatagtatacagtatgttccttttattaaaggaatcaaacaataaaatggatgcggcgactttgtaccatttgagaacctagtcgtcatggtcgtctcgtgagagcatcaaatgtgtgtacatatacatacaaacacatacgcacaaacatgtatatataacagctgtatattcttagcgacagcttcaaacgtcaatattgtacttacttttgtctttgaattattattagtatctctataaataaatatctcatggggttcttgtgaaaactctagtgtttttttttttaataaaaatttcctaccaaattcacaataattaaatgttttttattttattt

SEQ ID NO: 24609 - DNA, 3024 bp, Arabidopsis thaliana landsberg
  unsure (1)..(3024): unsure at all n locations
tctgagtttccgagaaacctatataacatatttatagatatgaaattttcgaaaccctaaataaatatgggattggacgttaattattgttgaatttcgtaattttaaaagttaatatggcccattttaagtccaataaaatcgttttattgtaaatttttcttcttcgggtttggtaatcaactcgaaatttattttattttaagtttaagaatgatttaataaaatcagattaaaaaagaagaaggatatctcaaatttgaatactaaagtaaaaccaaagaataagtctacataagataagaatgcaaaagaatcactaatccaagacaattctaaaagaggcaaaatgccaaatagcacaatgaggagagtcaacaatctctcaaacacatacttgagatttctgtaggtttgataaacgtcacttggaggtgttgttctaaagaaggtaatgtaacatagtgaaactaatccagtcattgaaaatgttatcaattacttccaagatctcaaaacagtctcactcattctacacaaaggtttaattttacatttttatttgtttttctttatccaattaaaaatttaaaattgataaaaaaaaatccaattttttttttccaatttcttccgagtgttcttggtatgagaacttaggacactcgacactaatttgccgggaagggcgcgtgaagtttgactttcaaaagggtaaaacagtcaattcaaaaaccatattcattctatatatagaagtttctccttgtcaagcgcgtaaaagtagatagaagaaaaaaagatgcgtcgatcggcgagcgcctccatagtttccgaccaactctcagcgaattctccttcgccatcaccatctccgccgcgaattaaaacctccgcagattcggatgatagccaccttcttttgcctaggtacgatcccaactctcatcccgggaagaagaacaaatcgcgattcagatccgccgagaacgctatccatttcattccgatcgtactcattctctgcgcagtcatactttggatgttttcgaatccaggtaaccaaattcaattcctcggagacaaatcctctgttcatgttcgagaatctctgtaatttttaaggttttggtatgacttatatttctattgtctgatttcttcacagtagcaaagatcaaacagtgacaaattgacatggtggaagacatactttgattaggtcaagctttactctgttcttgttgagacaattttctcacaaatgttagcttctagaattacattgtatgattcttttacattcaatcacagagtttatattgttcctatgattatacattgttcaagtctctctattcaatggatctcactatatatacgaaattcagcttttagaaacaaagagaggttcacactcaaagtttgtgtgttcaagcattggtccaagcctcagtaactttggtatgacaatattgtttctaatggaacacactagaggattctcccattgcagaagtgcgccaactaggtttgcacgtactgtcaacgggaatgctcgagaccatctctcactcccgtatgattccattgccacttctattgattcggtctcgccgtttattgcactagcaagtttatttgccagaactactgaatcttccaaggcgcaacaagcaccttgtccaagatttggagtcattgggtgccaagcatctccaacgagaaccactcgtccttttgatgctggaggagcaatgccaggccatagccaccggtctactagaggagttctgctgatagtttcatcaggtgttaaatcgatgaggttttgcagatcttctggccatgtactaaccagttctttggcttgtttttttaggatcgctggatccgtaattttgggccctgcatgtctcaacgtttatgatataggaaattgagaaaaggaaaaggaattatctttgtggaatgtctgagaagtgtcgaaaatctacctagagaagggctgttgaaagtgatgaaccagtagacttttgttgcagatacannnnnnnnnnnnnnnnnnnnnnnnctaccgaatatgtagttcaccttttgctgaaatggctgtccatttggaaagaacccaaggccacggaaagcgcaataaccgacatatttcggctcactgaaccccatccaagttgcaaccttagaccggataccatcacaacctataacaatctgtcaaagacatacatcatcaaatcagccatatactgagaataataaacacataaccataggaccagagcttaagagaagtatacatttgcaaggaaccgagttccatctttaagttgaaggagagtgtcaccattggcatcattgctttgtatactttccagttttgaagaaaaccgaatggtctgtggaggaagctggcttgcaagtgtttccaagagtactcgcctctccaccgcccgaacttcttggctatacaagacatatgctttggttggtatacacacatgatgaatcaaatggaatgctcaaattatgaagtagcaggtacctttgatcattgtctttaaatttgaaagaacgaagctctcttccatcttccttcttcaataccaccctgcacagcttatcataccaacacactcagctaaaaccaagaccaaattattacaagacagaatcaaaaaaatcgtacccttgcatttcaagaaactgctttcggagttgaggtccgatggagatggcgtcaagaacacgccacccattcttggatagcgtcagcgatgctcctcctgtccgaagcgactctgcctgctccaacaccaccgaccggattccaagcctaaacccatcaaacaaaaatatccggttaagtggctctgagtttctaagaaaattcaaagaaccggtttttgtaatttatatacttanccggtgaagagcaacggcagtggcaagtccgccaatcccgcccccaacaatcactactttctcctctctgtcaacaccgcttgtttc

SEQ ID NO: 24610 - DNA, 2673 bp, Arabidopsis thaliana landsberg
gatatacagcaacaacctcattggtactctcaatctgtgacacatcgagaaagaggaattttttaaataaggaacaaggtagtcaacagtaaacatgtgtcctacattgggaatttctttgtgcaccaagtagatttaagaaaagcttcaagttggtggccacatatcagtctctacccaagagttctaagaacttagcaattaatacaactaacaaaacaaacagctaccatttgggatgtatatggtaagccaaaaacaaaactcaaacagtatgtgtctaatgtaacaaaactcaaacattatgtggctttttttttatagataattttgaaagaatgagactacaatcttctccgagaacaaaggtttgaattttaaaatctgtctagtgaagttcgtaaaaagccaagaaaaaatgtttcctctatgctttcataagtgactaaaaaactactatccctatttcaaatctaaaactaattctcagcattatagagcaaaagcacactatggaatttaccaaatgtggctataattggcaaatgtgaagaatgtttacccatttatgaatattccaacatccattctttctgtcagttacaaaaaagagttcccctgcacgataagtcagagagtctcaggtcaatggaacctatgagaaatactaaagcttgacaggcttaattacaatatgaaaaaatataatttattcaccaattttagagctccagtaaaacatctaatggtttggagaatgatacgtgaaggttcatatcagagaactatcatgatgacatccattaaaagactctagtttcagccaaggagtttttaatagctaaaaattataaagataagaagcatatgcaaggaatttgtagatcaacctttttctcagtaaaattcacagtccttgtcacttggttagaagaagaaagatgaatgcaaagagcggaaacaacaagagagcagagagaaaaagaatatcattttatggagaagaccctagtttcatccaaaacagaaaaaacttataagaaaagctcaactgctaaaagtatgaaacaaatagaaagtcagaaatccaaggtcagtgtctaagaactgcaaatcaatcttttcccagaggatttcacaatccttgtaattttctgcatatttttcatttaagacaaatacctcttgatgaccacttcggctcagtgggtgattcgacgtatttgggatcacaaccagcaacacatacgcgcttatcaatatttctgcagaagggtgtaactttgattaatatttgcaatatgcaaagcatttgaaaaaaattgcaaatgcttacccgccctcggaaatgtacccaacccacagctctgctttatcccatggcatattagggtgactccattcaatccatgccaatcgctcacacttgggatccaaccgtggaaatgcatagaaatcattgccacttacgagtacttttggttctggatctcaaatatcagaaagaacacatatgagtgtcaatgatcagctgtaataagttggaaacttagaaacatgtactacatggcactactgacataactcacatcccctatagactctttcaatgggagtaagaatacttctttcactaaagtttgataatctaccttcaagtgtctctccacttagattaacctccacgattgttgtaattgggtttgatctatcctggcgaccatctataaacaccagtcaaacaataacatgtaaatctcgataaaaacacaatcaaacatcaagagagtcaccaatactaaacactagagacaaaccaaccttccctaacagtaacataacggttaaagcgtgaatcaaagactccatctgcataagtaacagctggtgtaccataatctggagtaattggctttggagatgaatctacacacatcaaccatcaaaacaaacaacatcagaacttgccaacaagaaatttacatagctagaatcagtgaagaggttatctatcacctttatcagtaatgtcttgcttgtacaatcgctgatccttgtaattagagaacacaagtgtatcatctgatgaaatctggaaagcaccaccaccgtattcttgtgttaaagttctcacagcgaagtcttttggagtaatatcaattgatgtttctccttgtagcaccaaaactcctctccttcaatcatatcaagctcgcaatcaaattagggttttcattttcaaaatcaatcaaaagaagaagaagtaatacccggattcgttagggcgagactcgagcaagacgagacggccatgagaatcgacggcggtgccgccaagacgctttgaagctccggaaacgatgtcggcggtgattggagatttccaggagccataaggagcggtggttagaggagtctgagcagcgtcgggggaagaagaagacatggatgcgaaggagcgaagtggtttgagtgagaagcgattgaatcgtctgatcgaagaagagaaggaacgagaaaggaagagattgtgagcggaagaagaaggcaagcgagtgagtgagaatgagactaggtgattgagtgaggtcaacaacaacaatgccatttatttactcatccactctttgcttgttttcgctataggtttttgaattatatgtttttttgggt

SEQ ID NO: 24611 - DNA, 2697 bp, Arabidopsis thaliana landsberg
cgtatcatcatatacatgaacatacatttcaattgtagatttatgtgtcacatcgttagccaaaatagtatactaactaatatgaagtcttgagcatatattgatcacttaaagaactgctttaagatatatcttccttaccatcatcaactcaccataattcaacataacatttgatagatgagcttaaaatcttaagaagaacaaaccaaacctacatcttataacaagctagttagtatttgaccgtcaatccacaagtaaacataaatcttaacgtacgagactatgagtaagcatcaacacaatatcagatttgaaacaaaatggttttgaatggtaatctcgcatcgaggatagaccctgaaattttggaggtctaaaaattttctaaaagttttacaaatttgggagcctatgtataaaagtaaaactaaattagaggcctttttgtaaatacatgctttatggaaattcacaaaccattgtttctccttgttgcttaaagacgacactgtcattgtgatatatcgttttgacaattaccgattttaaaaacgttattaaattttttttagcttttagagatacaacattatggtcagcaatgaaagctaacattatggttaatgaacaagaggagaacataaatgtcaaaaaataaacattaagaaagtggtaacgttccacttatacagtttttcttaccaaagtttgattctaatgaattgtgttactttcatgatataaattgaatttagatcgaatcttgtctttgtttaaccaaaacaaaaaaaatctaatcaatccaatttgagagagaagtcataacttttttaacacattgttgacttaagtatcttctaaagatatattcaaatcagatttattttctaactatagattacaaaaatgttaattaaagatttctaaatgcgtaatacattaggagatttgaataattagaatcttgaacttgacaatatttaaggtaaatcgcatcaaaaaaaaaaagaaggttatcccttaattttgaattcataatggcgtaattgtcacaaactcacaactgtgtaatattcacacctttatttttaattataggttttttatttttaaagtaatgaaattcacttttgctttcaaaataattcatagtgtagtgcgcgtagatcatacatatccccaatctaccccgcaagttgcggtggcaattttcataaagtcaaaaaagtattcaacacgtgtcgttccactattcgtccaacactcacgccctcgtaatcctattggttcatatgcatcaccctcttggtcactcaattatattatcacccttcaactttatccataatcacgtgaatgccattacactaaaaacagtaatcaaacttttttatgttaataaaataagaaaatctagtgagagtataagatcaaaaagcgtctatcataagtacggtcgttcttctccttctattttataaggtccactgaagtaaataacaaaacaacgactcacttttggaataattacactcacaccattcaatcacgccgttgattttggtgactaatattaaactcagtggaccgcgttacagttgattgtggcttcaatatacgttataggaaaaagtgaatttaaaaggcaaaggaaaaaaaccattttgtgtcatccccttccccacttccaaccaaaattaatttaaaatgtcaaatattttttcattttcctcttttcgaaattaaagaaaaccctaaacgccgttgtctgatattgagagagagagagagattaaaaacttcttctggttccttttatcaacattttttctctctcttaaaacttcgaagcgatttttgatttacagactatggaaatggaatcattcatggacgaccttttgaacttctctgtaccggaagaggaagaagacgacgacgaacatacgcaaccaccgaggaatattactcgccggaaaactggattacggccaacagactccttcggtctctttaataccgacgaccttgtaagtcttcccaaaaaaaaataaaaaaaatcgcctacacatgtttgttattaaatggtccggtgtatagtagactcggccgagttgactcgccggttcacggcggttggggattgttgactcagccgggtcaaaagtttcgggtttcggaaaacgcgttttactttattgcggtattaaacgtgcacgtcataagtgggaacgtttcgccggttccttttttgtgttgttgttaaaagacgaaactaccctttgatttttaatcctttgggagatttgtttcgggagtttgttgcagggtatattcggaaattaaaccattttttagtgagggtcattgtttcgtgagctgttcgtcacatgatggtgagctaccacaataaatttcaaccatttcgaaaattatatatgtcacacctttaaatttgatttattatttgatactccccaattattattgaaatgacgtaactacccttccgtttttatttcacccacccactctttttatcggaaaacgagtacgagttgactcagtcgagttatggagtttgactcggtctaatttgtttgttgcagggagtggttgaagaagaggatttggaatggatttcaaacaaaaatgcttttccggtgattgaaacattcgtcggtgtattac

SEQ ID NO: 24612 - DNA, 1024 bp, Arabidopsis thaliana landsberg
aaaatactcgacactctacagtttctgaagattggtatgcagggccggtccaagtctttttgttgcttaaagcaaaaatgtgtttggcccattaataatgaggtattgaggaaaaaaaatcaaattctgacaaaagttagactcaaactagacacatagaagaaggttattcaaagcgttgaccactataccaccaacaattttacgatttgatgcctcaaattttgttactaaaatgtgatgcctaaagccctagcttcaccatctttagctctgggccgggcctgttggtatgttatatagcccacaatcctttggttacataaaaagtataaaaataataattcatcagctaattttatattggtatgataatattttgtttgtgaacaaattctatgagtcatatttttttcaatttttttttccttctttgtaaagtaagagcccagcaatagtatgataaaataagctattgagcctaataacgataagcccaattaaggcccgtatacatgttattatctcaggcccatacataattacaaaaaaagttagggacgtaagaacaaataaaaatgagaaattatctggaaaagctgaatcaaatgtacagacacatgagactgagaatctaactttaggcttctctaattatgattcatcagagactttaattaattaggtttcaaatttctaataaagaagaagagtcaaagtgattaaattaaatggtcacagcttttatttattaagctctgtttcatttctgctgcgggagagagaaagagagagagacaatgccgttgttgaggttcaagatacggaacgagctaagcttaggtgggccggagattcaacgtagcgcctccgtggaagatgaggaacctaaggcgattctcggcgctgttgaagtagctggactcatcggtattcttcgtcagttaggcgatctcgctgagtatgttctcgttttcgactgttgcatacatacagaagattgaaattttgatacttgtagctg

SEQ ID NO: 24613 - DNA, 1880 bp, Arabidopsis thaliana landsberg
tgttatcaattaagtaaaccattgacaattttgtgcatgtacctagataattaagtttttctatgcttgatgcagatgtgttatatgtcgtttagactatgaggatgacgaagacctgatactgctcccatgcaaacattcttaccactcggagtgcataaacaactggttgaagataaacaaggtatgtcttttatgaaaaataaacctgtagagaagctaaagtatatagttattgtagtcagctatgtggaacctgataaacccaagcagggagtctgtttgtagtctgtttttatcacttgacagataccgtttttgttaaggatagatgtattcacgttagaaaaaccgccacagctcctgatatttccataaaaattatctgtttatgagagggaactttatggtcagtacagactatctcatggttgttgagtttatggattgcatttatgcgtttcccgattgtgttcatcagcatcttcaaaaactgaggggttttgttgctaataagcagaaatttgaacttgttaattcattaggaagagtatctagagtatggtgaatcatctcatcagcttccatcacaattaggaagaagaacttttgtcaacattcatgtatgaacgagcttttggaattccattaacaagccaaaactgacacaatcttttgcaggtttgccccgtatgcagtgcagaagtttcaacttcgacctctggacaaagctgatgaggcaaaggaagaaagattcagaaagaatcataagctaagaacttcaaaaccttagctgcctgtttgtacacttcttataaacaaaataacatcatcagatttccttggatcctttaaaaaatctcaaagattggaacattctcaagcgtttttagtttttgcattcatctgcttccgtatttgccgttgtgggatatagtttatcacatagtaagtatctatttcattgatgttcacgtatgctactgtgaaatagctaggataatctggttttcgatctaagaaagaacatataagctagaactttgaaattccgagactcagagaaacatcacaagggtggggggttgcatggtagccttgtaggtctgaaactttagaatagatcgaaacttgttttattacctaagataaatatgtggacacagaaggtaatatcaaaactcgtagcaaagaaaagtacaacaaattttcatgttttctctttggaacatgactatggtattggtcgtctacatgaaaagttggcgagtggagtggcaccaacggtcatatgctggctgaagattgggccactcggaggccgagactgagaaatcttggagccagttagtgagtaagatttcttggtccaatgcaggtaaagtcgagatagctttgtctatggctcgttccacctcaactctctcataacccgtcagtacgggaaacgcaagcccgttccttgcgtgactaaacagtgggagccagtttgcaaggagcctgaatgtcacttgtcctggaacttgtgtgctgtctcttgctaactctccaattaagagcgctgcaaatcattaaagtttgtgagaaaaccacggatcatgtcgagatgctatgaattcgtgggcatagaaaccgaatataacagaagttcctaaacaaaaccaaactgaatacatatactttacccgaaatcttaaccatgaggccttgaaccctgggagcagccgtgagagacaaggaagctaaaccggaagcgtagctccaccgcttaatcccttctgccaccgcaccataacgcctaagcttctctgtcatccacagcagctcctccgcaagcttctcgaccgctagttcagcctcattttcttggataccacccg

SEQ ID NO: 24614 - DNA, 918 bp, Arabidopsis thaliana landsberg
atctctcaactagattcatgtccaatgttcagatctcaaaagctggtgccttctacgaattccaattcgcgattaaaaatattcactccgagatgtatagtctccttctcgacacgtatatcaaagacaacaaagagagagatcatctatttcgtgcaatcgaaactattccttgtgtgacgaaaaaagcagagtgggctatgaaatggatcaacggatctcaaagcttcgctgagagaatcgtagcgtttgcttgcgttgaaggtatattcttctccggtagcttttgttcgatattctggttgaagaaacgaggtttaatgcctggcctcactttttcaaacgaattgatttcgagagacgaaggtcttcactgtgatttcgcttgtttgatctatagtcttcttagaactaagcttgatgaagatcgtttgaaagcgattgtttgtgatgctgttgagattgagagagagtttgtttgcgacgcgcttccttgtgccttggttgggatgaatcgtgagttgatgagtcagtacattgagttcgttgctgataggttgttggctgcgcttgggtgtgctaaggtgtatggtgtgagtaatccttttgattggatggaattgatttcgcttcaaggtaagaccaacttttttgagaagagagttggtgagtatcagaaagcttctattatgtctagtgttcatggaaacgctgcgtttaatgatgatcatgtcttcaagcttgacgaggatttttagattttgcttacttgctttatttttagttttgtaattttcagtataatgaaaaagagatgaagtttaatttgataatggacatttaatttcttaattatttaacatagtttttacatgggtaacatataactaatccgatcctagtaattacatgggtcta

SEQ ID NO: 24615 - DNA, 1854 bp, Arabidopsis thaliana landsberg
tcacaattagccgctgtccacgtcgtcactactattcgatctcttcttcctatgatatgactgtgatataaaacaaacgtacagtaccggtgagatctgtgacacctaaagactgatttcttctaaatcgatgtagataagactcttcgatatataaacaagctgataatttcctcttggagaaaagagtaattgaacgaatagttattgggcttccgccggcgatcatctgtgacggagaaacagaacgaatgacggaaggtaggatggagtgggaggctgcaagagctgcatcgagaataactatttcttcttcactgatgatctcgattgggatctcagggaagacgacatggtgactttgagggcttgaaatagaaacagtcccggattgagcgggcttagtggatgtggtggtgctaagcaacgcggaggttgactcggagggtgactcggccatgttttattcggagccaacgtgtggtcttcttcttctttcatgtctatgcaaaaaattcaaaccagagtaattacatttttaaaattgtaattaaaaaaaggacaaagaagtgagaggcgagagagatgaactgttcagacaagagacgtacaatgaaaaaagataaaatgacattaatatagaaaatatatagaatatgacatcaaatctttttttatgttagtttcttaattattaaatttttgttggttataacaccaaatttctctaattttattcataaatatttcaatatgaccgttgcatcaatttccttttttccgagggtttatacagctgtagaaaagtaagaaaaaaggaaattttgacttggcaaaaaaaaaaggaaatacttcttcgcaaataaatggaaatttcttacaagtttattaatataacccgactgctgactaatttttctataatgattcttattcatctgatcaaaattgtgaaactctcttactctgttctctaaagatcgtatttttgtttactctgttctctaaagatcgtattgatcttctttttactctgcaaaaaacgacgatgaaattttgcaatcctttcttgagactcattctcaggcgtaaaccgatctccatgatttctccaacaatgtttctcctatcgtcacctaccacttggtcttccatcggccacagtaatgggatgctgcgatcacgatcagaagataatcttaacaaacttggcgagtgtatggataatatggacgaagacgtctctaaactcttcatcgagtttcaacaaactgatctccgtgaagatcccgacttgttccgtcttctcaaccattacttcaccactagcaaaggtgtttcccagctctgcgagtctcttagaacttgcttagagagatccgagaacaacgagtgtctcttacttgatgaagcactagttgattttgagttggaaaaattaggttatggtgggtcactcgaagaagctagtttcagaaaaacctaccgagatctgaggaacttcaacgccttttacaacaacaattccggtgaagaagacgacttggattattgtgaatttctcagaaagtttcagacttgtcatgaagagttggcgaagatggtcgttaaactggagaagacgatgaaagatatcgacaaaaagctgagacgtgttcgaggacgaagagcgattgtcacggcagctttactagctccggtaattgctgtaatcttcttgagtaaactcgttgccggattagttcctatagagggattgagtaccttcgtagcttcaagatggagaaaatcaacggagtctttgaaacgggagaagacggccatgagttcaatggaaagagggattatcaggct

SEQ ID NO: 24616 - DNA, 1727 bp, Arabidopsis thaliana landsberg
ataggttaaatcaagcacactaactaggcagacaagatatcattaagtctattccacaatttccatgttattacaccaaatgggacattatttggcaaatggaaaaatactggtaaatgaatgcgagaactgtggcctacctcccatcctgcttgtggctgcagtgctgctgctaccattgaacttgctttcccctatcatttgaaagaatacatatcagtcaaattaacaaaatatcaaacagaactcacaaagatcattcacaatttacctgcaaaaatatacgcccattcgcaaccaaacgatgagcatgcaaatcgctgccagggggcaacaccaacaagtcaggaactgtctcgtccttctgcacctgttttttatagtgaaaaaataggagttaaaatgaaatctcataacaaagagaagactgtgacatcatagaaagcacagttcacatatattgtacacatccaagattttaacatcactaactatacgaggattcggagaaaactcccccggtgaatgacttaaactagacctcccttccacaataactaattctaacactcatcctgtgagaactaaacaacatatctagcacacaagtattcttcaaggtttatatataaaacttggaaagtaccgtgtaatgcttctccagctcctgcactgcagaatccacatccattttaagcgtatttacacgaacataccgtggtttcaaatgacctgcatccaaatttaaaaatcaagctacagaaacatactcaaaagccaaaagtaagtgaaacacattatataaaggagggtaacaaaataccagtaagcttagaacccaacaactgatcaacactttcgactttcttcctcactaaaagcgtagctaaacctgacaataacgcatctttatgccgcataagaaacttctctgcatcaccaattgatggagtatcctacaatcgcaaattccccttatagtaaaccaaaacatcttaatttcatcacagaaaattgaatcaagctattacactgttaaacaaacaacagaaccagtcgcaacctctaccttgccaaagaggatatcgtagcaaacgatgaagaccaatggctcttgcctctacaaacaaaagtaaactaagcattaaagataagtgaaacagagcaattttagcaaattcatatgaacaaatacataccttccatttactattcaatacattagctatatcaagaacatctttaatcacagtaagatctgaatacacaacaaattagttccttaagctcaaaattaggaacgaagaagaagaagaagaagtttagttacatttgagagtctcgcagacaagagcgaaagtgccgcgtttgttgcgaacggaaggacttaagacgagtgatttgatggaagcaacggctcgtcgctcggcgtcaccacggagaacggtacggagtatattagctgcttctcttctggcgtagagagctgatctctctaagctggaaaacttttgcttagtagctggtggtgtttttggtttgcgactctcggcgccggaaaatcgttgttttcccggcggcgtttttggtttgtgactctcgacgccggaaaacttttgctttgtagctggtgatgtttttggtttgtggctctcgacgccggaaaatggttgtttagtagctggtggtggttttggtttgtgactgtcgccgccggaaaatcggtg

SEQ ID NO: 24617 - DNA, 1034 bp, Arabidopsis thaliana landsberg
tttcttttctgggaacaacggagctgaatggctgctcaaatacttatcgcgggttgaaactggatattcttctctatgatcagcatttacctgtgcaagagagaagtaaaatacttatcacactagactctcatcaacccgattaatcgcagttgagagcatttggtacacaaatattggaaaaaaacataccgctgctggtcttgttgtagaagggcgaggaaacgagaggtctgtatcatccatctagataaaaagagaagagcataagaacaagttttataggtaatgtgtgtatttatcgctttaccgtcaaatcaacttacctttgtggcccatggtgtagagagagaagaagcttctaccttctgctcatttgttctgtaatcaaaactgagttctccttctctattcatgtatcggccatcatcatcatcatcctcgctagcttccatctcgttcccatgaacagatagatcacagtcaatgtgttgtttctctacagcaacttttacatgacgctcaactgcgtgagacgccctcataacagccccaaagcgtcaccatgtttgaataaattatgagctaaccgggatgcacccaccagtcagtctccactggttattgtgaatgacaacaatgccacgaaacttgcacgcctactctacctgagcagagtgctgaccgactgctggctgtgtgagactgcaagctcttgctccaaccttggatttgaagctgaacgcccgcttgcggcatgttaggaaaatcatctggggcatgagcagactgatatagaaacactctgagctgcttactgggctaaggcctatgcctagttctgaagcaggacatttcatgcacaggaaggagtgttcactgtgcatgaagttggagtaggaaataacaagctgaacgggtgaacgaattccaacaggttagataggtgctagacttcatggcttctctgtggacgctgatatcatgctaagtgatgatgggagacagatgagtcacataagcgctgattcttt

SEQ ID NO: 24618 - DNA, 1086 bp, Arabidopsis thaliana landsberg
gaaagatgtttcataaagcaaaactatagtttaatggaacaattaagtcaaggagaatggtaaataaggctttccctcagagaagtctagcgttgcagcattaatccgattccccattagtttaaccaccttggcatataagatattgtcctgtacaatattagcaagctcgggaaaatgtaaaccgtaccattcataaaccctcttagtgtaagtgttacgctctttgtcaagatcatcaagcagaccgatagataggaatatcatggtctccacctaacaaagacattttaagtatgagagggaaaaagtaacataagcaagggtaaaacaaaacacagagaaacttaatgactaccttgtcagaggtgatttttagtttatatctagcaaggatgtgagacaattccaagctcattggagctaaatcattatcatccaatccggataaaagttcggttaactggcttctcacacctcgtaacagctccatgacagcatcgatgtgaacacattctatgtcctagaggagagaagcaaatccgtaacgtaagacacaagccatatacagaaatatataaaaagatcataacaaaatacacacaccagtttctctgtgatgatatctccaagctttggatcagcgcaccgctaagatttcaccatcatcacagttatttttcaaatacttgtgtagacccttgcttggagttccctccaccaatttagtcacagcttcaagagcttcagatgtgttgtcaaacttatgaaaaacttttagcttaaccattcttcgagctgactctgcagagtagaactcagtacccaaatcctacaagaacaaatttgacatatttaatatataaaaaaaaaaactacacatagacaaggttaagatcaatgaaagtttaagagaatgaataaggtaaataacctcaacattagagagctttccttcatctaatactttaaagagtgcaaaaccacctgacgtcctaaacaggacgagcatttttaagctagcttctggaaaaaaataagattacgagaaaccctttaatcaactcaacgtcttaaagtcagaac

SEQ ID NO: 24619 - DNA, 2447 bp, Arabidopsis thaliana landsberg
gcaggcttcacgtggtaggatgctgacagaaaattatcagaacaaacagtctgagattatggagaagcttgccaagggatgtgttcggaagttgggaactgagactatgtttgaggtgttgactaaaatggggaaagaagcgggtgagaaagaatacaatgcaatgactaaactttgcatacaacgtgcgaggagaagcaatgatgcagaatatgctcttgatcaaattgggaaggctattgaacatctcaaagaaatgagacagcttggattctctattggagaaggagcttatggccctttttttaagtacttagttgatatggaaatggtagcggagttccaaattctcaaggattttattaaggaggcatgtcctgagtcttgtgggagacttgtctactatgaaatgcttctttggatccaagtcaacgacgaagagaagatccacaaactttgcaataaagttgatgatagtgggctaagtttatcaatcctacaaggtatgccacagtacatgtatattatgttattttggaattctggtttttcatttgttctactctcaaagtaaccttttggtccttgaaaacagaatattatttggttgcactgtgcgagaaagacagtaaggaaaattttcagaagctgttagaaattgtcgacataacaacagtatcttcaccagacgcattgaagagcatatttggataccttggaaaatcgctgttggagtctgttgcaatgaagctactttgggaactaagagactgtcgtaaaggtgagatatcaatcaatcgaaataatctggtgctgttttaccaatcaatcgaaataatctggtgctgttttaccaatcaatcgaaataatctggtgctgttttaccgtattggtattatgaatttctaaggtggatgcatatctcaatatatagttggagtgaccagttcatatttgatgcaaactaaaaatgttcgttgatgactcattttattaggattgtaacattgtttcttgctatgtccagatggagtggagacagtttcaaatctcatattcagctatgcaacctgcatcccaaattcaacggtgaggactttctatatatattgcttgcaaaattattgatgcggttgttaactctggtttttccttgttttgtttttagaatatttgcatcaaattttaacattagcatggtgatttttgttcattgacaatgtttcttgcacccaactctcgtcctagatcttttttggtattgaagtagatataactagagtgtgttaaatcgctttgatcccaagcgttctgtgagaaagtaacgtgacaccttccctccattaagaccgtctagctgaataatatctctcttcttaacttttggtatttaatttctttagtgtcgaccacatttacattggcaattgtttctttctccccgagaatgagaaatgatatatccatgagttttaaaatgttgacatgatgtttaatatacaatcctataggtcttgagattgtgaggtcccaacttgcttttcatgttgggtataccacaaaaacttggtccatgtccttgaaccaaccaaatatttgttctgaatcgtatgccatttttttaatgtacaaattatagtgagtagctaattaatttattcttattattgctcggaaatggtagcagactctatttacagaaaatgagattgaaatcactctcatcttttaagtagcgctaagctgtttaagcttctttttaagatagcctataacccctaaccgtccatgttcttacatattttggtgactaaaggtagaggatgccattttcaagtttaacaagttgcatgaagaactagatatcgtgccttcatctacatcttatgagaatcttgtcagttatctttgtggctcaaatgaggtatttgtacgcttctgtcattttcaactttcatttccaatactcttctggctccatagctgactaatgataattcctctgtgttgtaggtggtcactgctcttgatatagttgaaaatatgtgtgaagcaggtctggtaatatcagcaaacatcctgcactcattgttacaggccattgagcagattcttgagtttaatttggtacggcctccttttgctcgaagcatgttccttggatttcgtcccaatctttttgttgactgactttatcagttctaaatacaataacacagctaattttaggctggtcattgatatgctcttgattgatcattgacattgtctttctcatactcatgttaaacagagttgcgtttgatcatacattttctgtttcaggtgcaaagaatctattcaataatgagcaacaagagtgtgaagccaaatagtgagactttcaggaaatctataaatttgtgcataagaatcaaagatgtaagttatttctaattctatcagc

SEQ ID NO: 24620 - DNA, 2071 bp, Arabidopsis thaliana landsberg
taaagttggaaaaaggtatcttttggcgatgtgctactttgattatgtgtgcatttagactttttaacatcctattaactccctcatgttgaaaatttctgctcacggaatttagctcttaatattttcacagttctttttttttcttttatggaggcttatagcgcgatatgaactacttcattgaagtgactctcaaaacagtttggaattggatgaacaataactagttatctattctgatcattcattacctattttcgttgtaggtactgaaatatgttgaaggtttgtgctgggtttgccggtactactaccaaggtgtatgctcttggcaatggtaagtctgactttacaaaaacttaatgtcatgttattcccatgagagccatgcattctaacaaaaacttggtctcttctcgggaaagaccttgatgttgatgtcacttactgagaaatactaagctgcaaattttaaatgtaattttgtgttttcttacactttcttctaattgtttcaggttttacccataccattatgctccatttgcttcagatcttaagaatctacctgatttagaaatcacattttttattggagagccctttaaaccttttgaccagttaatgggaaccctgccggctgcaaggttcttccctttttttggaaccttaattattaatattgtgggcctctatggtgatgtaaattgtgtttcttggttgttgcagctcaaatgcgctgcctggagaataccggaagttgatgactgatccctcatccccgatacttaaattttaccctgctggtaattgttgatactgaatttgtattgttgttttcctatatattcatgctggatagttgacactcataagctatcattctatttatagattttgagcttgacatgaatggaaagcgcttcgcctggcaggttcatggttgtttgtattctttggatatagtattgatgttatcatgctgagactgtgtattttgttcttcagctgttgatgttgtgtgttttgcgcttgttgttatctagggtattgcaaaacttcctttcattgaggagaaattattgttagctgctacaaggaagcttgaagaaactctaacggtttgaactgaaccttgactcgaaatgcataatgtttgatcaaaactttattctctccaaaggaaactataattctttctgaaagatgattcttggacctgcaggatggtttatttgctagttataaagtagttttatagcttagattgctctagccatcagttttcatggcagtttatgattaactacaatatggatccatctttcaggtggaagaacaacaacgcaacagtgtgatgcttgatttgttatacgtacaccccgctcatccactgggccagcggattctgcagtactatcatttctaccagcacatgccaccacatgaatgtcttccatggatgattgacccgaattctaggtttgtttttattggctaaattgataactaacaagctgtgtgtactctggatatcgagcttgttcttaatcatcaattcgtttgtgtttgttgcagccaaggaatgaacggttttctttggtttagtgaaaggaatggtttccaaactagagtggattcccctgtcaatggtttgccatgcattgagcagaaccgagccttgtgcgtttcttgtacttcacaagttagtgttcatgaaattgatgaagtcttgatttactcacttatattttcctctacattttccagaaatgttacatacctgtgtcctgccaaacactctcatatctcagaaccacccagaggagcgatcattccggacaaggtatgattcctcaaaggaattcgtcatgaacagtagtccatctctactgcatcaaaataaatagaaacttaggtttttatagcgtttatgagaatctacttgcttgcatctcaaatgtctatgttttcttaccagtctatttatctgctgaatattcattgcaaaacaagtgttcttaataaagttcaattggcagatcttgacgtcagtagatataaagcc

SEQ ID NO: 24621 - DNA, 1598 bp, Arabidopsis thaliana landsberg
tatagatcatatatctaaatcgtaattaaaatatatctattaaatctttattttatttttcttataaccagaaatttcggaccaaaaattagactattcactgaaatgttaaaataaagtcagagattttacttattagtgggtttcaataatgttagaagagaacgtgaacaaacaaaccaaattaataatccaccacatgaagatagatatctccaactttgccaaatatttatgtttctttttgacattttttcaaaatcatgcatgacctatgtcttaacactttttggtgtttgagatagtttcgttacatgtggaagtggaagtgaactaatgtgcttttgatccatgtatatcattaagccattaactaatgcaatattcagtttatgcttctttagctcaccattactcgatcaactaatttcctcttatcctaatcctatatttactatatacatatacacacatatatgatatatgtccaaatacgcatgcaacaaaatttattgtttgtagttaactcatttttgctccccataatcgttcgatctaaaaatagagtaagagtaatttaaaggatgttctgtatatataactgtcgtgcttaaattagtgtaatcgttaacattttggcaacccgcaagactaaagttacaaatttagatatggatcaacacaaataaaatcaagaaattgaacttgaagtctatgcaaactgttgtgtacagagaacctaaggttactcttccctaatagcttccctgattagagttgatctttgataaccaaatgtaaatcattggaaaccaattagtttggaaatgtcttaatctcaaaacaccgaaacacgctttcggacagttgactttgctttctgtgcttatatacttataatcttccaacgataaaagattaccctatcccatctcagtgttgcattttaaaaataaaatgcgaaatatattttataaaaagtaacaaatgcgtgattacttatattataagaataatgccgttaatttcgtcacaattccactatttttgattggtctctccactgtgttaccacccaccactcacatatccaatgtatacggttctgcttaccaacataacaaaatgttctttaatatcggtttatgacaacgaccggttactaaatgccatttaatatctaacaggttaatttcgataggtcatattcaaattacatatttacttttttcgacgtgggttaacttaactcgttggtttctatttcgaaattgactgaaattgactttgatgattctcttccatgcaaataccaaaaattgactaactaagcttatacggcgtgtgatttggttaattattaacttttgttttcaagtccaaaaggttacttgatccttgtcttactctcattggtctattatttaaaattctataatcattgattttttaccaataaaatctcttggtgatggcgcaaaccagaaaacgtttcgaaattttattatgtattttattttttacgacgaaacgtttgcatatagaattaaagcctgggagaatacattggaaaaaaggcgattataacttcatgctct

SEQ ID NO: 24622 - DNA, 1962 bp, Arabidopsis thaliana landsberg
ggccggctaagtttgtaataacaaatcacaccttcaatccaccagacatagatatatttgtctctgtacgcaagatgaagctatccattatagaactgggattcatgtgttgtaaggtggttcttagttttattagcattaaattgattgtgtattatatcaagattcgcctcttgtttaacagacgaatgatgagttaagaggcgagcacgtgtctatcgctaagtgaggaagagaaaatatacatccgaaaaaatcatgctcgtgtttctctctctcttcctcttccttctctctcttttttttgcgatttatatccaatgaaagcaaagcaaatttctctctaaatcggaaccaatcggagcattagatgatgtatattcaatcatgatgttctttcgccgttatctcatcatatccactgatgtcaggtgtcgacggtgagtcttggtcatcgaatcagttaggtggtcattcaaaatcggagagcaatctcaccagatctctgagtttcgtacgataaatcggtgttaatcgttcaccaaacgggttgtcatggtaaaaatctctcttagtttgtattagttggtgttgattgattgttttgaaatagggctcatcacaatgagaaattaggatttttttttttgtctgtaaaattaggttaatttcatgattgtttccattaatagtccgttgtatcttaatttgataattactagagtctttggtaattaatgatttttttgtgggcagacaaagtgtttttgaagtcttgataatttttttgattaataatctttggatattaaatttgttcatgaatttgattagttatttttcctatatacatgaatgttaggtttcttttgagatattatgttaaaacggttaaggttttcgtgattttcattacaatttgatcaaactttctctgttttattttaaggtatctatgcaaaaacttgcacgtttaaattgagagagaatctgctacatattcatggttgaaccaaggtcccgcattgttttgtagttttatttgactttttgatatagattaggtaagacttttttttatatagattcatagtgtctgtttcatgataaatgcatttaagtgtattgacttgtttcctttctatatgtttacatgttgattagcatgtctacatcatttttattgattactatatgtttatgggggaaaatggcattttccaacccgaaagatttacaaagtgcgtttttataccttaacaaatacatagtactgttttcaacctcaacttcaaaataatttgaataaactacctaaactattaaatttgagcgtaaaactacattgacttaaatacaattagtcaaccatttgttttcactcactttaccgatacgataacaatgacaagtaacactgttttggttatttgagtctataaactcaagatgtgacaatgaagcgacgttttatctttacaagtgttattttgtcttaatcaaagattatcgtttcgatgagttgaaggactaaaatgacctaaacgacgtcgttcagttccgtttatggattcaaatggccaaacgatgttatttgattaatataaaatgatgtcttgttgccaacatatcgtctaagtgagtaaaaaaaatggttcgcaaattttgtttaagctaatatagttctcctgtccaaatttaatagcttatgcagtttattcaaatattcttggagttgacattgaaaactacccggtccggttttttacatgtgcaactagtgcatttgcactgggttcacaaaattgaaagcccaaattaagaaattctttacaaaattttctttaaaatcctacttttacgatttatggttgtagccctatttaaatacacgaaaattaatggccccaatcaatatacaccacctaaaattaattattattgctatttttttcaaaactt

SEQ ID NO: 24623 - DNA, 1446 bp, Arabidopsis thaliana landsberg
ttgttgtttttgactagtgataataatgtctcatggcctccctctctggttcttttctggcccctcttttatttatttttaaaggaaaaaatatctggctataatattgattgttctatttaactaattggttggctcactatactagcgatttgtatccactaaataaaaggttctacacatcgtgatttaaaatattcgaaatttggagttgaagcactagccatcatttcgtaatttgcgagttgaattgtgaaatacttttttgataaaaggtaaaattgtgtatcaaaccatgtaattatgttttttaagatgaagaaatctatacatactttattatgcatgttgattacccttatttcatatcctaataatacaaaaagtgagtggaattatgacttgtatactattcccgcccacccattttgtaattaatattatttgctgggttacgacccgtcaatgttaccttgccaattccaaaattcatataccatgactacttacatagatatcataaatactctacatatatatattttatctataatatgtagattaggttacgaaattcggtggcgaacttggaattctaattacagattaatttatgacttaatatggtcgataaaacatatgatttaattcctaactttatataaagtactaaatatataatatgttgactgtatttcaggaatatggattattcttcggacgtaatatactataacactttcttttatttagttctgttatttcgacgaagaaaagggacaccaaatttcaccctttatttcaattgtgatctgcttttttcgtagaaggaccattattatatattacaccacacatggctacataaaggtaatatgattttattcttaaatcggtaaagccatacaacaaatgtcgcgttaatcagataactaaaataaaactttgtaaaaagcacataaactgaaaatcgaggccaaatataagaaaccaaatacacttttcaaactaacaatactgcacgagttattgtgtcacatatagcttttccgtttgtaaataatcattctaaaaataatttaatcacgtgttattaaaacgttaaaattaatcatccaacgtgcgatatggtttactaaaatgattaaaatcatattttatgtaatcagattatcgtggtggaatttagttaactaacaccagttacttgagcataaaaatataatcgcttataactaatttttatatcaatacaacaataaattacagaccacatatcttaaactaatatagaattttgggtctaattttgaccaaagaaagtaaaacggtttgttatgtaaatattcaaaaatgaggggttggagaagaaatagagaaggaccgacaggaagcgacaaaaaagaagagataggccccagttttgaggcgtgattagcttttatg

SEQ ID NO: 24624 - DNA, 2333 bp, Arabidopsis thaliana landsberg
  unsure (1)..(2333): unsure at all n locations
gagtttcattatcttatttaccaccattcatgtcattttattacaaacatgaaatatcaactgtgttttctataaacctcactcgttcaacaaaaggaaaacaatcaaattgatgagttttaagaatatcaattcaataatcttgtgcgtgattattgtgcgtaatcttgtgcaacaaaaggatgtcgtgtgccgccaaacacgagtggacaaaatgcgtgaaacgggaaagagtaaaaaagattaaaagaacaccaagagacccagagagagagggaacaaagagaatcggatcggtcttgagattggttaatttttggttcaattgagatacggcgaccaccgctttcccaaaagatgcctctctgtctcttatgctctttgcttcgtagaacacgaaacctaaccctaacgattaccccaagacgcaaagtgttcgacttcgtaatttcacattacatgtcatgtctcttcactcacgtgacttctaatcttattataatctaactgagctgttgaagcctgataacgcctaatccagcccacgtttcttggcccatcatatcaccttcatttggttgaatgttgttagatttcgcactaacattcgttattttcttcgacaggtcccaattacacaaaaatgaaaagtctttatataaactaacagattttacaacaagagccaaactggttttgtcaagagtcaagaccatcattttgaactataactcaaaaaaccacagaagaaaacaccaaaaaagtagctccaaatctctctctataaacagacaaacaacacgaaaggagctttttctttaattgcactttgggagttttgtaaaaaagaaaagatggtttagtgtcttaaacctctctttgttacagtaattgatgattacctcatcgtcttcttccatgtgttgtcttagaaacagctttcatgccttgagaatctctgaagcatacaaagtgaactaacgttttcccgttgggataaacagcaaatacgcttgtccctatcttcttgttgcacaatgagcacatgctttcgcttgttacttgcgctactcctttcctatgtttgtatagttcctctttcacctattcgtttcacatcatcaatttcacatacgggtttcttttaatgctaggtgtcaatagttccagaaacacaaacatacctgtaagttttcactctgcctcaaactcttgatgactgaaaagtttctgtgagcttcacttgaatttcttagaaggggtgcaagaaacggaagcaggttctgtaggaattggataatagaataggtgagcttcaataaaatgctagtaagtagttatgggataagtataagtcagattcaaaacatttacatggagtttagtttctctaggcaaaagcttgagggcttgtgcaccgttgatcctctcccacctttggctctccagatcaagaaacttcagagatcataacggtggagtctccttcttccaagggttcttcagtatcaacatcgcttcttccactgtcagtgctgctactgagaccaactcgcatatcctcagcgccttctattgcaacaattttcttggatcggcctcctttagcttttgaagataaaacagagtccatcatttttgtggtgtctgaactttcgaatgatcctagagctacaattcgttttgcaaagtcttttgcgcttttcttaggattcaggtatatttgcagcactgtgaggtagatattgcttgacggttttccagatggtagataagtaacagactcatatatacgatcacagtaagccagcgccagatcaggtgcatgaagctatcagaaagaaaaaaacaaagagttaagccataagcaacaacactccatagaatccaccgatatctgagttctaaatagtttcagagtatacttatctacacaatgatacaattatctaacaatgcatttgcatatcaaagtgttttttaccacaactggccaacaattagaagattatttggtgaaataaattaatgatatttggttcatgttaaagatcgacaaagcaagctcatgttgatgggtaccttatgaacatagatggacaaagcaagctcatgttggttcattttgcccaatataactgcacgctcttcatagagagcatcacgtggaagacgcttcaacataggctgcggactatatccggagatgctctctaacgcagacaatagttttttnctttcaggaggatgatccttctcatcccatttctgctgcgcactctttgcagcatacaagtcaagcacttcttgaagatagatttgtaccctgtaca

SEQ ID NO: 24625 - DNA, 726 bp, Arabidopsis thaliana landsberg
tattgttgaggggttattgtttttggaaattaaaaatgtatttcgttttttaattaaatttaattaattaaattagtatttgactttttaatccttaaacagataaattaatttactctttaaaattttatttctaatggcatacctatgtaattatttacaaaaagtaaggttatatttaaaatgtacttcccaaataatatagtaggatatctgatttttgttaaattttattttaaatagattgttgttgttgcatagtagtccactttattaaatctttcataatacaataatacaatgttggaaaagtttttgtttgtttttaagttttacaataacaaacttaattataaagataaagatagttatgttattattaaaaaattaatatagttataataatttaatttgtaaaaatatcttatattaaataattttgcatataaaattgtaaatatgtggattatttttcttatacaattgcaaataatggttacgattgaatttatgttgtaatgcaaatatgtggactaaatgataaagtgttataatcaacttacaaacactttagggtatcaaaccttatttaaaacagctcgtcatatgatcttcttttttttttttttttttttgtctaaactcgtcatatgatcttaaaactttacatttaacatgtgtctatcataactcattccatcatatgactttcgatgagtttttatc

SEQ ID NO: 24626 - DNA, 1727 bp, Arabidopsis thaliana landsberg
atctctcctctcctgtgctctcatctggagacccaatgttacaccctgagtctggtgttaaaggctcccggtaagatgagagagactcgtcaactgagagacttttgtctggtccacagtccttgccagacttgtcttgaagaggagactcagatgttggggcaggggttgcaggatctgaatcgcccgttactggggctgagggttcgccgagtactccactgagtcgttgttgctcttcaattatcttcttcaagtactttccttgtgcttctatccgtagttgcagctgtctttgcacctaagaaaaaatcacatcaaagaataatgtcatatgtaatgcaaaattcagtgctacactgaaaatcctactaattgtttcgttgttgcttgtctttcttaagtaggaatggtgaagcatacttctagttgctcgtgtaatcgtttctgaacttccatctgcaacttgagggcttcagttatctgcattcccctgtaatctcgaaacgatattgatcacttaatctgcggcgcgaggtaatatatatatagcatcacaaatcaagctcaaagagggaaatttcacgtacgacgagccgtccaacccagagagcatatctccagattctttcttatcagtttttttccctgaaaattgaaaaaaccagttttcaggtatataggaaactggtagaatgagaaagaagatgaagaaaatcaatgtccacactaccttcagaagacgaatctggaagatactttgcaagtcgatatttctgactcaaaatacacaaatgcaaaaatcagcaagggtaagagaaagagagacgagacaagatgccacacagtttgagaatacctgtaagtgactcttgacatgatatatagttaagccttgtacacccatcactctaagaacgcctttgggtgtagctcctttggaaatcaaaggaagaaaaatgtttaggaaccctaagcaaacagacgataggctttccctctcatggatagtagtaaagcatacaagaagagcaatttgattatattggtgtgcatattattaccacagatattgatgaggaaaacatgagttactaaatttaccatagactatacaagaaaaaaggaaacttactatcagggccaccaagttgagcaacggcatcaacgaagcgttcatgtagctcatgcgtccaacgcagacgttgtttggatgcatgactagaattggggcctccgttgtctgcttccatcagggctaagatataaacacgataaagggaaagtaatgagtagtggcaaagctaggaaatgataacatatgaggactggccagagagaaagagatagaaatggaaacaaggaagacgaaatagcgcccagaattagctagtaaaaacagtccaagtcaagtttaagacttgctccggcagatccaccacaggacaccaaaatcagagacatgttcactaaaatcggaggaatttgtcgccgagaaagcaaaaagaaaacacaatccaaggttatggaatctacgaacctgtgggtggtggatctatacacgacgcccctccattttcggaacttgctcttctccaagctaaatcttatctgaaatagaagatattgtgttacagactagtttactgagtccggtgggttacagggcgggcggcgatggagcagagtcctcctcaaaaaaattccagtcttcttcttatcgctaa

SEQ ID NO: 24627 - DNA, 1803 bp, Arabidopsis thaliana landsberg
acttcagccaaagaacaggacttctagctcaaattgaggattcgcagttgactcgaatccaatctaacgatggtgatgctgtttactgggagaccacgatcaattcgtctctagacgactacaaacaggtggaagggatcatgattgctcactctggacgctctgttgttaccctcttcagatttggggaagttgctatgagccacactaggacaaagatggaggaaagatggaccattgaagaagtcgctttcaatgttcctggtctgtctctagattgctttatcccacccgctgatcttcggtctggttcgttaactgaagcctgcgagtactcgggtcaagaggagaaagggaagagctcactagcgttggcttcaacaacagctcatagagctaaagttgcagccttggagaaaggaagcttcgacaatgatcctgtttggcatattgatgtctgagtatggtagggaagatgcaatctgtgcatagtaatgctaataacaagactcgagccttgaaatgagactaactaacccctttgtttaacagctcaaatattaggagtttgattacacgattggtttatttaagtttcatttgtcttattttctgtcgccttcaatattattgagtaaggtgatgggatttatttgcagcaagagaaggagaattgctgcttaaatgttgaatttgtctcatatttttctagcaagtcaaaatttcaatctatggaaagttaattgttagcaagtgaagctctcttatcttcttcagctttcgttgattttaaactgaactaaaccgttttaagttggttgaatttgaatcatataggttttaatgttgtcgaagacatgaaattgatgtgatagaaaaagaaaggcaggacattcttaatgtatgtattgttaattttagtggttagagagtgaggtgtgttaggtacccaatagagaaagtgatggttaggagcaaataaatgggattttatgaaaggaattgaagatgatgatcatgaatttatgaagaaaggggtccattttgatatgcttttgtagcaaaaaatagctttttgtgcacaactgtcttctccttttagccttaactttgttttaaagttctcttttttttggcataactttcttttaaagttgttataaattgattgaatcttttgatattagacttcaatatatgtaacgtacatggatgtatgataatgacaacgttttggaagaggaagcaaagctttaaagtagtatcaccagattgagacaatcaaaatttctgaaaatgaaaacgttaagttgttgagctataacctcaaagcataaccaaattgtcggatcaagatttggatttggaaaaagtctctttcatataaccaacaagacattaaaagagagatcacagtgactaaaactaaaaagattcacaccatacgatatcaacgcttgaactgcctaatggcacaacaaaaaccattacaaacatgtgacagtaaaaaaaacactcatgggcgacaaaactcagaagatcgttttaaggatgtctatagcaagaagaagagaagatgtgtatggctatggcctaatggttaggcaaagattctatttacaagtttctattcctttgctatggctctacggcaacaaggacaatctccacaagctctaagccaagggtttaagcaagaagaatggaaactatgggtacagggtaaggatattagcatgtcacctttagtgaaactctctaaacatatgctacaatctctcatctcggatttaacctcggctg

SEQ ID NO: 24628 - DNA, 2137 bp, Arabidopsis thaliana landsberg
tgatatcgatttgaaacccggactggcttggattgaacaagcgaagcaacgagagaaagtatctacggtttctctgttgcttgtattttttgtgtgtcgattcgacgaagcttatttttatggttttgcgaggaagaagaagaagaaggaagctgcaatttcaagtctttaaagagaattcttgaaaatccttaagagaaatgaatggtcactgtttatttgcagcatctcctcctcgtctcttccctcttcgctctatatcatcgagggtttctccatccggtagttacagaatcaaattctccgataatgtcgccgttgagtgtcggaatctctgtttctccgttagtacaagacaaggtatatctgttcctattctccgtgattgctcctttcggattccttctggacaattgtggatgattcttggtcctaatggctgtggcaaatccacccttttgaaggtctttctcttttctcttaaacattgcatttgcagagcaaagacttaagcttttgttaatgaagtatcattattcttacttaagtcatccttcaatctggtgtagactaggtttgctagttgctactttgggcagaatcttagatcatcacactgtttagtgcaatagctaatcttggcatttataacatgaaactcaaagagcattcaaatctttggatgctgtttgtatgtgtaactaagactgattacaaagaaatgccagttaaactgtttgatctacattaactgcttggaactctgcagattttagctggtgtagtgaatccatccagtggcactgtctttgtggagaagccgaagaattttgtatttcagaatcctgatcatcaggttaagtttcttgcttttgcaatgtgaatcatgtgtttgattttatcttgaaggatcttacttttttcccatctttgttttctttattgtgaagtgttctttctgatttgtattgctgttttatagttgagtaggcttgtgtggttgagcgtctttttccatatcacagacagccttaatccaaatctttaattatcctcgaaaagctagatatgctaatgacatcgagaagagtcattttgttgtcacatctgagggagatcagttagtaacagttggattttgattcaagtaaaaccgctcattctggtcacatctgaacgttcttgttcatcgcaggtagtgatgcctacagtggaagctgatgtggcatttggtcttggcaagtatcatgacatgaatcaggaagaagttaagtctagggtgattaaagctttggaggctgttggtatgcgtaattatatgcaggtcagtttatgtacattgaacaacaataagttgtttatatcttctagttccttttactaaagtatagattttggtgttgtttccagagaccgattcaaactctcagtggtggtcagaaacaaagaattgccattgctggtgctttagctgaagcgtgcaaagtgctattgttggatgagctcacatctttcctagatgagtctgaccaggtaaggtttgattaattctaacaacgtgctaatgaaacacaactagtattgcaagggaacccttccataactggaatatttcaacatcgacatatgattgtgttatagtagacattggaagtgagtaacttgcacaattgatatagtatctagaagaaatgaaatgaatttgacagatatgttatgacgtatacgccttttttaatcaatgcatattgttttctcggggtttttgttctgcagatgggtgtgatcaaagctgtaaaagatctgataaatgcaaagaaaggagatgtgacggcattatgggtgacacataggttagaggagctcaagtatgcggatggagctgtgtatatggagaacggtagagtggtcagacatggtgatgcagccaccatctcagatttcattaaagccaaacaatcgtcttacattgatcaaattggttcttaaacttcctttgctaaggatttttttctttattacctctatatatatatatatatagaggtaatgaaaagtcgattatttgctaataatttgtgaaaaattgtgataatatagctctgcagagggtaatgtagttaggagggctcgaact

SEQ ID NO: 24629 - DNA, 1731 bp, Arabidopsis thaliana landsberg
aaaccttgataatgctacatcattagagactgggtatatcagacgaatgactctgaaagaatatggctcacatgctgtaatggtgcggagaaacctttttgtggcatgctttcatgattgctactcatggctgacagcggagtgcaactttcgtggagaaaatctccatctgataagcaccttttcacaagaaacctgaaagcattatactaagatctaagaatctgacaatacatggtaatcaaggtttctcattttaagagatatcaggaacaagtcataaacaaccaaaaaaaaaaaacagattgagctctaaatcatttctatcagcagctaaaatttctagaacaacatacaactcgatgcagtgaccaaaccaatcctctttttctcatgactccactatctcaactaaaaaaacactccattcgtccaaattgtttggtcatcccatgaattagaaaatatcatggtaagattaggtcacaaaagttacttagcatgaaaaatggaagtacattagagaatgacattctaatatcaaaggatgttgatcctatccgtctaaaatctcctgaagtagaaacctcaactaggttataaatagataacatggattcaagtttgcatcgtcagaagttacctttcatctttccctatgttcatctctccatttcgtccattggagagagaatttgatcgtaactcccagattgctggcattccctgttcaggctggaacgtgccaagaaatctgcatacagaaaagctacaaacctgaaaacgtttttaacataaatatatttagaaagagatatgaagcaccttacatattaatggcgtcttgtttatctgcatccatatatgcgttgttataatatcgttgtagagttctcaagaactcctgtgactgagttgctgctctccactggcctcttctctcactgaatacctattgcccaccagaatattccccgagtcaacaatatgtatccacataataaggttcaaaatgttcacttaatacctttctttgacacttgacatttgccaactaagaattgcagatgattttaaatgttaaccattgtgtaaagaaaaaacgcaaattacataattaagaaccacatcactaattgtttctagcaggacatttattacaagactctatgaacaagacaaaccatattgatgcttctgtgaactaacattaccttgttgtgggctgcggatccgccatactgatgagctagtgtgtcacccattctctcatacaaccccattaacgaaatagccaagggatcatcaagttctatggcgggaacatctctaatccctaatacatgaagctgctgcccaagagcagcccaaccgtatgcatattgtgctacatttgtacggtcaaggcaatcaatgcaattggtcctaagaacgccactctgaagcctgggtggcttgacatcacattttccataagcaatattcttactcctactagattttttctcaagactatcatggtccccattatcatcatcagaactagtgtgtggagatatatcccccgtgtcggcactgcaatttttaaaacattattacatcatctctaccaacctgccgttgatgctatttctcaattaaaataagttttctaaactgatgataatcaatgactataaccgagatagcaccactaacaagaaaatacaatagtttacataaaaaaaggtg

SEQ ID NO: 24630 - DNA, 1662 bp, Arabidopsis thaliana landsberg
  unsure (1)..(1662): unsure at all n locations
aaataaaataaaataaaaataggaagctttttctatacgaactcgatgaatctctgaagaaacaaaccataagaacatcatgtaaaactaaagagaacaaaaatcaaaactttccagaaataatagctgaggaaattcaaaagtcaagatttttaacaatcatacctatcggtgaataatattccgaagcagaagctcccaaagcagagtaaaaatgtccattttttagatactaaacttctggagggaaaaagctctcctttgatcttcgtcgacattatttattctcttcagctaccagaggaagaatagagattcctcaggagtaaaagtagctaatttaatccaatcaactccataagattaatcataaccaaaaatcaggttaaattcagatacatcaaaaagaagtagctcataaatcttcagagcctcctaataacaataaagttgagatttttcaattagtccgagagaaattgaaagagaagtggtgctctgtagtttcgtattgtataataagagatggaattaaatagattgttggtctctttctttctctttctctggctctgtatttttgacgtaagagtggaagaggaggggtcgttgaagaagaagaaataagaacgaactcttaaccgttccggtttatacttataccaactctgggctgacatttcttggattttacccaactatccctatcaataccgttttttattaaaacctaactaatttattatgatgtgtaattttgataacaatcgtatgcctttttttttttttttttttcatttaatcaaatctcatgtctttcttatttcttgtctttatgactcatattttcacagacacccacctaatttttcaaatttttctagtaaagatatatatttctttctgcggaaaaaactaaaaattcatttataattggtgctttgttagtttttaaaggtgcataatgagacacatttatatttatcttttcaaaaattatattatatatacatgtgtttactaaattcaagataatttaaaagtatattgtaacaatatgcaaatgagattgatatagttgccaattaattagttattgtatattaaaaaatctcttgatttttctcggagtaaaaattaatattcatagtgttaaaaaaagaaaattaatattcatttgattgaaaatatttcataataattgatagaagtaacaaatgcgatgttaggacaccaaatctgacaccactaaagaaaatgatgtgtactaaactactaattcgtgctagaaatctataatattccaaaattttgccttttgcctttctggtgatttttacactgttgtgaatattatatatataccaataagattatcatcccattatcatacgtctcaaagggagaattaaatatacatatatgtttgtggcatgaaaaaatctatatttcgagaattttccttttggtgtgggtgtagcgtagaggttgaaagaataaggcggctgatgaaaaagggcatggtggtcctgagcttttctcagcagataacacatgatcttgataggattcgttattcaactaaactttntattcacaaacaaaaaaaaagaattatttacaccatgaatatcattttcatcatagctagcctgaagtctc

SEQ ID NO: 24631 - DNA, 1832 bp, Arabidopsis thaliana landsberg
  unsure (1)..(1832): unsure at all n locations
atgtttccatctccaaagtggaaaagattacttgggaggagactagctgcgattgtgttcaactcggccattttatccgtaactgttgtgtgatgcttgcttaaggtttctgagcaacatatattgtgtttctgctttcgtttttatgtttatgtttaaaataagttttggcgattatgacgccaaaacataagtcaaattgttgttatgtctctgtgtgtgtgtgtgtgtatgtgtgtttgtttctctgttttgcttttgcgtcttgggtttagacggcaaatcatctcagagaaataaatatttgtcgtaaacttgtattcgcatgttttgtgttatttgataaaagttgtgtttatgtgcaaaagattaaattccgtttgtgtttttataagcttatttgcatcttatagttttgtggtttcctctttggccataaactcaagttgtcaatttgtattgaaatttgttaactgttttcaagtggccttagttttattttatagtgtcggttagagaatcgagtctcaaatttattttgaagaagtttttactaaataaaagattaaacatatacaatgtgggattagcgtgtagtttagttctttccttttgttttttgttttctttttctacaagaagacaaattccaataattgaatagtggaaggaagttatctacacaactcatttggtttggtccacaagcnnnnnnnnnnnnnnnnnnnnnnnnnntttgactattccttgtcccgcaagtatattcctcttcttgttatatccttcaagcaaccttttttatcatttcacatctttcttctcccttttttttgtgtgtggttaaggtctcatcgatcaacggataagatgaagcgtgaaggcaaacaacacggtatggtcaggacttaccggattctgcctccgtcgctgaatccaaggccggaatcgaagttggtcaaccctttgacttcacggccaaccgctggattatttaccaaagtgacatcaaagccgaccaatcactcgaaattcaccgggaaatgtggtcaagcaaggtgccttgagtgtcatatgcacccggtcaccaaatctaaagccaagactaaaggctcttcaaaggtgagaacaaacgatgtcacctataagatgctgacttggcaggtcgctgcgggtgggcctagacccggtttgaagctttcgggttctcggctaccggaatacttgatcttatgtctgatgattatggttatgatcatgattatgatgaagaagatgaagaagaagaaaacagaggaggtgttgtagaagaagttgtgaaaatacagagtagtgatgatggtggtgaaacagaagaagatggttcacatgatgatgatacagatgatgatggaaggatgagtttttgtgatgtggggatgatgatgatgatggatcatgtggaagaatatgatgaaggatggtatttggttgaagaaatgatgacttaactgatctctctgattatcccccaataattgtctttccttttgcttttgtaaattttatcatttttaataacttgggggaatgaatgattatttctatgtaaatgtgatttgattctaaaatcaagaactatgatttataattgtaatttatgtaaagttgaaaccttttctcaagaactcattcccactccaaatcagaacagaggttcaactactacaatttatcattcttaataacttgtgctagtgtgatttgattcttaaatcttgatttataaatgaaattaatgtaaagttgatacctttatccattccaaattagaaagagaggttcctgcaatcaca

SEQ ID NO: 24632 - DNA, 2765 bp, Arabidopsis thaliana landsberg
aattgtttcttcctatcctcaatctggaaatttaagggggtcttatattaagggtaagtcaatttttctttgtattttccacaaggagtttgtgttcagacttcagagcataaaaagtgactggcttgattgtgataggtcatgtgaaaaaatggtaactggttcatcttatcttttgttcagtcactataaagtgtccctctgatcacagaatcttattctcctttctttttttccttacaaagttcttgttttgttatgcttgtcctgttcctctttgctgctagaaatattctcttcttctactctctcttcacttttcctggatcttttaggtttaaattttgaagcttgcagagctggaaagtttcttcattaggaatctttgcttgttagtttcgtgtcacctcagataataactaaatagctgtgaaactgcagggaccataatgaatgaactccgaggcagaaaggctcaaaagattgaaagtccagttccaggatgcttagggaagatggttaacctatttgatctaggaactgctgttaatgggaacaagttgcttacagataaaccacatcttgatggtaatcactagttccctctgtaattgctttgttcactagtcgaagctttctgttatgtttctgaactgagtaggatgtcctagtatccacctgtgttattgacacgaggtagtttcatggcaggatcctctctgtcaagcagtcgatctgatgtgactcgaatgccaggcccttcttatggaggccattcagaagctgaattggtacgtttggttaaataattagaaatagtatgcatgctagcaacagcgattttaatattcagaagctgaagtctattgcctgcactgtttgcacagattatgtctgatttgaggagaagtgcttctagcaaactaagtggtacaccgatgaagaaactcattgctcgagaaatgtcaaaagaagttgaacataaacagagcccaactaatgtggttgctaagttgatgggtttggaaacacttccccagacgcatcaggagactgctacacagcgaagcaaatccagaagcaattcacactcttctctgaatcattcgatgacttctacagataatgaggttcaaaagtatcaggatttcagtagggaatttaaagatgtgtatgaaacatggcagtcacctcagaaggtgagtcgctcaagggattgctcgcctagaaaaggaagatatgatgaaagtacgactgagaaacaaatggctcttgttcgtcaaaagttctcagaagcaaaacgccttgtaacagatgatagtcttcaccaatccaaagagttccaagatgcacttgaagtgttaagctcgaacaaggatttgtttgttcaatttctccaggaatcaaattctttctctcagcagaatctttctgactttcaccatgttcctcctcattcagaggcgaagcggatcacagtattgagaccttcaaaggctggtgaaactgaaaaatatgtggttcaagggaggaggaacaagcaggttaagaaattggcttcatcaagtcaagagactggatgggggaaccgtgatctgggttacccgtcaccttatgtcaaccggggaaccgaagaacacactgtacagccaacccgaattgtcgtcttgaagcctagtctaggaaagtctctagatattaaggctgtatcatcatcccaatcctctccaaggggtttacacagtaggggatattttgatgagcctgaagatgttgagactaaagaagttgcaaaggaaattactcgtcaagtgcgcgaaaatctgatgggtcaccacaggaacgagactcagtcttcttctgtcctatccaatggctatatcggtgatgacagttcttttaataagtctgataacgaagatttagtgggaaatcttagcgattctgagatcatgtcaccagcatctaggcattcttgggactgtccaaataggtttgacagtcttttctctccttcctctttcagcagagcttcattttctccagagtcatctgtctgcagagaggcgaagaagcgactttctgaaagatgggcgttgatgtcagtatcgggaagaactcaaccgcttaaacatgtttcaagaacctcaagcaccttaggggaaatgcttgcacttacagagaccaaagtgacaactgaatccggggaagggagctatgaaatagtaccagcaacgagggtatcaacatcatgcataactagtgatctgagtcaagtggaaatggcaagtgattctctgaatattcttgcaaggtcaaaatcagtctctgacgttagactcaacggagaaacatctgttctggggagttccaaagtacaggctccacgagagctgactaagacgggaagcctgaaatcgtcatggaaagtctcaaacttgttcttctttaagaataataaagcaagcaaggagaaaagagatgcatctcaatgcagcagtatgtctcaattggcagcgccttctcctgtgactcttaccggaaaaaccagcgaagattgtgtgtttcctattgattgtctccctcctgtttcatcagaacagcaaagtataatcctaggcgaggtatcccaccaattctctacacctttttcaatctattcgaggtggatgaatattcatgttaaatcagcggtcattttgatccatttgcaggaagaagtgactacaccaaagccccctagcgactgggaatacatgtgaaaa

SEQ ID NO: 24633 - DNA, 2570 bp, Arabidopsis thaliana landsberg
  unsure (1)..(2570): unsure at all n locations
tgtaatttgtaaaataactaaaagatgtcacgttttcttaggtgagaaatggagtttgaagttggcaaaacgtttcttattgcttcttctatctcttattacaacattcatttatatatacagtgcaaaggattttaaagtgattttggcatgcatggttgaaagaatcacaattcattgataatttgatattgtgtctaccagtataattagggtacgcatgatgtttatccataaaaacacaaagcacgttaaaatggacggtgaagatcggctcctaagcgtcaaggtcacttcataattgtccttagccgtccatctctgccatgcaaagatcaagcataaccacttggaacaaggatgaagaggaggacgagccaggaccaatggcggtgagtcggtgactggtgaggcaatggaatccagatgatagtgggtctgtgtaatccttgcttctggtcaactccggtttgccaaatatctaattttgaggtctggatagttaattctctcttttgattcgttttacaaaaacaatggctctaggctctaatgagttaaagagtacatgaagctatagtagtaattctgttataagtgtgtggcaacgagttgcatataaaggctgctcaatctctctcaccagattttgaattacacttttcacatatctcttttctcgaggatctttccacaaaaccctcaatatttcaggaggtattactgttgttgcaggtcgaaccaccaacttctaaccatctatctccataccattcatgctgtttgaagaacacacaaaacaagggtcaagacattcacttgtaatgttgagaaaatggatgttctgggccatggctctacctgttgagaatggcgagcatgtttggccactcagagatatcgaaaaacacatccgcaacaccagttcccctgatatacacccgtctgatctgtccataaggtacacacaatgctcgtacatctctcattgctgatttcgacaagtttgaaatccttgccacgattgtcctcggtatatcaatcctcgagataaacaattgtgtgttgcatatgctgattgaatgctccgcaagtgctctctctttgccgtcttccgtctgcaacacaagtacaagatttatctttactgtatctggcattggattttgaggataaaacaagaaaagctacaataaaaccacacctcaaactccacgaaagcatctgttctcgatgaacccaagataaacttagatatgttgctcctacagaactttagcgcttctttgatctgatttgaactaaaatcgtgcgtcagtggatgaatcttaactgttcggactggttccttcaccaatgcaacaggcacatctggatcgccaatgagatccggaatgcaaatcctttctaccatgtcttcctgagaagttgcctcgacaactgtattgtaattcatcaccgtcacatggcctttcttgagagctttcttgactgcagtgttagtctacaaatatggaagcaaatagcaggtgagcaggaaaacactttttaagaagaaagtttaacaagaaggcagtgtgacttgtttctcgagatggagaattcaaaattcaaaatactaacctcaaaagttaagagagcatctttgtaaatgcacccttcaatagagggaatttcttgtacatgcaaaacggctccaaactgagaagaaaacgctttaacaatgtgtttcttcatagatgattctggcaaaaaccttagcagtactttgttaggagagtgttctccagcatataatgccaagaaactcttttttgttaccttaggattcacggtggtagcgtccaaagtgtcctgactgcacaatgattgggtttccattacaaaattttccccttggggatcttcttcctctatcgcacaaaaacgatcactgttttgcattgcagaattgccttcggatatccatttctcttctctactattagaattcaacgagttggcttctgcatctgtgccattgtcagttggaaagttaagggagtccatcaacttcttcatagtacccactgccataggtgcaacagtttttctagaactttcaagcgaaaatatacttttcctttctctaatagcagccaggtcttcactcttctgttcatcaatccaatcccttaatagaacggatgtcaaagagctgggattttgaggagcatccgacaacctgtgctcatcattttcgttggggatacttttaatttcctggacaggatcagacagcatcttaccaaataggctgtgttgatcacctgcatcactacaggattctccagtagacatactggaattactgttactcaaagtctcaaatctcagaggatgcttaacctctttatatggatccgagtttacaaacaacttcgagagactattttgaggtggcttcactttatcgaatagccctttcgcagcccgcaacttccccatatttttcctagatgatgatatgactttaagatacttcttcagtcaagaaacctaaagtgacagctttaccccgntattcctca

SEQ ID NO: 24634 - DNA, 4040 bp, Arabidopsis thaliana landsberg
tgtctttctgcaaaaacacaacccgttactttactcatttttctgtctctcctcaaaatgacaaacttccatcaattgtcagttgtttcaccttacacttgtccgttgatttttaattataactctgcatttttttcttactacctcaagtcaatataataccctggttttaggcatgcatgccttggaaaatgaatcataaactcgtaaaaattttggccctcactttcttgtctttgtctaatatattatttattactattagtttgcgtagaaatcttgatcacttgaaattcataattaatttaggcgttaaagatcttcgataatggttcaagtataattttctttgaaaatttttgaaggttgaatctgactaggtatttaacacggagacgtttcatgtaaatccatagctcatgaatctcgtggctgtgctttgatcaatgaaactcgtgcttacttattttaatgtgattaatattattataaattaaaaccaagatacgatcttgtattaagacgtaagggatctacacttatacatcacactatcaaaaattcaaaaacgtatcgattaaagaaatcattttttaaaactttataggatatatcgcccgccacaagttattcaagtctaatatatagtcaacgtgtaaaaccacatagttacaaacttacaataacattcactcgacccggttggatttctctatatttttttttatgtattgttgtaacaagaagaccaatacatgttgttgtgatctatcaaaaggatttaccaagtaggcaagtaagtaaccaatgtttccaacaatttttcgttcaaaccacaaaatcatagaaatagtccttaagattgactgatttgagtatgtatcttgctaattcagcttgtgatatagtagcataaggaacgggcgttaattataccaacttaagcaaaaaaaaaaagtatatttatatgtagattctttttatataaaaaatagcgtcggtcaacaaatattagaatctaaccattcatggaagaaaagagtatgaaactgattacaaaagagagaatcaggtagccactcacaaaaatcccagactgtatggaccataatagcttgaatatatgtaatagttctccaaaaggctaccaataaaactaataaaatgattggttaataacaagataaaaatggtagcaatagtggcatgccaaatagaaaaaggatgtgaccaactctctcttggcaagttggtgtccaattacacaacctaacccgttttatacataaagcaaagattccaacattgtcaaggtcgttccaattccaaaggtggaggagtctcttttcttattcccattaatcaaaaagttgtatataatgtatattcaacgtctctcacccaacgatcatatttttttttagtgtgggatccttggaagagacaacgcctcccaaggtggaggagtttatttattcaaaacacttcatcaattttgagtttatctctacgtctcttgtatcattcatattatatcctgcaaaatttgcttaattattgattcttggaggttggaccacctttttctttaatagagagaaaaaagaaatgaattttcgatccataaatctttcaaaatttaagaccaatcattgaaaatatttatgatagattcacaaaatgtagatcattgaaaatatgtataatagattcacaaaacgtaaatcattgttttgtagacgaaacgtggtctctatatagtgaaatgatagcaatcttttctctctttttttcatgagatgatttttttttcatataaatacatttgaatatgtattccataacctaatgtatctttgcaaattcttctacaattaaaggacatgatgcaaattaaataatctgataacttactaattatattcaatttctctgtaaataatattctatcttggagagaaaacttcaagattatccttatattgaatttgacgtaagatgatttataattatgaggaaaatttttaatactaattagatggatcattctggacctgcaaataggacacatgtatatagagttgaaacatattataaataaaaataaaaatagaaattagtggaattgttagtgggtagtagttggatttgggtaagattactttatgatgaatttcatattgaggcttgaagatcttcttctcatccattgacggattggatcctccaagaacagagagaccaattagcttactctattgtgccattctccaccgtatcttttgcttcaaccacttacaattttacaaaggaaaattaactacaagacaatttacctaaaggtggaatttaagaatattctgaaaatatcactttaactacgtgtttgatgtatgaatcatatacaaatgatatattataagaggctttaaaaaaggatcaagtctttgttatattccttcgtttagagtataagcggtcctaaatgcacttgtagcattcataacaattattgtagcgcggtatacaagtattacagttatttacatacaaataactgtaaacgctctatggagttgagaaacttgtatgtaataagaccatcatccctacagttgggtttatacattttgtaaatgaaaattggatacatcttaggtccatgtagataaacctgcacttttcaatagagtgtgtgactaggtctgggagatagagtttccttcacttcttatgatgattataaaagtataggagggggaccatatttaaaatgtaaagattcggaggataataccattagaaagttggacatcattagtaaatagtgagtgttacccaaaacaaggcactatctatgcattgtttctgcttttatattacaatttttctttatatattttggacgattatggtttgtattcacataaatttcaattataatttgctatatgactcatcttcctctatcattcctcttagtcaaatagagttggctaactaaaccttttattttaatcaaattactccgttttaacttgttttggtgccaatcaaaaccaaattttatacactaattatttttactcgtttttttttacaaaaacattaagaatgatacaacataaaaaaatgttgtctccctttatccgcatttgttcctcaaagatgtagcactataaatagtctcatcaccctaagaccaaaaccccaacactcaaactcaactgctctcccataaccgaaaccgagagaaaatatagaaaaagatgattgagacggttaaacacctgatcggctccggtggtcccagcggattcgggtcaagatccaccgccgatcatgtcacttgtaattctgatctccgttctctaactgccatcatcactggttagtcataaacttaaagttacttcttctttttcaacttaaccgagtcgcaaaatgagtttcctaactaatagtctctctgtttcttttctactaggcgcaacgtcggggataggagctgagacggcgcgtgttcttgctaagcgtggcgcaagacttgtgcttccggctaggagcgtcaaaaccgccgaggaaacaaaggctcgtatactgtcggagtttcctgatgcggagatcatcgttatgcatcttgatctcagctcacttacatctgttcgtcgattcgtggacgatttcgaatctctcaatctcccactcaacatcctcatgtaatttaaactctctcttcacaattcttatatagcgaaaatgttttcttctaaattttttgtaatctttttggtttgtttttgtaacagaaacaatgccgggaaatacgcgcataagcatgccctctctgaggacggtgtggagatgaccttcgccactaattatctcggtaattaagttttcataaatccatcattgacttataatatatcattcattgatttatatgttctctaatagtaattcatggtgtgtttaggccattttaagctgactaaactgctgttaaagaagatgattaaacggcggcgcaaaccggc

SEQ ID NO: 24635 - DNA, 1571 bp, Arabidopsis thaliana landsberg
tgcgaatattcggaaagcataacaagacaagttttacttacgggtatcaaagtagcaacatcaagcccttcagtttctcatatattatgtgtggacgataatttattattttgtaaggctaataaggaacaatgtggagtaatattgggtatcctaaaacaatatgaagcggtctcggggcaaatgataaaaaatttcaaatgttcgattcagtttgaccataaggtagatgattctataaaggcagaaattaaatcgatattgggtattagtaatcttgggggtatggattcttatcttttattaccggaaagtcttggggggtataagacaaaaatgttttgttcggttagagacaaattacgcactagaataaatggatggtcgacaaaattcttatcgaaaggagggaaataagtgatagattaaatcggtagatgctgcattgccaacttatgttatgtcttgcttcagactaccggaaacaatctcttccaaactaacaagtgcggtcgcaaaattctggtggagtacgaatggtgagtccagaggtatgcactggatgacttggaataaattgtgtagtagcaaggcggatggtggcttaggctttcgtagtgtcaacgactttaattcggctctactagccaaacaattgtggcgtctaattacagttcctgattcagtctttgctaaagtgtttaaaggaagatattttcggaaatctaatcctctggataaattaaaatcatattctccatcttatggctggagaagtataatttcagctagatctctggttaaaaaaggactaattaatagggtcggttctggggcatccatctcagtctgggaggatccatggattccagctcaattcccgagacctgcaataagtaatggttcagtaattgatccatctttaaaagtcaacaatctcatagacagtcggtcaaatttttggaatattgatctcttaaacgagatctttgttccggaagatgtccttctgataagtgcaatgcacttgggttcgtcaacaaaagaggattctttaggttggcattttaccaaatcaggaaaatatacagttaaatctggttatcatacgacgcgactagatcatttggatgataactcttcttttattggcctagacatcaaagttttaaaagcatactcatgaaaagtacagtgttcgcccaagttatgtcactttttgtggcaaattttagcgggatgtgtaccagtaacatacaatctacgaaaacgcggtataaattgtgagaaaggatgtagcagatgtggtgctctagaagaaaccattaaccacacgcttttcttatgctatcatgcgagtaagattcgggcactttcacagatacctacggtcccataaaaatttccttatgcatctatttatgcatatttagatcatttatttcggcacatacattcgaaattcgaatcatcttcatttccatggataatttggtatatttggaaagtaaggaatgaaaaaatcgttgaacatatggataaagatcctctagagatcttacacatggtgg

SEQ ID NO: 24636 - DNA, 1847 bp, Arabidopsis thaliana landsberg
ccccaaagtaaccacacaaatatcattctcttgattagaggatatgggaaggatggaatctaattaatttcttcctagcaaagtcctcgtaagcttcttccataaggtcattgtcgtcccattcatcgcgataagtttctgggtgtgagacaagtctctggtatccgcggacgatttgttgatttctccaatgttcaacgagcggacaaccacattcttctgcgacccaattgaggtactcactctgcaagatgaaatatatttttttcaaacaaagtcattgacatgattttattcttgagtcgataatatttctttgattgtttgtttacattttacttgaatttctattagttcagttttttaaaaaaagttcatcaacaattttaggcaaaaaaaaaatatactttgttaattgtaaatctaaaaattaaaagccttacgtttgcattttttctttgcagaaactttttatggtgaacaaaaagaggttttacaattaaaacatgtgaattatgtttcaaaaaaaaaaattcacaagaaaacgtgaaaaaatgattttgaactaatcgaatttatttagatataggcatgtaatcatattcagaatataaggtactcacctgaattttacccaatttatgtgtatatcttttaggaatgcctaccgcatcaagcgatgcataccacgcactaatatcttccatcatcttatcttctgtgggaagtgtaacccgccttgacaagactgctgccacccatttgctttggatttcaaacataacaaattgtatgccctgataaaaaaaagataaagataaaaaccaagtgagacttgaactcggaaccccaagatattgtttgagactaaccatcgatggtaaaccaacgaatgaaagaccaggagaaagcgcaggtggaaatacatgcttgtatagatgttctacgcggttttcatcaatgttcatatagccattggtttcaaggaatgtgaagcgatatttatatctacacacatagaccgaaatatatggtaaatcagtagtacatttcacattattaattttggtaactatgagcataaaaatactgaaaactacgaatatacccagtgcaatacacaatgctatcagcatataccacctttccgtttttgaaaacaatggacccatcttcatatgccgtgtctaccttcaacatatcaaaaaggaaaacattttaatactagcattcgataattacctttaaaattaaattccacgagtataaattaaaatcaaaattatggttaaataaaataaaatttgtctgttttacttccgaatgaatccatagattgttccgaggcacgggaagcttttcgtatgtatcagattcactcgctctagatgcaatgtgaacttctttcgcgaccttagctatgtccctactaatatcggcaccgctagcaaaatttccgatgaccaccaccacctgccaaaatatcaacgtaattataggcagatcagaaataaatctatgatatacaattaattagcccgaacatttctgcaagaacttgtttgatgttcgattacgtacttgtttacaaagtaagtataatgataggtacaagtaagtctatacaatatattatcaaccaactaacaagtacgttgatgtattactattaatagacctagctttatatctacatgtgaaaagtttttgtttactaattagtatcgctgaattgcaattttcccacatactaatatagaatatttttctaacctagtttatcagaagaaaaaaatccaattaaacttagatagctccggcggtcgaacagagttaatcagattgat

SEQ ID NO: 24637 - DNA, 2140 bp, Arabidopsis thaliana landsberg
tgacttgtgtaagttcaatacaaatgcacattacaagttcattagccacttcgcatatgttaactttatccacaagcttcaatattataaaataaagtatcctatttcatgcctttgagtgatttggtttagcctaaaaagttaagaaagtcaaatgcttaagttgtaaaataccaaaaaatccgcactaaaagaatgaataccatcacaaaatcaaaagtcaaaagtggaagccaaacacactaaacaatatactactatttgcttcaaacattaccaatgttttagaccattgacctaaatttactatttaaaagaaatatatatcatgtgaataaggagtgttcacataatgtgttaaacagtcacgcaacaagtcacatgaatatttcctatgtaaacaaccaaagtaaccccacaagattaattgaagcctcacgtttcttttcttggtcattttttgacgttaccaaacccactgaataaaaaactttaatataatgaaaacaactttattagatcgtctccactttatcatttttacttatattacaagcttataattaaaatcccaaaagatgaaaaacgatactctactttttatgaatcctttaattgaacaaacggaaccaacacaacaacagattgtgaagaagaaagaaaaaacaacaatggcttcacaaaccaaactcaagaaacctaattctcattttagcctttgtactttcctcttcttcaccgtcctctttaccatcccggctctctttgtcctccgcacctcctcttgctcctcctccaccggtgcagtctcctcctcctctgacacagaccagccaccgtggtctggcgacctccaaaccgcccaatttgcctggaaccgccttgatttctccttaaccaaccctcctcccaaaacactaaaactcgctgttttctcccggaaatggcccacgggtcccaatcctggcggcatggaacgccacgccttcactctatacactgccttagctcgccgtggacatcgtgtccacgttttcacctctcccttagaccaatcccctgaaaccaacaaaattccccctgtttccgaccaaatcatttaccctataatccattctcacggagacgcggagcccggaaaatggcggtacaacaaagcgtgggagctttaccaagaagaaaacaagaaagaacctttcgatgcggttcactctgaaagtgttgctttacctcactggatcgcccgggaggttccaaacctcgctgtatcctggcacggcattgcgttagagagcttacaatcaagcatttaccaagacctgatccgtaaaccagacgaaccaagatcacaaggcttcaatgcaagtctatacggtgccgtgcttcccaagatactagacgaaatcagattcttccacaactacgctcaccacatcgctatcagcgatagctgtggagaaatgctaagagacgtttaccaaatcccggaaaaaagggttcacgtgatcctcaacggagtcgacgaaaacggattcacatcagacaagaagctacgtactctgtttaggtcaaaattagggttaccagaaaactcatcaacgattgttttaggagctgctgggagattagtcaaagacaaaggacatccattgctattcgaagctttcgcgaaactaatccaaacgtattcaaatgtctacctcgtagtagctggatcagggccatgggagcaacgatacaaagaattaggcgaaaaagtttccattttgggatctctaaacccaaacgaactcaagggtttctacaacgggatcgatttgttcgtgaatccaacgcttagaccacaaggtcttgatttaacgttaatggaagcgatgttgagtggtaaaccagtgatggcgtcgaggtacgcaagcataaagagaagtatagtggtgaatgatgagtttgggtttatgtttgcgccaaatgtggaagctctgacggcggtaatggaggttgctgtggcggaaggagcggagagattggcggagagagggaggaagtgtaaagagtatgcggcggagatgtttacggcgagtaagatggctttggcttatgagaggctttttctttgtattaacgatcagcaaattttata

SEQ ID NO: 24638 - DNA, 1914 bp, Arabidopsis thaliana landsberg
tctggtgtacttctctatggccctccggaacagggaaagtaagtaagccattttttctttcacttttagcatctcttaatagtctgttttttggcagttatatttttgagtttttgaattaaatttacagactttactggcaaaagctgtggcgacagagtgctccttaaatttcctcagtgtaaagggtccagaattaatcaacatgtatattggagagtcagagaaaaatgttcgagatatatttgaaaaggtaagttatatttcttcttccctaggagaagcatattgagtctttggttctgattcttaaactagtgtgttttcttcaattgcaggcaaggtcagcgcgaccttgtgtgatcttctttgatgagcttgattctcttgctccagctcgaggtgcttctggtgattctggaggagtcatggatcgagtggtatctcagatgcttgcagagatcgatggactcagcgactcttccaggatctgtttattataggagcaagcaacagacctgacttgattgatccagctcttttacggcctggcagattcgacaaacttctatatgttttagtcaacgctgatttttcttacagggaaaggttaggcatttaaacaatcaaaagcatgtccaaagacaaaaaaaattagaagcttcctgattcttgtttttgacagggtacttaaagcactgactcggaaatttaagttaagcgaagatgtatctctttattcagtagcaaagaagtgtccctctacattcaccggcgctgatatgtacgccttgtgtgctgatgcttggtttcaggcagctaagcgaaaggtgagagggataggggttgaaatttaagactatataagtctctgtaaaagcttttatgaaaatcgctttgtatctgcatacttggcaaatgcaggtgtcaaaatcggattcaggggatatgcctacagaagaagatgatcccgattcagtcgttgtagagtatgtggattttataaaggttaaaactcttttccttcatctactcatcaaaaagagttgccattttcatggttgagtagaaatgttaatttgttatggttcggttttatcagtcgagagttataatagtttcccactttgtcttctttgtaggcaatggatcagctctcgccatcactctccataactgagcttaagaagtatgagatgcttcgagatcaatttcaaggccgttcgagctaaacccctctcagtacataaaaattagcttataatgaagacatttcatatttttttcccagactattttctctgaacagttctgttgatttggttagtcaattgatagtaaaattaaagaatcaataatgtaaaataattttcttggtttgaattacctttgattggttacgcacaagtgattcttcgcttccatagttccatgtaataatataacacacaagtgaagcagattattcaatggtaaaaggttttcttaaaaaaatttccacaacggttcataaaagaattctgtttttggtttgggtaggaaataaaatcatcagtttgttatattaggtttgtgttttatattatctgtttgattatggtgttgttagtaatttcagaatattttctccaaacaattatttcaattggcattccaaaaatagcgtttttgttttccacacgtgactaaattccattaattacgtgaagcatagaatccatatggcgaaagttttttaaattacagtaaaaatttttatgattaaggagattttacttgcaaaaaaaagacaaatctttgaagactgaaatgacgaacttgaccactatgacatcacttgtcacgtgggatttgctttgtttgggcgagctggtccgaaatcaatttttttttttaggaaattatttttgttga

SEQ ID NO: 24639 - DNA, 1739 bp, Arabidopsis thaliana landsberg
aaatcgaaaaacctcacttccaatttcattcaattactgaagctttttttttagcaacaatggcgacgaaatcagagaaagctattggtatcgatctcggcactacatacagttgtgtcggagtttggatgaatgatcgtgtggagatcattccgaacgatcagggaaaccgtacgacgccgtcgtacgtcgccttcactgatactgagcggctgatcggagacgcggcaaagaatcaagtggctttgaatcctcagaacactgtattcgatgcgaaacgtctcatcggaaggaagttctctgatccttctgttcagagtgacatactccactggccgttcaaggttgtttccggccccggtgagaagccgatgatagtcgtttcgtataagaatgaagagaagcagttttctcctgaggaaatatcttccatggtgttggtgaagatgaaggaagtcgctgaggctttcttaggtcgcacagttaaaaacgccgttgtaacggttccggcgtattttaacgattcgcagagacaggctacgaaggacgccggagctatctctgggcttaatgttttgaggataatcaatgagccgactgctgcagctatagcttatggtttggataagaagggtacgaaggccggtgagaagaacgttttgattttcgatctcggtggtggaacttttgatgtttcgctgttgacgattgaagaaggtgtctttgaagtgaaagctactgctggagatactcatcttggtggtgaagactttgacaacagacttgtgaaccatttcgttgcggagtttaggaggaaacacaagaaggatattgctgggaatgcgagagctcttaggaggctaaggacagcttgtgagagagcaaagagaacactttcgtccacggctcagacgactattgagattgattctctgcacgagggtattgacttctatgcgacgatatcacgtgcaaggtttgaggagatgaacatggatttgttcaggaaatgtatggatcctgtggagaaagttcttaaagacgccaagctcgacaagagcagtgtgcacgatgttgttctggttggagggtcgacgaggattccgaaaattcaacagcttttgcaagatttctttaatgggaaggagttatgcaagagcataaaccctgatgaagctgttgcctatggagctgcggttcaggctgcgattcttacaggtgaaggaagtgaaaaggtccaggatcttctgcttcttgatgttgctccgcttagccttggacttgagacagcaggtggggtcatgactgtgttaattccaagaaacacgacggttccttgtaagaaggagcaagtgttctctacgtatgcagacaatcaaccaggcgttctgatccaagtctacgaaggagaacgtgcaaggaccagagataacaaccttctcggaactttcgagctcaagggcattcctcctgctccacgtggggttcctcaaatcaatgtttgcttcgacattgatgcgaatgggatcttaaatgtgtcggctgaggataaaaccgctggtgtgaagaaccagatcacgatcaccaacgacaaaggaaggttgagtaaagaggagatagagaagatggtgcaagatgctgagaagtacaaggctgaggatgagcaagtgaagaagaaggtggaggccaagaattcgcttgagaactatgcttacagggatcctctagagtcgacatgc

SEQ ID NO: 24640 - DNA, 2300 bp, Arabidopsis thaliana landsberg
cattttttttttttgtatgaaagataatttactttaactatagaaaattcattagtattcaattttggccttccaacaacgagtgcatgaacgagagaaccttcgtggcaggtgactccacttggctgatgtaatttaatttggagattcctcaaaatctaagttactttatcctcttatttaatttttctttgtttgaaagtggctttatcattcacgatatccattcttggtaattttcgatatctatccagatttttaatataattaatagtatgatcataatttctgttggcgaagaagtaactaagggttgattttttacaaaaaaatataactatgttttaagtaaacacatatcatgtggtacatgaaaaaactagacgtaaacaacattttttgttctatattttgtgcctgaaatagttaaaatgattatatctcatttacatgtttatacacctaaatatgcatacagaatatacctaaatatgtatatttatgcatgcatatagaatcaaaattttatccactacaataaactagatacatactatatgcagaatagtgtctttcaattaagtcacaacaataaattagataaatactgatataaatactagatgtatatttaaaaattctgtcaagtgttagactaattagacaagccaaattaaaagacacttatattagattttatagtagatgaatcttgaaacagactccagtttagaagtgaaatagattttatcttcatctaaatataacaaaaatatattttttgggagttcaatataaaagatgaacactcgaagatgtaaattttaatatgaactatgtcgaatattattattttcatgagattaattctcacgacggtgaaacgtacagtttaaaattatttagctatggcaattctatgaaatttattctggttactcacaaattttaaataaatatggtttgatttacaacaaatttagtaatttttcttatatttatctctcattactccaattttgaagcaaaatgtttgttgaactcatactctcttcgttttaaaataagtattgttttgggaagttaaatttgtttcaaattagttgtcgttttatattttcaatgcatctttttgatagattttttaatttttttaattgttttagatgattatttaatattatcaaataaaataacatattaattaggagtaacacaatttttatttttaatttatgtgaaaaaacctttaaaaacaactaatccaaaatagaaggaggatatgataaacatcacctttataactatttttccaccaattcgaacatcaaaattgtagaagatacaatgttgttgtttataaattgtcaaatatctagttgaaataaaacaaatatttaatgcacacaatattcaatatttgaagtagccaagtcaaataagcaaaaatgaagtgcatggacagacagaaagagaaagataatacgaataataatatttaaactacgaccaactatagcgtagaccccacccacacctctctaaatcaacggctgcgatacaccggtactgttcttgatgcgataaacgcatataaaccgtcggatctgattttacttataaacgaacggtcgatgattaggttgacttactctaatcacctcgtaatcaattattttttctcataaatcaacggctctaatgcatcgagtaccatgttcaatgcgataatatggttttgcaccgtcagatctgattgataccgatctttatataatttcaacggttgagattaatgggttgactttacatagggtagatcagaaagtggagagcaccccaaagctaataaacatgagccccgctcaggcgctgcttcctcctctctctctatcatcatcatcatcactttctctatctatctctcttcttaaagcggccattggtgctctccaagttccatctcaagcttttcttcttgtgggtgattcaatctctctctttctattttttttttcatttctgatgatttagtgatctttgatttgcgaaactttgtttttatcgtgtttgtttttgatttagggttttattttgttgtcggcgagttttgatttgatgattttgatgatttttttttgtttgaccgtttggcttttggatcttaagagctatgtgtgaagattttttttcgttagatagggtgaagaatacgagctgatctccataattgtgagttagatcttgaatcttagtaatgaaatttgatactgagaagcgggaatgatgaactttgagct

SEQ ID NO: 24641 - DNA, 1771 bp, Arabidopsis thaliana landsberg
gactaattaactacccaagatggtttaagactccatatgcctatccattatgagcttcacgtttgcaggagcatcaaccgtcactgccacttttaccgttggtttgtctgaccactcgttcgcttcctcaaacctggttcacatcacaacaacaagtttttttccatcaccacacatgacatttacatcctctattatatataacacaactgtctattttgaatgtttgtattgtatgtatgaaaaatcttacctcttaagattgttgtacagtaaagtgagtcccctagtgataccacttgtctgcactctagcaactccttctgtataagtgaatagagaaggaaggaaagctgcaaggatcgtcgcaggatcatgaaggtacacacctgccccacacacacaaaaaaaagaagaggttaagataaaaatacgtagtcgtggaaattcttgttatataatttgtgtacaactgaacttattaccaaatgaaataaacacacatacaaatgattatcattatcgtacctttgatttcgtaagccgtgagatgataatcatagtacacatcaaggattttacagagatattgagctaatttccccttcgatgatgctagtttgtccttgtcatcagctaaatccagcagaaacaccgggaaaaaaagccattagaaagctctgtttaactaaattatgttcttggtcgcaacaagtaatgaaaacctcgagccataaaggcaacaatcaggatcatcacggttctgttgacagcatttgtatattttcaatataaaacatcaaataaggaaaaaagattatccaagataacctgtcataataacttgatgggtcacattgattcccacagcaattatatcggccccacatgtgaacacaatatctgcagcttcgggatcgccaaaaatctaccctaaccaaaaaattggttaaacagatgtgaaaactaaaagaagagattttgatagaaagtgatgtgttatgtgtatgaatatcacattactttaacgggtgaaggaacttacattagcttccgaagctggatttacatttccgtttactgcaaatgctccaccaagaagaacaatttgtccgacatttttcgaaaactctggatcaagctgaacagcctgcattatcaaggtaatgaaatctccgataagatgataggaacagagataagtaagaaccggaatataaaaattgcggatgagaaagtcttaccaacgcgagatttgttagtggtcccaaagcaacaaccgtgatttcaccagggtaaagctttgcttgttcaactaaaaactcaggtccagacttttcaattggttttcctttaggtggagggattttttggttgccaagcccatcttttccatgggcaaagttagctattcgaagcttcgtatcgccctttagagaagaaaagacaacaagttatcaatgctaaaaaatctaataggtatgacatgtgaaaaagacacaatataacttaccatttgatttataacacagattggaactaaacacatttgtgtgaattattattcttactaaagatctagaaaacatatatcgaatctcaaacacattacatagcatccatctttctcacaaaaacatatcaaaggccataaagtggaaacataccacgaaggttttatgtgtcccttcaggcaccggaatatcggacctacccgcaaccttcaactggttgatatgcatatagaacactgatgattcgatcaaccaag

SEQ ID NO: 24642 - DNA, 2151 bp, Arabidopsis thaliana landsberg
  unsure (1)..(2151): unsure at all n locations
gtcggaaattgccccgtagaaaacaggtataatacattctatattttctcaatccaaatttctgtttattaactattgggtttgagtaaaaacttttaaaacgaatttctataggtgcaaagatgtggagaagaagaaacctccgcttttatgacaacgtacgaaggaaaccatgaccatcctctccccatggaagcaagccacatggcagctggaacatccgcggctgcctccttattacaatctggctcctcctcttcctcctcctccacctcagcgagtctaagctatttcttcccttttcaccacttctctatctccaccactaactcgcacccgactgtaacattggacctcacacgaccaaactatcccaatcagttaccagacgactaccctctatcgtcctcctctttcagtctcaacttttcctctccagatcctccacctccatcatcgcatgaccacaccttgaactttagtggcttnnnnnnnnnnnnnnnnnnnnnnnnnnnnnncttattggcccgttatcgaacgagactttccggacagcagtaagccagtaactgtatcggtatagctagacacaagtctagaaagtaactgatttccgttttctttgtcattcatttgttttgcagcctctgacagagagatctggttttggcatgatatgcaaaatgcttatatacttgtagatatccaaatgtttaaattagtggattacctatcatatcatggattatatatgcatatgaaggttttgtaaattaatggtttacacaaaaatttgatacaccaaatattttttttatgtttataaatttttcatatacaatcttatttttatttttttggtgaattaagttagtatgactatgatgaaacaatgatatctaaaatggaaggcccattactacagtttcccctcttagaattcggcccatccacgtcagcgactccggatttagcgcagttttaaactcttttgacacacgaccacttattataacgccacgtgtcaatgcacttcatcaggacgcgcgtaaccgccagaaaagcgaaaccaaaggtccatctccgacacgttgcttatccgactacgaaactcactcaccactgttctaaattctctcactctctcttttttcattccttaaaccaaaaaagctctctgtaggtcatccgggtttcctcgtttccaatctaaaatcatcatagatttgtttgaaattcttcaaattgaaccggtatcaagagatggcgggaagtgaagcggtagaagataaggagataaaatcggcggtttcaagctgtgaagcgtatttcgagaaagtacaatcaaggaagaatctacccaaatctcttcaagaaaccctaaactctgctttcgccggaatccccgtctcctccttccctcaagtccccggcggcagaggtaaaaattaggaagatcccattttttcgatttctccaaatttcctgatttctcgtttaaagtttgagacttggcaatggtttagattcaattagtttttttgtttgatcgtagtgatagagattcaagcggaaacacctgtatcagaagcagtaaagatcttatcagacagcaagattctatcagctcctgtgattaacacagatcacgagagttctttagattggagagaaagatatttaggaatcattgattactcttcaatcatcttatgggtactagagagtgctgaactcgctgcaattgccttgtcggctacgtcagcaactgctgctggtgttggtgctggagctgttggagctcttggtgttgcagcgctcgggatgaccggcccggttgctgctgcaggtctagccgcggctgcggttggagcaccgttgctggtggtgttgcagctgaacgtgggattgggaaagatgctccaactgctgctgataagttggggaaagatttctatgaagttattcttcaagaagagccttttaaatcaaccactgtaagttttttaatagaacattaagttatttgtgttgtgatggatggtcctgattgatcatggatatatgtttatgtctgcaggttagaacaatacttaagtcgtttagatgggctccttttcttccggtttcatcagagagttcgatgttgag

SEQ ID NO: 24643 - DNA, 2032 bp, Arabidopsis thaliana landsberg
tatcaatcttgtataagttttaatagcagtaatgatcccaatggttcaaaatttcatgtatttttcattctctagattaggcaagtcggtatggtgagaacatttgatcgaatctgcgggtttgtgtgtgtgttttcggtgtttcgtcatcactaagacactctactgaagtatatttgtttctgattaggtaattttctaaagaaaggaggtgaagtgaagctatggtgaaattaagctttgttcagcttcctagatgatcggattcattcaagtaagaaatatcagaaatggtcgtataagctttgtttcgtgttcttcacaaatgtcactaaaacgttaactttatattttcccattgtaagggacaaaatagtatttctatggtgttaatatacaagtgaggaaatcattattcggctaatgagtctattactcgaaaatgaaatttcaatattctcaagaatatagataatcaactttcatcaaagacaatttttaagtttgaataattaatttaaaatccatatatttttcttgattttttgtctaacttggtactttttattagttcctttaaaaaaattaggttattatcatccatccaaaacaaagattctactatatgtacggaaaaagaagtaccaaaaggtcattattaaatcccaaaacttgtttacctatttttatcaggaatcaattgatcaccactacctaaaaaccacaaattgcttaagtttgttaacactgattgacaagtgtcatacaagtaatcccatttgccacgtgtcatgtcctttttatgtaacctaggacttgaaaaccacaagtgcaagcaaataacctagatgacacttgttagagagcgacgtcaccaagaacctctcacactctctattccaccacttatttaccacggcaccgccttctccgtggcatcttcttcatcgtcaagccctgaaacatcgccgattcaaaccttaaacgatctcgagaaactctccgttttaggacaaggaagcggtgggacagtctacaaaacccgtcaccggagaaccaaaacgctttacgccttaaaagtctccggccaaatctcaacaccacggtcaccgtcgaagccgacatcctcaagcgaatcgaatcgagttttatcattaaatgctatgccgtttttgttagtttatacgatctctgtttcgtgatggagcttatggagaaaggatctctccatgacgcgttacttgctcaacaagttttctccgagccaatggtatcgagtctcgctaacagaatcctccaagggttacgttatctgcaaaaaatgggaatagttcatggagacataaagccttcaaatctccttattaataagaaaggagaggtcaagattgcggattttggagcaagtaggatagtagccggaggagactatggatcgaatgggacatgtgcttatatgagtcctgaacgtgtagatctagagaaatggggttttggaggagaagttggatttgcaggagatgtgtggtcattaggagttgtggttcttgagtgttacattggaagatatccattgaccaaagttggggataaaccggattgggcgacattattttgtgcaatttgctgcaatgagaaggtggatattccagtgagttgttcgttggagtttagagattttgttgggagatgtttggagaaggattggaggaagagagacactgtggaagagcttcttcgtcattcttttgtgaaaaacagatagcattagtctcggtttggttttcagggttgagaaaagcaagtcataaactaaggaaccgaactttagtttcagtttgatccggtttaatttgaatttttgggttcggttttcctttgaaattctttggttcggtttagtttgaactttttggtttgattcgagttcagttttgacatcttcatgacttttgactaggctttagaatttaataacttttttaaagatccttgaagcattttctctgacaaattttctgttcccagtcca

SEQ ID NO: 24644 - DNA, 1031 bp, Arabidopsis thaliana landsberg
gataagcaaagcctggtcgttttgtttttctctaacaatgtctaagcaaaccttttaacttacatttgttcttgatgtacaaacgtttttttcgaataaattttacatttttattcaaaaaaaaaaaaaaatcaccttagaagagctcactagagccggttaagatactacagatgatggagccaaaatggcgcacgctcaagcttcaaaccttgaacatcggattggaaaaacctttatatgaatgtagggtccaaaactcccaaaatcaagctgagccgcttcaaacttcagcttttgaaatcacccccaaactcatgtcctcttatcattataactaaaggatctttcattttatttaactcatcggcttgcactacccaacccaaaggttccaactatacccgaagctttctaaaggtccaaagactttttttttttcgagccagactattcaagccaagaaaagccaaaccttacaagccagttcttttcaattccatattataaacttatctgtcttgttttagtcccactaaaaacaacagaatttaatttaggttgagctaaaacccttgacaaaagtgtatagtcgtcgattcagtagcacactcatcactcatcactcatcagatttgatagttgacctaaagtatgactactccatttcaactaacaaatgaaaataaaagagacctaagggttagaggattgaaactatactctcaagtcttttatcactaggctactaccagctagttaacttgatggatttaagcaagaaaacgtagaatttatattcgagcagattgtttagctaaaaagcttgggtttgaaattgcattttctcccatataagcacgtcggttcctaaataactctttctagcggagagtgtctttccaataatttaataaaaatggtgtttggttatcaaaaaaaaagaaaaaagaaactgatcgagatagaacgttcgcagttttataaacaatttaaaaacaaaaaaaaataaactcaatgtatttttttta

SEQ ID NO: 24645 - DNA, 1522 bp, Arabidopsis thaliana landsberg
acattcgttgacaaccgtttaaactataaacattcgttgaccaggccaaaaaaactaactgttaacagtcgttaactgattatctaacgtctgttaacatctctgttagccacctttaaatgccgtcgtttttatcttttaaaaagaaatgatgactataggattcgaaccgttcaccttcaagtgctccctgtgcttgtcaataccaactaagctagacagtttaatgattactatccaaaaacacgtaattatatattatgctattagatacctcagatccgctaagagcaataacggtgtaggtgcgagaacgaaagtgcatgtgagacgacgaagaactgtgctatttgtgttactgatttcatatgaattgacgaatctatcaatggtgttcataagaacaggttgcgatgaattgaatttaccaaattcgaattcttttcaatcaacgaaaaatgatatgattaatactaaaaaataaatcatctgagagagaacccagatttggaggcggcggctatggtggagatgtttcgtaggttaaagatgaagaagaaagcttttaaaactatataattatatttgtttcgtaaggttaccaataaaatataataggtgagatggttaagtaagggtcttgtttttgccgcaggttgtgagttcgaatcctaagttcgtcaattatttttaaaagatgaaaacgatgtcgtttaaaggtggctaacggagatgttaacagacgttagataatcagttaacgactgttaacggttagtttttttggcctggtcaacgaatgtttatagtttaaacggttggttaaagatatcttcatgtttaaaatgaccgcatgtaaagttgaggtataaaatggccacaaaattggagtattaaacgacattttttccgttcctaattagtaattacacgccaaattatagtcacttcatgtatgaaattatcaaaactagtgaattatagaaatcatctacagattttaaactcttaattaaccattttcacacttcaattttctctcatttgcatttaacgataaaaccggtttaagttaacactttaagtcagatcttaaatcgatgcaaaagaaaacgataaatctcgtttggttaaaaaattaaccagaaaacgagatctgacttctaacttctacttctacttagatctcctcaaaattcaaatcggaaaaaagtttgagaaaaatctcgatgaagaagaagatgattccgacgacgatcttactctcagctctcattttctctctatcaccgatctgtgaagctgtgtggcttactgtacctcacaccggatcaaagtgcgtctccgaagaaatccaaagcaacgtcatcgttttagctgattaccttgttatctccgaggaacattctatcttccctactgtctccgttaaggtaaagtaatttcgtaaaggacttgctttcatgttcgttgattggaatctgaactctacgaaattagtttctaaaaatggtgtcttatc

SEQ ID NO: 24646 - DNA, 503 bp, Arabidopsis thaliana landsberg
attgcacgcaggtcccaccacatgatgcacagcgtcaacaggacacgactgcacggaaagacatattcgggggtcatgtttatttacctgtaacatgaccattatttgactacaaaagcattaaaatttaatataaaaaagacagacgcaaggatgacaatgatgacgtactttcgcaatgatgctcttgggcttaaatgcatcgccactattttactctctccctctactttccttcgtagtgtaattgtaccgctgacgcaatgcacattcaatctttgagttcttatagttcctcttgtctatgtgaagatcaaatgcgtgtaattaagtgccatctgtaactatagaatgtttattctcaagttccagtttttaaagaatgtaattagaattcttattcgtaagttccaattttagataactctaggtgctaattgtacgggagactaaacacttttaaaaaaacgtttactcgggttttcagaggcttcttatgaaaa

SEQ ID NO: 24647 - DNA, 1203 bp, Arabidopsis thaliana landsberg
atgcaagataagagagatcaagcctttttgtaagtgtatctcaccaaagcctccatggcattaacacctaatttggtgtgttatggtgaaagttgctcttggtactagcattcgcctttacactgagtggtgtgacgacaatattgtcaaaattttatgctccgttaactctacatactgtttgatttggtatgacaaagtttttactttaaaaggagttaatagtagtgagtgtttctttggtttctttctttcagaatcctaccgagcattgtgttaacggagttagtatatatattttcaacaagcaagtcatacaatttgattttcattcaagttattggataaagacatataatataatggccagtttttaatttttctctagaaaagagctacaaactttgctaaaatttcagtggcaagtgacaaaagttggaaaataaggacatactaagccgtagtaaccagaaaaatacaaattgcaaactgaagagtttggatcaagatcgagagcaacgagattatcttgacagcgaagtgagagaatgactttattggtgtccctggagatggttaaaggtgtgagaggctgcttggtgataccaccaaaccaagtggaagtagaaaccaaatcaaccgagaagatcctctcccatgtgttgttatcttcaactctccatcaaaactcttgcttgcaatctttcttcaactctgaaatacagagacgaccatcaagattgcataaaccaatcttgtcaccagaggcatcacgggtaataaaaggcggtgtttggatgacttgaaacatctctgtgtgtaaatctaaaactatgagtttggtttgtgttgttgcatatccttcctcatctcccgtgagccagtagagtgatccgtttgcaaacaccggcctctgatcgcacaagatctgatgatgatcaagagaagtagtattcacgaacctccatttttttccatctaaatccaaaacctcgcacgtaggaggagtagcaggagaagtattatacatccatactagtttataacttccactaacgctgtctttcccaactccaatctgagaacatgtcatgactgggtctagaacaagatttggatcttgaactggctccagctccacctccgggttttgcttgtatataccaaagctgtggattctcaatagaggggagtctatgaaca

SEQ ID NO: 24648 - DNA, 1083 bp, Arabidopsis thaliana landsberg
  unsure (1)..(1083): unsure at all n locations
ctctgctaattgactattcttcgatttcgatatctattttcttgttaccaagtttaatctcgaattgtcatattaattttcatatttttgatcagtcggtgcgtcaatttttgtgagcggagtattaattatatcgtttgtctttgtctttgtcttaaatccaacaatgggttcgtggaccatttcctgacatgtttattgcttctttcaatcatgtccgtccaaatcccgtagatctcagtgtatattaatacgtacaatcccactttagcttttatttctgtcttcaaaggaaaataagaaaaagaaaaaatcgtatgagagcttttgtggtccaaattgtgactaatttttttgaaaatacgtttgtgtttacgttatatacacatttacgatttacatctccaattgttatatgctttcttgaaatttcgaccgggatattattatatgccttgtccaagaaaaaagaaagagagacctgaatcttggaactaagttatttgggggtgtcactcatgggccaatattgggtccattttgaaaagcatatcactatttcaacncaattaatgagagtctcatactaacgctgatgtactattgaccgaaccagttttgaaaccccattaaagcccaatacgaagtacgttgaaatttggagcccaagagggtaaatatggataaaaaatacgcgatgtggcaaaataatttacagctactatctctcctccgtcttggcttcgtggtggtctctctgacattatcgtcagacaaataatttctaaatatctctcctctcctctcgtttgattccaaaaaaaaaagctcatcgacgaacgaacgatggcggaaagtggcggtggcggtggctgttgtccgccgatggatctgatgcgttcagagacgatgcaacttgttcagctcattgttcccatggaatctgctcatctcaccgtctcttaccttggagatcttggcctcgtccaattcaaagacgtccgtactcattctccttctctctatctctcgatgtttttgttgacgaaatatgctattggattgtgcattttcttatttcca

SEQ ID NO: 24649 - DNA, 623 bp, Arabidopsis thaliana landsberg
ttgatttcatctgatgggtttgtatatgatccttctgatccttagcttctagttcaatatcctctttaacagcccgaggttttatttcctcttcgttttcagtcagcttattaccatgcacactagaattctccattatcattgtttgccttctcctctcttctattgcagaagaaactgcagatgggaggaaatcctttcctctgtacaggacaatgaaatctttatcccgagatatcagagtccctccagtcaaccactgcaacatacatatattttcgctcatcaatagatctctttagttatatgggactccgaagggcataattttctattgttcgcaaacagagccacaaatagtttgatactttgatcactagaagtaaaccaacaacctttaactcttcggccatcagctcactattagtgttctgaactcctctcttcactgctatcttggcaagctcacatttctcccaaagcttgacaattgcaacagctagtccctgccaatttctattcctacccggaaggtctcgaaaaggtcagcccagaaataagtttaacaaatcttttttccggggcctaaaatggaaagcttaaaaatccaaggtggaaaaacc

SEQ ID NO: 24650 - DNA, 2219 bp, Arabidopsis thaliana landsberg
tatgtagaaagcaaaatcttgcaccatttgtgttgacattttaaaatcggaccgattttgagacatggatagattctattaccaagacaattaggtactggattttacatacataaaacaacctcaaatcaaatagtaacataacaaaagattgttacaaggcaaataactactagactagagagaataaggcacttaattgttcctctgcatccaagacatcaacctttaagctatatacatacacaacgatgaccattagcaatagaaactagagactcccaatgctttgaaagctatgcaaatcagaaattagtatcaatgagaatcatccacatatcctgcgacctacttaaaaagggtctacctactaggtagtcagaaatataacatagaacagagcagaaccttgacactgactaaagttcacaatgcttgaaagctattaaaccacaaaatggggctatgagaaccatacacatatcctgcgaccaagttaggttctagcaagtcagaaagaaaacaagaaacagacttctcgagtcacgaccttggttcctttgatgatcaatccatttaagtattaagctcctaaactagtcacattggtatcaaagataatgaataaatccataggtaacatcataatcacacttatatatatatatataagaaacatcaactacaaatcgtaaaaacactgatacttagagtatagtaagtttagataaatccataacagagacgaatttacttgtacgcaacaacatagataagcaacaacgtaaatcatgataatatgcagaaactgaaattcacaacctcaaatcaagcagcttccttcacaggagcaggagctggagctggaatcttaacataacccaatttcttcaagctagcagcatcagattcatcattctcataatcatcttcttcttcctcaaaatcatagctttgacgattcacaacaagagcccaaacaagatacatagtagcagcggttaaagcaccacaaccaacaccgaacaaaagcgcgacgacgacgctaagaatatctctggttcgatctctaaacgaattgatgttatcagagatcaaagggagggaacgatccgattggatctgtggcttctcgtgacgacgattgacgaagaaaggaaccacgtggtgaggatttagacgacggattgtgaaaacggtgacgaatcgtgtggaggtgaaatcggattcgaggttagggttttctggggttattgagagggaatatgaggagattaggaaggttttgcaaggacgtgcggtggtgatggtggtgattgagaggaaagctacgacggcgatcgcaaatcggaggtacgatgatgacgtcattgttatcgtctttgacttcttcttcttcttctgacgattttgaagacaaacctaacccaagaagattcggtgaacgaagaagattaaaaagattttctaagatacgtgttattatgaaataacccctctacttttgtatttgatcatataggtcccttttatcttcttttcttataaaaggtgccaaaatattatttaattttgacttaactattttaagtctaaatctcattatttatactcacataagcaaacaatagatttatttctctatttatctaattttcaataggttaattgttaattgatatgaatttttgtccaagttatacaagttctaataccacaaatagtttgtgtaatatgtgaatagtctgaacccacctcgcatataatcaaacttctagtagttataaattcataagatttttgttattctaagcaagttaatgatgcattcatggtcaatatcaagttaaccatttgtttattaatatagtatagtcaaactttcacattttatatttattagtcaatattaatagctaagatttttttacctaattattatggttagagaatctaaatgaaaattctatctagtcactcatagtctcgtaccatagaataagagcacgacactttcgaatattccaacttttctcttatttaaaataatcctctcctttcttgtaaacaaagagctaggttagactcaatttagcagcggtcacagagcgataaaggaaaaaaatgacgatcttaaatgccacgacatgacatgatagaatctttgaggccagccatgagcccatgaggatcatccttcgtggcaaagccagctcacg

SEQ ID NO: 24651 - DNA, 1481 bp, Arabidopsis thaliana landsberg
accgagattgtgaattagacaaaaagaaattaaaatcctttatgttatagattcgatcctcgattaaacctcacaagctttgtaacaatctctcaactctcacaaaactcagctctagaacacaatcgaacaagtaaagaagaagaacacaagactcgatttgttaacccggttcaactagatctgtgtgatctaacctacgtccggagccaaatctatccggtaaattcactagatcaaaggaagagttatactcaaacttgagcttacaacaatggcggaatctcgctctctctagatacaagaataacagaagaaagatgaatgtgataatgacgttgaaacaaacttgagttggttaccctccactgcaggtaaaggcttctctctgagtcatcatctttcggtttactcagcaatcccaaaaccggagataaccgcctggtccaattccattagcttgattaaaccaaccaaaccaaccaaaccaaccaaaccactaaaattgaatcataaccataaacaacaacactttaaaacaaaagttagtatgattgttacgtttaaaccagcgagaccctaagtcattggattagacatgtagttcatcatttcatctactggttttaatatacatagatattattacatggctttttttttatttcttaaaaagaagatatttagtcatccatatttttcatagttgatatatctgaggttagatcttgaggagatttcatgggattatagaaactaaataattggcctatactctactatttttgttggaattttttttgacatgatattcgatttctgttaattacatatgaagattttaaacagcaaaactagttttattgaatcatgtcccaatttttttaaatataatattagaaatttgtgttagattaacaacatcacggattgaggacatgaaattgcagaatataaaaaattgtaaacttgtgttggaatggcataattaatttctttttttaaggttttgtattcaaagcgatttcggtttttttttttttttatcgaggttgtgaatttgaaaaaaaaaaggtttaagatcgtttaaaacgaaagtcggtcacgaaaatatttttagtctgtatgcataaattaagagaagtcaaaaacaaattttacaaaatacaccactgaatgtggatcatgcatgcatgcattcgaattttaatatccatgtttaaatgtgtacgaggctagtgaagtgagtagtggtgagtggtgtgactaatgaccaaaaacgcaaaaccaaagtcacaaaaccgaaaaacttttcaaagttaacttatagctaggatccacccattaagagtcaattcgttctctctcttcatgaaaccatgcagattctgctatttattactcatataacgtaggacacatttgtgtacaaaaagatagaacttccaattaacattgttatttttgccaaaaaaaaaaac

SEQ ID NO: 24652 - DNA, 2990 bp, Arabidopsis thaliana landsberg
cctcgagatgtattctcactatcgcgtttcaattcccttttgaaaacaacttgcaagaaaatgttgctggtatggcttgtcagtatgtgaggagcgtgatctcatcagttcaacgtgttgcaatggcgatctcaccgtctgggataagcccaagtctgggctccaaattgtccccaggatctcctgaagctgttactcttgctcagtggatctctcaaagttacaggtgggggtgtaaatgtttactctcgtctctttcttataatcctcgaacttatcgatgatgccttatgctgatatgtttgtttttccagtcatcacttaggctcggagttgctgacgattgattcacttggaagcgacgactcggtactaaaacttctatgggatcaccaagatgccatcctgtgttgctcattaaaggtatgtgtcctacaccaaacaaaaagcagaatacacctgtagttttagacgtataatatggtctggatatgttgcagccacagccagtgttcatgtttgcgaaccaagctggtctagacatgctagagacaacacttgtagccttacaagatataacactcgaaaagatattcgatgaatcgggtcgtaaggctatctgttcggacttcgccaagctaatgcaacaggtaaagaaccaaaacaaaaacatctgcagataaatggttttgattcatttgtctgagaactatctttgcgtctacagggatttgcttgcttgccttcaggaatctgtgtgtcaacgatgggaagacatgtgagttatgaacaagctgttgcttggaaagtgtttgctgcatctgaagaaaacaacaacaatctgcactgtcttgccttctcctttgtaaactggtcttttgtgtgattcgattgacagaaggaaaaagactaatttaaatttacgttagagaactcaaatttttggttgttgtttaggtgtctctgttttgtttttttaaattattttgatcaaatgttactcactttcttctttcacaacgtatttggttttaatgttttggggaaaaaagcagagttgatcaatctctatatataaaggggatgatgtgataattttgttaaaactaagcttacaacattttttctatcgcatttgacagtttcattttcacatctctcgctatatattagtaatataaactatttcaaaaaaacaaagaatcaacaagaatccacagatgtaagaaagaaaaatcacagccaaataacttttttatttatttggccgttagataaaactaccttcagaatttcatgcatctagccggtaaacctgtctgatgattgacggcgacaatctcagagacattggtgcaacgaagaacatcttgaccaagcttagctccagcagctttaagacctgtaagcgaaaccggaatgttgaaaagattgagtgacggaagcttacaaagcggagggagtaccaggttcggaaagaagtttccgaaaccatccataagcaatggaacttcgaaatcggttttgttgtgtttcaccacattgtctttagctgcgatgtgagctcctggttccatgtggttggttgagaagcttgattggttagggaagtttgggtatagactaacgtatcctctcaggtacatcatgtcgattaagaatttcttccatgacgcttgccaaccgttggttcttgatttcggaatctgaaccgggttagctttcgcgttctctgtgaatctcatgttcatgtagacatagaactctctccattgctttgggaagaaaacggctccccagctgcatggtaattggtgaaggtaaggtgtgtgaggatggatttgcttgaagaaatctgttgggttccatttgggtctctctttgacaacttcaacgattttgggcgtgtaaagagagatcgaggagagttcagggaaagagacttgagggtcgtagtggtaagcaagtaaagcgtatttgatccagaggaaataatatggagagacttcaatgtcgtcttcaagcaagagaccaaaatcatcatcagaagctggataccaactctcgctcacagcacggattaagcctccttggatgattcttcttcttagtgtttttggtccatgaggccaatcgaatgtgctcactacattgatcgtctcttcatccactttgctatccatgttgaagctgagtgatatttcgtcaccaaggtagtatgcattgctcaaagacctaagcaatcttaataaagattgagctcggttttgggtgatgatgttcactgagactctcatcttattccagtctgaaatcaagacatttgtcagtttcggtaaattaaaactgcaaaagctatattaaaggcaaaaagttgatacttacttggcaatgctgttgatcttagatcagccatccagagaaccttggagatagaagctctcggtagaagaaccaatgcggtgccattagaattagtctcggtagccattttcaaagctttcttgacattcggatcagcatcagctaccgtaatcaccacgcttggattatgaatcttaataagccctttcatgctcgaatacacagcttgaaatacaggcacctctgagttcgacacacccaaaatagccccaacttccaaatcaaaaatcttgaatctcctctccttacaaacaaccttaggccacctcaaagccgacgccgcatcctcacacggacagaacttcccacccgaaaccgcgatataagcctttttaccaacagtacctctaaacttctccagcaaaggaccaagtgctttaacttcatcaatcgaatgcgcgtaaaacaaagcatcaatcttctgaggatacattgcagcccattgagtcacataacccgtagaaagcgctttccaccactggttatctcttacttcaacaatgtttttaaatatcacagtagtctcagacacataagctaacctgtgttcactatctccccaagtc

SEQ ID NO: 24653 - DNA, 2276 bp, Arabidopsis thaliana landsberg
tacttcagattgtaagatgtccctaatacagaacaacatcaaacttatttagagattaagccaactcacattcttgacagataaaatatgacaggaaggagactatcaacacataaagggagctcagttagtacaaagactaattatttttcagagtagaacctaacaatcctatgtgaaactgttgacgagacaatcgtcctcccgtttacagccaggagaacaaaacttccacatttggtgcatatgtacatttctagatatacaacaagattatcttccaatagacccactagggattcatggccttaaactatcaacagaaacaagcatacaaaagttcgataacacgctttatatcatttgagaattatagtagctaaagattttgcattgcctggttgatggtcggcatgaagattctggatgaagtaaccaaagacaaaacccagcttcctttggattctccgacagaaatttgggaggaagaatgcggtgtcggatatcagacattgcagcctcacgagctctttcacactgaaattggctcagcaactgacggaaaaaaacaaattagtatatcaatgaaaatgttatgttttgaccaagaaacagtcgaatcaatatatacataaacctatgagccatgcagccaactgtactttcaacgagaaacttcactgttaccatctcattaacaaacatgctacactatctaaatctatctggacccaaacatgacccacacacgatatgtcccagttaaagacataatcccacgggaaaacatatatatgtgtgtcaacattaagggcttgcagattcacatttcaactcatggatgtacatacttacaattgcaggtcaaaagctacaattaagatggcatacctcataaagaagaatacccaaactatagatgtttgaagaggctgaacgcatgtcacccttgagctcctcagggctcgcataccatttctcttccaactgctcactcactgaagtaaaagggcaggcaactgtactacaatgaggttgactagatctgaaatgaaactcctgtatcgcgccatcattattttcagtttggatattgacgccaccagctcgttgaaacataggccactgtctagagcttggtccacttgatttctgcttctttgcagggatagagagactagaagtatctcctaaccgtcttctaaccagagggttttcgagttgacttaaagtctctttgttcatgttgctgtcaaaagactctcgttgagaacctgaaaccacatactttactgcattttccttgaaaattttgaatgaagatggtcgcaggtcacataaaacaactccttgagaatgagaacagtccacatgatccacgatctgcctaaagatatacatacattctgctttattaacttcctgccgctccgacttcaaccattctctcagacttaaaccttcacctccacaacctctatgtgtatctgaaggattagcacaagaagatggtttactggtattggaaggtaagcacggcaaaccatcataagccgccaaagggatgctgctagaaatctttgctgaagtattagctattactaaagcgctaccagaactagctacagtttgctgatccatattcctcgctttagatctattgtttggcgggcctctgaaagtaactcccttccctttcaatgtttttctaacaaaaaactgagaaaacccagactgcgataacatctttgtcttgatgccttcatgagacaatgcctctacaggtacaggatttcgttcaacatttgtcaaatgttcattagcttctccattaacagcaataatagccagttgtccatttgaagtctcaggcaaagacattttcccagcatttctcaagatacttactgttcccctgtcaattaccttcttactcatagaactactacccggtaaatcaccgtctagcggaaaacgatgcagaaactgactgcgattcatctctaatctagctctactacttggtctaccaactatagccatactcgatccctcacaagttttaacagtcaactcctcgacaacatcccccgcatcatttgtattctgccggctagaacatggttcatttcctataagctccacatggtcaccaccattcttaccatctaaaaaatctgcttttacaccataagaacaatcaggagaaccagcttttctctgaacctgcacttcttttacttcccggacttcaatgttctccggtttaaacgact

SEQ ID NO: 24654 - DNA, 2587 bp, Arabidopsis thaliana landsberg
tccagagtttgttctaccaacctgagaccttcttggcaaacaagtaaaagtttgctgtcttgagaaaactcgtttctaacagatttaagaaattccggattcactttcgtgaaaggtaaaccaaagaagagccctgagaaattgttgtgcactgtcctctttatgatcgtgcctgcaattttgttcagacaaaaccactcagaatctcagaattataatgcatacagacacagtatgttcaagttaaggctcgagtgcttaccaatatcgttgtcttcgttgtaaatgaagagaggaatatgggagcaagattttatatgagctctctcgaattgagtcttgtctcttacatccaccaccgagtaaccttcttcagctattaactgttttgcttcttctgcattcacgaatttcagctccgcagcaattctcaagcttctccggcggataacgttcccggagacactctttcccgcccagctcactgctttcagtcgcctcccaccgacattactgcatcagaaatcgaaactgttaactttatcttgttttggacgagaactcgccaagattaaacaacttggcgaattatacaaaggagtcaactttcagttgagggaactagtattacctggtgaaataaagagccgtagggctagggcttatgatccccgccattgcagcagaggtctcttggaaaaaaactcgtcactgtgatgcgatagttacttggacaagaaccactagattagccataccacaaggaaatttaagatagccaatgagttattgccacgtattcactctacttttacatgtagatctccaaatccatatcatctgattgttatacatgttacatgtttgtttccttatgcttgtcatgttcaaatctattatagtttcagataaagaaactagcttgaggttaacagaagcaagcaaatgtctgattaaaatgattactgaaagctaaaacatttgtttacatctgcagacaaagttgaatttttattgcaggaaacattcagacaaaagatgtgagaaagtcgctctcaagaaaacaagaagaaacaagagcaaagagtatcatgatatcacatatccagataaaataaacaaaagagattatctcaagatccccggatcagcgaatgcacatcttattaatctcagtgaccaaaagagaaatcaggaatcagcttcagctcttttctcgacggtgtaaggatagtattctctgccattgtctactcttgtggtctgacctccagaatcaatcaaagcagaggtaacagctagtgttgcacctgcagctatcgctgtcggaatgctccttgctgtaaaaaaaggggaagaccaaagtaaaccaaataacaattaagtatagcatcataagaatgcacgaatctatagcatcatctctcactcaaagctatgtactttcgatctttacatatatatgattttgagagtttcctgtatacactcaatatcaaagtcttgacacttgtgctatcctatagaattgctacactaggcaccaaataacattaacttggggtaaggaagaatcaatttcttcccattacaattcctttagttactcccactcgagatcattgtttgtccatcaataactactaagctcgtaaaacacatgaagtgaactacatactgctaattccagtaacttcaaatggtcttcaccaaaatcacatcagttctaaactacttaaccatcgagacattgttttatgcaaacacaatgaaaacgaacgaaccatgagtgaagaagaaaaaccattacctctatagccaagcacagaagctccagcgacaaaaccaccaatagcaccattgtaaaaatctctcttggatctaaaattctgaaccagctgttcaacaccgatgtaaacacctcctatagcagcaaaagtcagcccatgggttcccatcatcttcagtgttctaataagtcctggaagagccacatttctctccactcttggaacatctttccatgtggctaaaatggttccgtaaatagtcccagcaccaaaaccagtgatactacctttgattgtcttcatcaacggaccatcctcttcttccaaatatctcatttcagctggatccatgatttcttctactgttctacctaacgcacacaagttaaacattcaacagagaacaagatcaatcaacaaaaatataaaaatgtgatttttacaagatgcggatttgaaagaatttcaccaaattgaagttttcaaagtcgcggtctttacaaaattataaacccattttccagatcttcaatataatctggtttaaagacccaaatagagacattggattgaaacaaaaattccgaaacctagtttgtgaaagcattgagctcatcaaagttgtaacacaaggaaaataatggaatccatcactaacaatagaagaaatgttacagaagacaacgaagagagattattgaaggattcaggaaagtctaacctttggaattcgaagaagcgaaggatgagagcgattcagtggaggagctcaatgaaatatgttttgttgatgttct

SEQ ID NO: 24655 - DNA, 698 bp, Arabidopsis thaliana landsberg
ttgttatgttcttaaaacattattccctgcaattttaaccttgtttttagcaccctcttctatgtaacaaactaacaattcttgtttttttcaagaaaaatctctgaatggtcaaattcccacttcatagcaaaccaacacagattcaagaccaagacaaaactgtaaaaaaaaatcctttaaccgaaatattattgtcggcaaaaaaagattcagatgaaaaaatcagcattttcttagaaagtacttgttctttagacaaacaacattttctacgtgacgaaacagagtatgtaacgaagaacacacaaaaaaaaagcacttccataatgacaattccagaagaaggaagaaaaaaagttacctttcttgggaaaatctggaacgacacggatcttagttttgattccatggatacgaggatcctcttcttctttgtttcccgacattgtcgacgaagagaacaacaagatgatagattagtaataattcaaacagaacagagaatgaaaatcctctgttttgcttaaagggtgtcttcttcttctcttctctctcccaaactacttgaacaaaagagaaagagaaagtgaagcagtcatactactcttaccactatttatatctttaaaagaaaagaaaaaaattggttagattctctgttctttaaaatgtagtgcggtatatgatgggagtca

SEQ ID NO: 24656 - DNA, 1176 bp, Arabidopsis thaliana landsberg
tccacctgcttgtgtcatgtatgttgtaggcattcatttcattccaaggatcatgcatccccagatcgtgaggaacagcacctctgaccttgcgaattcccacatttccttctgccaggaacttaaccttcctaccatcttcagacaacacggctttcgcaaaatcccgctggatgtttagttcgatctttgggaatagcataaggagcgcatatgatgcgtaaaagtgtacatcatatgtgcaccacatcacatactccacaccttccaaatacagaaaccgaccaacatcatcgccatcatctacatggggagtatcgacaaataaaccattccggttatgaatggctgatacttcatcattgctttttactccaacgctgttgccattaccaaggtcattccgttgatcattaatgtcaagtccaccgaccttaccatctgaatttcctaatcccgattgttgatgctgactattcccattagcattgagtgaagaagagtctgcaaccaaaaaccgttgataaggtgatacaataatttcaaggtaccaaaataatgaaacaacaaaattttgttaaaagcgaagaacacaattttacaatcaagagtttgactttgaagaagcgtatagatgtgtacctatccaaactgtaccaccggcaaccaaaaagtaaagctcattgaacagagtgaacttgtacctacaaaaatacaaaatagttcagggcagaacggtgagagagcaaagtattcaaagatctattaggttccaaagcaattaccactcagggagcctttcatctctgagaatgggattctgccatgcttcaatatcttcctcccacctcttataatctgaagttgaaaaccgatgctggtcaataatgcataagcactattccacgtaaaacggaagacaaattgtgtgtatgtgtaacatggaacaatttcagttaacaacattatcaggtatacatccatacagggtggcaacttaagtgaagcatatgacacatgaacatcagcaccacaaatacatacttgtcagtgcatcatgcacaaggtccaacgctgctcttggcgaagtaccataaaatttagtgtatctcctgcaaaccaaagacggaaaaagacagaaaacagaacccagaaatcaacagtgtataaccaaag

SEQ ID NO: 24657 - DNA, 1791 bp, Arabidopsis thaliana landsberg
caggttcacctatgttgtcatcagttgggaaccagcgaagcaatggagaaggaggacaaggagaccgtgacagcaatacaagttcagttcctgcggctgttccatcacactctaccggtgagaacgtttctgctggggttcaacctggtttgggtgatgatgtttcagttgctcaaatcaatgcaaggataagagatatggtaaacattatgcaaggaagagaccagattccatcgggtaggtttcctgctgactaaagttttacattgtggacgaaatgttttcaagctcttcttcacgtgtcaatcaggaatagaatctctcgagcgggatatgtctacgggccatggtgttgccactgctatgcctgagcagcctaccaacattgcaactacttgcgcacctgagtcgtctagtggctcactgcatgacttaccatctgagaggagcaactcagtggtatgtcttctctgcaatcagatgattctttattttatgttcaccagggttagcctaccactaatttttgttttttcaaccagtgtcaaaatgaaaaagatcttggtggagatttagagcatccagcccgagcaaaagatacctcttgtactacaggacaatcatcagctccgtctggagatgctaccggtgatgccaaagaaaccaataaggctactccagaggtagctacagctacaccacttggattggggcttggcggtttagaccgtaaggtaatgaatcagttgaaaaataagtgtcaagttgctgctgcttgtttttcattgcatagcatatccacaagtgtcatagttccaaatgcttacagtcatagtatgtttttttttggttaaagaaacgaagcaagcagccgaaggtatcaggtaagactgaagatagcgggacttcagctacacttgaaggtgtgcaacaaagcagtgggaccagtggtcagcagcttttgcaatctctcttttctggtagttctcgttcagatgagactggtcttagacgcgggcaaggttcagatgatcgtgtagatgtctcaagtgcaatgtctcaggtcctggagagccctgtattggatggattgctagcaggggtatctcgacaagctggtgttaattcaccaaatatgctgagaaatatgctccagcagtttacccagaatccacagatcatgaacacagtccaacagattgcgcaacaggtggatgggcaagagatagaaaatatgatgtcaggtggagctcaaggcgagggcggcggctttgatttctctagaatggtccaacaaatgatgcctctagtctcacgtgcttttagccaaggagggccattgcctcatcccgcaacaatacagcctgatgatcgtcaaccttctcaggtacatctacgagtgttaggtttggattttcttgcgtttttgatttaggaaaaaaatgtggctgaagaacactgatactattatcgactgagtaggattttgttgttgtctttttttagttgtagaaaaagtaacaccattcttacctaggtattacaataaacgtcattgtctcttgttctatctcgtgtaatgaatgttatttttctactttttccaaataggtaaatgttcaatccatggctcatatgattgagcactctgatccaccagaggatgtcttccgtgcaatggtcgaaaatgctgcgataagccaagacgaactagtgaacgagctttgctgtgattaagctctttctcaagtaagcatcaaaactgaacctagttggttgttaataaaaata

SEQ ID NO: 24658 - DNA, 1726 bp, Arabidopsis thaliana landsberg
cggcaagagcactccacggtaagctcttaaagggaaggaagcttgatattcgctattctattccaaaggtgttgttcactcttcttatcccccttgtttgtatgctatgtgcgttgtacctgtcacttttactgtcttgcttactactcttttctgtgatatcaggaaaatcctaaagagaactccagcgaaggagccttgtgggtaaataatcttgattcttctatatccaatgaagagcttcacggtatattcagttcatatggagaaattagagaggtttgcttactagtgttttctttgttctttctttatgatattgacggttatgtgatattgttataactttgctacttcttttgtttgtaggttcgtagaacgatgcatgagaactcacaagtttacatagagttctttgatgttcgaaaggcaaaggttgcacttcaaggactaaatggacttgaggtcgctgggaggcagcttaaacttgcaccaacctgtccagagggtacaaggtagttatcgatttttcttccagccatagtttttgtcaatggctgtctgatgcagtaactaccatattttgaactgtgatgatgtgtaggattcatcatactttttttgtttctttcagtttctggccacagttcgcttcagatgatggtgaggggggtctacctaaaatggcttttaataacctatcatcagctcacatgggtaagatagtgcacacggtttatgattaatcgtttctcaatgattgaacatccagggtcacaactcatacctatcctttaacatctctgtttcagggagacatttcccaggaatattagcttcaacctccattgatggtggatctattcgaggtatgcacaattctgttgggtcacctatgaactccttcattgaacgtcatcagagtctcgatgttcttattggtttgccaccatcggcaagagtcatctcagctagcaagcctgttggtcttcaggagtttggaaacccatttgataattcgaaaacggggatccaaagtatgccaaatctccatcctcattttcctgattaccttgacaactttgcaagcggtagtccatataaatcctctacgacattctctgaaatggtaagcgatggccaaaaagcaaatgagggctttatgatgagcaatgttcgtggagtgggagtagatggatttaatggaggtggtaagtacatgttcttcttattactattctaccttgatacacttgcctaaggttagtgatgatgcgtaaccaatgattgtgaatttaagaagaatagtttactgtagattttagaatataatccatgagtacaatctctaattaaggatatttatattgatcctaaccaatagtagtggattacgaaaggtgacagaggatgcaaatttaggtattacctttagatagttggtttacttgtccccctgggtgtagaacttgtcattcttacaataacggcatcggaataacgtttgctcatttgtattttcttattgtagtcataggatctcccataaatcaaggatcccatcgtggtaacctcaacttatggagtaactctaacagtcagcaacataatcagtcaagtggcatgatgtggcctaactcaccatctcgcgtcaacggcgttccctctcagcgcatcccacctgttactgcattctctagagcatctcctttaatggtgaacatgg

SEQ ID NO: 24659 - DNA, 1711 bp, Arabidopsis thaliana landsberg
caccatggatcagagaagatgctgagactgctcagaatttgacttgagaatatgaggtttgctgaccacgactagagcccccgaatcttgaaaatagtgagccaaaacagctctgcaagatgaagaggaaacgtaagctcattaaatttaattcttagacaccaatctaccagaagagaatatagaaacacagaacaatacctgtatactgtgaggtacagtggcccagtaatccacattcgggattacctataaaacagggtgtttacatttcaattgtgatagaatcagtacatgagaaaaacttgcatatataaaggaaggtagtgaaacatacatctatgccacgaattccaagggagaaataccgatatactgcaccacccaccagataagctccaaacaggcacaagatactgagaaagataagaacatttcatttttgattcccacgatatctaaacatattccaataggcctcacattaaaaagattggtttgctcacatgattagtaaggtactaaaccagccccatccactactatggccggatatatctgctgcacaaccggcaggatgtcgcagctgagtagcctgtcagtgaaacaagaccatatctacccttagtacatacttcttaagaatcaagatattgagatgcaaataaaaactcagttttcaaacttcaaacccataaaattcacaaaagaaacaatcacacttggtaatttgaaagctacaggaaaagagcaaatagatgagttactgaacactcacatactgacaggtaccagatttcgccaaagtgagtggtccctgagaaaagaaaatggtgaacgaggttttacgtcttaaaaactcctaaaatcaacttcaattcatacgcttaagtaggatgtctgatatacaaatccttacatcaactttagttttctggcaaataacagaaactgaaagcgagcaattttggttcctatttccagttgacatctgaacaatgacgcctttgccaggatcctctttatctaccatattcaaaacaaaaatcctgaggcacatttattacattattattgcaaacgaagttgggagaaaacagcattaacaatttagctttttcacaacttagaacacagggtgaaaatagtctcaattttcacatatcttaaaccttaccaataatatcaacttttgtgcttgaggcatgccctagagaagtgcatacatcataccctgcaaatgattagatttttaagatggtttaactcttcattagcacaaaagcattgtgcaatctgcaaccttatcattctctactgagctacataatatacattaagataacatgctgtcagagtgtgattttaatacctcttacattttctgacacaagtgcactacatgacgttccgcagtgagatggacctccacaatcctaagtgaagaaaagcaaagtcacagagactgattgagattctcaaagttaaaatagaaacttttttgtgtagaaggatagatcaagacaagaaaagtagccaaatatcttacttcgcaaccaacacatcgagggggatcgtgattgaaaatcagcacgtcacaaagctgttccacaagacggttttcaaaaaaaattaacaaacataaatcacaatggcttagtgtaaaatataaacggcactataactaccaagcagttatacatgtcaaatc

SEQ ID NO: 24660 - DNA, 2008 bp, Arabidopsis thaliana landsberg
ttttaataaataacgggaccaaatagacattaccatttttgaaccgcgcatacatattgctactacggatgagtgatgactatgatcttcccaaattgacaaattgtatcgcctttaggcgagactttagccatcaaccgattaaagccagccaaacgtaataaccttggcaagcataatcatcgttgtacaaagaaaaacatcattttacttttgtatccgacatcaataaaagcatagcatcctaatatccaatagttatttgtcacatgtaaaacaactaaatatagccgtccgatcgtcccaattaggacgtaaacgaatatcaccgttgatttagcatactttgataatttaaaagtcgtccatccacgccacaaccccgaaatccacgtcgctccacgtcaagaacaaaaccttgctccaatacaaaactaccacgtggctatctcacaatacgatccgttagatctgacacgttggcaaatcatgacgaagctcaccaatcaggagaaactaatgcgtacgcaactaaacagttcacacatcactgaatcattacctgttatatacggatctatcgagctgaatcatcatcatcactgagttacccgaaagcaaagactgagagaaccaaagctcctaactaacaatgaggaataggacgctcgtgtccgttttgttccttttctcgcttctgtttcttcttccagatcaaggtacgtttcgatgtatatatgtgttgattttgagtagatagatataagtgttgcttaggattcatatgctgatgatggcgatatttctgtggtgtttatcataggaagaaagttacacgcgaatgcagaagagagttccgatgatgttacagatccaccaaaagttgaggagaaaattggtggtcacggtggtttatcgacggattccgatgtagttcataggttagtgttctgttagtttcacggtagaactttcgcttggattgcttgaatcttgccttattcgaattcgtttgatcgacagagagtctgagtcgatgtcaaagaagacgcttcgcagtaacgcggagaagtttgagttccaagctgaggtttctcggcttatggacattattatcaactctctatacagtaacaaggacattttcttaagagagttgatctccaatgcttctgatgtaagcagcttcgtgtacattgttttagtgagtttttgggatacctcgttaaataggggaactaataagtgtctgtgttggtgattttcaggccttggacaaaattaggttccttgcactcactgacaaagacgttttgggtgaaggtgacactgctaagcttgagatccaggttagctacatgtttctcaatatgatttttatgcttgagagtgttgaaaatagagtttcatcgatttgttttatcaaatgctgatctcagtaaatttagcctttcgttggaattgtgtctagtgtaagcttttttcttacctccgtaactatgctatggtatgcagattaagctagacaaagccaagaagattctttctattcgagaccggggaattggtatgactaaggaagacttaatcaagaaccttggtaccatagcaaaatctggaacgtcaggtacgttacttatgtggtgatacgttgtcctgcataatagtatggatcaataaattccatatttctaagatcttgcctttcgcagcttttgttgagaaaatgcaatcaagtggggatttgaaccttattggacaatttggagttggattctactctgcctatcttgttgctgactacattgaagtcattagcaagcacaatgatgacagccagtaagttgatttagagggctttgtttggcaatatacttgtgggcatgtaaaatcattgaaaagcttttctgataacttcttttccgatttcaggtatgtatgggaatcaaaggctgacggttaaattgctgttttcgaggatacatggaatgagccttttggacgtgga

SEQ ID NO: 24661 - DNA, 2678 bp, Arabidopsis thaliana landsberg
tttatatttgcattcatggattggtcttgcagttcaatatgaagcaaaaaagaaagattgtgaaagaaacaaatgtagtgactactgatcagacaaagacaagataaagagccaaatgtctttaaaacagagaaagaatgaataataaattacagaaaagtgtgaaaattttggacgcaaactaaagagagaagccacgaagtacgcatgcatatagaaaggccacgaagcgtgatatccaacgtaatgtctttgaagaaagataaacagacgtaaactgatacgttcaagaatctcttgtcaatacaaaagagaaaactcatcaaatgagtaagaaacaagtggataaacatttcaccattaaaaattactaaaccagagacaacaaaacaaagctttctctttgactaagaagctttcctcaatgtctgttaagtcttaaccaatctaaagatcattataccataaagaagataactagtgttaatcttaactaacaaccaatcaacgagcaatctacataatctgatgcagaataaatatggtaaaggcaacgatttgatagatggggcaatctcagagaaacgtgagaataatagggaacaatcaacaaacatcagattcaatgaaaaagagcattaatgaatcacctgagaacagagaatatcagaggatggcccattcttataaacccagattaaaagggcgtacttttagtgaaatcacgctcgagattaagcaaatgtaagcgcatggcattgaacagagtcgagaaaacgtagatccaccgtcgataagaacaagcaaaacccagaacccagtgaacaaagatgaagcacaaagaatcgaaagtagataagacagtcgatgatggatagaaagagactgacttggggccggagctgagagccggagaagaacgaagcgaggcaccggaccctgggagatctgaaagaaggagttgaagaaagaaacaaggaaaggaatttgtaaggctgagatgccaccaaagggttaaactttagagccatttctggatatgatgaatgaatccttcttttctacagagctagagctctccctcaatctctatctctcggtctgagtttggttcttctggctttttctctcaggtttagtttcgtccacagaaagagaatgcttatgcacagcgttgagcgtagcaagcaataagagagacgaaaataaataattcttttttttgttaaaacaaatattctaataaggaaaatgacgtcatattgtcatttgtatgtgaaaaccaaggtgacaaattataaaaataaataaattgggtatctgttctaaaatacccttgagatgcttcaattttgacactattgttcttacatatgtcggtaaaatatttgtatcaaataattattagtcaacaataatgatcaatgatacatcaaaacatcgagtagctaagtagcagtatactaaatattaatatagttgagaaaaagttgcaagaaaaaaaagggatacatcttgaaaagaattgttgattaaaaattcttttattgagttgaatagtaaagttgaaaaaattgattacttttgagcacctatgtcaaagatgattatgattcatgcttagtctctttcactcatgacttgtgctaattgttagatgactctcctatatgtgtgataatttggtattagatctatgaaaattgatgagcaatgagaaggggtaaaaaggtcaaaacaaaatataaagtgtttatattaatttatgtgagttttgtaataatcgacgtactcgggcgtgagaatccacgtaaaagccaaataagtttgaagcatgaaagagacagagaggggacaagtggcataggatctccacgtggatgtcccacttggcatatgaaaactctataaaccgtacattgggtttaatggttttttgcattttagcatcattcgatacttttctgccaagtttagctagctcaacgttttgagtaatttgatagcacaacgttttcggtttttcattgagaccatgacaacaaatttaaacttattctttgttttcgttccatcgcattaagtgtaaacattaatgcttgtttaacatctctttcggtgattaacattaatcaatggagtatatacttcgattaacatctctttcagtaataaatcataagtgtgtgtaaacatccccattggtgttcaccatacgtttgtgtaaacattagatctcttaaaaatatccaatttatccaataagttagcacacagaagaaatatgtagacttttcatagctgaaaaacacaacaagtactacatcataaaagtaaacacaaacgcatacttttcaggtcatgtgtaattattccaccgccgatataagtataaacagaaatcaaaacgatacattcaatacaatcaccaaaataaagatatttatcaagcaaacaccgtcacattttagatttctcaccaaacctcgaccatcactttttaccgtccgacggaagtcatcgcttccgtgatggtcaagtgtccttcctgactcctttgtcatcaatcgaaaacataaaatatttacaaacaaacatgtcatatataatttcacgaccgaactcagcatcacgtctcagcgtccccgggaggtaaaaggttccgttaacgtgaaggc

SEQ ID NO: 24662 - DNA, 453 bp, Arabidopsis thaliana landsberg
aaagttctgaacacacctggtgctgtgaaacagactaaacgagaactctttgatgctcttcgccattaactcgagtaaaattctctcctttaaatatctcagctcttattacattgattctggattactggtttctgtatattatggttaagcatttgcatatgtagtagaagcctctgtttttatcttgcaaactgatagattttcagtagtttactaacatgtacggcaattgtatttgcataattctggttcatactcttagctatagccccagctaattgtacagctgatttaattatataaaccatccatgatttgtaatgttttaaattcctcggcattgcagtatcgatcttgatctgctttctaagagcatttatctaggatatatcttgatctcctttctttgaccatagatcaatgtttcattctttagagatgaatgactta

SEQ ID NO: 24663 - DNA, 2061 bp, Arabidopsis thaliana landsberg
tgtttacttatacaagtagatggtctattctgaagtttcaatcatatcttaaacatatcagaacttttgagttctcacctcctcacaacataaacgaaaaatatcacacaccttgttccttcaaaagatgttgattaatcagtcaacactattggtgagttaacatttatcccatagaaggcaatgttccaaaactcatggaaaaaatatataacaaaacccaatagtatacatccaaaaagtggtaaaacaacttaatacaataattatactaaaataccaagaactatagttatacaagaggataataaaaacaaattacatccacataaacataagataatttgaacattggtccggcagaaaaattaacgagcctcacttcaaatcatttgacataccttccttgacaaccaccatagataacaatcattgcaaaagttctcaaaacctcttgaagcaacatcatagtccattgcgcacaatccggcgacgggatacatttgcaataaggatagagaaatgtcttccggtaggaagcatggcttatcctccgataaggtcgtaactccctcaccaactcctctccccaccgcctgactttctgtgtccctaacggaacatggaacatcccgaactgctcaagaaaatgtaccgacatagcctcgtttccaacacacatagagaagataccacaagctattgttgcagcgccatcctctgggaccaactgcgctagaagctcaataccagcggggatgtcacaacattcagccaccacccttagcccttcataatatatggggggcttgttatgaaaatagtctacaaacatatttcatatgaatgtataacaatgataccaaaaccaagaacgtatcactgacaaaaacctcctccattgataaccacactcatataaatggccaccgatattactgaaaccaaaaacgtcccctaccaagaacctcctccatagataaacaaaaaacttcccaaatctttgaaagagtccatagtgtcacccaaggagattcttgcacgtaacacgattgtgacctatacctccacatcttccacacttattaggaaattaagacttattatttccctacagaggacagaaaagtattgtaacatttgaattatatacaaaaaatatggatatatatataaaataactgatctcatattccccaactgaatgtatccgcagctttggaggtctcctagagtttttttttgttttcggaggcattaaacagagaacccttatattcttacggacatccacctccgatggatcgcgtacaaggaggataggttcttgtaccgttggtgcccacattcctaacctatgcatctctccaaccaaagttctgaattccaaacccctatcatgagctacagccattgcatgggtaaagggaattctgatcttctgaaactccaagcaagtacaagtctgttgctccaaagagacgtggaattgttctccaacctttgcaactacttcgaaatcccatctcccaacagccgaaacagacatacccaacgcacctttgaaccgcttcataagttcccttcaaccgcaataggtatgtctccaacagttctagctatttttttcctcctggatttaaaccaccaagtgatagtaggatttttactcaattaatcctaaaacactatcctgtcgttgtagtattttaggttgtcaatccaatccggtgtaatgcaaacatatgagatataattagaaagctctaagtcaagccgagcagagagttggttggttctaacagtcctagtatgcaaaaacagaaatgaaatgaaactaaaaacagaaatggcaataacagacaggtgaataacaaagcagaaatgataacaggcagtcaaatggataaacgattcctaaggatgggataatcgaataatgtggtctccttaatctattcaaatggttgacaaaacttcacataagctatccctagacaacaagttcaacaacagattaattcactctcgtgatggaaatcctcaagcaaagctatacac

SEQ ID NO: 24664 - DNA, 2249 bp, Arabidopsis thaliana landsberg
  unsure (1)..(2249): unsure at all n locations
tcctgatgcggacattacattatacattcatatgaaataaatgttacattcatttagttagagaattttaatgctttgttttttgaataaactgaaaagttcatttatgactcacacatcttatgcagttgacgttggtatatctttcacttgatctgaagtacctagtagctgcaagaaaagaaagtaacaaaagacttacacacgcttgcaataaatgtaagatggttagaaaaatgtggccatgtaggcctagtgcattatattattggagcactaagtcaatatattcttaagaaaatatgcgatatatttcaatatgatttggtgtgcttcttcttcaaatatattatacagaaaatatagagttttgaaaaaaaaaatctttttaggaatcaagcatgaatcaacataatagaaaagatggctcttattgaaaggtaaaccaagcatgagttttttgagagtttctaaatggctagtttttaataatagtttacacaataacttatttatatcaatgtggattcttgtattataagagtaaataattgttgcttaaaaagctaggaaaaaaaatcaattttgtattttcttagtattatgataacaaattaacaacgaacaatgtaatggctttgagtattaatattaagttttatgtgtccagtccaacgggcaagaaaagtaaaagaacccagactctcactttattgggcttataggtccacttaataaaatttaatgggcttatccacacaaagagtttactaggactgtgagagtttgttttcacagtcatcatcatctctaagaaacaagcttctatgaccctttaagcagcaaaaaaaagaaaaaaccacaaaacttctctgaaaggtagataaatggtgtcgtcgtctctgagactcccttctctcacttcccttctatttcccgccaccactcgttatccagccactctccggcgaaccttatgtttacggaacagaccactttccggattcgcgacggcgccgagtggtactgcttcgcctgagactaagtcgtcggaggttgaccggcttaggtcagaccgagccgttacgcctcgctcacaggactttaatgcttggtatcttgatgttatagctagtgctgaactcgcggattatggtccggttcgtggtactatggtcattcgtccttatggttacgcgatctgggaagcgattcaggtgaaaaattgttgattcaaattgattttgaatgttgatgtttcttcttatcgcctcaattttgcgttgtgaattgttgatgatttgcaggattatttgaatgtgaagttcaaagagacgggtcatagcaacatgtacttcccacaggtactgtttcaagctgaaattcagaaaattagctttaagctggtttagtttgttaatagaagtagaatttagcatagagttagtataagactgatgaaacacttgtgttcttggttaattatagattaatcataatccaaatttgtttgttggtgaaattcatcttctttcttatgctcttatgttacattgggatttatagtgatggtttggtcttttgtgcagtttataccatactcgtttattgagaaagttgtcttacacgttgagggatttagtcctgaactagctcttgttactgttggaggaggaaaagaacttgaggagaaacttgtggtaggcatttttctggcgttattatgttttaccacaaagctagaattgtgaaaattctttgcctaaggttttgggtttgattgttgcacttgttgaggttgtggcaggttcggcctactagtgaaaccatagtgaatcatatgtttacccagtggattcacagctatcgtgatcttcctctcatgattaatcaggtctggacagacattcaattgtttatcattctttgnnnnnnnnnnnnnnnnnnnnnnnnnnnnnctggttatgtttttcttctttctgcgatttagtgggccaatgtcactagatgggaaatgcggacgaaaccatttattaggactcttgaatttctatggcaagagggtcatactgctcatgccactcctgaggaggcagaaaaggaggtttgttctctatagagctgtggtcaacttgtggagattttttttgtggtactctcctgtgacaaataattagccctgtatcgcaggcgaagcagatggtcgagntatcaccagatttgattttgagccaaatgcaattcctgtt

SEQ ID NO: 24665 - DNA, 1448 bp, Arabidopsis thaliana landsberg
aggtcatagtgtcataatatgcaatatgatggtttgacgaacaattcgaattcgaatatttggtacctgttaatgacacaattatagtcaaataattctagagcatagatcattcacattataagtgtataatgttgattgcattgatgcgtttctgtttatgctagacgttcatttttttacgtaaatggatgggtagtaatagatatagatcaagtgttgatggaaaggtcgcccatgtagattatacgtttgtgcataactaaacgcatagcaattatagtcccatgtcagtatccccgttactctatgagtcaaacgtagtgcacaatctagtgtatattttaatccagaaaaaaaaaagtcttctagtatgattctgacataaccaaatggcatagttaaacgcatgttggtgaatggaggaaactaaacccgcgtgggaaggcttttctcgagtagtggaagtgaaatattatcttaaaacatatactttcaatgacataaattggtgaagatttactcccataagtgaaatgcattacatctagaaacttatctcttttatatttatttccgatttagcaaaagaagtaagtagaaagtctattgagtcaaacccaaattttaaaaaaaaataatgcaaagaacttgcatataaatattttacattataatttgtattaaattttgatttagtaaacatatataacaaaattttcatctttcttttaataatatagtttttagtttgttagatttttttttttttaatttgggcaacacaacagttgtgtaatagtataggcaaagaaaatggtcggacagctaagggaagatcgctctctcctcatcagacaaaaaattacaagcgagaatttctttgttcctttacgaccggacaagacacgtccgtcatcgtcttctactactttctatcttacgcctctccccttatcctacgccaaaacatcttatcctgcgcatcatcccttccattaagacctagggttttctctctctcccatcattctcttctcccgatctcatttccattacccaatcccgctccttttctctgattttgaatcgaacccttaatacccagaaatctcacggttccgaggagtgggtttttgggagttagggttttcgagagatgttgaatgtcaggttcattgatgaatctgttttctctctgcttcaagccattcgggcacgtctgtgataattccgaagctggatcgggtggtggtggtggcgtttctggtggaaccggcggtgaaggcaaagacggattgctttggttccgtgatctcggtaaatattgcggcggagatttctccatggctgtgattcaagccaatcaggttcttgaagatcaaaaccaggtcgaatccggtaattttgggacttttgttggtgtttacgatggtcgagggtggtcc

SEQ ID NO: 24666 - DNA, 1238 bp, Arabidopsis thaliana landsberg
  unsure (1)..(1238): unsure at all n locations
caacactgctaactaaattacatatctatgtttcataaaaaaacatcgctttcatagtgacatacattgacatgagtccgaaccaatcctgttgtgatgttcttactaatnnnnnnnnnnnnnnnnnnnnnnnnnnnnnnggttggcctacgagacttaacgaactcatcaaagttaaacgaggattccacttcatcgattatacccatcaccctgtcttacccgaaaagttaaaatgattagctgaacctattaataatgtaaccatttcttgtatagtggccaaaaagaacattacctctgttccacctcatcgcagctaatatctttttttggtttctcataagggtcagtaataccaagaccagtaaatagaccctcatgatgactatgatccgtctccatacccagaacatcctctttgaactgtgctagcccgtgacttcgcgttcttctttgtccagatacatcaggaaaaactaagtggtctctagctggagtaagaataagaccgtctatctcatgggccctgttcaaaagtttatgaaaagctatacattatacggatcataacagaaaactctactttaaaatgcactcaaaaccgatcagaacatttaaaaacttacaaacaatatataagaatgcggttgtaaggaagcagactttcccaagctctttgcaatgtctcatcgtcagagttgagttcagaagtaatctccctgaatacaaacgaagaaaacaaatatctaaagctaaatctatggccagtaggagtttgaggaaaaagtaaaatgaaaaacggtttacctaggtaaacattttctgtgataagctgttgggcaacgtctgcatacagcaaaatgcaacgcgtattgattcttgtcttcactcatgttacagagtttacatgtgtgtagaggacaggcaaagcagtctctagcagcaatcttggcttgaagttcttctgctttgttttgatcatcagcacagagaagtcttgcaacgcattcaggatggtagaaatgaccacagtttgacgcagagcaagggaagaccttcaaaacagtaaacagttggatgaatttcaagtactaaatacagctaaacttaacttaccaagtatatgcacatatatggtgcaagtatatcatacctgttgagagaaactttcatcagaggatcccaattcgccacaagcatagcactggtgctgtttatagaaacaattgttacac

SEQ ID NO: 24667 - DNA, 1572 bp, Arabidopsis thaliana landsberg
  unsure (1)..(1572): unsure at all n locations
agcttacaccttctttcttcagctgctccttttatataccaaccgacgcaacttcagggtacgtgtagacaaccccagggactttgtcgtaatccacatgcccgtgtttgcctgctataaactcaacacatgcaacaccatcttcttcggctttgtgagccagcattggtcctggaatcacatctccaattgcataaacgcctgaaacatttgtcgagaatctctcgttcaccagaattctcccgcctttgtctgtctcaactccgattttctctagatcaagtccagnnnnnnnnnnnnnnnnnnnnnnnnnnnnnaggaccacatcagcttctagagtggtctgttctccaccttcagcaggttccactatgagtttaacaccatctccagatgaatctaccccaacgactttagttttgagcataaatttcatcttctgcttctctagtgagcgttgaaactgcttgcggatttcaccatccattgctggtacgatatccgctgcaaactcaacaactgtgacctctgatcctagccgtccccatacagaacccatctctagcccaatatagccagcaccaatgacaatgagtttctttgggatctctgtcagagacagtgccccggttgatgagacaatcttcttttcatcgatggtgattccaggcaaagacttgacatccgagccagttgcaactatgatatgtttgcctttcacaaccacgttttctccatcgattgtgtccacagagacttccgatggggacagaaacttaccatagcccttaacatagtttaccttgttcttcttgaacagaccttcgactccacgggttaaattcttgacggctgtgtctttctgcgccaacatagcaggaagatctacctcaaccgaagagaccttaacaccatggttagcaaaaacgtgctttgcttcatggtacatgtgagaagagtgaagaagggcctaatacagcagaaactaaactagattatgtcatatatattaatcaaagctcaaacagagactaacacaatcacaaaacaaaaaatgcgaggatcgtgatccagcatatgcaacgagaacaaaatattttcagatatacaaaaattcaaaggcaaatagttccatttccgaggaatcaagcacaaacagatctgaaaaataaataagtatcatcatcacacaatcatttcttaaacctcgaacttaatctaacctcagatcgaatctaaatgatgatcaacgagcaagttccacaggagacgaatgaaaatcggagaaaatttccgacgaatcaaggtaatcggaaaaggagtttctaaaatcacctttgaaggaatacagccgacgtttagacaagtaccaccgagagcgcctcgctactcgatacaggtagacagaagaccgagctgtgccgctttaatcggcgccacataacctccaggaccgccgccgatgatgacgacgtcgatgccgtacgatcctgacgaagcgaagccgcgagtgagggagaaagagaatctgagagcatcagcgggagaattagagatgtttctggtgagaaa

SEQ ID NO: 24668 - DNA, 741 bp, Arabidopsis thaliana landsberg
  unsure (1)..(741): unsure at all n locations
aatccctaaaactagcttattctttgatatatattatagaatgtattataaatttgtaaaaaatagtcaacattaacccaaaattggttgtcatgtccatagagagattaaaacttcttataatgtgtatatattttttgaaaatttccttataattaaattataacaaaaataaagatggagccaacctaaatataggcgcctatataaacaagcactaaacacctgctactaacagacaaaaacatttccacacaatgnnnnnnnnnnnnnnnnnnnnagccctaatactattcttgatcttccacctcacaccagaaacaactgtagctcgccctctcaacgatgccgatgcgaagccggttgatagagtcgtaaccaccaccaccaacgaagccaacaacctagcctttgtatctgatccgttctccagtttgcagtcatcacctccaacatcacctattcccggttctcctggctttagacttccgtttccattcccgtcatcacctggaggtaatcccggtattcccggttctcctggctttaggcttccgtttccattcccgtcatcacctggaggtaatcccggtattcccggtattcctggtattcctggtcttcccggtattcctggttcccctggctttaggcttccgtttccattcccgtcatcacctggaggaggaagtattcccggtattcccggttcgcctggttttagacttccgtttccattcc

SEQ ID NO: 24669 - DNA, 1515 bp, Arabidopsis thaliana landsberg
atttgccactatgagcttcttgattcctaatagaggagtaggaggaaccaagattcctctctccatcatcgttctcgttctttgtggtttcatgttcttcattctcttatacactgaaagaatcagcttgttgtcttcttcttcctcttcgtcttcatctttcttcaagctaaagccttgtccgaggaaagatgttagctcgaaacctagtaagcacatacgcgatactcgaatctgaaaactctgttttgtccaatttcagtgttcctttcttgttgtgcaagtagtctcatgaaattcccctgcttttccttgttgccagaggagaaaattcgaaaggaaagatcagagatattggaagtgcttgacgacaggttcgaattcgatcccgaagagtgtaacgttgcagcagggaaatgggtttacaatagctcaattgaaccactctacaccgatagatcatgtccatacatcgatcgtcaattctcctgtataaaaaacggacagccagaaactgattatcttcggtgggaatggcagcctgatgactgtacaattccacggtataatacaacttattaacacaaactaacactagtttggttcagggtttgagacagaacctttatgagcttcatttcaattccaaacagatttagtccgaagttagcaatgaacaaactcataggaaaaagactactttttgtgggagattcgttgcaacgaagccaatgggaagcgttcgtgtgtttggtggaatcaataatacccgaaggagaaaaatcaatgaagcgtagccaaaaatactttgtatttaaagcaaaggtaagttaagtgatggtagattgcgctacaacgcacaccttgttaggtcagttatcactggtaccttgtattacaagcaaagcttagatttttgttgtttttttttgtatgtttctccgttttccttgattcataggaatacaatgcgactatagagttctattgggcaccgtatatcgtcgaatcaaacacagatatacctgtgatttcggatccaaagaaacggatagtaaaagtggactcagtgaaagatcgagctaagttttgggaaggagctgatattttggttttcaacacttatgtttggtggatgagtggtctccgcatgaaagctctatggggttcttttggaaatggagggagtggtgcaaaggcactagacacagcggtggcttataggctagggctcaagacatgggctaattgggttgactctaccgttgaccctaataagaccagagtcttcttcaccaccatgtctcctactcatactaggtaaacatttagttttattatatgttttgatgtgtttggtttgtgattaacgtaaagtgtaatgtaaatgttcagaagtgcggattggggaaagccaaacggcaccaagtgtttcaacgagacgaaaccgataaaagataagaagttttggggaacaggctctaacaagcagatgatgaaagtagtgtaaagagg

SEQ ID NO: 24670 - DNA, 1215 bp, Arabidopsis thaliana landsberg
gatcttcttgctcacatttaactgatctgataaataaacaaacttaataaaacattttcaaaattcagatcttgacaagatgggtaaagcaagaggagtgaacaatggcgtgaatgaaagttctctcggttatctttttggttccggccagccttcttccgctgctgctgccacaatggggactactactactacaaccaccacaactaccaccgatgggaccggaggcagaccgataaccaccacgacgaccacagtcactgataacaagaagacatctgcaggtgttagaggaagtcctaataattacttcagatcagaaggccaaaactgtggaaactttctcacggtaacaggagatctttagtctttacaaagttttgagatcaaagaattgacttttgatttggaaactgataaaaaccaaaaatgtttgttgatgagaacaggacaggccatctactaaggttcatgcagctcctggtggaggatcttctcttgattatctgtttggaggaccaagtcctgctggatctggaaacaaatgaagttacttgtagtttttttcccactattcagattcgtgtaaatcatcaaaagtgttggcttttatcccttagtgaaccctgtgtgattcaattgtgatgtttgccttttgttctcttctttgtcttgttaaaaggaattttcagacaatgttctctttaagagttccaagaaaataaactaaagtactgatcaaccaagagatctatatcaaatgaaacaaacaatgcccacaagatcttgcgttgaatcagccatgttcaaagctctgatcaatcgtaggagaaatgattcgaattcagccatatacttacgttttatcatagagtagaaagaaacagagtcaaatcaacgaccaattgtaggagaaaggattcaactattataattcataatcatgcactcttcttcaagttctaagatttaaacatagctataagccacaaaatccttaacaaaaaactaaaacttttaggggtcaaagaccacaattccgatacaagaaagcaattaagaaactcggacgaatctgagtctcggtgagagtgctctagaatcctagcttggtacggcgccagtgcctacgcttagcgttgtacctgtgtgaaggtgatggaacaatggaactcagtatcaaagtccgcaacttttttcggatgaaataaaaaa

SEQ ID NO: 24671 - DNA, 2022 bp, Arabidopsis thaliana landsberg
  unsure (1)..(2022): unsure at all n locations
aagaagagatgaatgaggtagttgcatcagagaacaaatttcagatccagtgggaggtcatcaagaaaagctagtgaagctgagcatgaagacccctgttgatgatataaagagcaatgatgatagggattttccaacagaccaagcaccaaaggatcagagcgacgaggttagtgctgatgaaactgttcctaaagaagcaataggcgaggaacttaaggttccatcctcaaaagtactagatgatattcaagagaacagtaacacggaagcagtgacgaactttgctgaccgagatcttccagtacagaatctaagtgaactcattcagtctcatcaatctcccaatcaggtggaagaaacttcatttgaattcaacaaggcacaagaagataaaaaagaggaaagtgtttctgctttgattacgaacgtgcaagtgcaatatcagcccaaggaagattttgaggctcctgcaatagagaaagagatatcagaacaagaacacaagttgaatgatctcacagatgtccaagaagatattggtacatatgttaaagtgcaagttcctgatgatgaaataaaaggtgatggccatgattcagttgcagcacaaaaggaagaaactagcttaatagaggagaagagagaggttgaacatgtcaaggcagagatggaagatgcaatcaaacatgaagtttccgtagaagaggtaatatttaaagcaaagaaacataggtgatttcgttaacttagatgctgtggttttactaattatcatttgttgctgaccgaaatttttaatgtgatattggcaacgcagaagaacaacacatctgaaaatattgatcacgaagctgcaaaagagatagagcaagaggagggtaagcaaacaaatattgtcaaggaagagatcagagaagaagaggtatgaacctgaacattattcagtgtttcttttgttttcatactcgtttaatatctaaatcatagaaaccatgtttttgcagaaggaaataaatcaagaaagtttcagcaatgtgaaggaaactgatgatgcgatagacaaaacacaacccgaaattcgggatattgaaagcttgtcttccgtcagcaaaacacaagacaaaccagaggtacaatatactttggtttggtatcattatcctgctttttccataagtaatggacacaaattctttcaaagtcacaagtcctgaaaacaaaagcttattttcattttttgcagccagaatatgaagttccaaaccaacagaaaagggaaataaccaatgaagttccaagcctggagaattcaaagattgaagaagaactacagaaaaaagatgaagaatctgagaacaccaaagatttgttttcagtagtaaaagaaactgaaccaacattgaaagaaccggcaaggaaatcactatctgaccacattcaaaaagagcctaaaacagaggaagatgagaatgatgatgaagatcatgaacataaagatgataaaacaagtccagattcaatagtgatggttgaagctaaagatacagtaagcattgtcaagactcataagaaatctcacggcattctctctggtgttggttcaaaggtaaagcattcaatttctaaggtcaagaaagtactcactggcaaatcttctcacacaacaaagccttcatcacctacataagtgaagaaacaagaaaaacacaatcagtgtctataaaaggttttttattggtttgttattttttttattggtttgtaatttgtgaatattacagatttgtttgtggggtttttcacatgttcaataaattggtttggttatttgtttttacctgatcattggctaattctctccggcactttttatgaaccttaaacaaatacaattacatatgttagtaattaaacaagttcatagttacattatagtacagtagagaacaaacgttttctcatgtgtgnttatctaatctaagtttggaatataaagctcttgcttagcaagaaatactt

SEQ ID NO: 24672 - DNA, 2235 bp, Arabidopsis thaliana landsberg
agaacgcttacaaacacttgaagtcaatctatttaaccatttacaaaaaagataatccatgttatatttttcaaggctatgatccatgtacgagaaaattgaaccatttggatacagatcaagaatcagaaggtgttacttttcacaacgttggtccatcacttcaagttgatcttggagcttttctgtagtccttagcaagtgcagaatatcacagtctaaagttgagataccgggaagtgctgtttgtgaaaaggacaccttaacaccctgtaaagcaaagtatgtaggattcggacactatgcataggtcatggcctgaactgagtctaactttctaaatttgtcaaattggcctctttctttttatttttcactggaattttgagtgcttatcaaaattcaagcaagatatttttacatgcatttattgaccagatatactaacagactaacaaatctctccatcagagagctgagacaagaccaaaaaaagatggataaataaccaaacctcaatcagttctccccgattgatagagattttatgcgcttttccacaccctgacaagtgactcaaaacagctgaagcctcattcgaaccgttgcacaaattccgaaacttcttcagcgtgacaacacaagtagaagtccagtgtccctcagataatatcttcaccacgtcagccgccttctcctagacatcacatagacttatttcaatcagccacatacttatataataaactgagaattcttctcctagatatagatggttaaaagtgagaacaaacagaagcaccttcaagagtggaacaagaacaagtgtattttccagaatctcttcctgcttcactggctgttgaaccattttgttctttatctgtcctcaataaacgagcaatgggaccacgaccgggatcatcgagatcactaatccgcacaacatcaccttcactatgcatcaataactggaaacacgagccacttatataatcgatcttaaagaagataaatcctctttggccactaaatgcagcagaaactcaccacaacatcatcaatgcataaaggcgtcattcctcctcgatcaaaccacgccttcttcaccttttagaaacaagtgaacaaatcaacgttacataatcagttcttcctactagttactaatttcatctagaaccaaaagcaattgaccagacctggacaggatcaatgatgaacaacccaaactgacgcgaaaccttgatgatcaaatcacgccaaaactgaaatttaagttcccaatcggacctctgaccactaaacgccttgaatctagccatcgccaccacctcatcgtcccaatctggaacttcccttcgtataaactccttcacagcttcaggatccatttccttcactcagatgaaagaattagggaaaaattaacagagatggtgaagaagaatcttgtagactcgcaactatacaagaatatcgacagaatcctgcgaatttgaaagtcgatttcccgccggactaagttttatacgaagatcgtcggagagataagccaagtctcggagatgttctcgattcgacatgctctgccgtttgtcctatgaaatttagcactgtatgacgtttttaagaattcggccaggcccattaactagagagtactaggctttgactttcaaaattaggcccggcccattaattagagtgtactaggctttgactctcaaaacgagactggtcaaaactcaaaagatcccagggtcaacgtcgctccggtggttttaacaacaaatccaccatcaaataatgtacctaaacaacctcttataataatgttttattttacaaaatcagtgtacttactattcaattaaactagaaagcgaccaaatttatttttaaaaacttagttcttaaggataagtaaaacgtcccacgggaccggccataagatgacccaatgcaagttacacgttgatagttttttcatgaattagaaagaaaaaaacaattgaaaatgggaaagtcaagtagtaaaatagtaattgttttttctttgttgggtgatgaaaagctaaaattaatttttaaaaagtgagaaactagataagaaaagtgtaaaagacacaaaggagacaagaaggaccgtccatgattatagtaaatgcgtaatattaattacgataatgatatgttttatatataaacaccacacaatacacctgaggcaag

SEQ ID NO: 24673 - DNA, 1791 bp, Arabidopsis thaliana landsberg
atacatattttctgtccaaggttctaaaagatttggaaaacgaacagccaagtctccaagggaaagggtgcaattcgatcgtacaacttcagacggtgcattttcaacaactgtgaagagaagctgaagattggattcgctggcatacattgagtttaatgcatcaatttaactataaattcagttttgtaaaggataaatagactatatgataatgatttaatctcaccagaaacttgcatcaataatcataaacctgcataatgcaagcattgcggaagcttgtagttcaggatgctgtacgaatgaaaagacaagtttcattttatcatgtatatcacaaaataaatgtgagagcaaaagaaggcttttaacttcatcacacgccatgaaacagaatgaatgaatagaaaactaactaccttttgcagcagagaaaaatttctgcaaagcttaaagagaaaagttgcacactccccaatcagattcttctcaacagaacccccagaaacaatttccctctctgctctttcagcgagtgtatcaagcagtgcatcatcagaggcagcaaatcctagctcagcatttatgccattgttctacaaaacaaagaaaactttgcattattcagcaaaaataaccctttagggttgtaaaatttgtgccaccagctgcgctctacgaaattggtctgtacctcttgggtggcctcaaggttttcttctgtgttctgactttcagcagccggtttgtcctttttagtcttctgtctccggatcttctggatacaggattctatatacaccaactggttcatggcaatgtgactgacagcgaacaaaaatctactgagtttagccacttgaactggagtcaaaatatcaactttattattttcggtatcagtctgtgcttcctcttgttcaactacgcccaacacagtgctcagggactttttaataatagtagaagccaatgtttctggagttgggtggatcatgtatatggcacttatggctttatcagcagctgcataatatatattttctggaagccagttcccagtgatcaagctttcaagaataccaaacaatcggctgccactgctgagcaataactttttcctatcttcctcggagaaccgctgaataacagtacatgcagttctggcaagtagaggttccacttttgcccaacggccaaacccaatatcaataatatcctgtatgtgtgatccaagaatcctaggggacgactttgcagccatgcaaaggatagatagagccccacgactttgctcagcagttgtcccattgatgttaaagcaaaagaagtcccatagagctgatgtctacaaacagaaaaatgatagaagcacttattagcctctagcaggtgaaaatccttttcgctcgagaaatttaatcaataatcaataacaaacgctcattatttttagttgttcttgactgtgcataagcagactacacgtatcaagtgaccataattcatagcatactcatacgctggagtcacagaaggaacctaccgtgctgctagatatttcaccttttgacactaaagcattaacaataaactctagtgctgcctgatctcctatattcgaatctatggcaaggttcaacagctgtttcgccgtgtcaactggatttttccttatgtagatggagatgaaggcattctctactggcttatagatagacttattctgagaaaaggcctgccaagacaacaataaacaggttttagcacattgtataagaggatgct

SEQ ID NO: 24674 - DNA, 1702 bp, Arabidopsis thaliana landsberg
agggtgacgtataattgtgtaggaccctattatttttcaaagtgaacaagattgtacttaaagtaattgtagtttaagaacataaactttctttgtcaaacatagtgtaaacataaaacaccatgcattgaaaactaacaacaatctaacttacataatcaaagacttctaaatacatattatccttaactccataactttcaatctttctcgtaatatagtcgtgaccaatagtgtgtgttccaatggtctcttgaatttgtcgaggactcaccaagtcaccatacatgtcaaagtcgaggatcgagtaacactctctatgaaaatcattgtagttaaccttttggccacggtaaacaccagtagtgacaagaataccgggtttttacgtgtctcttgagattagtctggatttccgtaatatacttcggttttagaaaatacaagtaatctccattagttagttatttatgtacactaatttcatggctttctagaaaatacacaaattggtcctgcttgttttagtccaataatatcacattttaacccatatttgattgacaacttacaagcctccatgaaacattgaaacccttagtttgcagagaacacagtcgtggttattgcggttttacattacaagctttgatttatctaatggagatacaatatattacaaaccattcttcacttgtcgatccctgccttcacagatctgcctgcaatgtagaacgaaaaccactcgggtaataatcaaatcaaaacatccaaacgcaaaactgttgatacctagtgaaagcaatcttcatagcatttagataccaaagaagaccataacatcgtggtctaagaatatgtggcatcgcagaccaatacagaggacgttcttttcacgacagttagtattacagattgccatgaaaggcttaacctatcaaaagatcaagtccaacagtgaaggaaagaagctagcaaatgccaaaaccataacaacaaagactatatctgcctctatatccgacggtaaggtcatggcctagaactaagagcagcaatcaagcatctattaaagcttggtatgacagactactaacaacaatgaagaaagaaaacaaagaccaaggacttataggaagctactaacatccaacctttaaatccattgcagttccagagattcaaaaacaatgatccaagctaagtcaatggattattacgtcagaagtcaaattccacataacaaatagaacaaaaccctaaccaagcaatctaatccaaaactagtgagccaagctagattccaactaaattcaaaagccctaaatttgtagaaccctaaagatcccaaagttctagccttttattcaaattgaaatcaagaagaagatcgtttcccttcacaatcaagactctcatcgaaattcttcgaagggtatttagcagttatcccagcaacctcaaagacaagattatctccagaagatcgaatcccagtaatagaccacgacttgaaaaacgcccgaacccgaatcccttggagctccgcgatcttaccctgagagatccgacccgttactttgttagaataagtagcgatgtagttatcaggtggaagcgtgattttgcatcaatccgttgaggaaaagagagaagtcgccggaggtttggttaggaaggaatctttccagataaaggtagg

SEQ ID NO: 24675 - DNA, 2127 bp, Arabidopsis thaliana landsberg
gagacttgatcacatgccttgatttatatggagaacgagagtgacttaagagcattaattagaagacgttttattttttgttttttttaaaataaagaaacgtttttttataatatttattacaaactaaggagattaagtagcttttgacaaaagattccagatcaagatcttgccaaagtaaaatatgattttggtttaacttagatcagatcgcagaatgttgcagacagattgcaattatttcagagctgaccaaaaaagtctattcctttcacacatacaatttgtttgtagcctttaaactaaaaccaaccgtttaagatatttatagaaaattaagtttagattcttatgaagctgccacatttttgtcctttctgataattaatattatttggacacttattgcaaattatacgtgtattgttttctatgactattgtttcaaattgtcactagcatcactttatacaattccattacgtctaagagacctagtttcaaatcagagccacatgattaaaagtagaggtgtgtcttaatcctccaatgtcttgtctcaacctgtttttgttgggttgggaagggacaaaattgtgactctgatggttttcttctatggtctcaatcgcacctaacctatcaaagccggtaatgaaacttaaaaggcttctcagaaactgaaaagaatctaaggaatgtagacagtaccagtaagaagctggactgaaataggaaatcaaagtcataggtccaaccatccaggacgaatatgcagccgcagtcagcacaaaatcattcatgaggtcatgcatggtttggtgtatgataagaatgcaggggattgtcgttcatttactagatacctttcataagcgttcattgtgcttttgaaaactgcaggtggtcagtgatcatctatccaaaagcctttgcaaaagttgatttaattttccattcttccagcaaggatacactcgattagtccgaccaaattttttacaaaacgtaacaataatgaaattacttggttgtaactgaggagattacaactctttgtctctttcccttggctacttcgggctatgcgccacacttcttaagtcttggatgtggaacatcagctgcaaaatagagaaaggaaagttgggagcattcaaataacggttaaagttgttagagaaacggaaactaaacatttagcgtagcagaaaattgaaagcaatacctttgtacccacgtacaagctaaagaacacgccgcccagaacaggtactcctgtgatatcaaatgaatggacattactgaatcagagcgtatgaaaaagatagttaaatgaagactgatatctgttgtgaatctatataccttctcttttgagaaagctggagaccatccagtttataccagatggtccaatgacatagccagcaagatttgcaatctgcgattgaggaactcaaaacaaatttatcagcatgaaggcgacaacaccgatgggcctaagaatattcagcaatagctatttaccatgaggcatgtgattgttacggcaccagacaacgccttgagttcacgaaggaggaattctccaaaagcactctcaacctgcaacattacttatgaagttaactacaatttccatggttattaaaccaaattacaaaggaagttatagaggttctatttgtcttgggacataatatactaataggctcccaagagtgttcacaggttccaaaacatatcatgtgccagtcaaatacattgccaagtctccaccaccacaataatgtgtgatagtatacgtcaaattcattcttcaaatgttagcgtggtcaagacttggaacatatgaggcttcagttatttggagtgaataaaacaatcattgtttaactgaccttatatgcactggatgctgatttcagtaacatttctggcatgaagaataaacatgttaaccatgcccatgaaagaagcttcctggttgcaaacacagcagtcaaccatatgaaaaagttgcatcgaatgattcatacaacacaaaggaatcataggaaggcaagggattaccattccaaatcatgccacatggcaacaaatgtaaatacaacccacaca

SEQ ID NO: 24676 - DNA, 898 bp, Arabidopsis thaliana landsberg
atgaaaagagacggcgaaagaaaatgtaaagcactctttttcttagcccaagaaagtgtccatggaggcatgagcaatggcttgcaactgttttggggcatccaagctttatcaaatctgagtttgaaaagctatgctttctagaaaacgacatcactgacacacaggtgaatcttttgtcttcgacaaattttcctgaaaatacaagttcatgatagatagtgatatactaatttgcaagctgcaggtggcaatttggcgtgatgcaaggaggaaaagagtagttatcgctttcagaggaactgaacaggtaggtatttatctatatcatcttaatattatgtggttgatttttctcctatcgttcttattgtcagtatttcatgttgtcagacaaagtggaaagatttgcagactgatctgatgctagttcctgctgggttagtactgtctatttattcagcatctctacattgattcagaagctagttgaatctgcacatttgaagttttaataagttattattcatctctttgtttgacattttaaatatgttgcagtctgaatcctgaacgaattggcggggacttcaagcaagaagtacaggtatgttttaaaccctggaatttgtcaggtatgccgtttattgagttattccttaatgctgttatggattttgcaggtccatagtggatttctgagtgcatacgattccgtaaggataagaattatatcgctgctcaaaatgataattggctacatgtaggtgcttcttgttttacattttactttctccttttcagggaattttttgttacttattatagtaacaatggttgcatcctgtgctgggaagaaaattgtctgtcattggtgaacgatgccaaaatctgtctt

SEQ ID NO: 24677 - DNA, 1203 bp, Arabidopsis thaliana landsberg
aacctgcttggaatctaacaacggcttccacaaactgcagagcagaaacaatgttatacatcaaacatcagatcatagagaaaaaaaaattcagaggatcactgagttcttgcaaccaaaaaaaaaaaaaaacttgaaagcaaattttgggcaaatcgaagtcacatcaaatcatacaacaaaagcaattaaatttttctacttcttaagatccaattacttatatggatgatcgccaaatctgacaatctcattgcgtaaattctggagttttcagatagttctcgattccgaagaacaaattggggggaaaaaaaaacctgctgagaagagatttcggcggtacggggcttgatatggaggtgaagatgaggaggatacgaatccagtataacgcagtcttcgctgtaaactgcttctagagcttccacttccatagctacctcttcctccgtcattgtttagaagaggaagaggaagaggccgcacagagacggcgaagaagaagcagacttttgttttttcactaatagttttcattatatattttattgtagcttcctaaaatatctgaaacggcccaatactatataataattctgattttgtccaaattaaatagttttttctcaaattcaccctttttccctaacttctaatccccgaagtttctacattctcgataagtaaatgttaaaacatatctgttaaaaagagtaaatatgaaaaagattaggaataaaacaaataaaaaaaaaagacgtaagcgatgccggagttaaattttaccgggaatctgccgacgggggaccaagaggctgtggccgtacatacttagagaacttgacggtaagctgttttttattctgagaagttttatttttctgtgtttgttggaacgaaatcaagcttatttaacagattttgtacgatttatgtcgttgaatcgagcattttacttccttgtttcgatacgtggctggtttgtgaacatgtttgattccctgtattgtaaagatggagaatttaagctgttaaatgtatggtaattgttcacatctcatttcattgtctgtgttatctggctgattttggtttgttctttgtactctctataagcttgacgacaatatatgtttatatagaggctgaagaatgtcttggaacttatatgagatttgaaaagtcttaacccttactgtt

SEQ ID NO: 24678 - DNA, 2508 bp, Arabidopsis thaliana landsberg
gacaaagagaatcagtacacacaatacaacgactaaatatggatatccaacttatcaaggttttgttctaatcagtaattccaattttgattattaccattgattcttcctctccttcaccaaaccgtaaagccagatcacacagtgcttgtgttgtggactctacagtcatcggctcaccatacgagaatctatggttctgtacaagagcaaaagaagccgtcaataacacataaaagacctgttgaagctaaaagaaaagaccctagagacagaaaccttacttgagtttcaactctagcatgctcaacaagtgtgcgcgcgtcagcaattaaaccgctcatagcacaaccaatatggtcatcaatttccataatcttctccacactgctcggttcctggggaaaaagaaaaagcatttaacatatactgagaaagctaatatcaccataactaacatagaaagcttatatgcttctgcttcatcatatcatcagattcaattcaaattgttccaaaatagtgaatcacaagaaaaattctgaaaaacatagaattcaaagttagcaagcaaaccagtaaaggcgaagtaatacgcttctcgactgcaagaacaactccctctttcgtctttacaccaatagcagtagaaccaagctgcaacaaaattcaacactcatcagagtctcaacaaaattcaacaatcccttttacaaatttgaaatgcaaactacatcgattaaacaaggaaatgggagctagaacttgtgcaaataagctaaagcaatcaaagaaaaccctaaatcaaccattaccctttcttcaaaatttctcgatttccataggaaactaacaaattgaggaatcgaaaagttaccttgatagcttcaatggcatattccacttgaaatagccttccttctggagaaaaagtgttcactcctctgtcatactcagttcttcgcacaacaaaatcagaaaccaccataagcaaaacaaacgattgaagtaaaggaagaaaatttcaatgaacccagaagtagatagagatacctagtgagaaacatcttcttcttctcttccgatttcgatctgcaaaacctcttaaagtccttcgcacaacggaatcaaaaccctagaaaaacaacggatctgagttaatccagagattcagagtaaataaaaaatcatcacaatgaacttgttgagagtagagaatcaaaccagctaattgatctgcgaatcggagaaagaaccaaaagcttttgttcttcttttagctttcaaaaacgcacttcttcttgaagaacaagttagattgattccaaacttttctaatgggctttcatgggcctaattatattaagcctgggtcacaaataggcctttatttgtatttttgaaaaattatgagacagctataggactgactggaattttaacatgttccaatttatctcaatgtcagaagttaagtgtaacaataaaagaaaaagacaaaaattgacagtccaggttattatttttttgctgtacacaaaaaatgtttttttagaaataattagttttagtgaataaaaccaaacagaaaagtacaaaataattgaaagagtgttgtctcgtaaaagtatggggacgatgaaaagctgtgacttgttgcgagacttctccttccagacgcaaaagtttgtctttggtcagtctctcttatttctctatagtaaacacttttgcatgataacaactattcgaatttcgttaccaaaagacaacaagaacaaaactacacatactgtattcactagggtttgtgtttttttcctaccaattttagaactccacaaagaaaaacttttattcgacttatatattctagtggtttgttctagtacacttatgttataccactcaagttcaacgcacaaaattacaattctatgttcaactttttttcgtttaattctgcaaattaatttacagaaaaaaattccgttttttgaaaagaatttttgcgattcgttattccatataggctttttactctcttgcataaacaataaacgaacatacatgttgataatcgaaacacataaacagtaatttcttgtgtttgtttatgtgtattttactctcttttactttgactgagttaatgacaagtattattgcaaggtagacaaccacatgagctacggccggtaaccaaatagcctcggcggatttgtcaatttcctcgccgtctcggccgctttctgcatctgctcaacatgttgctgccttgccgtagctctccaatcttctgctctccggtgcaccatatccattctcttcattaatttctcctctaaatttgatctcatcttctgtattttcactataacaataataatccaccccgaaaatcacacattaattctttaaaacttcatcactcaactacatttatggactattaattatgattatatagctagataattatgattaatagttaataacaaattttag

SEQ ID NO: 24679 - DNA, 1086 bp, Arabidopsis thaliana landsberg
  unsure (1)..(1086): unsure at all n locations
ttaggttgattcggaatggacaatctgatgctgttgaggtaaaaattgtctctgtttctttgacggaccttttccaccaaaaagttatattctgctaacggctagttgaacttagttcctgatttctctgttttgatttttttattttattaccttctcaagcgaatccttgtggttgtggaggcaagtttacgtggggagaaaacatttggatgttctcaagatactagtggagattggtgtcttcttcaacatctccgtggttgttgccttcttgatcaagtacaacgtggtgcaagtggcatattaagagagagaaagattattgatgccatccgctgcttcttcaggtactttattatttggagtttatcagtgataattttaaagtcccgtctctatatgtcatgtatacattatatattgtgccaaagcatgtggctttttctctaaacacatagaagacaagctcgcattttctgcatttaatgtttatatgtcttttcctctctggttcatttattttctaatattatcccttcaagaacatttgtctttgtttttcctaacatacatctcatgtatctaccctgtcatggttcccaatgtagannnnnnnnnnnnnnnnnnnnntggaaggctttgcacagcttgtctaaagaagcaggattttcacctgccacaacgggtgagctcctcaaagaaatttgttctttctctagttatttgccagttcacgtattatttctaaaaccaggctttatgtcttgcaaattcaatttttcccctttgtaccctctgttttgttgtagcaggtccaagtattttagatggttctacgtcttctgcagcatggaaacttcattactatgagtgggctatgcaaatttttgaacggtacaatataagtgaaggagcttgtcagtttgcctatgcagcccttgagcaagtagatgatgcctataatttcatagagatgactgaggaattcgatccaactaaagcagccacctaccctagagcacgactgtgggcaaatgttttcaagttcacattagatctcaatctcttgaatgatgcctactg

SEQ ID NO: 24680 - DNA, 636 bp, Arabidopsis thaliana landsberg
caacccgaacatctagtaatgaattcatgactcaatatatcaccaattgcaacttcaaccccattggccatataaacttatcccgaccctggaggatcgcgcttggattcaaattcagaaacttatatagcccttacatcaatgagaaagatagtgaaccagatagctaacctgaaaaattatctcagacgttaagttaaacgtcaccctattagtctgaaagatcaaaaattgaagagaggttaaaccagatgaaatgtcatataaaatttatcagcaaatggatgtattataccatacccggccatcagtagacggtttgatgcctgaaaccatcatgcttttgagccccatctgttgttttgactttctaatggaatctttaccaagtaatttctgcgatcagaacacagttgataactattacgattgagacttacgagaagagcaaaactgaaacatcaaggaaacaaacaaagaaccaaccttcctcgtagaccagaattcgtcttccgtcaggactttactttccacaaattgcttatgcaatttctgcaactcacttcattatcataatatcagaaacttttacccaaaaagaaagcaacttttataagtgattacacacctattttt

SEQ ID NO: 24681 - DNA, 1482 bp, Arabidopsis thaliana landsberg
tgtttgcttggacaaagattccacaaattttgtctttggtatctaataatcgactctctattctgcttcccaaaaatacacttcctttcacgtactaataaaacgtgacatttagttttcttaatagatgtcacatactatataatatataccgaaagtcaaactagcgaaagagtttctacatactttacattgatgaaaattataaatactctaaatggattttgtattaatgttgatatttcgagatatttaaattttatatgaatgttgacctaaaaacccatcttaccaaaccaccataaaactcattctgccatataacatgttaagtcatgtaacttatcttgccatataatccgtcatgcaatatagtctgtcttattcttttttttatatatatttttaagttttcgtggtattataattttttgttaattttaatccgccctatattgaaacagcgagttgataattttttaatttattaatgttgatccaaaataagtctcgctaggccatcataaaatctcgtcccatgttactttttattttaaaatgtttaattgttcataatattataaactttctatgctctcaaatatatcgattataataattcgtgtaaaattaaagaatttaactaaaaaccgaattaatatgtatacaaactttttaatttggatgtttgttaagtgaaggtttccagctcgtttagatttatattcattttgatcttatttataatataactctgaatcattatctaaacattttaaccgatgtgggacattaaacacatatttttccattaattgggtaatatatgtctgtttttaaattttcaaattacaatatatgtaaaaaaaattgagatttttttaactctatgtattataaattattcaaaggagttaaaaaataatcaaacaaagatggaaaaggaatcttaaatctaaatcattattttgaaatatcgaagcataattagtggacacagtccaattttggtaatattggtattcgacttttaggcaaaaaaaactggtgggagatccatgttaaatataacctgacccaaataaatttttatgaataatttttcttaaagaatcagataccatttgtatctaaaattattttaacccacccgctaaaaaatgacttcaaaaatactatagagataataaatgaataattattgggttcatccataggattaacctttttattcacctcattttattccatctaattattaaacttatttaattataaaatccaaacttttactacttttttataaactcaaaccgatatataatctcgttgcaattacataatctaaattttaattctcttttgaaactcaaacagatattcaacctcgtttattgaaaaatataaactctaatcattcattctacatccgaaccgatatataatttcgttaatattaaaattaacccttttataaaccta

SEQ ID NO: 24682 - DNA, 2842 bp, Arabidopsis thaliana landsberg
gcgattttaagaaatattatgattcatttcaaggggttttggtggacttgcaaagttggaataaagatttttggctctaaccaataataacatatggttcttagttgaaaaaaatataattggtgttgtgatgataaatttatttaaatttttattcgttatagatgatatattaattctcatgggccattgtgttggaaagcaatttggtggggaaggtctaatttgctttctcttctaactttcttgagaagggaaccattatttggaaattgaaataagcattgacagagagaagaatatatgtttttcctcaaagagttttgattttttttagttatttctcaattagtataattatatggaacgaaccttttaaaaaagaagatagataaattgattgtttttaacgtctaatgttgtagagtgtagacaaacgttctaaacccaatgggcggatgaaaagaaaatgatctaacatagaaaactttggtaattaacgataaaaaagaccctgtacatgtttatttaattagtagtaaatatataaaaatagaagaaaaataaatccagttgtatgtgaatgtgatgattttaactctatataaaatcaaaatgtatactaattaagatgatgaaaaaaatatataaagacaacgaaaattaaaacctctaaactaagatgatgtttgatgtatatatgtatgtatgtataaatttctcaaagtgtaaatacaataatatatgtttccgaagaaaagataatgtaaagaaaactaattaaggacatatgtttagggatcttctagtccttccttgagtcccaagaaccaagccaccacttgagaatgatcttttcaagtctacaagtttctctctgtttccattttcaagatcataatttccctcttcctcttctccgtccctgcttatccgcacaacaatatccgcggccgagaaccaacttggatgatgagaactaatcgaaacactaacctcttcacgatgatcatcaacgactacatttccttctgctgatccaacattgctcgtaaaccgatcaagattcatcaccacaacatgatgttcaggttgttgagtggtagggacgatgatcttagcccgacaaagcggacagtttgagtgagatttgagccaccgatcgatacaaacgacatgaaaggtgtggttgcatttaggtaataaccttaagctctcgtcttcgttaaactctccaagacatattgaacaatccgtaccgttgatcttgaaaccgttttgatgcttttttaacttgaagaaaccgatcttttttatgagagtatcatctaagccggcggttgaagactcaagagcaaaaggatcgtcttggtctcctctttccggcgagttaacatcgagaattatatccgatcttccggattctgaggcagcttcattggtggtgtcgttggcgcaatactttgagacaagagtgtagtaagctgccaagagaaaggcagttgcaaatattccaaaaatagcaatgacaagaggggagggattggggtttgatgcaacgccatcgtttaggaattgttcataagaaattggtggtggagagaagttgatgtaagtccaccattgaggacaaaatgtggaacataagccttgagtacaatctcttgggtttatgtattgattccaagcactaggatttggatcagactccatgaaagaggaaagacaaaagaaaaataaaatccttgagggattaatcaaagattgtgttacattgataagtgtattcattcatatatgataatccatttcgtagcatcaaagagataagaatttgtttatatatgtgatgaatgtagtttatagatgtggaatgtaccaaaacttgatattttataatagataatagagattcttgctggtacatgagaagctaatttgctctgattattatttatctccttacttttttgttctttttatgtgactttaactttgttctttagcttcttctttttttcttttctttttcttttgatgatagaattggcttgttgactaagatattgaatggggtacgtaaatatgttagcttttaattattttgatgtcatattctgtttgaaggatctgtaataatagtgttgatttagacatctcataacataatcctaagtttaacctgtctgagtttgaccgaaagcgtcttgggtttgggcagttgcaagcatggtccgcatggtgtagtttatatctcgagttatgttggaaagttgtgatatgcgacaagagtggaacataccttgagtaatgttcaatctctcttgcactatgagtctatgactctaggctagggtcatggttgtacaacactcctttagttcaaaaaaaaaaacactcctttaattatgaataacctttaacaaaggaaaagaaaagaagaagataacaaacaaaattcaaagaaactaattgcgtatagaggaggatttagatagaactatggggaatttactttctcaactctctagatgcgacacttttgtttttattggtatatatcgacgaatttagactcatggagccctgagcagtttaggacaatgatatttggtggcaacaacattgctcaggtgttcttcaagcaacatggatggatcgatggtagcaaaatcgatgctgatttgtatagggagattcttgctacagaagccattgcagaagatactacttgtcaaccagaagcatctaatgtggtttcttctgctgtcaaagaagagttatactgatgccacttcttagccatgttgctccaccaaagtcatcatcaagtaaatcaagc

SEQ ID NO: 24683 - DNA, 2252 bp, Arabidopsis thaliana landsberg
ctcggaattatcaatcggaaataattaaagttcatgcatttttttcgattcaatcatctggtttctctatggatttttgtgtaattatagagatgcttaattaaaatctctattaaaatcaatgaaatttatactactcgtatgtcacaagggtcaaggattgatcttaaaactttaagtactttattaaaacatcacccacccataataaatggtatgagtaataaatatgttaatatatttaattaattaacaacggtcgccaaaaaacctgcaaaattatgggtaacagacgtcataaaaagaacaaaacaaagaaacaaaattctaggttcctttttccaataggtcgtcagcttttcttggccacaattcaaggctctactagtgctaatttattgttcataaagtttcacatcttcaattctcaaatattagaataaattcttataaaatgattacaaaataaaaatagtgcattcatcagaatctgaaggttgatgaatctgaagggattattactaataagcatattctagacacttgtggttgttaataagggattatccacttgatcttctttacttatttttgatcaaattatcattatcgctacaataatttgtaatattcattcacaatcaaatttctaatcaaactatactctttttattaagcctcaagaacacaaatctaaacacaaactagcctcatcaagaatcagagcttttatttttattcttataagatatatctaaagatcaagactttaaaaactaatcaaacatggcacatacaatcaggagcaggataagtataaatcgactgtttaggtttccttaaccggatctgtccttgtctattcacatgtccttcaccaagcgcttgctgaaaatctacccaagtgatgcttttgttgaggaaaagctgtcctattaacgccatgtttggtctgatcgtcttgagattctcgaatgttcgatgaccaacaagagcgttgtgcatgtttccaggtgatgcgcagatgaaaatgtcgctgtgcatactaacgtagtagtcaagtgcagctaataaagaagctttgcccttgattcgagctcgttcttcagaagatgcaagacttcttttgtcttccattcttgggaatacttgtcttaatgttgagattctagcttctcctccatacacctgtaattcaaaaatacgtgattaatattctgctacatcacattataaccagactttaaacaagtaatgtaactgaagaattctgaccttgtgggatgcaagatagagacgagtattgttatcgaatccgaaagcagctaaaagaagtcccatttcttctggtgttagaggacaccgtccttgacttcttaactcttcatcagtgaactgagaattcaacactcttccttgccaaatcatttgtctgtatttcgccaaggagagtttctcggctttgcctccgccaaaatcacacgctgaatgcgcagccatgtcctataaacataacaagaagaaaatcttgatcaataactaacaacaatcaccaaaagttttgaataggatgattggaataaagtataatttaccttgtcgaagcgaagatgaagcacagcaaacttcccgggttcttgtcttctgtgtgggttgggcatgtctcctaaatgatcaacatttttctgttccttattgcttctccatgacgggtttctaaggcggctgacaagagcatcaccgagtgatgtaatgtgagggacaaaacgtattgcttggaaattcactttgcatcttagtcgttggatctcagcaggtaagtggtcgaatgatagccggtgagagaaaggagaaatggcagcaatcccataactacaaaatagaacaaaaaagctccaaacaattacagtctgaaagtcaaaaacttaaactttcattagtcagattaagtgcaagacagacctttgtagaactggtgagacgttctcaatataccaattcgcagaggcatgaacaggcgcggttttcactcgtgtttcacgtactgctgtaccgtaatactctcttgtactccaagagtattcatcaggtagttctctaaccacccttatgtcatcttttaaagaatcgataaaatgatcgacatcaaagatatcaacaaaagaactgcacacagaaagaaaaaacacacaacatcagcttccgaggcaacaacacaactctttaacagcagagaatttttcaagaaacat

SEQ ID NO: 24684 - DNA, 1327 bp, Arabidopsis thaliana landsberg
tcttttaagttgtagtcaattccaaaaacagtaatctcccactgtatttttcgtcaacaataaatctctacttcttgttatcatacaatctccacataccactcctcacatagatatgcataatgaaaaacagaacacgagatggaaatggaagaacgtgaaaaagaagagatcaacaatagggctcatatcaaacttgtgctcaaatcgtttgcttacgatttatctttgggcgttttttttttttttgtattctaaaaaaattacaatttattttgtaaatccagtaaaaattgtaatctgaacagaaaatatatcattaaaaggtgattgatatggctataatttgcatgttatcagtgtccattcatcactgttttgagtcctgtttcgtatcattcatcactgttttatatcatttctcatcattcttgcatactttgcatgattaggatagctttgcatacatattgcatttctgagttgttttcaggtgatttggagctgtttgcgagcaaattggaagaaacgagccagaaccagaagacatactcgacccccaggtcgagtgactttgggagccattcttcccatccactcgaccaccaggtcgagtaacctcagctcaggccactcgatgacattactcgaccccctggtcgagtatcacttcgccacaccacccgaccacactcgaccattcactctaccacgttactcgaccccctggtcgagctcaccaccatcaccatcactcgaccggacactcgatcacgtcttcacagtctactcaaatccgcactcaaccagacaagctgagcacaaggaagagatgaggagaagacaaagtgtttggaagcggcctggacctccatcggatcacgaagcccatctcggcccattatcactctatgggccgggcgattaggttattggcccgtctactatcattttatttcattttgtataaatagatgtcttagggttttgtccggagacatctagtcgacattgagtttttgctttagttttattttttgttttactctgttgcgccgcttttgcttctgcaacctgtaattcgagatttttccaagttattcagattccccatttgatttcatttgtcatcgtgtttctctactctttatctctttacttatgcaatatttttatttatctacgtttatgtctttgagcatgttgtctgagtagtgacttagaattcttagggatgggatagagtagctgtggcctcctagtctgtagaccggttaagttttaaaattgattgaatccctttaagactagttgcgtttactgctta

SEQ ID NO: 24685 - DNA, 716 bp, Arabidopsis thaliana landsberg
ttgctttgtctctttgagttagtgccattttgtctgaattcctacccctccatatgttctaccacttacatatgattctgtttttggtctgatatgtctgaattgcattgtcttttgagttttgtcattttgtcggaattggtttgtctgatttgcaggttgctccagggaagaaacgaaggatttatggggttggttctctgcatcttgaatcatcctcagcccataccggtccaccccttcctcgggatgatccagctttactctctgagaagttggttgtggctgaagcttgtattgcaactcagactgagaagatcaatagcttcagtgtctactttgactaccttgccgacaaggatccagagtttgctgcaatctttcgaggcgcatcctctacaaggactgaacctactagcaccaatgcaacacccgaggtggctaatctgagacctgaggtgggcaacaagacaccaattgctgctatgggagctaacgcgagaacagaagccggtacttgatcctcaccatcagcaaccttctaatttcatgtttttcatgttttttggattgttttatgactatccatcacaaacaaaaacaatttaaatgcttgtgatttgtaccggtattgctatgcaaaattaaatttgggtttaaagatcgttttagaaaacataatgagagtttaaatatcagatagtcgagataattag

SEQ ID NO: 24686 - DNA, 1429 bp, Arabidopsis thaliana landsberg
tcagaaaatctggtcaaacatgaatcaatggaaagtctcaccatccgatttctccgattttacctaaaagtttacatctccaaaggatctatctgtgcatgaaaacaaattttccattcgaataatccaattctaagatatagatcattgagaaatctccgataaaagtcaagccacggatcagtcaaccatagctactcatgaaaacaaacaaacaaacaatttcaacgatacgagaacacaatcgccatagaatcaagacactacgaaatttaaaactccctctggaatgtgaacggaaataaacccaggggaaaaacaaataacataccatttaccaccggaggaggcttatcagatcaaaatctattagctcggttatggatcgaaacgcatgagattcctccgataacagatgatccgttcacaaactcaaagtttgtacgtaacttacgccatgaagcagacgaactctgcaactccaaaatccagaaaatgatgattcaagagcaaaaccaaacaaaaaaatggccagaaatgcgattgatttcaatggaagcttgagaagctgagaaatcttcaagcaaacaacaattaataaaattcaaattggctccagaagaaatcctaatttagtcgcgttgggttatagacgctttctcctgcttttttgacttctctgagcattagtgatttagtcgtcgagcttttactgcaattaaggtaagtaagcgtttatttaccgttcaattcataaggtggtgtccttaatgagttaaccttatgaatattggggcccacagttttaaaaatttaccatttcttttcttacctcttagatagaaataaatctatgtctatttccataattttgttttataaatatctagactaaaccctcgaaatcgatttaaatcgaacattcttacaatttagaacgttcacagtgagtgatcaactatgatcaaaattacaggggataaattcaaaaaatggtctcgcaaaaccccataaattcaccgtgaatatttcagccattagattataatgaatttgttcattttggtttttgtaatggaaaaattatggataaagtagtatcttacagagattatattgatatatgaacaagttttagtaaaaaatgtaatctttgaccatgttgacaaaaattgtgaactttagagtataagactacacacaatgatcaaatgattaagcaactaactgcaaagaacaaaccttttgtactggtctataataagcaactaactgctttgtatcttttacttcgagggggtgcatgcaaacaaagaattggtactggtcttatgaaaattgtcacttgtccacattcgaggtaataactgtttgtctcacacataaggacttgaaaatatgtgactgttaggtgaagagaacggtctac

SEQ ID NO: 24687 - DNA, 1379 bp, Arabidopsis thaliana landsberg
ctcaacgactggagccggttcgggatttagtcaaactctgttcttccaacaaaacaaccttaggatccccagacttcaaaatttcaacactttcttccttgttttggcaagtcataacctcatccgccgcacgctgatcatttgttctcactgttatcagatcgctctttctctgaacatcagtggaagcaacagtcttcttctcacccgggagagagtaacagtcgttgttgcagtcacaaagtatctctcttttctccacaagcttagctaaatgatgactaagcaaattcgtgtgagcaaatggcaagttcttgtatttcgactttataaactcagatatagcatcttcacttgcgccaccttctttattcaaatccatgatagcaataaatatcatctgaaacaaatgtatacagtcataagaacacagcagagatatgtatgtgtgtatatgcacataatagatgttataatttcatacatacagcggaataagtgggatgatcaggagtacgggataaacacagatccaagaatttctgttggaagagtttagtctcaggaagggaaaagcctcttgaattcgccaaattcaccataaaacctctcagattctcaacttttctttcatgtgcctgttcgtcaacaaaaattgttcatagttaacattcagtcagattcaatgcataaacaagtgctcaaaattgtggaatcaagcaattaaacttatgaacaactcaaacattacatgatcgtacaaattttccaacgagacttagaggagtatacagatccataaaaactaccatcagaaaacactgaatcaccgaaatagaaactttttgtaagtaagaaattagtgatttcaaacccaatttgaaacctaaatcacaaacacgttgataaatgctgacggaactaagaaaaccttgaaaataagcggaatagtgaaagagcatgataaattacatagaaacgaagaagataagaagcaatagttacaaaccatagacattaatgtagcagaagccgccattggagaagaatcgaagctctgcagtgtacacagagtcggcgcttaaacctcggggaagtaacaaacatgttatgggacaagccaaactaatatcgaattgaaccaaatgaaaccggaataaaccgatccaaatagagtatgttctttaatttaaaccgatgggttatgtttggttcaagtaaagctaccctaaaggggaaataaaaagcaaaaacaacgaacgaagaagacgagagatcagaaatcggaaatgctttcattaaagcttgctcgatctcttcttctccacgagactctcaatctcactcataattccggcgatacagacgacgttgatgaa

SEQ ID NO: 24688 - DNA, 805 bp, Arabidopsis thaliana landsberg
aaaagaaaaagtaagaattattttaaaatgtgtttgtaaagaaatgttatgcttatagaatttttttttttttactatagaaagttagatgttgcttaattttctggtttttgccatgttaccaaaacattcttggtcctctagccttgttgtctacttttgaacaaagcttcagatagttttcagttttcacgaagagaattatcttggtcatgaaactgtctctggaacactttaccggggatataatcaaaggtagaaaccagacctaaagttcgctctctaacggtcgaggcatctgcactgcccatactcaccgaaaatttattgttgacaacgttttgcaaaaagcattcccctacaaaatatttaaaccatctggtaaatcctgaaaatcatctttttatataatgcggtaggcaaggaaggggcggtgcgatctttggcatggggtggtgatgcatctctattctctcgggttacactcttttctctttcgatatcactctttgtcttgacgacttaaaataaaagggaatcttacttatgtttttttagcggaatcactgaattactcctaaacatatataactgagacttggcgttcaactctgggctcgagacttgagagacgtcacacaaatgaagttatatttaaaagattcataattaggtggtgcatgggcagtttgattactgtccgagtcaaagatgaagcttacatgatgccaaatgccaagaaagatttcccggtttgggacttgagtagtagacaaaatctcatgttggttaaggctacggttag

SEQ ID NO: 24689 - DNA, 1263 bp, Arabidopsis thaliana landsberg
  unsure (1)..(1263): unsure at all n locations
agaattgtcaaaggtatatcttgaacgactcggggcttgggagaaactcaagcttgttctcttatggggagcagtgacattctcgaaaccgcaactgtgcctctccaaatctccaggatgtgattacatctgcttcacagacaaaagcagggttccaatttatttttctcaatctgaacaaataaagaaacattcatcaattgtgaatgtgaagtcatgtttttttttctttttcttgttctatgatagatctctcgatgggttatataaactgtttataattcaatgatctaaacatgtttaccagtctagtaaatctctttacaattattgttgctttaattttcttatttgatcgattaatctttcttttgtcaacatgttttataaataaataagttatgcacatcacatgttagctgttgttacatggattttgtaaatataattttacttcagaaaatgaattatgtcatcatctctaaatgaaatgtaagataaaattagatatcaatgtcaaagatgagatggtccagtttcatcagttttgagcattgaatcaaacatcaaaatgatactaaagagataacatatttattgaagaacgaggatttattgtacaatccaataaaatacttgatgagttttcaaaggataagtgtattccaaaaacggattctaagtggtagttttatctgtgaaagcctttcccacacactcttgtttggagatcacggaactgctgcatgaggctttgagattttcttctttttggttttaagaggctttggaattttcttctttttggttttaggaggcctcggaatttgtctgcaagaattctctcctactgccgtaacttgactcccgannnnnnnnnnnnnnnnnnnnnnnnnnnntacgggcgagggtggtggtggatttaggatttgacttggcggctcagctgccaactcaaaatacataaaaaaaagattagttcaagatttagttgaaaattgtgaatagaggtaatactctaaaaaccattcatagtcttagttatcatatgacagaaaaattgggagtaagaaggtactgacctagaagagggcgtatacacgaatctgaaaggatagacatagaagtatatgaactaaacttagaagaagatacgcttgagttgtttttttctctatcattgctcctctctcacatgtttactgaccagcttaatgaacacttatagtggagctaatctttatcggaaaaaaaaaaaaaagg

SEQ ID NO: 24690 - DNA, 1565 bp, Arabidopsis thaliana landsberg
agaaactctattgaagttgatttgatctcacaacacttcatgcctttataggttttctgatagataattcacaaatttattgttgtcataaaacagtaatttcctctatccaataatggatttggaccaagttagttgagatataggtaaagcttcaatggggagagatatacagagatgggtgggtctttctgatcacacacagaggtcaaactccattactcctctgttacattgtcatagcatcgttgacacaaaaccgtgaacttataaacacacatatccaattaaccaaaacaagagttattgtgatccttgtgattccataacaaaacatcgtttctggttatgagtttcacaccctactggcctctcgtttgttatgtacgatgatggattgtattcacttttttacagtaatgaaaaccacgtgatagatgtaaacaaatttaattttatccttccatactaaattctaccaacaaaaaatataatccttttatcgtcctaaatttaagggggaaaaagtaacaaacataacatgccaaaatagttaagtcggtaattgaaagtgatggattcttccattttcatgcactagatgaacccacaattatataattatacgtttgtagatcccaaaaaaagaatgatatgttatgcttaaaatatgagttaggttaggtaacatttatcttcaatctttttaaaagaaagcagaaacaaaagagaaaaaaaaaaaaaaaagtaaagcctcgattgacctttaataattacaaaaacatgaacatactagattttaatctgcggtacatcgcggaaacaatttatttttttaagttagtatatataaaagtttgcaaattgtatttatctttaaaatatttttattttatagtttacaattgttattaagtaacgtcctgccaaactcgttccgccaatccgtcccgtaaaaaactcatttattttattaatgttgatcttatttatgatatgtttatgaattattgtctaaatattttgtaattttgtagtacttaaatgctatcaaatatctctccggtttgatgattataatcgaattgttatagtcatggaaaaaaacaatatcaaaaatgataattttgtagtaattaaatgatattaaatattttggaagttttattttagtaactaatcgtgtagttaatgtggagagatttagggaaaattgttaagtgtcaaatatttaattcgaagatttttttttctaattaacaaaaacaaacattaaaatctagtgacagtcattgtaaataagtctcaactacatgatttatttcacaaaatagctgcaaaaatgtatatgtagatattgaagtaaattatatgagcaggttatttcgacaaatgattaagaaaaaccccattatttgcgcgataataagggaggaaattaagttgactcacatgctgatttgtctttgttaggtagatgatttacgtctgataagtaatataattaaatcgaagtaggtttagctgcaaataggatttcatattcctcagaattgtgacacatg

SEQ ID NO: 24691 - DNA, 1035 bp, Arabidopsis thaliana landsberg
atagtatattattttagaaaaacatgagactttaaatcgataaattgtcgtgctatgcatattattagtcaaaattttgaatttttcataggtggaaaaatatttgttcattcaaatatgggatgtgatttatatataatatcaatgaagattttttccaaaaatattctctagaatatattgtagatattactgaaacaatgataggcaaaaaaatattattgaaatattatgaattataattcaatattttctactccaaacttttcttataatatatcttaccatccaagctcatttgaaattcaaattgtattgaggttatctaggcaaagatattaattacttgtattttattcctctttttgtccaaaatacatttataaaccttaatctttaatttccctaactatgatttcatatagttaatctcattgtgatttatacataactccattggaatctattggattcatgctccaccagttcttacacttgaattgcaaaaaattatcaaaacaatcattaaaacatatttttctgtatgcaattatttagtttaagtttaataagacaaaatttcatgttttcctaaattttctattcactacaataatatcatgttcacgattcgatttcaaatgtatctatcataaagtttgaaaataaaagattttacgcaccaaaagcccgttaacttttatcttaaatttacatgacaatattaagaaaataattaataaagttattatctcttctatgaaatggctcgtttgaacaataatttaataacgattgacaaaaaagaagaagttattatctcttttattatttgagcacaaatatagcaaaggtattcatcgattaactaggttttgatttctcacttcaacaattaacataccaagatcctagagttattaaggagttcttaagttttttttgatataacaccaatcctaaattttcagtttatccacaatccattagtctatatttttattaaaaatttctttagagaagctttaaaaaaga

SEQ ID NO: 24692 - DNA, 1422 bp, Arabidopsis thaliana landsberg
agaggtaacaattggaaaggaaaagtaaaaagaagtatgaattttacgccaccccagcatattagttgagaattgaaattagaaaaggctaatagatacgtttttaggtgtaaggaaaagttgatgttctaaggaagaaggtgcaatctgttgtaaagaaacatgcttctctctgcgccaaggtcagactcctcagttccgtcaaaagcatattgtgtcttacattttagttaatctcatatactgtagattgtgattggtactacatcagtaaaggccttataagcttcataccgatcccatttttttcatcttattctatcatataccagtgtaggaaaagttaaacatctttcaatttcgttgcaggctttgtcaaagaaagaggccgaggaacgcttgagcgaaggtgtgcagaagcatgaaattggttttccaacaacaagggggagctgttgatgatttgctaactatagcgaaggttccttactagaatcttttgtttgtctcttccagtgttatcagaactgtatgtatgaacagagttacgcattttgcaggttttgagggctatgccagttgttgacttggaaatgccgactctttgccttgtcggagcaccaaacgttgggaagtcatcattggttcgcatactttcaacagggaagcctgaggtctgccttatgtaccaatctttatatatgtgataataacttgctttgtctagtgcttatgattttttcggttgtcagatttgcaattatcctttcacaaccagaggaattctgatgggtcacatcgttttaaactaccaacgatttcaggttgcgttgcttacttcgctgcgtctaatcactttcctcatgatatagattatttaatcatccaaaaacgcattgcaggttacagacacccctggccttcttaggagatgcgatggtaaagtctagttgctacgaactctcatgtggattaatacctatatgatatttgattaagtcttgattcttgtatttttttatttggtaattacagaggataggaataatctagagaagttaactcttgctgtactcactcatcttccaaccgcggttctatatgttcatgatctaacgggagaatgtgggacttctccttctgatcaggtatatagtaagaaacaaatccttatggatttcgttgcatcagatgtgtcaaaggaaagcacaagaatgtgcaccgttatctgatttgccgaataattgggtctgatatatcctgattcagttatatgtttgttgtgagggcattgcagtttcaaatatataaagagatgaaagagaggtttaaggattacctgtggattgatgctgtgtccaaatgcgatctgctgggaggctcaccggtatgtgtgcctcacacgataggactgggaactct

SEQ ID NO: 24693 - DNA, 1203 bp, Arabidopsis thaliana landsberg
ttatatctttatgtatgttccttttttcaaatatactcaaaattcggatccaaaattcttttatatatatatattgaaaacacctgaaatcatgattacatttctctcttttttcgtttcttgatctttttataaacaattttttcttcatttggttctttcgtatggtaagaaaaggaaaactagctagaagtcaaaagtttttttacattaattcaaattctaatacactttatatgatatattttcatccattccttcgttttttaaactttctatcaccactaagccgatttgattgaattgaatgcattgatctcattcatattattctcattcaaattcaaaatatatttctgtaatgatgaagtctagtgcaacttgatattccaagtcaaaattagttaaaccaaccaagttattagttcggttcaatttcaactatattttgcatcattggataaaacaacaacaattaaaataacatagttggctattctctagaagaagttgatgaatatctgagtacgtataatgctaatctgatacaaagatttaactgactaaaaatgtgaaaatttggagaattatctttctacttcacatcaccacgtgctaattgtgtcactggactgtactaacacatctttgttttagcccattttcttatatattagaaggacaatcccactaatccggagatgagcatgtcttttggcagaaagttagtaaaaaaaactcgcaagtatatatctaaatcggaatctaacagtcaaaagtggtcacatgtacaacaattttgactcgaaacttctacgtaaatgcaaattcagcaatgagagacccaatcctcaatatcccaaattatatgaactaaaggggtcatttggaagttagaacaaaattttataggggtcaaacactaattttaaccaaatatttttctaaattcaatcaaattacattaaaaataactaatatataaaatttataggggtcatgtgacccccttcatcccttcttaccgcaggcgagtttgtttgagccgacttagatcatcactataggatgtatcactttctcattaaactattaacgattgccaaactttttgccaataaaatataatgaaaagctacgtaacttttaatatagagctttccaaatctccttaaaaacagattcctcaaaaaaaaagctctt

SEQ ID NO: 24694 - DNA, 993 bp, Arabidopsis thaliana landsberg
  unsure (1)..(993): unsure at all n locations
atgctccaccaccggaggaaaaaacttctgattctgacctataaatagaagaagatctctctcgctctctcacaccagaagatcatgttttttttccccttgcccatgttgtttctccttcaacccatagctttgtatgtctggcaccttattcatcactgtcattcacaatgtgtttaaaacagtttaaatgtagtttccttgaagcatcaaagcatttttacccattttcttaaaaagttttttggtatcatcttctctcatttttcttcaaccactcgaaaagtttgataatactttaaagtttaaagtttcattcctttttggtatgatatgatttatgtggtttcttccatcacccaaaagattataactttttgattgatgattatcttcaattattaatctattatgaatccccaatgagcgataaagaaaccacactaatatttgacactacaataaagttacaatgacgacttctcttctcttcttttcaaaatcctaaaacctcatgtttcctttacaaaaatcaagcagtcgtggaagcccactcatcagcctgaataaaattggcaacagagtaaacatcaacatgcttctctggtatctcactactccatggaaccctactcgatctaaccgatcccggacccgtattcttatactcaccgtaatacaaagnnnnnnnnnnnnnnnnnnnnnnnnnnnnnnnnnatccatcaggactaatcaaagactcaagattacagtttacaaaaaccgtcctcgaaaactccttccacggtcttcccaagaagttcttatgcccttcagggttagcttgaaactccttcatgtattcctctgttccgttaatcgaacagttcaaaaacacagatcccgtggactgcgacgcatcaatcctcccgtgtgctgtgatcgcgttgttggcaccgccttgctcgagtttggagtgttttgaagcgattaggatatcacaatcttggaata

SEQ ID NO: 24695 - DNA, 1409 bp, Arabidopsis thaliana landsberg
ttccatctgcgtcaagattttaaattctagaaatcaaatcgtttaatgtaaccgtttatctatgttggcgtttgcagcgtgtaaaacatttccgattgataaaacacttaccatctttctgttaaatcagattgttgcaatcagagatattatcccgccaccattaagaaacgctttcaacgatgtttacatcgcgtatgagttaatggacactgatctccatcaaatcattcggtcaaatcaagcattatccgaagaacattgccaggttttgagttttgagattgtttgttgacctatataactcgacttgaaaacggggactaattgaactccatttcacttgtctctttgtgcagtattttctttaccagatcctccgtggattgaaatacattcactctgcaaatgtgcttcacaggggatttgaaaaccaggtaatcttctcctgaacgcatactgcgacctaaaaatctgcgattttgggctagctcgagtcacttctgagagtgatttcatgactgaatatgttgtcacgagatggtaccgtgcaccagagcttctcttaaactcttctgattatactgcagctatcgatgtttggtctgtaggctgtattttcatggagttaatggaccgtaagccactcttccctggacgagatcatgtccatcagcttcgcttgctcatggaggtaagtagtaacccttctttgacccaaaaataagctttgaagcactaaagaaacagaccgagaccattttctttttgcagctcataggaactccatcagaagaagagctcgagttcttgaacgaaaacgcaaagcgatacataagacagcttccaccttatcctcgccaatccatcactgataagttcccgacagtgcatcctttagctatagaccttatcgagaagatgttaacatttgatcctagacggagaatcacaggttagtccctaacctctataccatttttaacttgcaaaataactggaattgcttgtacggatcattccaaaatcccgaaaaaagattcaatctagtgaaggaataataatagtgagttcttggttattgaagagttagttagtagtcagcacctatgattgactgttgattctcgattcttgattcagttttatgacgcattgcaccatccatacgtgaactcgcggcctgacatcagagatgagccagggtgaacaacaccttccacatttgtttttgcagtccgtgcccttgaggaggggcagctgtagattctaatcaaccgggaggagcttgctttcggtccaggctatcagcagtagattgaacggctgctgatggaagatagacatacgccattggtcaggcgaaatgtgggctgtgacaacattctattctggagagagtatcctga

SEQ ID NO: 24696 - DNA, 633 bp, Arabidopsis thaliana landsberg
gcatccgaaaactgagacagataccgtcgagaccaacaccgtactgcataataagctttatgttgcttgcacgagatataacatttgaatccatttgcatagtcattgccacacatatatgatagttcttaataacctcagggacatcgcggtaatggacaacatcaacctatatgaaccaaaaccatacaaaacaaacaataaccatctcaaaaataagaactttttactgatagtgaaaactagtaacaccaccacatgatttatacacagtttaaaaccaaaactcaaacactagcatctacacaacaataaactagtctaggagagtcaagttttcaactttactcattggtagaagtaaagttatcaactttactaaattggtagaagaaatcaaatagcttttgtaccttaataaaagggtaaggttgcaagtattctctggtgaaattgtaggaatcagggaagtgaggaccgcagaatagaacacgagttacatgcatgtcttctttctcaaccattctctcaatcttaaccactttactttgcctaaccaacatccaattgaaatttgactcagacactagactttgtacaaaacacaggttcccagagaggacatagatctac

SEQ ID NO: 24697 - DNA, 1325 bp, Arabidopsis thaliana landsberg
  unsure (1)..(1325): unsure at all n locations
ttgttctcatcaagaagtgaattcttctcatcttctcctctttttatacaagtcacaaacacagattctttcccatgccaagccaaaagcgattcctctgcttcaatccttagtctctcactcgtgttcttaagtaattcagcatctttcctcacttcctcgtacttgtccttccattgctgagactctaacctagcagcctcgagctctgtttccacaatcacaagcttctctttcgtttggctacaatcagtagctacctctttcaaagctaaagccaaatcatccattgctttctcgttagtcatctctgcatcagtcgctgatttaagctcgttcttaaccgatttcatctcttctaacaattcagaaacctttaaagaagaggcttgtgcagcctcatgagcctgtgcaagactctccttggtcgattccatctcagtcttcanagactcaatatcaaaatcctgaacagaactatcgtcttcgtcttcctcgctggaatcttggctattgtaagatgtatctatcttctcttttaatgaagcaatctctactctttgactcttctaccaaagctttggtttcctctaactctctcgattgatctttaaacgaatcaagcagtttcttctctgcagcttcaagattcttgatgaagatgtctttcttcaataactcttgttttaaagaaacgacttcgttttctctgttctcaagggaagctttcattttgtaaagctctgtaccaatatccgcaactttgttcgatgaataccttggagaagctacatcaatggacggtttctcatcgacttctcccatagatgatagaatgttttttattcagcgtttctgaggaatttttggtaatggccaatgggtttattagaagattgactaagaatatatttaagaggttgacaaaaagatctattggtcaaagaaagaaaatttggttcaaagaggaacttatttccttatttttagggttagttttatcgagagccgtctattttatcgtctgatattattattttctttggtcaaaagtccaaaatctgattcttttaaaagaaagcattcaacaaatccaaaattatagaaaaaaatcagccattatttgaagagaaagcaatggtgacgaacaaacgagttaagaaaacataagaatttaacaaaagagttaaaaagagttcgcaacacacataataataagcttaaagaacacaacattcttagattgcagacttcttactactcttactactacatacccagagatttaaaaaacacagcaattaagatcttgctttcataaaaaa

SEQ ID NO: 24698 - DNA, 1176 bp, Arabidopsis thaliana landsberg
tggaaaaaacgtggcagcaatacaaatcgagcattatctggatgtccgaacttcgaagcattgcaggcatagttgaggcggcgtgggttgtcactatgttatgtaaacggtttttcccgactagttccggaccgcatgagattataggtcaagggtccaaaaatattttgttgacaaaaaaaagttatgtgaattgtattacagtttaaatgttaaaacaaatatatactttaaccaaacttttatcacgtcacatgttaatatttaatttgaaaattttcgtcgtcttaattttttttttgtgtgtgtgtttttttttatagaaaaagttgtaagcaaattgtttagttttgatagattttaattttttccaaaaccctcagaaaaaattacgctctcatttaatacttgtactgcataattttggtgaggttgttactcgacttgtagttgtaggagagttaaagaatcttaagtatttgaaagactgacagatataatttttttggaatacaccatattaaatagagcaatacatgaaaacatagcgattgtcaaccatgaaaaacgtcagaaattcgttggaaacaagcttttgttccaaattcattagtatcatgattagtctgttaacagttttgcactttccttggtgtagctctctcgctgataaccaaattgtggattgcatcgatcatcttgccgagataagctcggtctcacattgagataagtgaatcctttacatgtgttcctccgaatccgtttagctttctttttcattctaaatcgaatcgagtaacaaaatgagaggtgtcaaaatttcgatccaaggttcttccgcatatatcattacaacaatctaacttgaataccatagtttaagcaattaaagtcaaatacatgtggtgctttatattatcggttatattttcttcttgcactaaattttcaaatcgtcgattagagctgaagacataatgataaggccaatgcttcgaatcaaataatgcgagtgaattgtttgcacgtatctacgattcgcttccatttcatggactatttttttgtgtgtctaacattaatttacgaattacatcgcgaaacaaattgctacaaacaaagtaaatggctttaactatagattcttattttgacaaaaaaaaaaaaaaaaaa

SEQ ID NO: 24699 - DNA, 1574 bp, Arabidopsis thaliana landsberg
  unsure (1)..(1574): unsure at all n locations
aacgagttcttcttagtaacttgaactattgaaaatttatatttgtaagaataattagctaaaatgacatagttattttttttagtatatgttctttcaccaaaatcccacaaattatatgcaaggacgttacattttttttttccaccacaattctattaaggaaccttctattaattcatcaacaattccacaaagagttggtcttgtgcggaagcaagcaaattacatgtttgtagaatgaaagatagtatgtgaagttgtgtgatagaaagtagaaacagtttagttttaaaaaacatacagaacaatttttttatttgtactccaaatatggtcatcttacaaatttgccctaatcataaatgggttttattaaacgcatatttgctattcacttatcaacaatttttctaagaagacgactctcttcttctcaaagcatcttcttccatgttcttggtgattatctctaatgctttctcatacttcttaaccaaattttctaacgacaatcctctcacaggatcaacggtgaaactccactcaatcacacaaccatcttcgccacgtggcaatatcttcaccgtcgaaacgtaggattcgaatccagtgttactctccactatctcgtatctcatcacacgttcaacaggattaacggccacaagcttctcctttgaccatctcgcggcggagtctacaccgttggatcctatggaaaagccggaacagaatctgatgcaaccctgctcaccgttgttgccgtggacgccgtgacatgtggctagcgttggaagccacttgtggagattgaaaaaatcggtgaagagaggccagatttcgtcaggctttgcctttgtgagcgtaactgatactttggctagccatttttctgggcttgaagctttttccatgtcaaagagagagatagagagagcgaggatctagatatatgaaaataagatatagcgtattgtttatatgagtctatgacatctaagtcaaaatatcatatgaaaacaatttggagaatgaaattttattacctgaaaggttgatgccgatacagtgagcgaagagtttaacgctttttttgtttttgatatggatgcgtttggcaagtgttattcttattattatcacttcttgggaatattaaagacagttgtccatgcatggtaaacagcgaaacatgtgttagtgttttttgtatgtacattatgaatttatgataattttttaaagagttttttttatataaataagtgcgaatggtttttggcagttttttctctctctacatactaaagaataactgaaaatttagtagtaaataaaataaaataggcattagttgaactcttttgtaaattatttcttaaacaagtatttattttgaaaacctcttaaattacagttattataaatctattcaagataacgatacaaatattcatggattttatagttnttttggtttttataatgtaacgatttcaaaaatatcatggttaggagtaatttttagctattagaaatcacctaatcatattttaaattactctaatata

SEQ ID NO: 24700 - DNA, 484 bp, Arabidopsis thaliana landsberg
ttatttttcttaatatgccgccatgctaacggtcctccggttacttctccgagaatcaagctcaattatggaagatatcttgcttatagagaatctggggtggagagagacaatgctaactacaagatcattgtcgttcatggcttcaacagctccaaagacactgaattttccatccctaaggttcactcttattctcaatattaactctcgtacatgtcacatgcccattttcaccattttagatatacagttttgatactttactttgcatttattttgctatatgtaattgaggatattgttttaatttctttggttttttttttggctaaatgagaattcactgtctttggttcttaaaaaaaaagtatttgttaatggtaaacgctaaacgctatttgagtttatgttttttcaagaactgaaaacgttttattgaaaatatacactttttttgctatttatagaaaggcatatcaca

SEQ ID NO: 24701 - DNA, 314 bp, Arabidopsis thaliana landsberg
acttacacatgagaaccaactaccactgtagggtttctctttttatctagtccacacacaacatcgggcgtctgctttcttctactacggtccgtaatctccaaatgccaccgtatgttgactgaaattaattttcggtttgactatctctacgcatttactggggcgtatataatacacacacacacacgcgcatacatgccgattaaattaggggttttaagctgaatcgtggatgggccagatgaagaaaacctccgcgtctcgctccaaacaaccgccgtcttctacggctgtgacggtggtagaggtgg

SEQ ID NO: 24702 - DNA, 964 bp, Arabidopsis thaliana landsberg
acaaaatcagattcagtaaacctagaaaatagtatattctaatataaacaaaattcaagtcaaactgattagtgggagagaaaaaagtcattccgtatttatttccttttaatcaattacttcctaattatatatggtaataattactgagaaattaatttagttgtatatttttattttagtatatgtattaacattgttatcaaagaattgatatagttaagtacacctcgcctacatataacctgtcattgtcggaaatttgcaagtcatgtcggaggatttactattttaggagcgaaaagaaagaacattgatatcttaacgttcacaccaattaccaaataagcacccacaatgttcatatcatcatatgataccgatacggcctctttttttataaaactgtggtttcatagtgcctagtggaatctatatactattcacaccacctctctcagttgaatatactttatctatagaattctcttgattacatcagatatttattgcttttagtttatattgcatggtcacatactatttaatcactatattcattaaacacgaaagcacaagtgcacaactcaacatacagtatgctgaaactacatttgtaatgccataaataattctatgctagtaaaagatcgaggactaagcaaaactaagatgacttattcaacatctaattgacattattatttttatataatcaacaacatgccttataaagatttgatcattggtaatcaacacatcatcgacacatcaaattgaatcaacgaaagcaagtatcattgattttctagctttttcgacaataataagtataagtaacaaaaagtttaaaaggttttttttttgggttcttgaaaatattataatcaataatataaaaccttaagagaatctttatcattataatagaatataatatccagattattatacatagactgaa

SEQ ID NO: 24703 - DNA, 1122 bp, Arabidopsis thaliana landsberg
  unsure (1)..(1122): unsure at all n locations
aggatctaagatctttatatttatattagttgtttattagtttcactgtatctgaaacttaaaggacccaaattactatatttttctattaattataattttcttttgtgaaagaagaaaatagctttttgtattttaccttgcaaaagggacaaggcataatgtgatgtgttttttttaatttcttacacaagttatgattttacactctatttcgtaagttgaaattacttataaaatatcttcatagaaattggatattttaattggtgatgtttataaaaaaattggttgaagagaagaacagaacttgacccaccaaagaagaggaaaagcacaggaattaacctggtatttagacatagagctaaaagagactaatatgttgttggaaactttataagaaggaatttaattttgatgagtacatagaactaataaaagagactaatattttgaatctcttaggaaaacaataaacagggccacatgcgttggagtgtcatcaacttcagatatttgagaaaaaatgttcattgttcaatcatgtgatgtgaattgtgagctctttaataccaactcatttacaaaggttaattttgagaagataaaacaaatcaaatagttacatttacatagaaaatatttagcttctgcataaagtcaacatattcagtagcttatttattgttttgttctcttgaaaatcactttgaggtgttctccactttgttatgatgattcaaatgcatagataggcttcacaattacatttgtggtaagattctttttatccttgttgtttagtcaaaattgtataaattacaatgctaaattatgtgaacctgttcatcacagtcgtctccgcttttgtatttttctaatgttttgttaagttcttagaatatagggtaacagtactatctattttctctgtcgacattagaaaacttgatgcgtgtgtgtggtaaatacaataataaataaatagaagacagaagtaaaatactttgaatgctgtcggtgactgcttttattaacagttaacatccaaagagtcattttaataatactaaggaacaatgtacagtattaagttttttggatattntagctattttt

SEQ ID NO: 24704 - DNA, 3299 bp, Arabidopsis thaliana landsberg
tattcaattcgtaatcacgagttaagaagaggtttaaaaaaagagaacctgatgtgcatcttgtgaaggtatgatataagcgtcgattccaacacccggctccgaaaacagtcgccggatcgagctaagcttctcgtcgacaactactttggtttgagctttacgaatctctttggaagactttgccgtgaaggaggaagagctgctgctgctgctactagcatgacaccttgcgccaaaaagaggtttatacggtaatttccggtggatcagagagagcgaattgaaattgctgagaaatagagagtgtgagtaacgtgatgtggataaaacgagccgattcagagacggcgacgaaagagttagaggaatcatcaccagcgattgcaggagaatcacacaagaggagaagcttcttgagcagagtgattacggataaatgtgtataactactgaaaattgcaaaacaacccccgtattcttttaaatgttgtataatgtgcatgactattgataattacattaaaatcccagacttgtcaaaaagaaacattttattttgaaacaatctcatcaaattcgttatggtaaaggacagccaagagagacgtgtgcaagaagcaagagtctttgggtgcgtaagaaatgtaaacgtgttcgagactttcatgctgagaatttcgattggaattttggtttgacttagaaagtttcatgagaaagacttaataccgcctgaattaagggtttccacgaaagagacaaacgataaattgcaaccacaccagaaaagagaaaaatagatactaatattctttatattgataaccatggggtttagaattcaaaacatattttgagatatgagtagaagaagtttctgaatgcattatcgagccaagatttattacaaaaccttgcaacaatgtggtttgggacaagaagctgaccatgattttaacctgatagtaaaacgggccttgtctcttgacagctgaaagtctgaaacaagatcataatatttctcaagcgctgaactaacacaagtaagggaatggaagtgaatacttgctctatagaggtaccttgtaatactcctcgtttgagcagatgggcttttggaggttggaatcaaaggaagcatcggatttgagggggttttcgaacattctcttggctatttcgagttgatttctcttccaagttgtgtcgtctccatttttgttgttacagtggccgagctttttgttttcacagcgatgggtttacattggttttgaaattcaaattgatctcggttcggtttaatttggtttagagaagaaaaccaaaaaaaatacgacacgcgatgggtttttgagaatgaggtgcgtggatccaaaaatgcatgatttttgtggattaacccctttagaaatcgtagacacgcgctcaacgcgacatgagtgagagtggctgtgaaatagcacgattggtaaaagtggggtatgaagtggagctctctcattggctaaaaatataaaaaatagtaggggagctcctcctctcatatattgaaaacaataacaaacacttataaatgttctgcattttcagagtaaattttattgatttctgaatttttattgatgtgcatagattttgtttcatattttgtgtacttgtagtttatcaacacttatggatcattcgaaatgtataccaattcaggggaaaccttcaagaagaagatcagaatcaaagtatcctctgccatggaaccagtaaggcttgcgtgaggttcacaagaaggcttatgtgaggttgacactggattatgatactttaaatgctgcaatcaagactggaatcatctaaaaatatgaatccttcagcttctttaaccagtaatatgtagattaacaatatgaatcctttgttgaataaaggaaacaattaaacgtttgtttacagataagactttacataatccaaattttatatgaagcttcaagcaagattcaaaacatcaccaagtttccatctaatcttccttcatattcaacatccttcaatgtcatacacaatcccagctgtatagcagttgcaaggacaaggacgagctgatgaacatatataggcttatactctgccagaacataagtttcaccacactctttcacaccaatcacttgtcttctatcagctttgggcgatgcgtcgtttggtgactgatacaatctgcaacaaagacaccattatcgagatgagctcttgaaacatgcaacaaagatacaatcgaatacaaaaggtggtttgggataatgaaaatatgtaacacaaaccgaaaaaaaaaacaatgtgagaaaccattatcatttagaaacgtcatcgtaatcggtggtgacttttctccgttcatggctgtggatattattagagaaacgtagagatcgagtaaacgcaaatcctaaatctagttgaactcaaatcacattaaatctcaaagcccaataacggcccacttacaaaacggtagcgtaatcactcggactcttaagttgaggaagatatgagtttgatagagctcatagaatggataaatcacaatgttaaaaatactttcatatctttcaatagtgaaagcatatttgaaatcatcccactccactcctatcaaatcgcactgttatcttatctaaagacaaactataatacgaatcctaaaactatagtgctttgtgtggttgtaaaataaaatggagttcttattcatgcattataccaaaaaacaaaatgtgagggactttatacctaagcaagtggggagttatgaaagtataatatctaaatcagatcaagaataaaaataattgagataccaattgagtatgttttgttttatgtacactcttaataaacatacgtgagattattgttaaagtccaaactaagaattaaatgaacaatttagaaagctatatgattcggaccctcgcatgagctgttcccacttgtctttgcttaatttggatggaacatttcgatccgtaattcataaaacgggccgacactactgaaatctctaaataaataatgtaagatcaaaaaaaaaactaaatcaaagtttgacataaaggcgaaataacatgcgtgagtgttattttattgtgttgccttaatacaaacggaaagaaatatacggccgttcgtagatgtgtactaataactcataagcgcactaatgcgattgaataaagtacattttttagcctttctcaagtgtacttaaccttgtattatatcattaagccctatac

SEQ ID NO: 24705 - DNA, 946 bp, Arabidopsis thaliana landsberg
atgcaaatccctgaataccagtatgggaagggatgatagtgattatcctgaagtagggagaatagagtctcacaaaacaacaggtactactcttttaattagctctaagaattattgtccatgttcaacacctttcttgtttcccaaaaatttgaggacactattttttgcttacgtgaagttgaatagaatctcaatgttttccatttctttatgatgcttccaatcttttgaaacatttttaagctgtgaattatgtgaatcatgtaataggtgcccttctagatgctgatattgggaaaaccagtgccacttatggtaccatatcatcagatgtgacccatggggaaatggttgtggatgttactattgaagatagctattccacagagagtgcctgggttcgatgtgatgattgctttaaatggcgacgaatacctgcttctgttgtaggatcaattgacgagagctctagatggtatgtatcattttatattgaatatgagcttgctataattaaattttttgatgattgtgtttttccaatagttcttctcttttagttttcggttactttgtcttgtgatcataattggggatgaatgtggccagcttttactggacagtgccttcgtatttgattacttaagttcatgaaatttgcttgtttagccttaaaattagcgtctcctcatctcggccacacactgttctggctaattgttcgtagtttccccttacgaattcttgtagatcattctttttatcaacagtttcccagtgtgttgcggatcatagttagtcctgttgggctatacaaaatttgtgttaacttagtgttcgtcgcacttgtatcaaagttaacctagtttctctattgagtctcggatgtataatctgagtggaggttgttcatctttttgattcatcacatttgtacttcctg

SEQ ID NO: 24706 - DNA, 1150 bp, Arabidopsis thaliana landsberg
gttccctgctcacctcactatatctgatttggttattcagctcactgttccttaaataaaagctgaaatggaaaaaacattgcagtggcttgttcctgttgctacaaacaccaccaagtaagcttctgtgatgatttctatctctttatctttggttttgtgtcatcattagaactctgttctcacttaaatcatgtattttttttggcggatcaatggaacatgtgatgtcttaattctgttaacaaaagcatgtaaaattcccttagttttaactattaaagtaagtcagacttattcttctgtcttttcttttctcaaccagagcgcatcatggttttggatgggttggagaatgggcaagttccgggtaagccctgactacaagctgattctctctttgtgctgtgtatatatgcagacaactgcattctttgctaaatgttagattatgcaaaataactcaggtcggaggcgaaccagagacctgcaggtcaaaccatactaaggatagatactcttcaccatgcagataaagaaaaaaccgaggcttacatattagacctggtggtgtggctccatcatctcgttacccaagtcagggccactacaggttatggcctaagatctcctgttaagtctccaatcagatcacctaaccagaaaacgatccaactctccagcggttcacacaacccgagtatgggtttgccattgctgactacggaggatcaagagatgcttagagatgtaagcaagcggagaaagacgccaggaataagcaagagccaagagtttgaaacggtggctaaagcacgtctttgtaagcaccataggctaagcaaaagcagtagccactcaccaatgatgggcgagatgatgaagaataagaaggatactttctcaaccagaagaccttctgttcccatcattgattttgacattgatcgcatgaaagctctcgatgtgattgatcgcgtggacaccattcgaagcttgtagttaactacttccactccatcagagttcagaatagggattgaatggatgggaaacaccactctcttatcaccaaaagttgttgatatgatgaagaatttgaatgtgattcatcgcacggtgccatcgaaaccctttataggtgatgaaa

SEQ ID NO: 24707 - DNA, 719 bp, Arabidopsis thaliana landsberg
tctggaactccttgactaattctttgtcaatcatagattttagtgtagcaaagttagtatgacccattcttgcatgccacagatttgattcgcttatggtagataagtacaaacggctccatctctcaatcccatcttgattttgtacaatcgattctttgatctctcagctttcactagaagttttccatattgatcaagcattatcaagtgttgtcctttcattcttatatcacagcctgattctgtagcttgtccaagactgattatgttgctcttcaagtcaggtatgtaataaacatcattcatgatccttgacttcccatccatatctgtaaaagctattgtacttttccttttatatcaattcttgaatcatctccaaatcttacttttcctgtaattgactcattaagattgtcaaagtatctcttatcaccagtcatgtggttacttgctccattatcaaggtaccaacattcatctccttctatgtttgtttcaaacttgctaggcatacagttcttttcatttaagtacacaacctcgtgcatcatgagtgtgtctgcgttttgtgtatctttgttatcattcactgcattctcttgagcttcttgcagtttaagtagtctgtctgggcatttagaggcatagtgaccaagcttgtcacatcgaaaacacattatttgagaggtgtctcatcccccgtttggtcctcg

SEQ ID NO: 24708 - DNA, 983 bp, Arabidopsis thaliana landsberg
ttctgatgaaaatgtttttaccagaattttttttgtatagtacctaaaacatatctaggattgtaatgaagaaaaaaactcgtacaaaaataaaaaggagaacatgtagaaatgagagaaaaatagaaaattttcttaaaaacaaatagatacttagcactatcatatatttctatatattccatgaaaataccttccattcgaattaaaataaaaatagaaaataggaagatacacatacataatgacctgtagatacatattttctactttctatggaaaaaatggaaaacaaatttaaaaggacaaatatccttgtattaaagttggatcatcttattattgaaataaatcaagaactaaagtgggcaaaatcaggaatttaaaatgaattatgatgaataaagaactgttgtatatatgtgtaatattcttacttatctcgtgaagcttcctagctaatgattggcacactttcttcctagcgaacgagtgacaaacattcttgttgtaaaaaatgtatcagcgaccacaaaatgattacttgagagtgaataagcggaagagtaactacgaccaactaaacgctgactctaactccgtacctcagctggcgcaaacacaaccgcgagtgcaagtctacatcatagacaagaacgacttcaaaagccttgttcaacaactaacgagtcctcaaccatgtgaccgtttacctcaaaacattccaaagcatcaagatattagaccagagccgataaattggacctcttcgattcctcccagtgccatggcggttcaagaggatcctgatgtctcattgtatatggcttatcttcaaagcttactcgaagaatcatcaggatctaatggagaccaattcgaaaaaccttttgataagtatcattctcatatgatggctcaatcgcaacctcaagatcctacacaatcaatgccacagtcaatggttttgaaccttttccctt

SEQ ID NO: 24709 - DNA, 1683 bp, Arabidopsis thaliana landsberg
tagaagtttataactcttaaaaaactatgaagtttgacataccacagaacataaccaccatcaaatagaacatactggatcaaactgcaggttcgcctcagagtcatcatcgctactgccgctgttttcctcatctgtcatattctcaacaatggagtcctgttccattggtgtctgagcatcttgtagatggtctgttggaagttccttaagagaaaaaaaaagaaaagaattaaactcactagaaaagagagcaagaaaggggggagaacaaagaaaccacttctaactaggtctcaccacttcgataggtgttgtttgtgatgtcttccccagaaacgtaatcaaacactgcacaataaatcatcaaggagaagcagtgaatatacaaatgagagttgcttttctgattaatttgattccttctaaactaatatgtgttctgaattctcaagtagccactcaatagaagaagactctcaaatctgaaacacacaaagagcaaaaatgaaacaaaagtattagaagctaaggaatcagactcatagtcatatatttcagtcattagaaccaaacgcacaagaaatatgtaataaacaatcctttccaacgaagataagagagaccaaagaaaaaaacagacctttgattttgtcaaatcttcatctcttttcatagcttcacagagtaaattaacatgatctattacgtcatcctcagaaggctggatcctaaataaactatataacttatacatgatttcaaatatgacataaaaacaacaacacaacatataacatactattccaaatcatacccatcaactttctgtaaactactccacacattaccacttgcaacatccggattccttttaacaaagtgaagaaactgaagagtaaccagacttgttctaatcaaagtctcataactctttcttgggctttgtagagttatccaatgcaacccatgtagaagaacctcaatcttgggatgttcatcaacagaagaaagatcaaagttccaacctttaacaagcttagagaatgactcgtctccagagtcaatattaccacgcaaaaacacagacaatcctgagctatcatcatccgaatcaacactgttccatttgagtggcaaatcacaaaacttgacaagcttttcactttgatcaatgaaatagtagtcattaacgaaatcaggtagaatctctccttcttcttcagaccactccattagattagctgaagaagttaagaaaaaacaaagctttacagatttgagcaattttcaggagaaattagacgaaacaaagcattaattatagattttcttcacgcattttctccgatacctgtggcgttgatgaagcagagctcgacagtgggaaaagaaatcaacagagctaaagtgtggctaagtatgggaagtgcctctgtttctaatggagggttcagctttaattaatgataagtgcaacgatgtcgttttgttgtcattgttttgttgtttaattatatgcgaattatctcatttcatttataattaattaatatctctattcttatctcttcttataattgatttgggtagagatggatcataaaaaggaacttgatttttatgataaaatctacttaatgtataaatttctttttcgatttaactcagacatgtttaaac

SEQ ID NO: 24710 - DNA, 1029 bp, Arabidopsis thaliana landsberg
  unsure (1)..(1029): unsure at all n locations
attgctttacttatatttattctttgtttcaagggtagagattttttttggtttaaaagtgaacctaaataggtgtcgaatcttatcttccaaaaatagttattacgtatacgtataggaataacaactgtaatattttgttctttttacaattttactttattagagacatatatagcagaaaatatccagattataaggtatgctataatgtggagatttttccttaattcaacgattttgattggttcacacacatttactttttgtttcaacggtgggaattttttgtttgagagtgaattctaaataggtatcaaatctcccaaaagtagtaattataaatttagaaaactataagattttttaccttttattaatcaggcacatatatagaagtgaatccttacaattattatagggtctgctgtaatttgaagttttatttttaataaatttctttaaattttatgaagattgtctgtttcatagtaaatccaaagaaagtgtatattggaagaccaataatattcttttgaataacatttttataatttattttattaactaaagacatctatgtgtgtttttattgccaatgagtataacacatgtgttcaataattaaatattagtcaaaagaaattcattagtcataaaattagacacaggtttaatataaaagtttagtaaaaaaaattagtcattcattacaaagtaatggaagaacgataatctgttaatcttttttaaaataatagatatgtgctttttttgcccgtgtacacatgtgtttttgtacaaaattagtcgaatgttttcagaatacagaatttcgaaaaacaaagtttggcatagagttgtgtaaccgttggtgaattagattttgttttgccacaataatgtgcatagtgaatgagaatatgtttttttttcttttgtaaccgctggtgaatgagatattgtggaagataaagaaggaagattatgtggaacagtggaaagactnctttatattcctaatataat

SEQ ID NO: 24711 - DNA, 1824 bp, Arabidopsis thaliana landsberg
  unsure (1)..(1824): unsure at all n locations
aactctattcatttgtatataaatatgaactcttgattgaattttcttatgaaattgaactaggtgagaatagagataagagatgagaactgctagtataatacaaattaaaagatagagtcgagcattaaatagttgatgatagtgcacaccgtgccattggtcgagacaactannnnnnnnnnnnnnnnnnnnnnnnnntctacaaagacgacgattacgtgttaattgtagttaactagtgttgagttaaatatttggtttaaaagtgggtctacttaaaaggcaactgtccccattctataaacatgttagcatcttaagaggcacaccatgacgggcgtatatatcatacacacaacatgtacatacatatttatacgtaaatacccttcatattttcatatatacatacacatcaatatgtatacttcgtcaaatcccttctatcatatggtatgttttagttctaaatttaattttgataagttatatagtatcttgcaaagttataggaatgcatatagtccaacagaaaccaaaaattatttgaaaaatcataaaatattaagctttctagctacaagtggacatccaaaaatattgtacataacactttcactattgggtgtttcgacattgcaacatgattgcattgtctatgactggtgactttcaccgagacatgggttttatatagaaccaaataagtgtcaaagttggcgcaagttttaagataggaatctattatcaaatactaataatactagttgtatgattaacgtcgttatttaatttgaagtattgagtaaaaaagagagaatattgcgttgggcatcaaaccaatcatctagttttgctcaaatgcatacgatagagacctcttttggatccaaaagctttgggttttgaactaaaaactgaaaccaatcacataaaagtcagatagctcagagggaggcacgtgttcttggcttagatatcacgtgggaatgagggatccatgtgcatccctttaccccaaaaaccaagttaatacttcttctaaatttatttttctcttctccacgcaatcaatcgaatgagttttaatattttgacatttttttatatataaaaaaaacttttctcattcaagcaaaaaacttaaatcaaattattcatttggtcacattttcgtgcttggtatttcatgggtcctgggacatagaaccagtctctagctagtggcgaatataaaaaagaaacagcatagtaaaaagaagagcaaaaactgtaacaaggaatcaatccaaaggagaaaaaattaataacaaatgatagaaataatacgttaaaaaaaaacttttgatattaactttgggccacgtagagaagaatcagtccaaaggagaaatgttctgaaaaagttataaaaagagaaagtgagcacctaatagttttcttacacatccatatttgcatagtccgtagacatatatatgcttgagctgcaaaatcttgagtcgcaaaatctaatctattagccttattacgctgcgacttgaacgtttggaagcggctgagatcaaagacgcattgtgatggtgctaaaaagcaaatttttttacttattttgtgaactattttggagtattattgttcacatattttaatgaaaataaatacatggttatccatagatctgtttgtgttcatttcacaatacctagaaagaagaaaaacagacataatgataagttcacaaagagacataacacatgtaaaacaatatacgtacactcattatggtacatctatgtgtcaaattgattggttttcagt

SEQ ID NO: 24712 - DNA, 1386 bp, Arabidopsis thaliana landsberg
attatctcatcatgtctctctttttttttgtcatgtaataaagaaactccttttgaagtctttttcgtagcaggcggttcatttaaactaaagtattactttgattttgtgtagttggaataattttgggacacgttttttattgtaagatgaattaattaagagcatgttgctccaataaaaagaaataaaatctctttgaagagtggtatttttgtataaaattctcaagtctgaggcagtatattcttcacttatatcgagtaagagtggttagagatactaatgaaaggtagtgcaggaaaaccccaccgaataaataagttgtgtacacacctttaatttttaaaactaggcctcttctcataacttatggggtagtaattatcaagtttataccagaaaccacaaacaaatatatatgaaaagagagtcagagacaagaagaggtaaataatacaaaccagaaaaagtgaaactatgaaccaacacaatttgatcagaactctcaaagggaagaagatacacacatcttcttcttcttcaatcccacatcgaggaaatgccaaaggatccgagttgccctatttacatatataagagaacccgctggtcaagacagcggattccaactccgagaggttcttcaaagaagagccaacaccaccattatgtttttggtattgttttgtggagagagttccatatgatgcttttatgcttctttatagactcacacatacacatatctatataattatatacacatgtcccttgtactataacaaaagtacctgatattcgatttgttttatgaattatatatcatttgattatattttactctctagctctcgatttgaaaaaaacattatgggttgagaaatagggaatcttgcaagggatatgccatatttccattagctagctaccttttcacttcagctccaatcgcacaccatgcattatattgatcattttgcataaatcattttactttactttctcgcatactttaagaaaatggtatgtgttttctaaaattatcctttgtaatgaatatattaataatacctatgaaagttggtatctggtagaatcatggatcatacgtatgcgatgacttgacgtaacatatatatttgttatgtcttcttaacttgtaaataataatacaaaaaaaaaaagcttgtaaatgagtaaatatcagataattaaaaattcgggcatgcaattttttgttattctggttcgtattttacatgtaagatatacacataatataatgtcattcactcattcggtatatgagttctgagaattattattcttattgtaatatttcaaactaccatcaatcattcacattaatagtatatgcttcat

SEQ ID NO: 24713 - DNA, 1203 bp, Arabidopsis thaliana landsberg
aatatggtacacatatatctttttttttttttttgttcacaatggtacacaacttttaattcacagtatgataagatcccatgactgaatctggaactacaggaggacacatccagtcgatatcagattagtactttggatgttgaccataatcaatattattgattgtattttagagaaacaacaaaacaatgggctatacaaacatagttacaaactatggaaaactgaagataactaaagcaaaatttaggtttgagagaagaaaaaagaacacagacgatttcgttttattttgagcctccaactccccaattcaataagacacgcatgacgcaccataccataaataaaacgtgtatatagtttctaaacttttgataacaagtgataacgatgcgattcaattgcaaacgaggacaaaaaaaatatcccattacacatgatcatttgtatcacacccacaaaaaaaggaacacgtatatcgtcgtattatcaaccttttcgttggtagtgattaatgtagttttcttttaaatgttggttaccaaactatgagatttagcattacaatgtgaatactcttaaaacaacgaatctcatgtgctaagtaagtaacataggtattaaacattttcacacattgtcttttctattttgacatatatgtacatatattcacacattgtcatgtctgaagcatggcaatcagattgttatgtaatggatccgagacatggtcaacaagattttgtacaggaccttttccagtgaaagcagcctgtgcataaaatccaagccacgcgaccatcgccaatcgtccatttttaatctctttaaccttaagatcttcaaaagctacaggatccttggaaagattcaagggatcaaaaagcgtccctccaggatagttaatgtctcctggcaagtatattcccagtggctctaaggcctcaatgccacagtatcttgcgtattccggtcctacctgtatagcaaaaaaacgtttttggtataagagaaatgtatgagataaggaaagcaagtctcgaggtatattaccatcaagagtacttggcagatggcaattacaatgacaccttggctttcagctacatgaagccctgggatgccgaggtactccaatgtctctccctggtgaaaatgaaagcgtacacgatcatgctactgactagtactttg

SEQ ID NO: 24714 - DNA, 655 bp, Arabidopsis thaliana landsberg
caagggttgtgcagaagatgattgaaactgtgaaaacaaaacagcagattgcattggtgaagtcaggtctcaaaccggggtttcttgctcttgtcaaagatctgaatgggaaccatgtgatacagagttgcttgcaaacccttggccctaatgacaatgaggttacatcttttgtttcatactcaagctttcgtgaatgttgtgaaatttggtgttagtttgagttggaagcagctacaaagtaatgtgctgagactgttgtttttgtttcttacttaagatctgattaatgttgtgaattttggtgtcagtttgtgttagaagctgctactaagtactgtgctgagattgctattcatcgacacggatgctgtgttcttcaatgctgcatttcaaactctgttggactgcaacgtgaaagactcgtcgctgagatatcaagaaactcgcttcacctttctcaggatccttttgggtaaatttagtctccacttagacttaaagatttggtatagtttgaaaaactctccttatagttaatgaaatttggcaggaactatgtggtgcagtacttaatagactcaacaagtttctgcagtgaagtagatggtaaagtttagaatgcactacgccgagttagctactcagaagttta

SEQ ID NO: 24715 - DNA, 718 bp, Arabidopsis thaliana landsberg
  unsure (1)..(718): unsure at all n locations
tgccctctctctctctcatcgcactgtgccttattgcatgattacaagtttatgagtttcatcatctatgcatgtacaaatatcgtaggtaataattatgtctgtaatacgaatgagtttccttaaaaacaacttagctcataattgttttcttttnnnnnnnnnnnnnnnnntactaatagaacaatttttttatctttaaaaaaaacaaaaataaaaaaataactaatttcatagatattgagtttcacaaaagtagtacgtaggagaggcttggagagcttctaatcggaaactaacatatagaggaaagctaaggaacaaaaaaaaaaaaattccatcagaaagaccaattacgtacttattgaggatcattgaaagtctagaacattaaacatgttgtagatttcaatcaataatttagatatatgaataattccttgccaaaaatagacaaataatgattagttatgttaagtaacctagctaacattcttaatcatttgcaacaaacggagctataactaataatccaattagtacatgatacaaatgccatgcatgttttagatcaaacaagatatcctcttcggagtcgaacagttgattttcaagtgtcgtgttgtcttatattaattggaccagtgtttaaaatttgtaagaagtattaatgagttcagagacgacagtccatatctaaaacatttcataaaggctg

SEQ ID NO: 24716 - DNA, 908 bp, Arabidopsis thaliana landsberg
ctgccggcattctccgtcagctcagcctgcagagatttctcgtttatggaatcccgaccctcacgttccaaggaggaaactcaaagggacattgtcatttgggaaaagactaacaatggcttcaaggacgttcctctgttcattctcaaaagtacccgaatcgagcttggtcgctccttgcagtttcaatacctttcaacgattcttgagcgtaatgcatcaaagacgttatgatactctctgaccgcaagcctgttctagccatcgcagagacaactccgttgcgtaatagtcaatcctcacagcagagaggtcttcaattcaccactcaggactatctcctcgcttgagttcccctgactcggagccccggttcaacccggacaggcctaacactaactggtctctgcaagcattcacagcgatagcctccacacatctatcaggaatgtgagcagtttcagcaatgtcttgaggataaagcgtcggacaggaacagaggacttccacagacttctcaagactgcgaaacgcgacttgctcgaggtaagtctcggtccgcgcaatcaaattctcttctttgaagtcctctgtcatctcaagataaccagctgcgcaacggatagcaaccacgttggagatagtgatctcgaagttgatgccgtagcagaacttcatggcgagttcaaacgtcttagacccacctggaaagtctcggagctctgtatgcgagagatttgaagatgattctttcatctctgccaccattttcctaatctttccacaccgagccactaaaggaaactgcaaaataattcaaacatcgtaaattgaaatttccgtcgaacacttcgtgtgggcaaaaaaaaaaaacagatcactaaccctgtggagtaaaaaggactctc

SEQ ID NO: 24717 - DNA, 864 bp, Arabidopsis thaliana landsberg
cataacacatttacatataattaggttatctaagcaagtgggctcttgtatattcatgtaatgagaaccgtgagactaatctagtgagttgtcactttgagcaactctcatattttcccttttataaatcaaatctatagttattgtgctttcagtagcaatctaaattgtttatacttataccaaaaaaatataaaattagaaaattttatactatgtagtagaactaatagtaatatttttttcaaattaaattggttttaatgactatttaaattttcattgacttgttacaaacataattattttttcaaaagatattataaattattttatttttttctcaaatgaaaaactcaaaaacgccagaaaagatcctacaacctggaccgaaataagaaatataggctcagaatttttaaaaattaaaccgggatagaatcaagaatcaaatctatgagagttttatgaatttcggaccaagctggactggactagccctattgacatgtctaacttcatcctttttctgatcaactaagtggactacttttaaaatgggcttagttcttttttattgggttcaattggaatctcagaatggtaagagcaatacaatagatcgatgtatcaaaatattatcaaaaataaaataatacttggatggtgaaacgtataaatagaaaaatgggttattagagcacctccattggtgtatcttaggttgtatcttagactaatatcttagaattaaactctaaaaaataaatcaaaacagcttagaaaataaattttgtttcttagctaagatgttttcgtaagagagaaaagctgtgatgtgtcatgtttcaaaattttaatttg

SEQ ID NO: 24718 - DNA, 570 bp, Arabidopsis thaliana landsberg
gagaaagcacaaataaagcaaaagcaagacaagaacctgctcaataacataccaaaaatgaacagattttagtccttaataacttcacacaaagcaacaccaaaactgttactaaaaccatctctacaatgacaagacttcaaactcagaacctaaaattatcatacagaatcaaatctaagagaagaacacaacagctacagacaaaatttcagaaccaccaaagagaaacctcatttagaaagcttgaaaaggaacgatttttagatcaggaacgagaaaaagagttgaattttggatatgaaacaaagtaacgattcctgatctagattatccccaaaatcaaaatcctagtaaaatcgacaaacccagctcaaatctgactacagatcctctaaagtctcctccttttccaacatttactaagcagaaccaagcaaaacaagcaaaacccagaaataaaaatcgaacctttaacttaaaaccactggatccaaagcgagctagggttcaaacaaaacccagaaaggggatagaagagaaactgagaattgctgtcaaaaaataatg

SEQ ID NO: 24719 - DNA, 854 bp, Arabidopsis thaliana landsberg
aaaataataaaaacacgaaacactaaccaatcaatttttctaagaagattaaaagaacagtttttggggggaatattaatcaaaaacctgttttggttggccatttctaccaccaatagtagtcacaatgatatgtccagtctctgttccatttccatctaccactgtcgcttccatttcctaacaaaccacaatccattatttagattctcatgaaatacataccaaaaactatactacaacgcatggaaacatactttatcgtcacgaattttcatgtcattcatttcttcaggcaatttatcaacaccagtagagtctcttgctccaggattaggagctatacccactgatttctcatttttattgctacaaaactcttcaaactttcaagcctgcaacaaataacaacagagattaaaatccaatgagtaaagtttgttgctttactaataacaaaacacacaaattcaatttcaataaaggaacaaaacacaattctttcaagcttaacaattgaacacttcaaataagtaaaaaacaatttagaacactaaaattacgaaaaggaaagtttttttttaacgggaacaaaaaaaaaaatgattagcccaaaaaaagttgcaaaatttaaaagacccaaacattaaaaccaaattagagtttggtagagaagagagaatctgtcgattttaaaatgatgggttaaattaaaattcatggtgaagcagatctgaagctaaaacccagaataagggatgaagaaagagagagatttttaatacgtaccgaataaaacgtaaaaattttagatcgttgaagagactaatttggattttaagagagagagagat

SEQ ID NO: 24720 - DNA, 1833 bp, Arabidopsis thaliana landsberg
cagggtcgttgaagacagtttaatagtaaatacgaaagtttttaccaaagaatctattacaattacttggaacttggaagatttagtttcaagatttttaagttttaattattaaactaagggacagttgtacccaaaagataaaatatctctgtcacctccaacaacaagtctttattctcaaagatttgttttgtgacgcgtcggcacaagttatgccgcataactatcataaattattttattaacaaaaatttatgttatgttcgtaatttaattatacaagagaatataatcacaactaaaatattctacttctgattttcttattaataaatatatttactcggaacatctttttgtaagaaattggttaactttacaaatgcgcacattaaacctattttcgaaatgttgaaagaaaaaataaattaacttaatttgcatttggaaattaaatcaattatggaaaaaccgatgattcgacgaatcaaacagaaccgcgtcaagcaatgcctctcaaatcaatcgtgttcttaacgtgagagagagccccattgtttctcaaacacgatcgagaataaacattacaacaacaacaacagaaaaaaaaaaacagagagagttaaaaaaaaaaagaaccagacataatgttgtgtttcagatctcaaagagtgtttatacttgagactctgtgtttactctcttcgtttcttgtggtcgtcactggaacaacatcgattactggtaagacttagatttttcaaaagttgtttctccatttttttaatagttataagatttttcaatttgtgtttgattgattcaggggttggtaacgaagaagaaagaggtgtagaagaagaatggagaacaagtgtaatagaaagagtaattgcagaggaaagtggagagaactcatctctgattttagctgcaaagagaacaagaagaaaagatcctgctgataatttcaaactctacactggtggatggaatataagcaattcccattatttgactgtgagtcttttatatctgtggtccaaaaatgttttttttttgttgttgtgtgaaatctctctccttaccaggtgggtattgcttcatttgacttgggttcttcttagattcctaaattttgattaaagttataatctttaccatcaaaagtatggctaagtggagttttgactgttttaacttttaaggtgtagttatgatgctcatgatgaattaatcaatagcataggattcacaactagctggtgcttggttaacttgacttgggttcttcttatattcctaaatattgattaaagttttcatctttaccatcaaaagtatggctaaatggagtttgactgttttaacttttaaggtgtagttatgctcatgatgaattaatcagtggattaggattcataactagttggtgcttggtttacttgacttgggttcttcttatattcctatattttgattaaagttttcatctttaccattaaaactatggctaactgtagttaaattttaattaaagttttgattctatgactaagtgtagttagggtgtttggtttatttgactttcattcttatattcctgaattttgaactttaaaagttttgatctttatcattttgtaatattcactctggattaatcaatggaaatttggattagctctatgactagccttgttacttgaatcagttttattatgcttatatagatgaaagatgtttgataccaattgatatttttgatgagtcttttgtatggtattggtgacatactaatcaatctctatcattctgtgcatatggtgc

SEQ ID NO: 24721 - DNA, 1046 bp, Arabidopsis thaliana landsberg
gatagaaaaaagtgaaaacggttgatagaagtgttcatatgggaacaccccgggcagaacctaatcaataccaccacacggcggatgttattataaaattttaatccatcaaaaagaggacctcgtatatccacaagttaaaaaaaataaaaatacaattcgtatgtgtgaatttcttatgaatgaaactaaaaaggttaaaaacaaaaacaaaatgacattgaaattgttatttatatatatattaaaaaatcccatgggaaggcccaaaacgatggacactcgcagaccaaatacaatttttcatgtcaaccacgagccctgcatgttgggactgacccgccatagatcattttattagattgtctttgatccagttggaccaaccaactttaactcatctattcatagataagaaaggaaatatctaaaaaaatggaggaactaaacaaacttgagaaagaaaaaaaacaccttaaaacattcttagagttggaactaaaaaaccccaataaacgtttcttagtgtaaaagccaatataagctaaataattaacgatagttcattgtttgattatcataatcattttgttcgatcatcaacgtcacatagcgatttatattggacgcatccttttctttcattgcgaaatttacatggagattgtaaattccgcagatgagttctagtccgacctatgatctttcataaaaaagaaaggaaaataaaaatgaggtggaactaagtgaaaaaggtgtaaagatcggagagactattgaggccttgagggtttatatataggtctatgaaagaagaacatatatatatatgctcgaagaatttaaattaatgaagatttttaaagattattctcttgatttttaatctttatattgtagatcacgctaacaaatctgactgcgtaaaaacaatattgaataagtaaatattaataattgtactacaatctagaaaggttaataaactcaggggtgggcaaaaaaaacgaaaaaccgaaaaccgaaacaaatggtttgatttggta

SEQ ID NO: 24722 - DNA, 669 bp, Arabidopsis thaliana landsberg
tatgaacaaaacccatatctctaaatagcaacaatagtgatttcatttaataatggattttgcctctgttcctatttatatagtaaccatggagcggctgatttctcatcctcctctcatgatcgtctcagaccttgatcacaccatggtaggatctgattcttttaactccctctctgtttgcattttcatagtttattgatgttgtgattcgtgttttaacaggttgatcatcaagatcatgagaacctctctcttctcaggttcaattcattgtgggaatacgcttatcgccgtgactctcttcttgtcttctctacagcaagatcacctgttctttataaagaattgagaaaagagaaacctttgttgactcctgatatcattattacatcaataggaactgagatagcatttggtaactccatggttcctgatcatgcttgggttgaatccttgaacagctgtaaatggaaccgggaaatagtcttggaagaaactagcaagttccctgagttaactcttcagccaaaaactgagcagaggctacacaaggtcagcttttacattgatgaaggtaaaggtgaggcattgaccaaggaactatcacaattgctggagaaacgtggcgttaagtgttacttagtagtctttttgtgggtaatttgt

SEQ ID NO: 24723 - DNA, 1176 bp, Arabidopsis thaliana landsberg
  unsure (1)..(1176): unsure at all n locations
caccagcacagttcattctaatcagcgtaaatcctcgatgccttctcttaaacgcactatctcttgaccatgggcataggaaatcaacaacaaaccctaaaaatgaaacaataaatcatcatcatcatcagcaaacggaaatctatcaattcgattaacagtgaacacgaaatcggacacccgatcagaaaaaaacgaatcgagcatcagaaaagatcgaagaacaacgtaattagcggtatacaaaagaagcagcacatgaaccatagaagagaaaaagagagagagaaaatggtgaaacctggacaagagttccattgagacagagagagagaaagagaaagagaggctgagaaaaaccctgtgcatcgggttctggttttttatttttatttgacaaaagtactgctttttaatacaaaaatattctcttgatttattaacatttgtcgaatctttagttgattaaattctaattatagattctctcttctttctgtcgctgttaatctcccattgtaattcagaatctatgggaggggaactcanactaatgactacaaatcatatggaggagacaaaaagacttggnaattttttaggaatcatcnaactataagtgttctcatttgttgttgtcccttgaaaattagattttaaataagttgcgtcaactatacaaaaatatttcttatttttattctatctatattgcatcactaacatttttttcctttctatttctgtagtttaaaagactcgggtctttttacttctttgtttagtggttattattacattaagaaggaaaaagtaaaacaaatcatcatataaataagaggacgttaaggatcggtcttcagctataaacaagtaaagaaagttgagattcgaagactctttataagtcattggatttgtagtaaataacaaattaacaacacaacaaattaacaacacatatactacaaattcgagttaaaaaccccaatataatatatgcatcgactactaaacgcgtttcaatgactggtaaacatatgtaactatctctgttacatattgaatgaatgatgatgtaatagtagatgctaacataagctcacaattatttgaataattaaagtcataaataaaaatcatctataatgcgtgtaagcttgcataaaaatacac

SEQ ID NO: 24724 - DNA, 1994 bp, Arabidopsis thaliana landsberg
  unsure (1)..(1994): unsure at all n locations
aagaaaacctttcaaatgagatactgtgccatttttctctctaaatatggtccatttcaaaagggaccaatggaattcttctgtttaattcggcacccaaaaaatggaacaatacatgttgcaaaacaaaattagagggaagaaataacagaacaattcaatgcgagtttaatatatgatgtagattgtcaactagtgggacttaaacacatatccttggtaggtccgtaactttttttatgacatgaagagatatagagttcttgtgctaacaatgaccgagacatgacaaatttttcaacttccaaatcctttttcttgtttgaattaaagcacaatttctcttaacaaaaagtaacaaggaatgacacattttcgtctatttcttgcaccgtatgagaacctacatgttaagtacctgttccacttcatgtccatgtgattagtctctcaccatgcatatattcatgttggacctcttgtagatccttaacacgtgtcaacgatggaaagtgtcggtccacgctttgaaatcaagcattcatattgaataaatgttttacaaaaggatcatgaacccctatgtatatgaataaatgtgcacatggtgatgcatgtgaaggagaatgccttaacaatggggatccacattcaatggacacgtttcactgtttttaccctttctctgacattctcaactaacctttagatggctcagaaattcatctttaaattgacaaattatgatttttaatcatttttttgttggtcattaagtcattctcaccgttttaaataactagaatatctgaatatctggattcttatatgtcatgtaaattaatatggacttctaattcctgtttttgacataaaaagcaagaacaaggaacaaccaagcaaataaatcagtaattatgaaagtggtaaatggtttcttaaatagttttaagtccactacaaaaaagaagtccattagtttttggattcgtcttaaataaaaacttgggctgtttaaatcaataaggcccattcaacgggccattataaacaatacttacaaaagaaaacagagttaggttccactagtcctctgcaactctcattcaagaacttcccttacaaagctctgaaaataaaattctacaatttagagacaaatgaatcaaaaagataaaatggattcagaagagtttctctatagcgtcccaatcaatctccaaagaaggatacttgtgcaaacccatcaagaaactctcatcttctttcacacagtcgcttgagaaatccaacaacgttatatccgactcaggagatgagcccgagtatccgcatccgtatatctccccaaattccggttctttctccggtttggaaaaaccagagagcacctcctctgatttggtctgtttctcgatctgaggcagtggaagatcagaactattgcagatggattcgatctttgcgttgatagacggagacaatatctgtttatagtgtccttgacgaacaatgtctgggaaattgagacgagcgttgtctcctctgatcttatgagctgcttgatcgtaagctaatgcagcttcttgagccgtttcgaacgtaccgagccataaccgggttcggtttttaggtagccgaatctcagctacccatttaccccattgcctctgtcttacgcctcggtatagtttaaccggtttagttgctacgtcgattttcttcattgaggttggtttagcggtgagaagatgactaccagcgcgacgacgagattggttttgccggagatgtaactctgtctgaatttggaggatttgtgttggagtgagctggtttagcccaatcggaccggtttggttagataccggtaagacttggtcattatagggatgaaataggagtaatggtttggatttgatgaattcaagtagaagaaatgaagttccttctgaatggttangagcttcatgaactcttacgtagcattcatg

SEQ ID NO: 24725 - DNA, 2304 bp, Arabidopsis thaliana landsberg
gatccagaacgctggtttctcttgcttctctctctcgagttctgcttcggattcgttcttttgcccttgcagacggttaacttcttccagtgtactctcgtgatctttagccttactcgcaagctctgcttccaaaccatctctctctttcttcacatcttctagcttctgattcagatcagattccgtctcaccagcaacttcaagtttctgattcagttctttgttctcacttgttaacttctcagtttcaactctcaaattcccacaaatctcatctgattcctttaacttcttcaaaatctcctggtgctctgattcaacagcttctttgtgttcatcagttgttgctaacttcattttgagatcagcaatttcaagatttgcatcttccatctgtttctttaacaactctatctcattctcaccccgcccgtttctcttgctcttcttatctaaatccgaatctgagctcgaagaagaagagctttctcctttcccgttgacctttttcctaatctctccagttagatcatcgtactggcggtacagggactggtattcgctgtagaattccttcactaagtctgcaaccacttgtcttttggactcatcttcattgacgtctccactctcaaccattcccaagattttgttcaccttttcatctatttctgcatcagacgatggtagtacttttcatgtaagcagttaaaccaagagctaagaatctcattttacatgtgaatcaaacttagtagtgtaggaaaattaccagttttagttcctttaagcatttcacctttctcatgatcaaaatgaggctcaaagaaagacttcaaggtttctctaaacttatgctttttcatgtcttattccttcagtttctctgataacttcttcaaccaattatcatcaaacaaagaaactcaatcttcacctgtgaccaaacacaattcacactgaaacttatcataagaaacgttaacactagcaaaactaacttgttcacattaaatgcgattatttaattagaaaagaggtaccatccttttcacatttttgtttcgtatataatactaacaaattagaaaactaatactaataatttggcttttacagaatccagatcataggttaagcatcttgatattcaacataaagagaatataataatagaagtagatccagcaattgtactctgacaaggtacgcagataataatagaattcgtgggacccgcaaagaacatcatcatagatccaaaatctttgcagcaatgagtaactgtcttaccaagtgatatattattattttacttcaacagaagttacaagaacaaatgccaatttgattagagtttcgagtttggattaaagctaatcactttttagtgccgggtctaaatttggaatctgatggcattggctaagacaaaagatctcaagtggagccacctcagcaattttggaaatggaccagaaagcacatacctctagaaccgataaaagacagctatcattattcaattttcatacctcaggaaaatgtgagttgtttctttttgttcttatatgttacttactacctttaaggctttaacaatacagtttcaactaaaacaatctcgatccgatcatccaacgctttcttaaaaagaaagttactagtaaaactgtaaatacaaggaaaggagtagagtttctagtttcacttacactttatctctcgaatttcctttaaggtccagaatcgatttctatggtttttcgcatttccctgtatagaaaccaagaattctacttagcattttgatgattacacagcagttgatagaagcttaaattacaaaatctactaacatgagaaactaaagatgacttgatagtaaaatctaaggacatctagttactgtgcctaaacatgaaatcccaatcgcaaaaacttgaataataataaacaaatttggaaattgcagctcatgaccttgattcacctgatataaaccctattactctatttctaacgaaccaaatcaacgataatccaataagtaatctgatgcaaatcatcaaaacctcaacgagacttaagatgaactggataacaagaaactcataatttccccagtaaaaggcacatcaacaaacaaacaaaaccatcagatgtttctactcatgaagtcatgatccaacactactaagcaacgaaagcgtaaactaaaagctgatcgaagaatcaaataaacttcaaaagtcaataatcgaagccaacaaaatcatttcgtaacctagaattttacct

SEQ ID NO: 24726 - DNA, 426 bp, Arabidopsis thaliana landsberg
taactcccctaatatattctaaaacactttatttctgcctataataataaaatttgtttcatttggcagtgaccatagtcaacatctattagtatagtcacgttaacatgtgtgtatctattttgtctatttacatgatagcaaatttttaatgtcattttagtagcaccatttatctaccaaaattgacacctcataaaagaaaaactgaaatttgcaagaaggcactttttgtctagcagttcaccctcatggtcgaacacgttagtcaaagttcttgttctccttcgatgacatgatttaatctaaaaaaaacaaccccttcttctgtttagtgaacacgcgtgtgagttatgaatatacaaatattccaaactccaagctaggacaagagttttaaagttcatctcctctctcttttctctc

SEQ ID NO: 24727 - DNA, 5363 bp, Arabidopsis thaliana landsberg
tgcttctgacagcaattgcttgatatctacaaggtcatttatgggtaagaaacacattgatactacaactctgtagctaaacatccactaacactctcttgcactaaccaacatcaatcaaaatatcacaatgtaacagagcaatacaacttaagcgggaacaactaagaagcaaaatataaatcgtaattcaacaagctagaaatccttcccttcactaaaatgcaacaaaacgaaaaactagtaatgatcagatccaaaacaactaaaaaggagttcaaaacacgaaaaggaagatagcaaaaaccctagatatggcgaaatggtagagagacctaatcgaggagcaaatccgaaagatccgcgatccgtcatggaacataaacccaaaatccaccagagatagatctctagctgtcgcaatcacagaaaaaaaaaaatcaaacgaaccctaaatcgatctaggtgtatgaagtgagcttgataagctctttagaatttttttcctctgctcgagctttccaggttgtgaaagcgaatcgatgattactttttttccttttttcctctctattttctggggggaggacgaaatcggaaggaaagcgccgatatggtggaggttgttttataaatttagtgaaccaaaacatttttatccaatacaaaccttacacgtggacacgtggatgaaatttttattcaatgtgtgtacttttgctaaattgattcatgaatgtaattataattaatgttccttttaggaacttttcttaaggagacaatctattaatccgaattaaaccaaaccaaaagatattggaccggacagttcagtcaagaccagattcacgtgcgctctgtctgctgaacgccacttcaagattcggacaaactaaaaaaatgtgcattcgtttttttaaaaatagttatcttaaaagtaaagcaacagttggatatgagccacgtgtattcagcagtattcgccgcgaaacagctgataacgtcattttttatttccttcttgtttcccctacttacactttctttcgagaaaaaacagagttgaatcattttctttcagtcagagaacaagcctcttatctgagaagtgaatctataagtatacgagagagtgtcgtaagatgagtcaactcattacgaaagcagctttacgagttctgcttgtctgcggcagaggaaactgtaacatgttcgtgagttctgtttcctccacctctgttatgaaaagtccgtatgagataacggcaccgatgcgaattcatgactggtgcggcggttttggcgatttcaagatcggctctaagcatgtgcaaggtgtgcatatctgtagatgatcctcatacaaccttataacaattgtacatgataattaggatttgtatatttctaaaatttgaataggaaattttaacttgaggtggatgggtatgagttctgcatcggcgatggagaagaaagatgaaaatttgacggtaaagaagggtcaaaacggcggggggtcagtagcggttccaagttattggggaatagagacagcaaagatgaaaattactcggaaagatggatcggattggccttggaactgttttatggtaaacttatacacatcccaaagttcgtagacaaattaagcactcttttatatgtagtagatatatgacttaagtatattttgaacagccatgggagacttatcaagcaaatctgtcgatagatttgaagaagcaccacgttccgaagaatatcgccgacaaagtcgcttaccggattgtcaagctcctccgtattcccaccgatatattttttcaggcatgactgtaatttcaaattttaaaatgaaacgttggttcgtttaatatgttcattggtttatttagctgattcggtttggtttggtttgtaattttgtatgcacatattatcctaccatgattcacatatatacatacgtatggattcactgtttcacttcacatgctaatgttttacattttttgttccttaatgttaaatatatgtttggtcagcagagacgatatggatgcagagcgatgatgctagagacagtagctgcagtaccaggaatggttggaggaatgcttcttcacctaaaatcaatccgaaaattcgaacatagcggcggttggatcaaagcattactcgaagaagcagagaacgagaggatgcatctaatgacgatgatggagttagtcaaacccaaatggtacgagcgtcttctagtgatgcttgttcaaggaatattcttcaactcttttttcgtttgttacgtgatttccccgcggttagctcatagggtcgttggatatttagaggaagaagctatacattcttacaccgagtttcttaaagatatcgacaatgggaagatcgagaatgttgccgcgcccgcgattgctattgattattggagattgcctaaagatgctacgttgaaagatgttgtaaccgtgattcgtgctgatgaagctcatcatcgagatgtcaaccattttgcttctgtgagtctaaaacaacaacccttttattttttttcaaaactcccgagtttcatacatttcttcgggtccatttcggtgatattaaaacaacaaatgatataagtagtagaatcaacgacatttggtgtgtggatacatacaagttcatagtttataatataaatcaatgaattttaaaaatctatggatttgttatgttgtgtggtgtttttgaattgttaatattgtgagttatttgcaggacattcgcaatcaaggaaaagagttgcgagaagcagcagctccgattggttatcactaaaccaatttcaaaagagtatcctacttggagtttttctgtttgttttttttaatgattttggatatgaatttgtttgaatgtgctaaaacatgttttaaaggtgttagagatgtaccggtgtttgtaaattgcagaattgttttggtaaaaatgtttcagactataataaaattgcgtctcaaccgtcccaatcgctgctgaaccgatacgaaccaaactcggtatcatccggttcgattatcttctttttttttgtgtcttcgtcaaggggtacaaatgtaattaacaacaacgtcaagctttaaaaaaaatgtccccgtatctagtagattccattgtttcagaaaagctttaacctaatttcacttcgtctctctctcgcgctcccaatttctccgccggcgggaaaaccatgtcgcacttcggaaggtcaggtccaccggacatcagcgacacctactcacttctcgtccttaacatcaccttccgtaatctctcaagtccctatttctgtttctcaacctctaatcaattttcgtgaactgggggtttctaagagattaggttttgttgttatgtgtaggtacgactgctgatgatctctatcctctattcgcaaagtatggaaaggtcgttgatgtgtttattcccagagatcgaaggtccaatttcttcttcttctccgactgaggaattagggtttcttgatttctgtcattgagtcttgtgtcaatttataggactggtgattcgcgtggttttgcgtttgttcggtataagtataaagacgaagctcacaaagcagtggaaaggcttgatggtataattatccagatcttcttatctctcttgtgttcttggttttgttatgtgcttttggtgcctggattcaacatgaagcttctttctctgtttcaggaagagttgttgatggcagagaaataactgttcagtttgcgaaatatgggccaaatgctgaaaaaatgtaagcttctttctttgccaatgattgttcaagtttactcttgatattcgggagctcactatgaatgtttcctctttagaccgtttccgttatttgtgcaattggaacttctatcatgtaaaaagctgcatctgtaattgtattttgattcgtttgttattatcatgattcatgacagttccaaaggaagagttgtggaaccaccgccgaagtcacgaagatctagaagccgtagtcctaggcggagtcgtagtcctaggaggagccgtagcccgcctagacgtcgtagtcccagaagaagccgcagtcctcgtaggaggtgagtttcttctttaatctgcattcttatgatgattaggtgaactagtgggagttaataatggttatgttattagtcaactagcttttgttacttgatttatgaaagaactccatctctgcctaagaacagtatttgtctgaataattctctcatccgagttacataacttgtaggtcccgagatgactatagggaaaaagactaccggaagcggagcaggagcagaagctatgacaggcgtgaaaggcatgaggagaaggatagagatcatcgtcgtcgcactaggtctcgtagtgccagcccagatgaaaaacgcagagtcagaggccgctatgataatgagagccgcagtcacagtcgttccttgaggtttcttccgttgtgaacctctttttttcatgtttttgctccacaatactgtgtatcctgatttcaactttttgacatgcagtgcatctcctgctcgccgcagccctagaagttcctccccacagaaaacctctcctgctagagaagtttctcctgataagcgtagcaatgagaggtctccatctcctcgtcgcagcctcagcccaagaagccctgctttgcaaaaggcctctccttctaaggagatgtctcctgaaaggcgtagcaatgagaggtccccatctcctggtagccctgctcctctgcgcaaagttgatgctgcttctcgaagtcaatctccttatgctgcggtgggttacaaaaacacagtgtttcagatgtgtatcactaatgaaacttgatgtctgaattgtccttgtttatattttgtttgcaggaatgactgcagccacttgtgaaagtgatacggtgtatgatgaaaaacacgtttgcttgtactgatgatgtttcatcattaagcactggaacgtctaccctctgtagtattacttgctttccgtaggtgccctcaaactactgagtactgactgtatctttgtttcctgttatcgttctggtttagtgttcatgtgcaagaattattactgtttgaacagcctttttagtctctgttttatttgaatcttctctggtttggaattcatagcattctaactccattcccctggcttgtcttggatttttctagtctggttcgagaaaagaattgacaaaaaagatggcacaaccatgttgagattgtagcagttgatggcagtttatgaaacgtacataaagatctgtg

SEQ ID NO: 24728 - DNA, 976 bp, Arabidopsis thaliana landsberg
aagatagaaaataaatagtgttagaaataatgtcgagaaacccaaacataaattaatccggagaaaaatctaaagatttatgatattttcaaaagttgttttttaataaaaaatagtattcattaaaaccctagatcatgcaacattgaatcacatatacttaaacttttgttttcctatattattctggagatcattatttagaaacttctaaaagaaaagaatagaagatttttagaatattttcaaatattacttttccaaaaaatattacttaataaaactaccaaatctctagatttataatattttcaaagattatatttccaaaaaaaaacattcatagatccactaaaaaagctttgatcaacaaaaaaaaaaaaaaaaagagatccactaaaaccctaaatcatcatcaatataaattaatcttgatgaacttgtataaaataggaattgaagaagttatagagccagagccaaagatgcatgctaggactctgttcataagaattatgtgagtgacttatttgactgagttattaaaaattgaatccttgaaaagagaaaacagaatttaattaaaattgattgtttagttttgttttgcaggacaatgccaaattaacccaatttgagtaggcgactcacatatctcccgctccggccaatcgactcgtcatctccgccattatcactactccttccttcatttctggtaaatctttgtacccttcttctctattcttcattcttttattttttgttacttggagactcgaaattgatcttatcaatcgcttccatctctcgattgattaacaattttaaaaagtgataatttcgagatttggagtctgtttctggaaaatgtggataaggatttcttatgattcatggattaatgcgtactgattcggtcacatgttactcaaaactgtatcatggggtttgaaaatctggatgtcttcttttg

SEQ ID NO: 24729 - DNA, 2224 bp, Arabidopsis thaliana landsberg
  unsure (1)..(2224): unsure at all n locations
tcaccatgaaccatagaagtccacaacctctggggacgacgaaacagattattttgatgctatccatgttgatctcttcactgctaagatcttgtcgaaattgccagtgaagtccatagctcagtgtcgttgcgtatcaaagctctggtcatcacaaattcgtcgtccatattacaacatgttgttcccgatcatgtctccagccccaccgcggatccttttcaccatcgaaaatgcacaagggttgttcttctacacttcacctcagcctcgaaaccctgatgagaacacgtctcttgtagccacccttcatcataggacaagtggaaacaatttacgtataacaagtcctcctgttggcggactgttatgtcttgaacatgatcgaaagaattattcaagagtgctggtgatttctaatcccatcacaggagagtttttagctttgcccaaactgagaataaacgagattaagaaagagttgttatatctaaatgaaacatatatttttgggtatgatccaatagacaaacagtcgaaggtattgcgtatcacctcgtcgtcgtgtcggttacccaaattcggtcagtatcatgttctcacattcgagtctggaaacaaaaatctcttatggagaaagactgaatgttgcacacttcattttcctatgggagatattagggcgatgtgcataagtggtatcttgtattatgcagcggatgtctcaactaactttacgatcgcttgctttcatgttaggtctgaggattttacttttattgacattaatcaagacataaaaaagatgggacaaaccctcaattttatcgacgtcaagggtaaattaggtgctttttgttacaaaaaattctctaaaacttttgaattgtgggttttagaggatgcagagagacatcaatggtcaaagcatatctaccaattgcctaatagatatttgaacaaagttgttgctgctggagtggttggtagtagcgaaattgtgttttacagaaagtatacacgagaacaagatcagttcttcatagcttactacaatctcgagagcaacattatcacaagagtaatacttgaagttccactattgtttagtgggacgtgttgtgttaatgcatttacaaactatgtaggagatgtgagacttatgtaagcgtttacttgttccaaaagtaaacttatctcaatatttatctttgtattttatgtttcgtgcgtgtcttttaaagttaaacattttcttattttggtttcggatggttaacatttttttggaatttttgatttatacaacgctcagattgttatgatggtgattctttggttttgttattgatatatatgaaactttaaaacattattcgtaatcggcagtgaccaaataacaatgatcataatgctaaacaatttaaaacagcaaaaagatattgctatggacaaattcgaatcaaattgtcgatgcataattcggcagtttttcacgattcggcaaatataacacttttgatgtacaaattacaaaatacacacattgactatttgtacgggtcctaagaatggcaaatagatcagcacatctgtatgttgacaacacataaagattagaccttttttctctctctatctctcttgtggaaatttactttacatgttttaacttaaatgtaaagaagatgagttacaaaagatgcatgaatgagacatgagttgatgaatgatgcttccttcttcaatcctaagtttcttactctctctgttccaaagatgaacagcgaatgtatttttgcgtaaatgcgtaagcctcttccgcaaccaagcatcgctctcattcgtgggcgctctgtagaatcctttgattctagtccagtccaccggataaaatgtagatggtggaagaacagagaatcccaaatctgaagaggaggatatcttgattcttgcaatgactctcgacactaagtatggaccgttgtgtccccatttgttaccgttaaaggttcttgagaattnnnnnnnnnnnnnnnnnnnnnnnnnnnnnnnnttgtcgaagatgagcactgcgttgttgagcctactccatttttttgtaaccgggtcaactgtttgtgctccgattacgttgtggagattgctaagagatttgaggattataacgtctgtgtctaagtagattccgccgtatttgtagagcaggactaatcttagaatg

SEQ ID NO: 24730 - DNA, 643 bp, Arabidopsis thaliana landsberg
tgcgctccaggtcttgatgatcttcgtgattggacaaacaatgtccaacctcacattccaatttacactgctatacgtgatctcgaggtttacctgttttccaacactccaaaatatttcccaatgctatttcagtagctaaaggctctccaccatgacatgtgaatctcaggtgatgaagaagacccattattacttggttgatacaagtgtcatcatacccggagctgcagtctcagagttggagtttaaagtcatacacgaggaccagccatttgtggtaaacgatctgaaggtaacatctatctctagcttataatcatcaaaactactatgctcagtaatgatcttggcgttgtcttatgcatgaattggatgtttttaactgtttcagatcaccccattacctgtatggcatggaagtaactaccgttcccttggtttccgctttggtaatgtctgctacataaggtaaacaaacacacacttccctctaccatttctgtaccagactttgttcatgaatatcttagtctttagttatcgtattgtaaaatatgcagcgatgtcagtgacataccggaagaaacctacccgctccttaaagactgtgatctcctaattatggtaatcttctcaacta

SEQ ID NO: 24731 - DNA, 1227 bp, Arabidopsis thaliana landsberg
  unsure (1)..(1227): unsure at all n locations
acagttataggtctcggttcagaagggcttattatgcagttggattgagctgtgttatagagtggtcttcaaaattgttgaaccaggccgagttagttgagacagcccaactgaccgttggagtgtctagaaacagagaacttaacagaaacatagaccaagtgcttcattttatactttccttcttccaaaagccttgtatcttctcttggtttttcttctttcctcttgtatacacctgagattttggggggatctcgtaaaatcgactcgagcatttactttcagcaaactacaaacgagttcaagagaaatttgcgtgtgagtgatcgattcaacagcgatatataactttatatcagagccttgaataaggctgaataagttttttgcaaaagtgttttaggtttaaaaaatcaaagaaaacaaggaaagaactacgacatcaaatggtaaagaatcttatttgactttgcaaagggatcttttgttttgtgattttgtgactatttctcatgtgaggagatcttccgtgcattcttgttgcattgtccatctctgagggttctgaaaggcattagttcaactggaatatgtggtaagggaaatacaagaccatgagttaagagtgtaatcaactcaagcacatntgaggtagaaaatttngatggaaaaggggaacttgttctcttgaaccacaatgcaacaacaatgctaggagttggcttagttatagaagaagacataatataaactcaatattacatccatttttccaaaaaaaagaaaaaaaaaacagagttctatactactattacatcccttttcacttttcagatacatgattttggaacattattgatttattcatttatttcgataaagttggtgcattatttttgatttgggttattcgtttttttttatatataattgattctaatggcagtggtctggtaggggacgacacatctaattcgtgaaaaaggttgacacattagatgaataatattggcataactcacgtcgggtgaaacacatcccaaccttagcaaataaggtagtcatctagagccatgcttgagcatggttttccacttttgtgagaaagaaatctaccaaacaagattgtgtcaataaatataacattttgaaatatatatattgcatcctactcatcagcccatcacattattcttttggatgacgtcagatttgctgacaacg

SEQ ID NO: 24732 - DNA, 660 bp, Arabidopsis thaliana landsberg
aacccgagcagggcaatactctagcgagaaaggacaagccatccatcgcctcttaatgaatctgatacgttccacgagctatcgatttgacagacaatatagtatgaatcgtgtcgatttaagtagcgtccatgcaagcccgagcaattgctacgcggaacgcatccgcttctcgggccgtataagacattacatctactgaataaatggctttataatattctcgaacattttcgcgttttgactttctaaataaaccataaatcaaaggggatattattatttaatgtacttatttttcttttgaaaatgatttgttttgtaaacatcgatcttttatgtaagataatcataaaatattcatttataattaggtaattataatattttggtttaattataaaagtactttattttttttttggggggtaaaaatcctttatttgtaatgaaagttaatatttgaaatatttttcacaaaaatattttgattaatcctcttaagcaaattttgtaatcggaaataatatttatggattgcttctagttgccctgaaatttcttaacggattaaagacaaccaaaacggtttgggtttgacataaaattaaaaacttataaatttaatggagctttatgaaagtgtggggccctgggagg

SEQ ID NO: 24733 - DNA, 984 bp, Arabidopsis thaliana landsberg
gttctctgtcaaattatgttaaataactaacagtccatctctttgttttagcttcttttctttctaaaactctacttttcaggggttttgatgaccaaatgagggcactagttgctagaaatcttgaaggaaggggcgttaatctgcatccacaaacaagtttgactcaggtatctgaatatgattatcacttttcatgtctcattactatatacgttcttttcacttgtttcatgagttcatagtacttcactgaacatacactatctttccatttagttgacaaaaacagaccaggggatcaaagtcatatcgtcccatggggaggaattcgtggcagatgtcgtcctatttgctactggtaaattttctgttacgtgattctcaaatttcgtttgtttatcatagagtacttttatctctgttctcttctactctaatacatgttcctctgcgtggatttttgggttcacggaacagtaggtttcttcattctgtttttcgatagttgtatgtttgtgcgggttttgcttcctcccttgaacttaatttttgaggaatctacttattattgaaatggagcatgattggtattttggtgttaaaattcctgaattattgtagaccaggaagctctgtagctttacctccagctgtctaaggatgtatcttttgtttatatttgatacaggcagaagtcctaataccaaaagattgaatttagaagctgatggtgttgaacttgatcaggctggagctgtgaaggttttaacaatttcctaaatttgcagatactaaaatttatcctgaataaagttttccgtgactttctggggaaacattctcctcttgcagctactaattcagtacattatcctcaggttgacgagtattcacgaactaatatacctagcatatgggctgtaggagatgccacaaaccgaattaaccttacacctcgtgtgttaatggaggccacctgtt

SEQ ID NO: 24734 - DNA, 1238 bp, Arabidopsis thaliana landsberg
agcctagccatattgacatgtgcattatagataatagtttgtgcatgtacgaaacagttggtgataagaagatcatccaagagatttggaggttgaaatcatcggaagacgcatgggagaagatttataccataaatctgctttcttcttcttattgccatttcccatgttctcgatggatataatttgaccagattatgttattggacccaaaaggatttggttgagtcatccacaccggtggcgatatacaaggacaagaagatcatactctcacatcgctatacctgcaatctggtaaattccaaaacaggatctctttgctcatttttcagacaatttttgtgtttaagatctgttccttacttttccagtttgatttctcatatttaaataaaatactactaattattttgatgcgttttgaagcttgaaagaaagaactcattgtattttttaccgattatgtgtgtttttatttttgcttccattatacgtttgtttttatttagaatgaacgaggctacacttatatatcttttagacatcaaaatcaagacaaagttcaaaaagcctactcatcatatccaaagattcaaaatttgcctagcaattgctcttcttgagctcattgcagaaagtcaatgacattaagttgattacatatttgaaatctctcttttgttggatcatattatcacctcatgtttttggacatgttgattatccaacaatgaacatgattaaaatcattaaccatcagatattcttaaggtgttgcaaatgcatcaagaaaagctttgctcatgaattatgatttctcacttccctatctagtaaacgacgttgtagaggaaatcttcttgagacttcctgtgaaatcactaattcgactaaagtctctctcaaaacaatagagatggatgcaaattatacaaattagtgtggttttataattctaatgcgtctcattctgatgccacgagtccaaacgaaggacttaccaagtgtgaggtttttgattttagggtaaacgcttggaggtacttgacttgcgcgccaagttatcgaatataccatgcccaaaagccagcatctgtaaacgggacgctttattggttcacagagctatataatgctgaaatcaaagtaatagttttcgatatcattacagaaaatttccggttgctgccaaagatagttcccgctattgctagtttagatcctagccatatata

SEQ ID NO: 24735 - DNA, 707 bp, Arabidopsis thaliana landsberg
ttaaaaaacaatctcatatcattgattggtttcccccattgatattataggaatatggaatatctgtaaatttcctgaaaaatgggttcctggtggatttggtatcggacaaaacaagaggattgattctgaaattagattcgatcagtaggggaaatcaatggttgggatctgatgtcgccatctttaacacattccactggtggtctcacactggccgtgccaaaacgtaagtatcaaccaacgatcttatatatgagcttaattaataatacaagtatacaacatacatattacattatatactctaatgatgatgatgatgataatgtagatgggattattttcaaacgggagataaaatagtgaaagagatgaatagaatggaggctttcaagattgctttgacaacttggtctaaatggattgatcacaacatcgatccttcaaaaactagggttttctatcaaggcgtctctcccgttcacttaaagttaactctctctttctctagtaatcataataaactaattaatcaattaacaagacgtaaccgtatttttttgtttttggttaatttgaagtggtggtgaatggggtaaaccggggaagacttgcttgggtgagacggtaccagtgcaaggacccaatttcccccggacgaccttaatgaaggtgaagcttatagtgaaaaagtgtgatccgga

SEQ ID NO: 24736 - DNA, 683 bp, Arabidopsis thaliana landsberg
  unsure (1)..(683): unsure at all n locations
atggccacgaccgcttgttttttgttttatacatagtttccgacgtttgactttatctttctttccgcttagtcggattttaataattttttgcttagcttggttcgtttccggctaagatcggattatgttttttgtttttctctcctctttctacatgatttcagtgtaaatcccgcttgctgtcaattggtttatttcatgttcatctgttggcttgaatcttctccaaagttagagtaannnnnnnnnnnnnnnnnnnnnnnnnnnnnncgaagtggacctttctttaggtcttgggcggagattcttcctttgaagttggggttgagatgaagatctacactatctcctattattcaaggtggaaacaacagatccaatttgatatgcggcggtaatatctttaggaggatgtctccaagagcgtgaattgaagctttcacctggtggttacgaccgtcgtcggacgtgacagcaaattgaagatttggcggtgagcaaccaaaggtgttccgacggatttctcgattgtgccacatgaatccattacgttttagcatcaaacacgtgtctcttacgtatcttctttgtgtaatcaagcttattctaaaattaggcctcaaaaggctttgcaccacgtatcttgtaatctgcccttatgagctttgttcttttttaaa

SEQ ID NO: 24737 - DNA, 754 bp, Arabidopsis thaliana landsberg
aagtgtgggcaatagatagagcctcaatacctttaattaattatttatttccctgaatttatattctccaaaaaggaagggtatttttttcatcaatcaaaaaacgttgttgggttttagtccaccaaaaagatgtttgagtttcgattgtttgtgttcaaaaaatcaaattacataacaaaagccagaacttttttttatatcaaaaagtaaagaaaaaataagaaaaacaaaaaatcataactttttttattgaggtgataaggaatgtaatttattgacgtcttgtgaacccgatataaatctaaaacttgaagtagctaatgaaacataacaggaaatgttggagtggtatagaaattacctttaatttacctttaattgtatagaaattaaagataaaataaaaagataaatctatgaaacaattattttgtctatataccaaaagggttagttttcttgtgtttagttttttggaatggaaatatattatttaaattggaatatttttttggttgaacacaattggaatatgtaaaggttgatttcatgtacttgaaagattatggtcagaagccttctcacacggttaagaaaaataaaaaaaatatgttgtctatttatttggttcaaattaagtttttgtgtgggctttgtgggctagctatttagtatgggcctagatctggacttctgtaaatcttaggactacacttaactctattactcttatagtatgccactatgtggg

SEQ ID NO: 24738 - DNA, 555 bp, Arabidopsis thaliana landsberg
  unsure (1)..(555): unsure at all n locations
gaggcacttttaaaaacatttgacgtgttccaacacttaaaaaatattagacacttttccctactaaattgaccattatacccaaaattattggtcaggcatataaccaacggtttatttattttaatcaaattttagtttatagattcagtttatccatgatttactaatcaatgtcaacttcttacatagttcacaagaataacagaatcttgtaaaaaacttttatcgtctcatcgtttcccatatctccgactaattatctggcttaatttttcgattaattctccactacaccgtcacatgattcactcgatttgattcttctattctctcagtctatttctcaactttttttacagttttatacgtccttaacaaccctaaattcgactccggcataataagaaccctaaattcnnnnnnnnnnnnnnnnnnctctgtttgattctggcgtgagaacctaaatgtgacttatgttctacgcctacaattacataacacacttccgctctttggattgaaactgtctataccggtgttgatttctgcgag

SEQ ID NO: 24739 - DNA, 1053 bp, Arabidopsis thaliana landsberg
aacgccccgatgaactgtccaatacccgtggtgaagcgaagaatgaaggttccaatttatgtggatgaagacttgatcaaaatcttcccacaggccacaacttatctccgtcaaatccaaaagagtaataaaaattcttcaacttgttatagttttttttttatcttagttaagttgcttcgattattgtttaaaggttttgagtattgaaaatgttaataattgaaatttgcaaataaaacgaggaggtgggtctgggtgctttgaattcataagaggagaagtttgcacgaaagacttgagtcagaacaacactttttattttattttttaatattgtaagaactatgcttgtgaaattgttatgtatgaaaaaaaaagaagaaggaaattgttatgtatgtatttatttatgcgtaggacaaaaagaagatgaattctaaaagatagtagaccaatgtaatatttggtaaatattctatatccataaggttttggaggtggaggtctctacaaactgtaagaaaaatcaatatacaattatttggtgtttataataacgagtccatttaaatatatccattcggaaacctttttaccaatctatattcattctatataccatgtccataataacaagagattcgataaatcgtggtttgtaaagaaaccaaagttccatgtccataaggtcttggaagtggaggtctctacaaactgaaagaaaaatcaacaaacaattttttgatgtccataataacgagtctatttatatatatccattcaaaaaccttttattgattcatatccattctatataccatgttcataataacaagagattcgattaaccgtggtttggaaagaaaccaaagtgccatgtccataaggtcttggagatggaggtctctgcaaactgaaagaaaaattaacaaacaattttttggtgtccattataacgagtccatttaaatatatccattgggaaacatttttacttatctatatccattctatatatcatgtccatattttaacaggagagtcgattag

SEQ ID NO: 24740 - DNA, 604 bp, Arabidopsis thaliana landsberg
aacaagatctctcgttctctacagagattcttgaagtcagtgttcaaacctattttgcacctatgcttaaccactccttcttcgccggtctacatggcggtgggtcacggcggtggcgataaagatcgatactacgtcgtttacgacaaatcgggttcgttgacaactattccagagtcaacggagaaagaagtgagccccgagatcaactcttttgttaggaagaccgtgtccgagagattcccggcgagtagagtcgttggtatttcatgtgcatgattataatattaatctaagtcgtatatttgatataaattaataaatataaacatgttatatgacttatgagattagagttattttttttttccctttttttgtttttataaaatatacattttggaaatgaataatcgggtcgaaccttggacgtatgtgaatgtataggagttttttttttcttttgaacaattaaggggggaaattgaattttgatgcatttatgatatgcaacgaacgtatagtctccggttagcgtagatcatatctacctttgaatgtgatgtataaccctagctcgggttatataggcaactacgtgacg

SEQ ID NO: 24741 - DNA, 795 bp, Arabidopsis thaliana landsberg
ttgcaagaagcagtacgaagctttcaggaaactgactcactatatatctggacttggttattttgcaaatggggccgttgacatgtttgaggattcgtggaaccagccgcgtaaggtcaataactcaatattaagcttcttctattggtttatgaatccattagtgtttctgattactgtttcttttgttgttctcattgtttgttttcaggaatggcctggagctaggaaaataagtcagcggattgaattgtggtattattaaattgctagactttggagttggttttattattaaaccaaagtcgatttaattcaattgaaaatataccaaattatttaattgagattaaaatttggttattagattaaatcatggattattattggaatataataatcttgatcggttaatctaaaccattgcagattaagatcgtcgttgattcgcgttaagcttcattctctatacgatgtcttacctcctagagacttcacctaaattaatcggagcgtgttgtgatgttttaggtagtagaattgattccatttgtgatgaagttgtgtcacataatttctgtggggagttttttttatcgtgaattttaaaccacaaaaatcttcacttgttgctattctctcattagggattaggtttagggaccaattcaaaatgtttgtgaaaagagcacgaacattgcttttgtcttcgaaactataacaacttcttgggttaacttgttgcattcaactagtgattggccaataatactactatttaataagagcttactg

SEQ ID NO: 24742 - DNA, 2775 bp, Arabidopsis thaliana landsberg
  unsure (1)..(2775): unsure at all n locations
gcttggtgatcacttcatatcgcttccaatgtagtggatctaaacgtctctttgtgtaatcacgtggtcgaattaatggtcaatcatttagcaattaaccaaatttgaaataacatccgaaaaaagtcggtttagtgggaggagaagtgagaatgatgtttcatgaatgctcgttaggaactcttcgaaagacgataacctcggatggatgtttatggtgtcggcttctagtggttaaacataattagatcgtctactgaaaagttggagatgtggttgagaaactcgtaccctacatatggttactcgcctgctggtttaatcgttgggattgatcgtgtactagtctttcttaaaggccaagaattttgtcgtcgtagttaatatatgttggcgtacgttttactgtttttcttgagaaataattggatcttaagcttattaaaaaagtcgtcacgacttggtccaactcgtacatatcacaagttgctcggcgcttttcatgttagttagccaccgacctcgaactttgaaattttatattttttaacttcaaaaacaattctttgatagttttgttttcattgctaatatttctctcatttttttttttattgcttttatttttgtatagaatagtattcaaaatgaaactataattcagtatggaacactttctgttttatttaacatttacttcataatgaattatgtttcaaattttcaaagaatatatttatatttgaatttggttagtaccttccaaagaagcttaattccccacattaaaattcaacttggtcttcatattaacattattcaattgaattcagactgaaatggttcactttatctggtttgaaatatatgtcatgcattttccaaatcaagaatgatcttctaaagaaaaaaatgagaaaaaagaagaaggagaggaatggtctcctaacaatgaaaaagagaataaacccttaaataattgcaactatataaaataaaaagtataaactccactaaaaaaagtcaaaacgttgaccaaaacaaaaacatgtaactaagtcgtccactactacatctctatgactctatataacaacaaagccaaaaccacatcttctcacacaaaacacaaaaaagaacaaatatggagaaacaaatctctctattgctctgtctactcctcttcatcttctcaatatcatcctctctccatgaaaccgaagctcgaaaacacaataaatataaacccgcaccgatcatgagcctagtcccaagaactctctacgaccaaatcttcatccacaaggacaacaacgcatgccctgcaaaaggtttctacccctatgaagctttcgtggaggctacaagatccttcccgaagttcgggagcgtaggaaacttttggacaaggcgacgcgaagtggctgcgtttttggcgcagatatctcacgagacaacaggtggttgggccacggcaccagacggaccatacgcgtggggattgtgttttaaagaggaagtgagtccacagagtaattattgtgatgcttctaaaaaaatttcaaaaagggaggaaattntttgngncccttgtggtttctaggncaagtcttacaaaggaagaggtcccattcaactatcttggtaagtctacaaaattaattattaaccaataaccatttatatctatttatttgctcgaacaactaggtctacaatagttcaatgccccatgaaaacattatatacttctaccattttgcgaattaccaacgaaacttcttttgaatggttgtatcatctttgctacaagtttcatatccatatatcagtcttaccttttggttaacgttactttcttttttgggatatataggaattacaattacggacaggcgggtcgagcattgggtttcgacggtttacagaacccagaacttgtagccaacaactccgttttagctttcaagacagctctttggttttggatgaccgaacagactcctaaaccgtcctgccataacattatggtcaaccgatacagaccgacgaaagcagatagagcagcaaaccggactgtcggttatggtttagtcaccaacatcataaacggcggtttagaatgtgggattccaggagatggacgggtcactgaccgggtcgggtatttccaaagatacgctcagttgtttaaagtcaccacaggacctaatttagactgcgagaaccaaagacccttctcctaaatataactataactcaaatctatgtatcaaaatgaaattgaagtttgatatctcaaaatatttaataaaactcacgcaagctgggagatttaatgttttacatttacttgtaagcgtaccgtgacatgaagttgttgacctcaatcgcggtttcatatgcgccttctacacaccggcctaaggctacaccagcgacgtaattgccacccaaaaatagcccttcgtagcccgaagacgttagagatgatttagccgtgtcaaggatatcaaagtgaccaactagaaactgaggaatggcttgaggccataccctaactcctaatttaagtggatcggtcgaattaggcttaattagcattttcctcaaatctctgtcaactgcttccactaactcaccttcagactgcggaatcaaaacaaaagagagagagagagaagaaaactatcagttcttaggtttacttggttgaataaagatgtgttacaagtgtttgctgttttttacttggacagaattcagttggggtac

SEQ ID NO: 24743 - DNA, 1153 bp, Arabidopsis thaliana landsberg
  unsure (1)..(1153): unsure at all n locations
ctttccaagacacggggggggggtcttttctttttggttaggagatactgtatggatcaacgggaaagggctatatacatttatctttgcagatttcgctttaatgttgtcccctcttgctgcaaaaaaaatacaggaaaaactttttcttatacccgaatggtttatatgcccatgtcttatctatatgggaaacgatttgttcttcctcttacacctcttattatgctatttcacaaagaactgcactttcaaccttatgaggaaatcaattggaacaaagcgcgccgtctatgtgcaaaagtatggttaaccaattttaatatgcaaatttcttctttattggagaaaatccacaggcattacatcatttttaatctttctggaagacatgatttatcctcatcctctggttcaagatttgttatgggacactcttcacaggtttgtggagcctatccttacgaattggccgttaaaaaaacttgtacgggaaaaggctcttcgagtggcaatggaacacatacattatgaggacgaaaatagccattatattaccatcggatgtgttgagaaggtaagacgttgacaaaacctttgaaatattgtgcatgtattctcttgacaacataaatttcaaatatatgcctaaatgttaatgcaggttctgtgcatgcttgcttgnnnnnnnnnnnnnnnnnnnnnnnnnnnnnnnaagaaacatctcgctagaattccggacttcatgtgggttgctgaagacggactgaaaatgcaggttctagtatatatagatgaattatttatgtagacgctagttgaaaaattttcttaagcatttcaagtttttgcagagctttggaagtcaactctgggacacagtttttgcgattcaagctttacttgcttgtgacctttctgacgaaactgatgatgtactcaggaaaggacacagtttcatcaaaaaatcccaggtttaattgtagtcttgtatcttgaaatgccttatggaacaattgcatgtgttcttttccctaaattaaagcactttgtaggttagagaaaacccttcaggtgactttaagagcatgtatcgccatatttccaaaggagcctggactctgtccgatcgagatcatggatggcaagtctc

SEQ ID NO: 24744 - DNA, 1025 bp, Arabidopsis thaliana landsberg
  unsure (1)..(1025): unsure at all n locations
ttccgtcgttcagaagcagaaactgtggcaacaacaggttccattgataaccttagtgatggaattcgtgcgccatggggtagagctgtgaacatctctagagatggagacaggaaaaaagcaaggaaaatccaatcatctcagctttctctcaagtcctttttcactacaaactcaaaagtaaacaatgtcgaggatagttcttcttcctatgtttcctccagtcccagctcccaagtcgaaagcatcatagaaccgaatgtttcaggcaaagaagacagtgaaccgactacttcaacacaggaacaggatcaaacaggttcttcagctaaacaaaaaaacgatgcagctttaatggagtggcaaagaatacagaacctaatgcaaaacagcatacctctctgcaaaggacataaagaagcttgtgttgctagggtcgtcaagaaaccaggtcccacatttggacgcagattctacgtctgctctcgagctgaggtaaagagattttaaccaagtctttttaaccgttgtaactacatgctaagtatatctacaactctagcagggaccttcctgtaatccagaagcaaactgtggttatttcaaatgggcttcatcaaaattcagagacaagtaaaagagtgatgagatcaaaatgataagtattgaggaacgaaggattttaatctagtgagctctggtacaccgtagaaactcgacaatgtcggtatgtagttaatgttatcttaatctcnnnnnnnnnnnnnnnnnnnnnnnnnnnnnnnnnnnnnnnnnaaggttatttccacgttccaacgtctctatcagtttatccctctttgttttataatgtattgtttcttctaatgtgattaacttttagctttatagcagctaatatactaatgttacaagttgcagagaaatttgattatataaggttatgttaattaaaatggaaacgtatacgtatacgtaatctgtgtgtatggaattatgtattattttatttcactttatattta

SEQ ID NO: 24745 - DNA, 2023 bp, Arabidopsis thaliana landsberg
aatttgtctacacgtcaaaataattagataagactttatatgctgtaatcaattttcaatttttttcacaaagtgacagcctaacatctcaatctaacttgaacacgtctttacaacgaatcgacgtcaatttgtaacaacaggaaaattttatgtagtctataaacactattatcaatgctatatctaaagtataaactatagaaaacaagagactacaacaacaaaaacacagtctaacaaggtgatcataacctgatttgcgtactaacaagagtttgaacaatggctagagataatcagattcatcaatgatctaatgtcttgccttgatgctgctccagagattcaaggagtgataggaatgctcaatggatgtaaaaaagagcttctgtttcgtaaaatcttctttaattctatgacaataagagctagtatgttatataactctcaaatgagcttgaaaatcaagctatatagttaattaatgtagtggacctttctctacttaaaataaacaaaaacaatcctctttgtaagagtatctaaattaagcacaaaatcaaagatcaccacacataattccatttataacctcttaaacataacaaaattacaatcaaaagccatcgtcttaaattttcccaacttcgttcccaacctctttctgattcaccatcacacaactatataatatatcacacattacacatacaatgtatatatctaagtttttccacataaagccatttacaaatattcaagcttactcagtctcacatttaagcaacctctctctctctgattctctctttctctgagaaaaatctcagtttctcagagctctcaggttcttttattcttcttcttcttcgatttcatcccccaaatctgcatgctctggatcttacgaatgttgctttgtagttttatgatctgagatcaaattttaacaaatccgtcaccggagacgaaaatgcgggttaaagagttacatccactttgttgtattactttggagagtcctcacgggattaatagccagtcaccggaagaaccggtgacaacggctttaactaggtcaaggagtttaccggcgaaatcgttgaccggtggatcggaatcggagactgtagctgggatcttatataaatggactaattttggtaaaggatggagatctagatggttcttactccgtaacggaatcttatcttattctaagatccggagaccggagaatttgaatctactttctccggatgatgatgtgaggttaatcggagatatttccggtgaacgtctttcgagaatggatagttgtagtggtcgccggaaacaacaaaaaaccgtcggcattgttcatcttaaggtatttacaaaaagtttgatttctgaaattttttgattttggttttagggagaaaaaaaaaaaaattcacctgagattatcagtttttatgatttattgatttctggtcttgttgattcattattaaattttgactatcatggatacagatttgtttctggggaaatgaaacgccttttatcactcatagttagaggaaataaccagtggtttatagatttgtttgttgtgttcttggtgaaaaagataaaccctaaatgtgaaatttactctcttgtttcgtttctatgaatgacctttcatcatcagattcatcacttcttgaccactttgattttggtctttgtgtaataataatactattaatcttgctggtattttcccagcttttaacttgctgtgaatctctagtgggtcacatcaacaggtgcttgtttgtttttcaaaatttaaaatcttttgtgtgttggctgcaacaatctggcttctttttgtaggtttagggttttgttcagtggtcacattgttttttttttctttcaagttggtttcttagtgtattcagttttttttaataaatatatatttctattggtttcaagatttaacacatttgccaattgtcaaaaaacacattggattctcttagtt

SEQ ID NO: 24746 - DNA, 2077 bp, Arabidopsis thaliana landsberg
ttgtcaggtaaatagacagattaatttattgttgatataaaaaacacatgacattgttaattgaagaaaagaagaaaagaaaaatgtttgatgtgtatttttcttgccacaaaaaaaagttctatgctttgtgaaaaaatattaaataacttgcttttttgtaaggagttttccccttttaattacttttaagatatagaagattactcatttaaaaaaaaaaaaactgagattgattaagagaaaaatcttagtaacattaatcttgttgatataaagccacgccagtggtaatcccctagtcagagaaagaggaccaaactttgagaaacgacaatggcgatgtccgatcttccaaatgatttggtggaggagatcatctctagggttccggtaaaatctataagagcagtaagctctacttgcaaaaactggaacactttatccaacgatcatagctttacgaggaagctctttggtaaaacaataacaacaaaggaaaatgagtgtttggtggtcatgatgatggattctaaggtttatttaatgagcgtcaatctccatagaattcacaaagaaaacgacgacaacaacattaaatcatctatcatgcataaagctaaactcattagcctaaacgatgatgacatactcaataatacatatataatttttcactgcaatggtttactgttattgttaggcttcaccgacgatggcatcaagcttgtggttacgaaccctcatttagggcaaacaaggtggatcaaacctagaaaagctaattaccagttttgtgacaagtacgctatcggatacgagaagaagaagaacaactctcttcgtaccaacaaaatgttgttatttcataaagaatccttctgcttccggatttattggtttgaaatctacaactttaactctgcttcatggaatgttttctatttcgctcgtgactgggaattcccgtattctcaaggcgtgtctctcaagggaaacactgactggtttgctagagagataaatataagaggagaaagaatagatgatcctcctgacttcttgatctgttttgactttccaacagagagatttggaccgactctgcctctaccgttccactctcgttgtggagatattgtggctctctctagtgttagagaagagaaacttgcagtgtcacttcaccgctgcaatatatcaaggatggagatatggattactaacaagattgagcccaacaatgtgtcgtggggaaagttgttcttaacagtggacatgaaaccactcattattgatgatggaattttcttcattgacgaggagaagaaagtagttgtggtttttgataaggacaaagagatgggaaaccgtatcacagcttacatcattggagagaatggatacttcagaaaagtggatctcggagattctgaaagttttcctgttaggtgctcttatgtaccaagttcagtggaaatcaagcaactggcaaaaggcaaaagcaactagtccatttacaatacccaaatatttggttcttgcattgtttaattactactactcttgctttgtcttcttttctcagcttcctgattcctgaacaatattggtctattcttagttcgtttctcatctcttacgttgaaaaaaagattgttaagcatactagtttgagatcgaaacaacaaaatcattcaatactcatgtccaatataatctggcaaaactgttgtttcctaaactgttacacggtaagggtataaattagggccaaggctatctagtgctaaacatacaaaatcttttgccttttgactgtcaagtaccaaccaactgccattactattgccggcactttctcggactcagaaatatataaaagctttgatcaatcaaaagaacaaaacttaatactctgttctgcattttgcactcatgttctgtttctctttcgtctgcatcaaagaggcaacccgtggcaaagatcgggttctttctcagacatttgcaaatgaaacgaacccacttttccggttctaagcctcataggatattacactctcgaggattcatt

SEQ ID NO: 24747 - DNA, 1056 bp, Arabidopsis thaliana landsberg
ctctccattgctttcaagatttcagaatcagcttctctattttcaagctcaactcggtcactagcatcacgaaggaaagacagtctcatctctgagttccaaaacataggatggagtagcacttcagttgcgctaggactgcaaagagcaaacagtgtataagagattaggctttttcgagtggattttaatcatcagagaggaaagtaacattaccgtaaatcagggtctgggtttaacaaacgggatatgaggtctgaagcttctggaacgtgttctactagaaataggtcgacttcgttcttcacaatattgacatctcgttcaagatcatcaccaaagggatgcttacaaccggttatagtgtaaaagatgacacaacctaaactaaacatatcgactgcacgagtttgacgaccttgtagaagctgctctggtgcttgccagcccgaactgccagaacctgtagtttttaaagcagatactttaaaaatgtgggttgaaactcatttcataaacataacacatattcaacaaacgatcatacattgcgttcagacactaacatgcattctattgaccaacttatgacattatgtagtttttctctagtgttagttttgttttgcgagatcaatcagtcctatttttgaaagtgttacaaatccaatattttgggcataaaaaaaagataataaaaaacaacttacctgtggcaaggtgacccaatgatgacatatctctggacatacgcttgctaatgcccatatcggacagttttgcactcaaagtcatatctttactaattaacacattttgtggcttcaagtcccgatgaactattcccaattcgtgtaagtggacgattccacaaactatatccctgcatcacaatacaaacaatctgaaaaatataagtttaaacagtaaatcagtaaacaaggtttgaactaattctactgtttattggatcacatagcctagacttatcagaaccatagcttcctttgatgttcatatagaacattacttaattaatctatattatgacattta

SEQ ID NO: 24748 - DNA, 933 bp, Arabidopsis thaliana landsberg
acatcggccaactgactagtggtatgcactttccgagtacgtatcgtcccgttcatgatatcatctcgaatgaaatggcagtccgcttccacatgtttgttctttcatggaataccggatttgccgcgatatacaatgccgcttgattgtcacaatgtaaatccatcggctctgtttgacttactcctaagtcgtgtaacaatgatttcaaccatttaagctcacacgtagccaataccatagaccgatatcagattcagcggatgatcgagagacaacatcttgtttccttgttttccatgacaccagtgaatctccaagtgtaacaaaccacccaccaactgatctcctagtaatcgggcatcccgcataatcaacatcacaccaaccaaacaactttaaattcgaattagcgcgcaaaagtgtgccttgcgctagcatccctttcaagtatcgaacaacacgtaacgaactattccagtgatccactcgcggctctttcataaattgtgacagagcgtgtacgacatatgccaagtccggttgagtggccagtaaataaatcaatctccccacaagtcgtctatatcgatctggattatccataaacggttctttagacaagcttctgttgttgcgccattggagtgctcacggattgtgatcctaacaacctaacttcattaataatatcaagagtgtattttctttgacataagaaaattccttcttgattttttgcaacttcgattcccaaaaaatatttcagagaacccaaatctttcatgtgaaaaaaatatttcaggaattcccaagtatttcttaaagctttctattccagcaaaatcattgcctccaataatgagatcatcaacgaaacctatatatatattttcgagtttcttctccatagatgaaacaaagaggtattct

SEQ ID NO: 24749 - DNA, 1031 bp, Arabidopsis thaliana landsberg
cagaacaactgttggttagcttttgctactttctttataaccattatattcttgaagttctgtgtgtcgaggacccaggcacaagaagtctgtcccaatcttttcttttttgaaatatatatgtatcatatgtgtggttctaatattttcgtggatacaaaatagtattcctcaaatccctacacagatactttagatttcaaaatttggcatgatattcttgtttattcatttattcgcactcaacggttttcttactactttcacatttttattatataagacttattttatcactaaaattaattaaacagacactatttcaatctatgatgggtatggggtcctatttttgtatttttcaataatggcattttaacgttttataaaaaatcttatctttggaatcgttttgtctcggtaaaatctacaatgcgttcattgtatatacattgctaaagaaacatgcatgcaaattaatacctattatatctgaagttttggaaagtaaacatgtatatacaacttactaatttcatacatatggtgatgagtaggtgggcaaattgggaatttcacatatcgttcgatgttcgagctggcattgtcatatctctcgcatcccttttcgacacggacgtgaacaaataccggcaagtcctatataaaggtcacttatcggaaatgttcataccttacatggatccaactgatgattggtatttcattacttatcttgattgtggcgattttggctgcggtcagtgcgccgtatctcttcagccatacactgattgtccagcgggtgcagtttttatggatggtatttttgctggtcaagatggaactcccgcaaaaatcccaaaagttatgtgcatttttgaaaaatatgctggagatatcatgtggcgacatacagaagctgaaattccaaacttagaagtaagaaaacatatggttgttgttatgttatgacttatgaacaatcacttatataaaatacatgatttgtatttgcatatataatgatg

SEQ ID NO: 24750 - DNA, 1188 bp, Arabidopsis thaliana landsberg
  unsure (1)..(1188): unsure at all n locations
gctagtataattgaaactacgggtgataaaaacaagaaaagagagatggtatgatatcatattagctaaaaacatacaagaggttaatatgggccatgcctttcccaccttcttacgtatctttatttatgactcctttgtttgtgaatgtctcgtcgcatatgtgtgtacgtttttgatcttcatgatcactttatgttttttttttttgcataaggattctgacactggttgcgcctctatgtgactgacttgtagatcaaatttcgactgtgtagaaaaggaagcattcggtacttgcataatcttttgctatttctagtaaattacgttaatgttaaagccttaaagtcatcatcataatagaaacacaaaaacagaagactttatcatagtacgttagatcagagctgctctgtggaaagtaaattagcagagaggtaagacataccgaatgtttgttgggcctttttcaatgcaatgatagctagctaggtcagtgactcaatgattaactgttttaatttttatatttttaattataaattcttctatttctgataatttattttcagaactaaatcctaattcttgtgtggatatatttagacaaaattaaacaattatgattagtatttgaaataaacaatgtctagctaaaattatcatgtaaggcctgcgtgtttgaattttaaatagatgtagttagacaaacagtaccggttctctaataatgtataattgacaaaagagtatattttgaatgtaatatacatatacagatatacttttctagtgggatattcaagtatccggaaatcgaatgcctctgaggtcatgcttttgctaaatattcttcccgtggacattttcttacataaaatctatcatttgttttattttttaaaaatctataatttcgttctaaaattcatttatagtctcctcaatcatgaaagtttagtttccaaacaataaataaaatttgacaaaaaatctatatgataataactcaatcgaagacttgaagtacttaaaataaatgatgtcagtatcacatagatattttttaaaaaagagtcgaaattttcttatttgtttatttcactaatcttttcaactccgacataattgtctctattatattaagaaaaatgacgttagaaagaaaaanaacaatgtatcaac

SEQ ID NO: 24751 - DNA, 1093 bp, Arabidopsis thaliana landsberg
ttaatttcttacatttttggtgggagtagacacatataatgagggaatatccgtcggaatttgtcttggcactttcccacaatgtctgcgtttcaatctcttgtgcatttgttagtttattcgtggaggagaacaatcctagcgcatggattatgagatcgaaaattatgttgatatgcatcgtcgcaacggtatggaaatgtttctatatatagttttaatcaatgatcttattttgttaaatttgtgtaaatgatacattagggggtggtgaattcgacgagctatgttgttgaatcatggacagtgcgatataagggggctgtgttcctagcaatgttcaggccattatctatcgtaaccgctgtcgtactaggggcaatatttctaggcgattctctctatctcggaaggtgaaagaagaatgtttaatatatcaaaagatggatcaccaaattagtattaattactcatcttggattttcactttcagtttttactatctatatttggcagtgtgattggtggaacgttgatatcaagcggtttcagtgtccataattcattatttcatatagccaatggctttagcgctttagccaaatccagtgttctaaggcatattggcatgttagtatagaaaagttgtccttatctgaacaaatttttagtaatggaggcaacgacctttgtgcatgtgagctatgttatgtacaataaaaaacgtatctgaagtaggtcttcttcgaaaacgactcagaagattagattccaggcagtggcaaaacaagaattgtgactgactctgaaagcagctacacttacgagatcaaatgtttaaagggaatggttgattggatttcttttggctcgaagaggcatacatataaattttgtgatgatgccttagccaaactaagttttaagatatatttagagatatgactatatgagttttgtagattgagtattgtctaatctaatttgtgtgagaaatctagtgatgaaaattttaaacgcgtgtatatatcaatctctattctctagtggtccttttctatagtacattggtccaaataatagggagtcttat

SEQ ID NO: 24752 - DNA, 950 bp, Arabidopsis thaliana landsberg
  unsure (1)..(950): unsure at all n locations
tcccctgaaacgagacaattctgcaatatgaatcgcgaaaaggggagattaattaatatctggagcaagctcttaatcataatccgataaggaaaaacagagaattgtgaaacctggaacaaaggagcgtgagttacagtatctgggtaaagaagaaacctccattgatgaacgcacagatcaataactgaaattatcactcaagaaatgaaaatttgaaatcacaacagttccgactcaaatgtccgaattaagcgacgactgctgtgttctctcgatcgaggaagaagagtttggcatcgccggataatgacgaaagacacgtgtcatgctccttcgctttaaaaggccgttgactaccgcttctaggcgttgaatttttcactgcaatgagtccaaaaacttactagcggcccactggcgatggatctggccagctcgattgatttaactctctacatatataatcccagtgtgcatgtgtatcaataaattattgatgcaattgcaaatgctttacatgacgacactttactatcatatataatccatcacaattatagacgcgacaaaaggcaaaataggaactgactagtagaatcttctaacataatcagcacttctagttctatggatgtgcatcagatgttaacatcattcgccaaaccgctttggtagtataatgtttgaataataataatttaacagaatcaaatcatatatatgtgagaaaaatctaaaagtgaatttgttaatcgaaacaatatggcttatatatttctgcgagttgacatgaattgtttttttccccatcatgtgtttctcaaaactgcattgtttaagtaattcttgtcttccgatttttaatagtaatttacctgcaaagacttactgatttatataaaaaattgtgtacaaaaagaatngatgtattgattctattatgataa

SEQ ID NO: 24753 - DNA, 1182 bp, Arabidopsis thaliana landsberg
caagagttaattggaattgaaattctgcacgttttaattcttttgaaagcattgggttgttctcagagggcgatcatatacttggctgcctctgaaatatttggcggccaacgggttttcgatccctctacgtgccatgttccctaatttagtggatcggacttctttatgcagcacggaggaattatcagaattggttggtcctgagacacctcttccagagaatacatataaaatgcctcctcgaaaaagcgataagcagctcaaggaagagtggaacaaggcaggtcctcgacctcgacctctacctcctcctccagacagacctatctaccagcacgaaaaaaaagtatggtatggttggcttacacagaatgacacagaacctagcccttcgcctatggatcttaggaatcaagcacacaggttactgtgggatgcccttgatttagctgtttctgtataaactgatgtgttcttccctgggttcaacaacgatggtagtggatggccagatttttcaagtttggtgatgggtcaaaggctctatgaaagaccctcttcacgaacatatagactggacaggtaagcagaattattgataaaaaattgcttactgcatctaccgtccttcctcatagttaggttgattgcacaccttttatgccgataatcttcttattcttttgggttcattgatccgtaattttagctgatacatgcatcttatgagttactagcttttacaaaatttctcttttgcaaaattcattaactgttcactgatttgctcaaacaggaaagttattcaagaacttttcaacattactcgtgaggacatgtaccatcccaaccgtaactggacacttcgtgtgaggaaacatcttaactcaagtttgggtgaaagtgggcttatcaggcagtctatgttgtcgaaacctaggtcgttcctttcgcatccacttcctgaatgctcatgcagaacctcagcccttgaggattccaggccaatccagagtgatgatggttgatttctctatgcaggtgaggatgaatgccctaaatggataacatcagcgggagtggaaaagagtaagtctcatcatggtgatcagcccgattatgaccctgtccttctcggtgaacagaccatatgatgttgtttttgcagaaagtaaggta

SEQ ID NO: 24754 - DNA, 1381 bp, Arabidopsis thaliana landsberg
aggaagatggaaaatggagactccagtggcgaattaaggagctgcaagtaccaaaagtccgatgatatatcagtcgctacgaacaacgaaggtgatgatgacgacgacaagaggaagttgataaggcagattaggaaccgtgaaagtgctcagctttcgaggttgaggaagaagcaacaaactgaggagcttgaaagaaaagtgaagagtatgaatgctaccattgctgaattgaatggtgagattgcttatgtaatggctgagaatgtcgctttaaggcaacaaatggctgttgcttctggtgctcctcctatgaatccttatatggctgcgccgcctttaccgtatcaatggatgccgtatccgccgtatcctgttaggggatatggatcacagacacctttggttcccattcataagttaaatcctaagcctgtctcgagttgtagaccgaagaaggcagagagtaagaagaatgagggtaaaagtaagctcaataaggttgctagtattagttttattggaattctcttctttgtcttcttgtttggtacattggttccttttatgaatgtaaattttgtaggagaacgtggaagctttgggggtttgtctaaatatgatggccaccggtattacgatgaacataaggggagggttttaatggtcggcgatggttctgatgttagaagaaatagtggaatttctgaaggaaatatccattctagtaggattagtcatggtgagagagatagttgtggaggagtagattataatgctcatccgaaagtagaaggacgaccaagttcgttgagcaatgccagtgatcctctctttgcttctctctatgtcccaagaaacgatgggcttgtgaagatcgatgggaacttgataattcactctgttttggcgagcgagaaagcaaggggtttaggaaagaagaatatcactgaaacagtaaaaactaaagaaccggatttgaccattcctggtgcactgtcttctgcatatagctgttccgggggtaagaggaaatgcagcaatgcttccgcattcaacagctctctcttctgaagggaaaagacttcaccaatggtttcatgaaggtggctcaagtaattcttgcactctaagctgtctctaccatttggagcgatctggagagaccactctgccttgcattctcttgcatggcacactaatggattacagcatgtgcaccgaggttttccagtttgatattgctcctggtgctatagtcccgtcatcagtctccagcatttttgcggagcatctccaaaatgtcactacccacggcaagagaatgaagaacaggagaatcctcgagggacttcctgtttcacttgtggcgtcagagctc

SEQ ID NO: 24755 - DNA, 1530 bp, Arabidopsis thaliana landsberg
cttcttagtcgcagtttcagctttctccacatttatagatgcaggagtgtctattcagagatttaccactattcagagataaacccaaatcataattacaacatcgttaagactcaatgaattacctctttgttgcgtttccggtatgaatccacctccatgattcaatggatcggtggctgctttaggggcagctttcgaatgaatcaaattgcctttcagaagccgagatttatagttctgttgccaagcgagaactgagcaggaggtattgaagctttgatatacagtaaacagctcaatttttctgggtaattgaagagaagaaagaggagaaagagatgggggtcgatgagaatgaattcacttacaatttatttacacgtatattattcttatcccatccaattaattagatcagattaggaaattagtagtttaatttattttattttttccttaaaaaactttttagaaatatacactctcttatggtcttaccttaatatttcagttattgtttcaaaaaatctcctcattattgaaatattttattttatcaaccaattaaactttgccataaaaactgattaatgctaaattttattttatttaataaaaaatagaataaatactatgtccgtgcatagcacgggccatactactagtactagtatatatataaaggaaagagtgggtttagtcgacttccaactttagagcgtttgtgactctcaaatttcttcttctcttcctcttcaattgcgcagagaaaaacttacggcaggataatctaggcaacggtgagttcaatttccggtaagaaaagttcaattctaagtttgtgagatcgcttaaaaagtatctgattttgtatgtattttttcttaaagcccctgtctttgagttttactttttagaggaggccatggtgtggtgtaagcattgtgcgaagaatgttcccggaattcgccccttcgacggtggtttgtaagtgtttacgagattcttaaactctgcgggttatgattctgccagctccgacttacgaatgatgagcttgtagggcatgtgatttatgtgggaggattttggaaaacttcaatttttctactgatgttaccttcgttaagaatgccgcaggacaggtatgtatactccagagattttcttcactatgatgctatctttttttttggtgccctttgaaaatatgtcttgtgcatgcagagccaagcgtcaggtaacataatgacgagtgttgggaattcaagctcacgtgataggagaaggagaaaaggtatatagtgatgagtttgcctttttctcaaatatcagttcattgggctcatcttttgttgttggcagctatagatgagttaaggaatttgaaagatgccttaggaatcggtgatgagagagatgatgtggttgacatggctgccatattctactcaagtatgtttagtttttttacatatatgataaatcacgattcttacactatcaaactttatttgtcttctggag

SEQ ID NO: 24756 - DNA, 834 bp, Arabidopsis thaliana landsberg
ctataacgattgtatagttcttatcatgaatcagccagcaacttcgaaattttatgaacttgaaaagagcaattatcatttttcatttaaacccattaacaacataacatatattataataatccaaaaattttaagatgccaaaagcctcataagtcactcaaccattcaccaatacagccaagtaaaaatttctatggaaaaatgtgacttggtgtgcaaatcttctattttttgcaagagggaccacaagggaatgggcatctcttcttccctcctgcaccaagatggttttaaaccaaatcaataatcaaaaattctcatctcatatgcaaagttatatctttatatatcttaactttagttttcgttacctgatgacttgttcttctttccacctttagctatctcaaatgcaccatttggcatcttcttgctcggaggagccacctttaaaggtacttcagcctctacatcttcttcatctgaagagtcatcatcctcgtccaaacccatctaaccaaacatacagaaaaaaacaacaagattagcttttttatactgattcattgctaatcagtaaatacttaaaagcaaaatctacctcatctgagtcggattcatcatcttcttcaggattgatctcattttgaggcaaagcagcttttcaacaatgtcaaagttagatttcataagagatacacatgttaactataactaccacacagccagtgcttagtaaaaaaaagtaaacataccaatttgttgttccattttttatcttactcataatttacacaaccaaaaagcaaaattttttcttaagcttcatat

SEQ ID NO: 24757 - DNA, 1693 bp, Arabidopsis thaliana landsberg
ggaatccactaaaagcatagattatttagtgcaagaatctctttatcaacaattatagaggaaaatagcttccttgctcaaccaaattttaacaaaaatgagatacttatagagcatcgaataaactgcaaactgtctggctcaatatgtttttcttaatttgtttataaaaacgaaataatagcttctaaccaatgaaacatctaacaagctcaacaacttttaaattttcaagtagataacactccgaaaatgtcaatatagtacgtacgagtaatatggacctttaaaatctacaccacacgatatgttatcatgtcacaaatgaaatgcaacataacgtatatgagtttggttctgttagtaaacaaattctttgacattgctacaaaagtttgagtatcaaaaaattatatcgacagaatccttttagccaaattatccacgtaatctttttagacgagcaatctttattattgccttagtcggggacataaactattactcgatgaaggacaaaacaactatttttaaaagtcttgattttcagtttaatatgtttccgctggccgagattttggtaattctttttagcaacttaatttgagatttaaagcatggttagttgtgactgttgaaccaagttttatttaagttaagtgggcttaataaaattgaattgtgtgaatgatttgtgttttcgaatggtgcgaaaccagtttatagaagttgtatcctgtgatccttacatcacacagaaaccgtcgcaccacgggtgattcaaagggttaaagagttcatcctctcatgtctttacttaaacgtttatgatttcaatttcaattacttttacgtagtgttacctcttttaggaggagtatcacgagactgaggaccagtaagccttggagtacaacgaggatagaacttttcttgcttagacaaaaatcgagatctgccaaaaaaaacaacaattgaaaacaaaaacactcacataaacattccccataaaagataaggaagtcttacttaggagaagcaaatggcactgcagaggaagaagttttgattccggcaccgtgagcactcatcttctgatcaaaacgccgttcctctgacttctcagagcggcgaatcggtgccaacatatctgcgaagcaggtgaatcttctcgtcggagctccggcttgatcacctttgaaccacttagttaggcgcaattcatggttacttgcgccaacgccgaatcgtcggagtttgatatcgagaagagagattgcggagctagccgccatttcgctcattgactcgccatagaaatgaagaaattagaagaattgagaaaccctaggaagcgaatttgtagaactctcgattcgtggaagcgagaaagagagagagagagaagtgtttcagtttcagtttcagtttcagtccaagtagagaagaaaaagcccgagaggaggttttatattctgcaaaacgagttttaattaaattgggcgtattattaatttactaacgtatgttaagcgagtttagttattctaatcttcctttgtttattttttttttgttgtaatcatttgtgacaattgtatgattatcctctagcagtgaattttgaacaataccaggacggtgaatcggactatgttttggtacactgagttactggatcaaccaggttcga

SEQ ID NO: 24758 - DNA, 2049 bp, Arabidopsis thaliana landsberg
tcacgccttttcttttctttggaaagtaaatgatttgtgaggacttgttgatttcttttagagcctaaaagggtttagtaaacttattaaaccgttctccacatattctatagttctactattctaaccaaggttccaaaaatcagtttaggccgtctgcctaggcgctcatgaaccacaaacttatgataacaaatgatgtatatataaactatcgtcgaacgatttcttgaacattgattctaggaaaccgcacaaaaggattcgaattttcaacatgtgatcttcatctaaccggtagggtcggtttagttttgttcggatacatttaatccggtttagctgatcgtcgtaagaagaacgagaaccaacataactacagaaggcatgtgttacgccttgagagaaccattaaagtgacttgcgcagcaagaaattgtctattttcagtcattaagaataaccttcacagatcaactcacaatctacaacttatcatttgtttctttaacattgaaatgaacagaagaagaaaccattgtactattttctcatgactatatacatgccatttttggaacctctcttcaatattaattatgttattttcaggagaaccaagaagtactggtcgacgatggaatctttgaatcatggtgcttctaaaaacatatatatatatatatatatatatataagtaaataaatatgaatctataattaaagaaaaacagtaaattaaattaagtaaaagaagctctcataatgagccgaaacattcacactatatactttaaggatttctcaagctcggggtaatacaattcttgacttagttttaaaataaatcataaatttgtaaaaggacttgggacttttttatatacgttagaaaactattattttgtaatactgtgaaagtaggagcaataaaaggtaacaaaaaaaaaaaattatgaatatatagtaagataaaatacctttaatgcaatatatttcttttaattatcactagggctcaatttaaataaatcattttgtaaaaaaaatttggtttccaaagatctgttaacctaacttgttcaatttaagtacaaagtatactgaaaatatgtttcctctgtatcttatggatcgatgcctctgattccacttagtttgacaatcggctatcatgaatccacaacccattaatcgcttaatcacagaagatcatgatgaagataaagatccagcgaatatatgcatgttaatcaaaaatatttatcttattttatatacttatgtattttttcaaaagtaataaatgatcgtgaatgtaggtatttaacttttgatgcatattaaatagtttaaatattcaaatttcacgcatactgttcttttttctaaaaatttgtttttttttatgagtatttttagactaccacttaacttcatattatatgtaatttttgttttttttatactatattggttttataggttaaagaatttaatattcatttcaaaatttttaaatcatggcgtatacaaaaaaaaaatatatttatattatatagatgatgtgatgaatttatatgttttacgaggcgagcgccttatgcgcaaggcgaattcagagaccatttgcgtctaatatcgcctcttgctatatcaaagacaattcagagacaattcagagaccattcagagatccattgcgcttgtctactatatcaaatcattgtatagtgacttcttgtcactgtttctatgcataacattcattactttgagtgaatattaaatggtgataatgacgagctccatgtgaatcccgacatggttggaacaaaagatggtggatgagaagagagattgacttaaggaagagttgcatgatgtccacgtcaacatcgagcctataaagaggataaagaacacaaccacaataatactacaaaatgggagtcttttttttcagaaactgtaagacattgctacttaggacaatctattatgcatatgagagctggaacattttcaagactgtcatatttttttccc

SEQ ID NO: 24759 - DNA, 1150 bp, Arabidopsis thaliana landsberg
  unsure (1)..(1150): unsure at all n locations
aagaaagaacacaatacatgacattatctaatgcatgcactgatgcacctattaattaacatttgtcatgtgttattttattgatgttcaaaaccttccccgacttaaattttagacaatgttttcatagatcaaagtgtgagaaagaatcatatattgtagtctttgaataggaaagagttttgtcctcttttcgattgtgtagttgtgagaactaggactcttttggtttacactaatggtttgcgcagccttgaatctagtgttcttgtgttagcactataggtttgagtagatgacaaaccaaaaaaaaacaaatttcacacaagcaatggaaccacgagaagaaccttaagaaatcaacttagtttaagaaatcaacttgtcttaaactaagaaaatgttggcaatatacatcaaagatataattatagctatactaagactaaaacgtaggaccaacgtagccaacgaaacatagccgtcgattagtaaggaacagttaataaactcgctggcacacgcagagatcgtacggtactcattacctttggactgtatggggtactatacacctccacgtacacaaatactatcttctcattttttaatgaattattttgcataaaacgacgaagtaagctttctatatatttttcattagtttagcagctgcacaggtaatatttggttaacacgtgtcacttaaaccgtggttgtttttaccttcgtgaatcatccccgatccctaaacaatggttaactaaaataatacacgattatcgagtgtaacacgacgtaccgtaacaaagatataatctacagcctcggttttatcatgcataaaagttaagaactcatatttacaaaactaattcttgttaatgttagcttaatctatagttttattagtatgcttttttttttattttccttcaaacacattttttattaaattattataaatatattatcggttaaagagaatcatttagaaaccgacgtgtttcaatgagaaaaaaacattttaaaatttatcttttctgactaaaataactggcagactattaaaggttttgaaaaaaaattctaatattaagcaaaggaaaagacaccatgaaagaccgaaacgaggcaatntccataacac

SEQ ID NO: 24760 - DNA, 1699 bp, Arabidopsis thaliana landsberg
  unsure (1)..(1699): unsure at all n locations
agagtatcaagatgatgagtagtccgattgagaagaggattgaattgagcagccaagaatttatcgattgatgaagtttagatccaatgctgatgagtggttttgtttgaatctcttttggtaattattatgaatatgaatgagcagttctggctattgtttagattggtagagaaaacagtaatggaatgtttgtgagggacaagctctgactataagcacaatgcaatatgtataaaatatgagacttggaacattctctctcacattggaaacactgaattttaaaaattatacatttccataatggtctacctctaccactagtataattcatttgaccattagtgtgctaaccaatgtggttgtgtttttaccatctgttttgtacaatataagtctctaattggcttcttcatcatcttctttgtttccaagaaatctctttaggctttaaaaaagatgtctaaaagactaaaaagagtgggctttggtttttgtcttcttctcaaatggctttcttaatcagtttgtgatcgttcacttaccaaacgtaaaaaaggtaaagtcttcatagaaagccctttagatatttttatattattgtgagaagaagatattttctttttttaaaatagaacaattttttagggttgtctcttccgagtcggggacttaaaataaaaacgctgtctttccctatctttgagatctctctctcttcttgngttttttttttcttatcttctttctcataaaaagtctctctcctctctcttccttgcgtcttctctttccccaatctctctcaggtttctctttcctctctcaccagaagggcaaaaaaattcccttaaagagtcccccgtttttgtttaaccccctcttctctcatgtaagttttctctctgctaatccatttcccatcttaactaacatcatctctctccctttctctttctccaatttttatattacaatgggtcctttttgtgtgtactgtccctcgcttttctccatttcttagtattgggttttggaaaccattgattcatgtcttgattcattagatcttgctctggatttcccagatctatggatctgcatgtgggttttggtcaaaaatgtctaatggtgttgcaattccctaaaggaattcatctttatccatttcaccttatttttgtttctgggtatctccaagatctaatctttttcctattgaatcataattacattgtttgttgctgaaaatatagaaatgtttagcttaattcagatatagatctttgtgtatttctgtgcatttaggacagagaactcttgagtttgattggttctgtctgaatttggatctgaatctcttaattgttatgtgtagttgaattttgttttgtaatgatgttttttgtagatctttgaaatggatgacgatgggtttcgtaattggggttactatgaaccagctgctgctacctttaaaggtaatctcggtttgcagctaatgtctaccattgatcggaacactaaaccgtttttacctgggcgggatccgaatctaatgatggggcctaacgggtcatatcaccaccaagagcctcctatccacatgagctacaattggattaaccaacagaaggataagttcttcaatatgttgcctgttacaacaaccactcctaactaccgttatggcctt

SEQ ID NO: 24761 - DNA, 1184 bp, Arabidopsis thaliana landsberg
ccaaattaactaaatcatgcatttaatccatttgttcttatcagatcatccttttccttcctacacaagaaatggttagtgttttcttttctcgattgtctcttagtttagattctttatccgactactttgttcatcggttttgtttttctttttgtcttccggaaggcgaattacatgtcggaagcagcacagctcagaagaggtctaaagcctaaagggaagacttatgggttgaccaatcagaagagacgagagatcagagagatctttgatcttttcgacatagacggttcaggtaaactattaaaccgattctttatccgatttacaccgctttaaatcagaatcacatgatttagtgcatcatttcatatgtaggtagcatcgatgctagcgagctcaacgttgctatgaggtcaacggcaatttttctttctttttcaaagttattttcttcaagttctagttaagtatagtactaaaaaattatcagctgattacaggtctcttggatttgagatgaataatcaggtttgttggtttgcctgtctttttttttcatggcttaatttcatggcttagatcattgtacgtagaaccaacttgtatttagtttggtcatgttcattgttgcagcaaataaacgaattgatggcagaagtagataaaaaccaaagtggagccatagatttcgacgaatttgtgcatatgatgacaaccaaattcggagaacgagactccatagacgaattgtctaaggcgtttaagatcattgaccacgacaataatgtgaataaatctaaacctgtcattatttcattctttttaatattatctttttttgtttggattgatttcattgtgtttgactggacaacttttggaatgttttaggggaagatttcacctcgtgatataaagatgattgctaaagaattgggagaaaatttcacagataatgatatagaagaaatgatcgaagaagcagaccgtgacagtaagcaaaaacacataataattttgcgttttatctataatcggtccctcaagttcatgtttttgccttaacctacgcagaagatggagaagttaactcggaggcgttcatgaagatgatgaagagaacatctttaagctaagtataaatcaattagtaatggttgtgaataatgtttgtgatc

SEQ ID NO: 24762 - DNA, 1344 bp, Arabidopsis thaliana landsberg
  unsure (1)..(1344): unsure at all n locations
aattgtctgcgcaacataaaaccgagtctcatcttcccgtaaggtatcctttcgcattatgcagtttcatcatatcacctccagggaggtattccataataagatacaaatgctcatcatcttggaaagagtaacaaagcttgacaatgaaagggctatccacttctgcaagcacatttctttcagctttaacatgttccacctgatatttaccgcataaagagaggattagcgtatttacgcagatgttaatgaattaccaatttaatcacaactaaactctttgatttggagagatgctatcagatagtgcattacctgccctcgtcgaagcatctcggatttctttaactttttcattgcatatacgcttccagtagatttttctttacaaattctcacctggacagaaatgaaataatattaaatcaatacaccaagtaaaatcactaacagaagctttggttcatagaaaaagaataatagctagtaatcagtacttcggtagccagtaagagagctaaaaaagaagcatcatcacattttatatgtaaagatgagtcaagatattagctaagcttccaaaaaggtagtgaaatatcagagaggcaccctcaaagaacacataaagagatatacctcaccaaaagcaccccggccaatgatgctaagcagttcaaagtcatcaccccccattttctgtctttgtagacgcatatactccatttcctttttctccaagttctttaatatatccgtcttgtcttcaacagtaacatcagcatcagctaggttttgttccaagatgacaccgcctgtattcaagaacgagctgatatcagaggggttcggggtaaaccagtagcagattaattcctaaatcagacccaaccatcagtactagaaaataagactactctgaagttccatttgtaacaactaaagcacaagaagtaaatattggcatcacaagaagaatcccgagaacgtaccgctcttttctttcctggagactcttcttctgaattttataatgattctcgatatattgcttcgctgcagcaactttctgtttagtagcattagatggtgcatcattcataggaggtctcccaagattcttcacatttccctcttgtccctttttagtagggcttgatttatccggtttctgctgccgtatctggaaccagctccttgtaggctccgtagccatttcaatccaatctaatgcanatcacttcatacaacctgcagaaaatcaaaacaaaattcccaaacccaaatgcttcaaaactaaatcaaattgatgacaattcttgtctaacacgctggtcacaccta

SEQ ID NO: 24763 - DNA, 832 bp, Arabidopsis thaliana landsberg
ttccctgttttagatagactcttagagtctctctagagtcaccggaacaatcacaaaagcgacgacatattactcattcctacaaatactcatgttggacctcaacctcggaatcttgtcgacacacaacgaagatgaagattgcaaagtaccaacttccatcttcattcaagaagaagattccattaatccctcaaacgacaacttgtctttgattacatttggaatccttaaacgaaacgtcgaaatccttcctccttctactgctcggtcttttcctttttttagcaaaagacaaatacttttaattgtaaagaacacacacacagagaaacatatgtgaacatgtggaagaagcaacatttatgcaagactcacactttgggcagatgcaaggacctctgtaatggcagacaccaaagctttgtcgattaagtcagcattctccacttcttctgctcccattctgttatgctagtgcttcgaaatttcaactactgaagaacaaaaacaatacactaaaatccaaggttagagcagcaaaaccataaacccttaaaaagagatattcattctatattcaatttttttcttctcgccctaacaattttcttctaaaagaggaaaccagagcccaccatgaacaaacaaacaaaggttagagagaactcgcaccgatgaataatttttacacgctctgattccacttagctggggagatacacatataaacggcgtcttcttcttttattttttgtcggcagaggaagttcgaatggatcccgcgagggctcaaaaataaaattatattaacataaattattataccata

SEQ ID NO: 24764 - DNA, 1296 bp, Arabidopsis thaliana landsberg
tttggaattaggttcataagatttttggttaacaattctgtttcatccatcttctcgtgcacaaaacaaattaagttcaacaatgccttttctattgcagggtttagggtttcgtttcggaaacgcatattagtcatcacaactaacttttttgttgacaagaataaactctcattctaatgaagctgatcaacataagttaagatacaaaaacatacgattaatctaaggatctgattggataaaaaaacaaaacatagctgatttccttgaagaaaaaaaaaaaactgtgtcagaaacacttgatcaacatagaggataataaggtttcataagctaagccactggaatatatacgttctcattagaaaatattacgcctacttgtatatcgagaaaaacatgaactgattgaaatctgtgaaaaagctccttttagagaagttaacattttcaattttttttgttgactgaagaagctataaattgtatacatgcatgacaagtcaacataaatcacatattcctccatgctcatcataaatgttttgagcttaagaaacaatggtaccatgacacatgcatacacaattttattattgactgctgatattattatttttggcctaattaattattttgatgtcatccattttggttatcgtttatactagctagttgtaaaataactaagaaaaacgattgtgtgtggaaattaatttaatattctaactttaatttcggactaaaaaaaacttaaatttaactaatttgacacgtggatgagtctaattggattagtataaaagatcctctggatccgcatgtactgtgacccaagtgagtttcgtgcttacacgtggcagtgccgtccaattcaattacgtctcggctctaaataatttgtcggtcacatcctttacgttttccttattttcgcccccaaatgtttcattaaattacgaaagttgcctgatttttttgagtgggttccactacacccgccacattttttgttggtcaacttggccatttcctaattcctaagaatcgagaattaaagtcaggtccatcaacagatcacaaaaatattccatatcagtgacgcattaataacttaatcatatagtttaattacttacgattagcttgacaacatttacctatcacgtcaaccataacacagaacttatgtacaacattgggttcttatttcgtttatcaaaagaaaacagtgatatattatttaaagaatttatagtgtttaagtacccaaaaaaatggctacaaaagaac

SEQ ID NO: 24765 - DNA, 1707 bp, Arabidopsis thaliana landsberg
gctaggtatccgtcaacttcacacattggcgatctccctaagtcctaatggaataatggtagatatcatttctggttttgatgatcatatgaaatctttattacacatttgactatatttgtaggtacatgtgtcatcatttgtgtgaaagattgagcatatgagaaaaatatctagaaatagcgcaacgatcgatgaaggaaaaggtgattgagtaaaaaaaacaaaaatagaaagtgagaccccagtagaaaggtcgatgtaagtgtttggtgtttgtcgtcagtaattagaaccggaaaggcaaattcttgactttttcttatcattggcatgtgtcatgtgcttgcttattcataactaccaatgagtttcaaaaaaatatctaccatggagatttcaaaaatatcttcaagtttatggtcagaaatcgttttttttgtttagtttctagaaattgtatagagatgtttctatttataaccttaagaacttactcaaagtcattttatttttattcagctagccattagtactagaagaaccaattttgacttgatcatctagtttagttaaagctatggttctctacttttttaggtgagttttttctttcttgtacgtagcttctttgagtttagaatgggaagctaatggaaaatatgctttataagaagagtcaaatcactctactgaaatctttttcaccggcaaaatctacaaatacgagagacctccaaaactcgttagaccaaaccgagaaaacttgagccgattaaaaaaaaaagagagaaaagtagattatttcatgatacaaccattaaattactcataaattatgacattaacatgataacatttttcaataaccaaagatcatgaaagaaagcataaactaatttatggactatatatagccatcatgtaagatatacctaaagtaaagagtgtaaatagttcaataaattcaactctggccaatacatcaatgaccattgacttcttaaaactactagtctccacaaaaatttactaccgactacgtaaactaccttgatcagtaaaatgtagtagttctctacatttattataaacggttgaactattatgaatgtaaaaaggagagagaagtggtaaaattgttgtaagtgtgtgaacaaaaaagatcacgtgggaggataagaaaacgaattgatgggttcatgagaatgctcttatcgcggatcttgcctctcttgaccactctctctctctccctttctccaatattattacttttgaaatctcattttataaaaacaattccttgataaaatattaaaaaattagaaagaccgtttttgtgttcacatgtggtgtataaatacatagaagcctcttcaatccaactccaaaagagaagcattttcaagaagaagtcttaaattctaaacaaaaaacaaaagcataaaaaatggcttcatggaagaaaacaatcgcaacaccattcaagaaagcggcaacgttctttaaccaaccgcagcaaacgaaccgccacgcaaacgcaaaggcgagagaagaacatgagaaacgaacggtgcaggagcttcaaggtgatgtcatggcttgtggttatgaagatgtcctcgtcatgtggtcaattcttgacaagtcaaactcttcaaacaacctctcttcttgattagaatgagaaaggaatccgaaatt

SEQ ID NO: 24766 - DNA, 1383 bp, Arabidopsis thaliana landsberg
ggaatggcccatccccaccctctcacgtcttgtctcttgtatccctattttctcattatcctcttaataattacaaatggaattggaaacactaactaatctgaccctttgtttgggtcttcttctcttggtttcttggcccaatggcttttggccctattttaattaatggggaccaataattagttaacttaaggttcatttaaacttttgactctccatcgttagttgtatgttaaacatgtagggattagataacctacgttaaggtaattatatgatcaaaacaaatctatcgcgtgacttgtgatgtgatcactaaagaagggtcccccacccaagtgtgttactcttgtacaattgaatgtgattattcccactccgcagagatatttgggttttatatgttcttacttagtaaacttatatatgattataagttaaactaatactgattcaaacaatcctaatgtttattctaaccctaaataaataaataacgctatttaaactatatatagttttcccaacctgttttcccatatccatatcaagaaccaagatccaatacaccttttaaaccctacttaaagtatagaaaatattggtttctgttttcaaaaatattatgtaagaggaagagaaagatagaggggtaggtcaaaaggaaaaaaaaggctttgaatttttaatgtaacattgaaacggtaacaagtgtatgtgtcttttttgtatggtagtagtgggaattgttaaatcgaagagagaacatgcatgcatatgaataaaaataacaaaaatagttaataatttagtgtgtttgttagagatgattaatcggccctctaagccatctaagtgcatctcatgtcaacctttctttcatatggcgtgtgactttgaccctttttataactgcgagcttcggtcttattggattcaagttcccttttaatagttcagttaaaggaactatagtgccaagtttgattttgatttcatttggataaacatgaattctcttcgttacgtgacaagcttccaaagaagagagtgacatacaataaaggacgtatacatacactatgccctctgattctctacagtatagtctttagatggttgtgacaaaaagggaaataaatacggattgacacaaacatttagagcatgtccattgcagggaccttacaagtttcttaagagaatcctaatgaaaagaagcaaaaaattaaatcaaaattgtctaattaaccaaggtgcgaaccttgaataaggtatttttgggtgagtaaggttcgctaacgtggcactatatcattggaggaccaataaaacaaaacaagtttttttcgttttttctttctctcctctctcttggtt

SEQ ID NO: 24767 - DNA, 1421 bp, Arabidopsis thaliana landsberg
aattcgtcaatcgtcatattgatcgatgttagagatcgattcttatctattatattttgatattagaagttgtaagcgacaaacactcgtaacaaattttgtagaataatttaaatattgtgcaagatatatacttaaaagttacaaagcaaattttccaaaagcaaagcacatgaaaacggtcacgatcaaatttggtattatacgtggaacttgcaaagttgataagagttacatggagtacgtatgttgatgtcgattttcattacatcgttacatccaaacagttgtctagtccggcaagtttttgtgttgatcttgttgcttttggtggtcaatttgcatatggtcttatgaagatattgatttgttttacttagtaataagtttggtccgtccatattgacaggtttgctggaatcctaaatagagagaatacagataaaacaacattaagtttcgttttttttgttggtccatttagcggttttccaaagttcgttttgtatcacgacgaagccatgatgaaagggaaagtttgttaaagaaagagaagatcttattcatttcttctcttacaatgtacacattgctttgtttatatacagctatggtataaacactaaccaactaaaccgactaaatacaaatgactaaaccggcctatttacaatccaatattttgttccacttaataacaagatcggtctgaacatggtccggtccgtccatttagttaaatgcagctatcctaattagaaaagaaaacacacacacaaaacaacattaagtttctatttttggtggttggagacaaagaacgatacgcgccaacatgtatcacgatgttttcttcagtaggagaagacaccatcattagcgttaggttggtgtgtctaattttctgtctagctgctgatttcattaatggtttttttttttctctaattatgtgaaaattgaaaatatactaatattaaaataagaatctaatccttactagtataaatttcgagtaacaatgtcttaaatatgtaatctaatccttactagtattaatcatatttgtttgtctaatgtatggtaaatgaaacttagctgggttttttttgataaaaaataccagaagtatacaagaatgataagaaagggatgattaagagaaggtgtccccttgtagtggaaccttatgttggaatgtgaagtaatgtgcctatttaaaaataccaatggccacattttatggcttttcaatttcagaccaacttagtcccaaaattgagaccacttaaattcccatatttggtgtctatattttatttttgcctcacatgtgtcaaaattgagatctcatgctttgccgttgtagaatttatatagcaataaatatttagttaggattaatttttggtatagtttaa

SEQ ID NO: 24768 - DNA, 1102 bp, Arabidopsis thaliana landsberg
  unsure (1)..(1102): unsure at all n locations
cctacaagcggtgtctgaagatccgacatttcctctcctcactgcatcaaaccaaaaagaaaatcaaatcaaccagagtttcaaaatccatcactgtaaaagtcaacaaggcctaagaagtgagcataaatctaccagaatgtcaaaaatactaaagattagtttcttgaatccaaaaagagtataataagcacacataaacacatacgtatacacacatgtgtatcagtgtatgtgtatgaaataaatctgtaagaagaagatagtgtggagtccatggaaacagagagctagtgaacagagagacaaaaagacatgaagttatgttctgaaagaacaagaacacagaaaatggttataatctttagatctacacatctagtattcctacaaagccatcaaagtctgttttctaccaccaaaataaataaataaaagttggtgagcaaagtttgaaactttgtttgaaattctccaagactgagatgattaaaattaaaaaacccacatagttcactagtgcgtgctatgaaacaactatgaaccaagtactgagagatctaacgacaggaaatgataagtcagcgactgagacagagagagaaagagaggtngagagagtcctgaagaatccaaaggagagagagagtgagaggatgagatgtgaaagtgtccccaagagtgtgagagcatttgtctttataataaaacgtgattcaagccagcctgcttcacttgcatttttcgctcaaaacaaggtattttttatttcccatttttttatataatttaaaaataaaaaaggtaataataacgcaaaaatatagaaattaagaaatatataatgtatatttttcatgggtttgtataagtggtttttcatatttctaagtttctttgttgttatcgcaattaaaaattcgatgttagttgtaatgttgataaatcacatgtgttatatttatgagcaattttttagtttataattctgatgtaagaaaataaaaataatttttttttacttatatcagtatttaatatatttttaccaactcttttaaaatttagaaattatatgtaaatcgaacctagagcttaatca

SEQ ID NO: 24769 - DNA, 1436 bp, Arabidopsis thaliana landsberg
  unsure (1)..(1436): unsure at all n locations
gttctaccgattggcttgttgaaaccttgcggaagctgcgtttttttttctcattctcagatgatgtttgtgccaccggggaattggggagatttgaagaagggactttgcgaacactcttctttggtctcgcaaactcagcctcgactatctgagaattactggcaaacttcttctgagattttctgagtgatgctttctttggctgaggaactggtttccagaagcaagatgctgaccagttctctaaccagattgaattggaagaatcattgtcgagggacaaaggcagcacgtttggcgatgaagctagaagctgataagaataaggcaacagaatcatccaccatggtcttctcaacttttcaaacatagtaatagtagaaacaagtatannnnnnnnnnnnnnnnnnnnnnnnttagcttattgattcccaagtaagaatgtgtatcaacaaccgagttggctttattctcctgataagacaaaaacattaatcaaagttaagagctattcagccaagaaaccgaaatcacagagaagtgcttgaagagcatttactaaaggctgatgatgcaaatgacatttcctctgaacttcaactccaatgtctgaatgtctgatctctctcccacgagcaagtgcttgcaatctgacaattcccataacacagcacagagtcgaaacagcttgccttctaaccatgtgaccacggataagtgcttgcacccttgtgatacctttgaggttctgagattcttcacgggcctttaagaaaacaacaaaagtatcagcaaaacaagacacacaaaaaccattactagaatgtcgaagatgtacacattcacctgctgagctctcaaagcagcttgaacctttgtagcagcttcttcaagcttgacttcttcagagtcattccctgactcaagattcacattcgatgactcatcgccttcaatgtctccacttagttgcttctcagcaattacaacatcaggaacgaccacagtttgagtagctgcaacttcttgtgatgaaactacaggtggttcggtaggtaactttgagacattattatccttcaccttcaccacaagctcttctttctttgcagatctcttccaaaacatgaacaatgtttacaattactcatcatataattttcccacagaacaaaaaaaaaaaaacagaacattcactcttcttaccaatttttcgcctcctttctccaaactcgatttcgatgacttctttccaagaagagacttgatccatttaccaggacttggagtctttcccatcttttctaatggctacaattagaaacttgctacaaaaatagaaacctgcaaaaccaaaacacacatttcgtcttaaaacgaaaaaagcctgacactttcaagtaacacacatcaaatatacggtcgcaaaagtc

SEQ ID NO: 24770 - DNA, 971 bp, Arabidopsis thaliana landsberg
tgatatagtggaacaaagtagtccaaatttcaggtgactcacacatgagaaggaaacactaaatttgagttactccatctactgattactctttttcgacatgatggcttacatcaaccatgttactcaagaccttgattctcatttagaacattagttattccatccaaaaacagtcattgggtttgagaaggaaaaagaggcttcaatgtacgtagagtggcatcaagctcaaatacctaggctcagctctttctcgccacatatcataatatctgtgacattctcttcggcgagataatcgtgaaaatattgactgtgggggacacattacctcggtcgcgctttctcattttaggatcaaacactaaaaatataatcattatcagatgttccttcaacttaataaatttaacgcctatatcttcgttgttattcctacaataatcatattttttcaaacgttattttttgtaaaaaaaacttttaagtagtcttcttttgcaactttagctctcatctccaaaaatacagctcaattctataaaatcaaaataaatataactctcatacagatcttctaaaaggttttacaatcacatgcattagattttcaaagttataaatgtggacttgaacttctcgttgcgaggattttgaattgatattactatttatcaaaatttacaaatttgacaatgatgacaaccacttatattgccttgtacttttaactctgcggagttgatatgtatctttttagaaatggaagttaaattttcaaaatatgaacaaataatgcgctgctgtgtatatgtgatttatgttagtattcaaaagtcggtttaaacaccataacaaaattacacacttttcacttttaaaaaaaaaaaaacgtgaaaattctcttaaatgattgaacgtctttcacattcaaaaggaataataccaaaattcctaagatatatcat

SEQ ID NO: 24771 - DNA, 529 bp, Arabidopsis thaliana landsberg
tccaactcacaaggactttctggccgagtttgacggatagaatcacatcggatcggttcaattcgtcgacaatgtggagagaaaccgtcgaagaagacgccgacagccaggttccgtggggcgaatgatactgctctctctttccgagaggtttcagaactggatgcggagaaggagaagatggatagtgaacaaaccgagcaaaaccgatcgtccaccggtaaatttctgaagaatcctccgcgtttctacggcggtttgatgctgttagagatcccgccatcttccaaagatatttttctccttttcgaaattttcttttttcttcgttgtctttctgttacgaatgaaatttgaaaagcgtgctgtacggaatttatatttccatagtcgctctctgctcagattaaaaatattcatttgggcccaaattcccaagcccaataagctgtcttcaaagtttagtttggtataattgtggttctattggggcccaaatgaacatattattgggcttatttaaattaga

SEQ ID NO: 24772 - DNA, 2217 bp, Arabidopsis thaliana landsberg
gtacttcggaagctcgttagcagcttatgattctattttagaaggttgtgcttctatttaaaaaatttgatacctcaaataaataaaatatgaaattatttttgatagtttttgagacaaaaaacaatagtaattttctaattattatttctgcgtacttagtttttaaaagatcatgcgtagaaacatgataacgacatgaatcatatatttgggatatgttgaatttaattaacttcgaggaacttgagtttaatgatggttaataaaatttgaaacaattttatttgatggatataggaaaatgaggatgaagataatgattcgatttttttttactttgaactgttctatttattgtaaaactaaaatatttgattattatttgtagttgaggtatttacatttatgtattagatttgtgtggttaattatatttttatatgatataatgcttaatatttagttataatttacatatatatgtttctaacacgtacccaccaaggatggatctaaaaattgcaaaaacaaattctgaagaataccattttcaatgaatttcatatttcaaaaatatataatgaagcaaatttactaaattcactgaatataacttttaatgatgtttcagaatgtagataatgctggtttacatttatcacctaaaactaatttgttatataaaatacgaaaactaattatgtgtatataaataaaagattggaatgaaattttaaaaactataaaataaccaaccatgaaatataaaaacatgaaaggagtcaatatatactaaaataacaaagagatatgtgaacaagatttgacgaatcgaacaagacatcttcaattttactgggtataaacgccactgacctaacaaacaattatatgttgtgttacaaaattttcaattttgaatatcggcatgaggcatgtaggagagtgatttagcaaccatgttaattcgcctcgaaccaagaataaaccgaacctttaaaatgttttatcaggcacataccaattctgtttctccaatgttctctcagctgatggagtttgcacaaggaaagatagtgctggcgttagagggagggtacaatcttgactcaattgcaaagtcttcacttgcatgtgtccaagttttgcttgaagacaaacaaattcaaggacctccggaagcatacccattcgagtcgacatggcgtgtcatacaagcggtatggctctatatcatcctatcttttaactttcttatttcacaatctgaaacaaccttccataaatgggctgtagtcctcatgttactagttgaccaaaactcatctgtttcttgtgggtttaggtgcgcaagaggctatgcacatattggccttcacttgcagatgaattatcgtggaagctaattaatcagaaaactcctactccagttgagcacccttctttttgtctaccatttcagttgttcattgttcatcagagagcgtttccttgccagatcggatttagaaaaacctcactatttttagcaaccacttcttaacttctttgtctctatactaattttcctttgcttgatcttctttttaggcgacagactcggtatttcttatcacataatttctttcttatttgttcactatagatcatccttatctcaagctccgactctgaaactgaagacgacgcccaaggactcctggatcaaatgtcgaaactcagcattgaaaaccctcaaggtacactacttgaaaaccaccaagtagaacctgcatctacatcttggagagctgatctcgcaaaggttgacgtttggtatgcctcttttggatccaacatgtggaaaccaaggtttctttgctatattcaagggggacaggtaagtaacctgttttgttttgttttcggggtcgagtctggactttggtctaacttgacacatctatggctgtttgtgtttatttttaggtcgatggattgaaaaaggcatgcgctggctcaatggataaaagtccaccaaaggaaacagtgtgggaaacatttccacatagattgttctttggccgtgaatcttgagtcggttggggtgtaggaggagttgctttcaccaaccgccttgctgatctaatcgagcagactcagctgcgtttgacccgtatcgccttaagtgatcaacactaatgcgaatgtaagaacaacgtcccctatttgatc

SEQ ID NO: 24773 - DNA, 661 bp, Arabidopsis thaliana landsberg
gaatgtacggcggtggcatataatacggcgagtaatagccgtaagggaagaaattgggagggtattgctgcctaataaaatttgtctgttgagtggctgctgctatggagctctgatctggaggatatgatactaatgaaatagctggagagttggaatttccgggctgcaaattagagaaaagcagttatcgaaaaagtagagaatagatacagggattgtttagagtgcatatactgtgacaagatataccacatacctgagtctccgctgcttctgtgttaacgggttggcctattgctgacaacgaggggacaagaccaaacacactgagtggagcttcttgaccataagcaatttgatgagtttctgtgtttgataaagcttcctccttcggtacttcttctacaggtgggacaatgtgatccgagtgcaccacaggctccgctccagttgcagaatttgatatcccatatatccctatcttcagaaacttgtgatgtttccttctctgcacaacaagttatggtaatgaaaatgagatacaaacctgaaaattggagaatacacctctcctactatatcacaagacaaaacctttttatttcccaaatttgaacttataaaagcctatttttatatttcactcaactgaaaccag

SEQ ID NO: 24774 - DNA, 1657 bp, Arabidopsis thaliana landsberg
  unsure (1)..(1657): unsure at all n locations
ttatcaatctttagtaagtctattttagtgttgtcaagtctgaaattcgtttaaaatgttagttcggatgtagaattaccattgaattgtgacgaaaaaaataaaataaatacttaccattgaattagcgtggatcaacaaaattaaatcttttactattattattcctagaaaccattaaaatacgtttagttttggttatctattaaaatgaatactaagaagctatatatgtaatctgaaattagatatagtttagaaaatttaacatcatgactattttgctttttcaaaatagggttttctcaaagtttccaatttttacaactttacctttcacataaattttttaaaataatactataaaatccaaaataatcttatacatacattgtaaaattttcacaatcacatacatttgatttttaaaattctaaaaatagagttgaactcctcgtcttgaaagcttcgatttgatatattatttattaaaatttaaaatttgacaataacgaaaatgactatattgcttattatttttgacttaataagattattctgaattttttagacgttaagggtaaagttgtaaaaatatatgattttgaggtttgtattgcacaaaaccttaaatattacctcattgttggttgcggctaaaaataaaatgtttagaagaagaactatgatgtaaattttctaccaaatatctgagaggcatatgagcttggaccagcaatatgtgtatccgcattgttgtgtctttatatgcataatctgcaaaatttttaatccctttttatagatgattctttctaatacaatatcacctcatcatcatcatcattggtttaagtataactgatattgatagttatactgtataatttaatatatatatgaacaatattacaaacatatacaactctgtaactagacaatgcaacaagcattagggttttcatcactgaacaattgtggagcgtatacgtagtggacaaagtaaggtatgtttccatctttatctttttggccctcaacttttactatctctttatactccacaacttgagtaatcgttttggtcacttctacttttacttcttctatctttttttctccttccttctttttattctcctcttctttcttcttctcttcctctttcttcttcttcttatcctcttcgtccttcttcttcttatcctcttcttccttcttcttctcttcttcggtctttgagcttatgatctctgcatgtttgtgaactttcttctttatataggctaagagttttgcggattctatcgtcccttgtaccgttagggtttgcgcctttgtatcggttttgacaatgtgaatagctgccaaaataaccaagttagaatccaagccctgaactaatgagtcaaaataagattctgaaatttattgcgaattccccacttaattattttgaatatttctaacgactcaatcttacctttatgtttcaagagtttgtgctgaagatctttgtcacactgtgcgcaatgaatgtgtacctttagaactgtcgtacgaataacgtcctgtggatgntagaaagaaaactcacaaatgctttcacacacgtataggtacatatatatatggtatgcgattatgaagcaagatt

SEQ ID NO: 24775 - DNA, 2693 bp, Arabidopsis thaliana landsberg
tgttagacttgattatagatctacagtttggatctgaatcatcatccttaggcaaacgaccaagaagcttcaagattttgtagttatcacgagatacattgtcgtcgtatccaatcccaacgtaatcagtgtgcaagtaacaaaccgacggtttgatccatttaatttccctcaaaaccggattccaaactgcgagactgttgtcccattttcgacacgtacacagcattagtccatcacagtgaaccatggaataaatcggatacaaatcgcgaaactcgtccgggattagtgcgtctgagaggatttcggtcaccggatcaatgatctgttggtcataggttcttatgaatcgttccggtgagtagtgatccaagtgattgtacatgaatctcttctcggtgatgagattgtaccatttcttgcacgtcgatttgaatcggatcaaggattcggcgggaatcttgtaaagtatttcttctatcaactcaaatggtagcgacggcaacaacaaacactttgaggaagccatgaacgatcactggaaagatttgaatcgaatcagagagatagattcttgaataaggtaggtttctttttcctttctcagtttttctgttaagtacacaatacttggatctctttttaatgtgaaagaagaaatgttgattattatgtacaaaacatcacaaaccctctctatcgacgtccggattcataatcaacaaaagaaaaagaaaaaaacaattttttatatttggaatccaaaaaacaaatcaacgccaaaaattaaaatcaaataggaaaaagaagaaagaagagagatatgaacaaatcaaaacccttcgaggctagttctcctaccactggctgaagacgatcttcgaacctcttcccgagccatttcctccaaagatgaacacgctcgcggcggaaacactgggggaaacacgagcgtccgtccccttgtgggtgagacagacggtcgtcgtggtggaggtgacggtgaaaaactcgaccttggtggcactgatgccggggtccaaataatcgtgttgagactgcttgatcttcccatatgtttccttgccacgaccggtgcggttctctcaatggaacctacacgagtacttcatgtcctgtatgatcttgagttgatccacgatgtttctcatggttggacgctctgaaggctccacctgcagacatttctgtgctatatctgctatgctcctagccgcttttgccggaaaccgacctttaagctgaggatccattataagcgagagcctgcaatcatctgctagaaaagctctgctccaatttcactaagttcctctcttctttcgggtaagacccgtccatatttttccgacccgttaacatctcaagaagaactattccatagctccacacattgctcttcggggtcaaaagccctctctctagagtctcgacagagagattagcaagtgccgaactattagatgtctctgtctcaggcgcatggcctgcacaaccgtatcctgatagcttggcgctgaaatctttatcgacttggatatttgccgtcgaaaattcattgtacattgcctgttcatacagaggaagaaaagggctcaatcacaacaaaccttgttaccacccaaattcacaaatgttgatggagttttgtttagcgtacctgaaaagggccttcttcgtgcaagaaggttagaccctgagctgcgcatagtgcaatcttcattctagtgttccaatcaagaggaggcccatctgatctcccatgcagtaaacggtccaagctgcccagagcaagcctctcgtacaccaacattcttgtgtcagaaccgtcacgagcatgatagcctaccagcttacaaaggttctggtgttgcagcgacgccaatgtgttgacttcattaatgaactccctaatactctgtggaatcataataaacaatcttaaggaaacaaacaaatagatatcatcaggattatgaagaaacatgaccaaaagaatgtttatatacctgagtaattacgtgaagtcgtacaacagttgcgtcaaccttctttaaacctgaggtcgaagcctcatcaccaaaggaagccatgtacataacagatgaaagaccttccatgacacatcggtctgaagaaaaagcgttacacgcagccattacttcatcatatgaaaagctcctaactgacccgctaggtggcaaaggtaaaggtccagatacagctgcggatgatgataaccgaccgctgcttccgttaaacgacttaaagcttccccaattcttcaatgaagaaccagttcttggtgacggtaacggaagtggttgagggctagattctttagtagaagtacgtggatctcttggttgttcatcttgctcgtcgtggtaaacaccagcaagcaaatcccgttccgctgcaccgtggatgcttgacggagcagacatgactcttgctcggctactcatctctccgttccaccgttgttagattgaattggcttcacacgagttctgaaactcggaggagctgattgtaaattacgacttggaatctttggtggctcaggtaaagcagttggcttgctttcttcaagatccaaccgcttcatagaaacagagccacgtttcttcttgcttttcaaagggaaacaccccaaaaccatcttt

SEQ ID NO: 24776 - DNA, 705 bp, Arabidopsis thaliana landsberg
caagctacacaaggaagaaccaatagccctgtctcaccaaatgcacctcctaattgctctactaccgccaccattaccggtaatgttttctatgccaccacaagaaaagaactcccaaatttaagagatcaaaatcggttctaaaaggcaaactctattattacctggcttgaaatgagcaaaactgcagtgctgttttccttggagctcttgctaccacctgtaagaccggagaggatgcggattgaaacagcattgaatgctagtagagaaagatgcagcaatctgtaagaagacgtaagaatcttctgtcaaacgtaatccgcatttctaacacacaagccaaatatttccatgagcttcttcacttggtatcttttctatatgttaaaagaagaatgcgtacattccaatgccaactgctgcaaggaaaaccttaggttgaacggatagtagcagtgatcttgacctgctcacttggatccatggcacctagaatattaatcatggaataaacactattaagttcccaaaataaccaggtaaatgcaataacaaagtcagaccagttgaagtagccagggaagcagaggttaaactataaaaaggaaaaaagtattaagtccttctatctccaaagtcataaccgtgactgcaaatatggtttttgcaatttagtaaaagctttggattggcacatcaatg

SEQ ID NO: 24777 - DNA, 1181 bp, Arabidopsis thaliana landsberg
  unsure (1)..(1181): unsure at all n locations
gtgataagatcacggaaataatacctcagcatggtataagtattgatcttggagttcgagtggaagcagtgcaagtcctgaaccggattgttagataccttcctcatcgtcgttttgcagtcatgagaggaatggcaaacttcatcttaaagcttcctgatgaattcccactcctcattcaagcatcactaggacgtctgttggaactcatgcgtttctggagggcttgtttagtagatgacagacaagatactgatgctgaagaagaaaacaaaacagcaaagggaaatgataggttcaagaaattatcttttcatcaagcagcagatgcaattgagtttcgcgcttctgatattgatgatgttggcctaatatttcttagttcagtcgacagtcagattcggcacactgccctagaattattacgatgtgtacgtgctttgagaaatgatattcgggatctcatgattcaagagcacccagaccatgttatgaaatttgaagctgaacccatatacatgatcgatgtcttggaagaacatggggtaagtagcttctgtgtagatctcaccatttcagaggctttttagccttttggttgattatggtttaaaaccgtctggctttatagaaaattaagatttgtatcctttatttctttcacataataggatgatattgttcaaagttgctattgggattctgcccgtccttttgatttaagacgagattccgatgccattccttctgatgtgactcttcaatccattatctttgagagccttgataaaaacaaatggggtcgatgtctcagcgagcttgttaaatatgctgctgagctctgcccacgctctgttcaagaagccaagtaagtatatttcttagctgcattatctttagtgtgtttgctccaagtatattttcctaactacatcatccttggtgtgttttcttgagtcttctctgaccgtcaacgctgtcctaccagtctataaagattaaaaaagtaaagtaggctttatggatcaacaatccttcagtaaaattcatgccctagtataacgtgcaaataaatttcactttactgtgggaattttaaaatttaggaagaatttttttgtctcattttattgccataactcttttgctattcttaataacatgaaggaaaggntttagtg

SEQ ID NO: 24778 - DNA, 1125 bp, Arabidopsis thaliana landsberg
aaatgtgaaatgtgttcaaatcccaaatttcctcatttgaaagtcaccaatcaaaactggtaatgtgaaagaattacggacaatttatcaatttagtgaggatattagatatgagtccaaatttttagaccaaacatcagtcgaatagacaccaatgcacccttccactgattttcacttcagttgttttccctagaaaaacattttgcttcaaaacccgactatttagctcgtattgctacaatccattcatgtaatttgcggtctggttgtcgatgccactagtttaagttatctctatttattaacaactctttaggtgaaaataaataatctctcctaactcacagttatcttataagttactcttcttcaatatcaaatgtttgtcaagtcttgaaaaccaaggacttattattattctgaccatccaaacatttgtttagaataactaaattcccaatcacaaaattcttgagtgattgtttcagtttgtaggtatattactatcacatgcacaatttctaaacatgttgcacgtacatgtacgtgggtgtatatataatgtaattcaaagacatgccaatgcttaacttcttcactttgatagaaacaaatagtgtacatgacatagcatacacatagaaattagcagtagataaaaattgttattggatatcaaatcgatagttgcataaacttcaatatataatatcactaaatttagtcctttcgtacgatttagcttttttttttttttttttttttaattatgtatagcttacatacgcacacaactaaatttatatatggattataacctaacaatgatattttacaaactactatattatgttttttcattgttttaatttgttaactaagagattccgaactgaaaaatccatttatatatttttagacgattcgaagcaacataaataatttatttgtaccgtttgtcatttattcatatgatttcttaaattatttctgaatatttttccaatcaaagtagcaatttttagtaactatactatgttatgtataagattaaaaaattgtttgttctataatagttttgacagtgatggaaaagagtctatttatccagaaaatgacccc

SEQ ID NO: 24779 - DNA, 1866 bp, Arabidopsis thaliana landsberg
tatgagtttatgacagacatgccgtagaacatttaggtcccattaacaagagtcggtccaagacttttgccgttttgcgacttttaggcctccttcttgtaaaagctttatacgtgaaagtttatttttaccccagtaaagtaatttttattccacattgcagaattttacgagaaattttactaacaaatttacgataattttaattttcttcatggtcaataatttttatttgttgatgataaagcacttgtggatttgtttcttatatacacacactatctataccaaattataatgtccagaaatatagaattttatttctttataattatgacaaaacaacttacatatttatatctctagctatttttgacaaaaaatatctctagctattttaaaactttttatttaagtttcatcataatgtaattgatatgtaattaattatcaaaacattacaaaaaagaactacttgtcaaattcttataatacaatgtattaatatttattgataaaacaataatttagtcaatattacaggggctcaacaagtaaaaaataaaagtcactcaacatttatcaaactcatcaatatccagattgtgtattagaatcttgcaattacaataaaacacaccaatgaagaaacaaaaatcctcaactttacctttcttctctctgtctaaagatggagtcagagccagaccaaagcttcaaagacctctcatggtttcttcaagcaatcaaagacccacaacaaacttttttcaatcttcaaaccctatctttctcctcttccggaaacaccacgcattgtcagctaataacagagagctccatgaacatcaacgtcactagagacaacctcacttcactttcccagatcttcatcgagctagcaacatccttagagacgcagacatctctcaggaacttggaattcgaaggaatcttttgggaaatcgagctgttgcagagcttgggtttgttgttagacaacacctcgaagataaagcagcttgctttcagaaagaacaggttcagtgaacaatgtctcaacgagctctcagagattctgaaaagaaacaggtttttgaaagaggttatgttcttagagtcgagtattggatacagaggagctacgcttctcgggtcggctctccaagttaacgattcgttagaggaattgcagatttgggaagattcgattgggtcaaaaggagctgaagagctttcgaggatgattgaaatgaactcaagtttgaaacttttctccattttcgactcgagccctttcactgctacgccattgatatctgctgttttgggtatgaacagagaaatggaggttcatatgtggagtggagatcacaaacgagacagaagcctaaagcttgttgagttcttgcctgagagcaaaactctgaggatttaccagattgacatttctggttcttgcagagtcgctgcagccttggggatgaatacaacagtcaggtctctagatatgacgggtgcgaagctaaactctcggtgggcgaaggagtttagatgggttttggaacagaacaagactctgagagaagtgaaactttcgaaaacaggtcttaaagacaaagctgttgtttatattgcagctggactattcaagaacaagagcttgcagagtttgtatgttgatggaaatcggtttgggagcgttggtgttgaggatttgctttgtccattgagtagattctctgctctgcaattacaagctaacatcacattgcggtcaattgtgtttggaggttccaatacaaagattggaagagatggacttacagcagttttaaagatggtgacaacaaatgagcctggggt

SEQ ID NO: 24780 - DNA, 1039 bp, Arabidopsis thaliana landsberg
tcccccccccgaggctgatattgctctgttttctaaaaacacatttctgcacacaacgtgttcgatcaaatgcctaagagatacatgtgatatataggacgcgtcttctcactcatttttttttctgaatgtttgtggttattgcagtaattccatattcgcgtctattaaattcatgggagacagttaggccggagaaatgaagaggcttagactgaaaatttttggttgttcttgagtataaagtaaagtacctatctttctctggtatggttgcttactcataatgcctaatagtttttgaagtatttaagtatcaaattgatttgatatataagcacattgttgagtagtttgaagtattaatcagagataatagtgttaagtatttggaattcaattgaactagcgccactaatgttggaattcttatgttcaggctgcctcaaaaggtgttgaattccatgataaaggctcctgccatgaagggtaaattttgtttacttctataaaaatttgtcatgcattttcattgggaatgatttcgagctatatatcctttagaagcttatagaacttactgtaaaggcacaaactttttaaggattatcagagcggtgctcgcaatggcaatttcgtaacttaggatatgatttccgtaagctgaaccatatgcggatctaggaatgaaaatagcatagtttaagcaatcatttctaagaatttgtatcactattcattatctttgttattcctaaattattgaactctcgcaaaatgaagaaggaagaatttcaaagtagactatgggattcatggggatgtaaactttagcgttaggcttaatgtgggttgtttttcatgcactatgttagtaatttggtttttgaaagtctctccttgtgtaattgacagcaataaagaagaaacttgagaaagatatttacggagttggaagtattggccttttcactgatttagacagagaggtacagaaatacctatatgtctgcatgttttatggtatttgattatcttt

SEQ ID NO: 24781 - DNA, 1337 bp, Arabidopsis thaliana landsberg
aaaaaggattcaataagcagtcaaaaattttcggttacaataattcacacggattacatgcttgctttaaataatacgaccagctataagattcagttacgccataaccatagaacccgggcacactttactacttgctacttgcttcttcttttttacggatgcgaaaacaacaacttaaaaatccagatacttttaccagtcttattacaactcagtttcctgattacgacttgtacgtcctcggtaatggacttggcttaaaaacagaatttgaaggcttccaaattaatattcgacccataaacatatattttgaaacccccccccccctaaaagatgtcctatatgggcctgattacaagaagcaaaaaagaataatagctcaaacattgggtagagaaaatggaggtcgtttctcaaagagaccaagcctatagtcaccaagcttagttttgtaagcagataacttgtattgagaccaagtaaactcattataaaggcaatcatcttgctttggcacaaggcatgacaatggtgcaatcttctcgctcaaaggaggacctgcgaagtagatcatcgatatccttgaccttttgtatttgtcaccactctatgtttcacactcttgaatcttacgtttgccatcacctgcattaattgtcaagagccaccagatactccttttgtattagttcctatacataaagtctaaaactgcaataaatctaagaatatataagtttctataaaatttaaaatatcacccaaatagcacaaaatataataaactcataatgtaaattagtagtgatagatatataattaaaataaaaagaagtagcaacagaaagagtacctgaagagtatctccgacaagaacgaagaaagaggagtgatcaggtgtaacatcaacccatgttccatctttgacacagatttgcaaaccctctgtgtcgtttgatctgagcagtgatatcaactgtggatcagtgtgctcaccgaacccaatctcttccttgaccggagtctcttccttctccgggtaatggttcattctcaggcacgaatcactttctttcactttcaccaaacggctcagcttctcctttggctctatctttagctcttcctctaccatttccagaaatttgctcgacattctcttcatctctttaatgtactcttccactgcctttctgttgcaatccaaaaatgtatgtttaagaaacagaacagaagatcctcggtttttttttttttttttttttggggtttaaaagggaccaaaatttttggaaggttaagggaaaaatcttttttggttaaaaaaaaaa

SEQ ID NO: 24782 - DNA, 652 bp, Arabidopsis thaliana landsberg
actttacgttttgggatatatacttccgattacagtttccgtgatttttaattcttcaatgaatgcatttgttatcactttgttaatttaattataaaggactttgattgattgattgattcctcgaataataatcaaagtgtacagatttggaatgtgtgaacgaaggaaaggaacgtctgacttattatcagttttgaccttcttcgctttactttcttctacgcgaaatttcggttcggtttggtttaatttggttaaggttttgaatttacaagaacaaaattgatattagttgtattattcggtttagttttctaacagaaacgtaattttaaatttcgaagattcgtgaacaaagcaagcattattcgcaaccatgacacaactacgtactgtagattttaattagtaatagaagatggtatacctaccaataatctatagtaagtaaccaataatctatagtaagtaacagacacgtcgatgaaatgtcaattgttcgattttttttcatgaatgattatcacaattgctacaactattcaaatatttgctctatttataaatttagcaaaatgaaaaagtggagcgttacaactccacgactttgtggtcttacaataatccattactcaaccatcgatgctga

SEQ ID NO: 24783 - DNA, 1208 bp, Arabidopsis thaliana landsberg
  unsure (1)..(1208): unsure at all n locations
tttggctatgctcacaaaaacagggtaaaactatataaaatagttgtttgttaattgtcaatataaacttgtgtcgtcagatataatgttggcttatgtatgtctatgagaaatttggtttggctcagtcatcatcttagcttcccacttgacctcatctagattgttatcatctgctaaaagtttagacatgaaaacaatatgggcacataatggactgggcctacgaagaggcccaatgattgcattcctaacatatctagcctcaacttggaatatacttgcatgggaaagggtttagctatgatcaaaatgttgataactttttggaatacatttttgatcattaactcaagttaagaaagattctctacaagatataaaactaatttattcatgtagcaataaaatgatgagtttttgcaatatgctaaagccatacctttcctgttttttctcaaatcgctttcttctttatgaatccaagaacaaaaccgttcttatcctaaaagttcggaactatataataaaccatgaatcttagaccttagctcacaaaaaaggccacagttgtttcaaaacctgaaaccaaaacaaaatggcggtttttggatatgaaatggatgaacatagagcttcttcatcgagacgannnnnnnnnnnnnnnnnnnnnnnnnnnnnnngacgatgtaacatatatttttctttccgttttcacattaattttggttctttttctaaaggatttttctcttgaaatgcttgtagttgctgatataatgttctggaagaacaagaaagaatcaggaacaatcttgggggtattcacattgatatggttcttgttcgaagtggttgaatatcctttcatcactttcctctgccagatcctcttactattcattttcatattcctcatttggtcttacattggctcctcacaactaatccagaggtaagaaaaacattaacactacttgagatatacttctttatgaatcaatcaaccaagctctcaagaaatgttattttgcgcagtaaacctccgagtattaatgatctaaggatttcggaatcgaattggagattcttgttcaacaagataaactggttcatcatcaaattgtatgatatttcaagtggcaaagacttcagactcctttttctggtataaatcaatacacaccatttcattttaattatttcat

SEQ ID NO: 24784 - DNA, 1078 bp, Arabidopsis thaliana landsberg
gtgacaagttcgattattagcaatcgataacagctaatgtagttaggcagaattcgagtgtctgaaccgatctatccaatatacttatactattatcgtactatgcatactgtactttgtattttgctaagtaattgtgaatcaaaagtaagatcattactttcctcctctatcctctgactaatatagggctccttcatggacagtcttgtggatgtgactcaaaacatctgtagaagcaacttttgtgttctctcactattcttggtccaatctagatatttctatacagtatagtataattttttccttattttcggattttccattcacttttgttggaatttttttccagtttaagagatacaggaaaaaagttctcctcttaattactctaattattaaatttactaatcctatttcaattcctctcatttccagtatttcaatccactgatcgtccaatatgcaatatattttacctttttaacacacaatgttagtttcttgacagatttgactttgaattttggtggagattagtaaaagaattaaagaaatatgtagtggaaatataaaaaaatattgaactgggatgagattacacaccagacaccacttgccaagagaacaacgggctcagtcacatggtcctaaattgaccatttccataatattagctgccaacaaaatacataaaataaaaatacggttactttcataactccccttttaatttattaatattttaaaaattaagcagaccttaattcatcatcttttagtgcgttacaaactaacagcgttacaaatctctcttagtccaaaaaatgtgactaaaagatttctcttttaaacccttaaaaatctggaatcaaaatcttttatattttcaacttttcttttggaaacaaataagaatgtagaattcgatcaatatgaaagaaaaatgaatggtgttagatttgctttggaaatatgtaaactaacagtaattaaaatgttttagtcattagcaactaaaacagtaattaacttgttttaaagtaaattgagagcttcctagcaaaatatgctc

SEQ ID NO: 24785 - DNA, 2248 bp, Arabidopsis thaliana landsberg
gtacacttcacttcttaaaccgttttttcaacttgatgataaaagccgacgtcttcgtgaccaacaagtttcacattctctcgagctaaggtcttacagaaaacgggtcactgcgaaatcaggttctcaaggttgggactttggtagattcgtcaaaacattgtactttttcaatggaccaccatctcctctaaaggtatatatgaggacttttgtttgattctcattgagaggtgtaatatagtcatttgaagtaattgattgtttcttgcttgtgaagtttgtttcatcggtgtttgagaaacttactaacggagcaacggaggaaccggttgctgaaatgggaacttctggaatcatacttgtggctggagctactggtggtgtaggaagaaggattgttgatatcttgaggaaaagagggttgcctgttaaagcattggtactaaacttttcgataggtttctcttttcttgtgttttaattctgattttgaaaatgtgggcaaagtctttaactttttggggaataatcataggttagaaatgaagagaaggctcggaagatgttaggacctgagattgacttggtgagtccactgaaattttccacattgtattcttgttatttttatagttataagaccattgataactatctgcatatatttcaatgttgtcagattgttgcagatattacaaaggagaatacgttggttcctgaaaagttcaaaggagtgaggaaagtgatcaatgctgtttctgttattgttggtccaaaggaaggagatacacctgagagacaaaaatataatcaggtcggtgaatttttctgaatggaatttcttaaaagctttgaactttagattctagctttgagaaatgactctgtttggatattggttataatgcagggagtcaggttcttcgagccagaggtactgggactataagaacatttcttgagtattgttttgatgaatttagtgctcaatgttcaataaaactaaaacctatagattttggttattcacagataaaaggcgactctcccgagttagtggaatacattggaatgaagaacttaatcaatgctgctagagatggtgttggacttgagaatgggaagctatttttggtgtcgggggtaagttgggtcaaggaacttgattaggtttctatgagttgacatggcattataaaagacttaccaatatatctgtatagataacacgtttaaggatctaccttggggagcattggatgatgttgtaatggcaggtgtcagcgaaagtaacttcatagtagatctaaccgctggtgaaaacggtggacctaccggaatttttaaaggtttgataagataacaactctatttgccattttccttctcttggggttttacttatataagcataacatgttttgttaggaattgtttccacaacaaataatggcggatttacgagtgtccgaaccaaggtaaagggtacgactaaatgtcagaatctctccaagcttttttatccttcgttatctcactgaagcatgagtcttacacttttcttctagaactttcccgaggcggagaatgtctctgcatatgatggtctagagctaagactaaaaggtgatggactccgttataagctaatcgtccgaacaagccaagattgggatactgttggttacaccgccagttttgacacttcaccaggccaatggcaatctgtaagtaaaatcacttttgtcattcattttcgatatacttttgtgggtagattaattatagttctgttactttaaatcataggtacgcttacctttctcgtctttaagacctgtatttcgcgcacgtacagttacagatgcaccaccttttaatgcaagcagtatcatttcactacaggtttgttttcctttttgtgttaaccctcttaaaattcccattctaaatgtttgattaataagttggctatttttcagcttatgtttagcaaatttgagtatgatggtaagcttaaccctacattcaaagaaggacctttcgagcttcctttatctagcattcgagcttatatccaagaccccgtcactccaaggtctgatctagtttcttgctttttagaaaccaaactcttcactaaatgctgaactagcatttcgttactcatcgttacaggtttgttcacgttggctctgcgggagtaactcgaccagagagacccggttggatctacaacagcctg

SEQ ID NO: 24786 - DNA, 819 bp, Arabidopsis thaliana landsberg
ttgtgtacacgaagcaactcatccttaaaattcaccacactaccatgaaaacaatttttgtatacaagtaaggcaaaagcaatcgaacaacaagagatgaaccataaattatatgtaacagacagaacctgagcttccattgattgtgtgattgctggcaatttcaacaaatcatattgcctaatgcctgattcgcgacttttttttttcttcgtcaaaataattttaattaatttgaaagatcatcatacaaagtgtttacaatccaagtgggaggattttgaatgtcagaataaaaactaatgtctatgctcccatgttaagcaagattatgagctacttggttacaacaacgatttacatgagagaaataaacttctttaaatttagccgcccaaaacttgacatccgcgtagatgccggtgatagaagaatctattgattcattgttgatgctgtcaattaagattttatatgtatatggataatacacataattactcatgtatacaacatcttctataaagattttaaaaatatttccagttacatgataacatgaaaaatgattagttctatgggtacatattgtaattcttttgaatgtatgcatctaaccttctagagtcattgtgctccattattgtatctctattaacggttaccatcaaattttttgcatgtcatttaaccttgtaaatttattacaagaataattaaaaacccgattacaattcgaaagaaagtacatccgtcgacccgagtaattgataaaaaattaacccaaaaataaaatcgatggtaccacacgcgatgtct

SEQ ID NO: 24787 - DNA, 1056 bp, Arabidopsis thaliana landsberg
catcaaaaattctgttataaagaataataattataattggttatgtttagcagaagttaataaaatctgaagtttaaaagaacttgttagcgtgtacgaacaattcaagtgttaaaccaatatacttacggatcggatgtatataagatttttttttgttaatggtgtatgcatatatattaaaggttatataaatattgagttgtgatggttgtgagtacgaaataaggagatggagagaacgacaaagaggtgtgcggaactggggttggtgtccaacaaagaagagacatctaatattatgttctctacgttgggatcttttctaagtgacccacttttgttttgctgtcttatatgtatatctcactttcattatttcatctatggacgactacaaaccatgcatccccattttgccctaccatatgctctacatccatacgtgcgtctccaaatacatacactttatcatattcatatatacatattattcatattacattttcaatatgtatgtgtatatatatgtgttataatttataacatatatatgtgagaaaaatgatagcaacacaaaggattcaacacatatttacgtggtttactgataaatatattggctaagtacacggacaaatgaatcgatttcattactagctagagacaaaaggatgagcaaaatcatgtgagcctagacccaaagagaaagaaaacctaagccaaaattatggtccataaacagaataactttagcagactctcgagctaagctatatgtcatcgaattcagtgtgtgttcagtataacaacaacggaatgcaagaaacaccatgttctaaatatgactaaattttgataaatgagtagcatgtaagaaatacatttgtttaaatgaaaacaaattatagtatttcccaattatacatttttcgaaatttatttgtatcatatgatcagtttacttcattttaatttatcgcacttatgcaattatcaccgaaatacgataatgatgtaataatatgctaaagcaaagaatgtcaaactattaca

SEQ ID NO: 24788 - DNA, 1184 bp, Arabidopsis thaliana landsberg
caaaaaaaaaagagaggatgagaattatttatgtattaaaagttttttttggtatacgagctaccggtatatgtatttacaaaaggattgtaaaacacaatcgttttttaatttactaatatcagctagttaacatattgttaattactattatttgtttgtttaagttatataaatttttatttaccaaattaactcatttatttatgatgtttgtcgtgtatactatatatatacacattcatgctatcttccttcgtctcgtggtatagttacttacatgagcatcaacttcacttatagctaacttttttcttctctttctttctctctggctcgtcgcttttagaaaacgttaattcaatatggctaaaaagaacggaacgtcttggttcaccgccgtgaaaaagattctctggtcaccgtcaaaagactccgacaagaagactcaccaccacaaagaaaccgatattaaggtctttatttcaactctctactatgaattactacttaacctcgtctctaaatagacttttaacccgtaagtttcgatcttttatggctaattgcagagaaaagaaaagaaaggatggatttttgaaagaccaaactcgaaaccacaaactctgtcttacaagatactgtccgtacggtggaagcagaggagaaagaaaaaccaccggtgattgtctccgccgtagatgaaggtgtcacagagatcgttaagctaacggcaactccgggctttattagacgtcattgggctgccattattattcagacagctttccgaggttacctcgtaagtaaaaaacaaacaaacaaaaatcttttttttttggtatgtgtaacgtacaaacgtagtttgaggaaacttttagtttccatattttagttgatttgaaactttgttttgaaaatattttgtttcataagaattttgtcagtgtcattttttttaatgagttctaaatttgtctagaatttgtgttatttttagtgaaatttcggattttattgttgttgttgttgttgtcataattttgtgttatttttctttaagcgttcttaatttttcaatttgaactttgtttgtcacaaatttgtcactaatatttttcgtttatatgaaaaaagtcgaggagagcattacgggcattgaaagcaatactcaagcaactagc

SEQ ID NO: 24789 - DNA, 1254 bp, Arabidopsis thaliana landsberg
attacgttacataaagaatgacatggtacatgaaacatccctgcttcgttttggttaaatgaaatatatcaaattggaaagatgggtattagttttgtcatattgccatttgcttttaatagtttctgatttacttcctacaaaactatcagatatcaacccgaatctaataaaccttacaatttctatacaataacctttgaacaagaattggcaaagagattagtgtttagggagtgacgagaaaataatctctaatggttcgccttttgactgaggaaggagggtttagtacagaggatggactgttgaatgtggtttctggtgttctctcgcatattatatcttcttctgatgataatgatgacaatgatgatgatgatgatgttttcttcttctgagactctggagttctaatgataggcattgactgatcattattataatcatcatctgatgataatgatgaatgcttttggggactctcagtttctctgttcatctcaagtctttctttggcttcagtgtttgacaatgcggttactctgcgtttaactctggacacagacgctgttgcgtttgcgtttgtacatatgttgttctctatgttccatagtcgtacctaattatgaagagccatggaatcagtacaattcattaaccttttgcttgtgtcaacatatatgaaatgttttgttaccgtgaaatcatctgaagctgttgcactttcccaatctctgatggagacctgaacaatagatttggaaacagtttagttatgtatcatcgaatcgacatgtctgctagttgaattcagtgaagacagacttggttaagtataagtaaccaatctactgcagtagcttcaaagtcatggcctttcaagataataggatctacttcaggtttatagacctgaaagtgcaatggtgctttgagcatttacatataactctcgaatctttcgtgtataagagaattgttgaactaagggtcagaatccaaacgtgccatatgtaagcgtttccatcgcttgatccgctcaaaacatattcaccggtcaggactaatcatcgtctgcagagcaagatttagacagtgagtgagcaggtgaaaaatgttgtaaaagcaaatcaatggtgtgattgaagtgaagattgtgaaggaggcattacccttacgaagaaagaatctataaggcagccagagaaagatgtgtacaggtccttctgtcaagccgcagcgtgttgatag

SEQ ID NO: 24790 - DNA, 587 bp, Arabidopsis thaliana landsberg
  unsure (1)..(587): unsure at all n locations
actgcaattatctatatataatataaaacaagtcagagaaatgacacattgtatttaaattgtactacattcataccaactttgtattgtatcaaattttctattcttattaaaacaaaattttaattaacataaatgatactataaatatcatttatagtataaacataaatatatgatactataaacataaacataaatgatactataaatataaacataaatgatactataaatataaatgatactataaacataaatgatactataaacataaataaaggatatttgtgtttaaaagaatcgaaaataaaacatatataatagttttttgtattattaatgtcattgtgtagctacttaaatgattactaagtccaaaaatatatttatacattcgataaatataaacatgaggtctcatcttggtcttattcttcaccctcgccacatttttcaaaaaaaatatcactacaccctctatatatcaaagctagacattaatggttcgatcttcatcacagattatcatattgcactggatcgttgggagtatactccactagngttctgcatgctttgatcct

SEQ ID NO: 24791 - DNA, 767 bp, Arabidopsis thaliana landsberg
ttaaagtgtacaatcgaccaatatgctaatcaatattctggcacttaataaggcatatatatatgtttgttctaggattcgttctctatatatatttagactttgatgtttctcgttattggagagagcatgaaagcgagagaaaagtacgtaagacttatgatgggaagtggacatcattttcgcgttgaatatgaaacactaataataatatgtggtttcaattcttgttcttttagtcgttttatgagattgggggaaattacgttatacattaataatgctcgtgacaacaccacccactctatatgaattgaaacaatgcaggtccttatcctaattgggcaacaattgttatatacaagtgtgagagtgatgataaagatccacagctaggatgctatgtaatatctaatgcagaaagatagtaataattccatggcatgcattaaatcaggttggtggtagcccctctcttttgaccgatattatactatatgataagttttgtcatgagcatggaacatcatctctctcttctctcttgcattggcatttagtgaatgtgaatgtgaatggaacaaggggacatacatatattggctgcagaaaaagagagggcagcttgagctgggttcttagctgtttgttacagtgaaccaaatgcgacatatttaatagtactattactttacaataaaaagagcacagagagcagcaaaattacaaaagaaaacaaaaagaagacaagtagtatatcagtatag

SEQ ID NO: 24792 - DNA, 1013 bp, Arabidopsis thaliana landsberg
ttaactaataataattggtagttagtgtatttgtcgatgtcttttatatattatttttattccttctttcttttgatgtgaaatcctaacggaccctttctaataaattagatttcactggatccaaaatcaaaatgaattagaactagtaatgacttctttgaatattagttaagatctcttatacattatttaaggtctttttaaaagatgatataggatcctaccatttccaaagaccaatgaaccaatcatcgaacgaaaacgaagcgaggaaaagaaataaaacaaacatacttgtctcaactaaagaagttactttagtaacatatatagactacagagactactttagctcacacacgcacaaacctatatataggctgagattgtgatgtatatttatacaataatcaaagtgaaaaagaaaagaaaaaagatggatcgatgattttgagaactgggaccaaactgttattattttgacttaccaaaaaaacaaaaacttatgtcatttgttcctgtcttgaccataaagtgttgtgtgttatattgaattgtatttccagcttttgaggtgttttagaaaagctgtctctatttctttcttcggctttcaatcgcaagtgtctctttcagtcttccacttacattatattatgtgattttagtggctaagctctttgttttcttggccggtaagtttctcacccacacgaattcgaagaaaaaagccgtttgttttcttgactggaaagggtcttcttttacgtaagattgtttgtttgtcttcttgtctgaaattgatgtaagcttgatttaacattttatccaatttataggtttacttatgctgctgaacagatttaccaataatcaatagtgtaatttaggtttttaaaaaatagcattaactgctttctaagccaaatcgtgcaaaacctcagtccatgctctaccgatacaagtactaaaataaaataaaatgcaaggtactaaaaccccccagataa

SEQ ID NO: 24793 - DNA, 911 bp, Arabidopsis thaliana landsberg
caagaaagcaaaaacgtttttcggtgtttcagtaattttgacttttttttcaaaaggtaaagaccaaactgatgaagttatgatattttgatgcatagattaattgcaacacaataaggttaacaaaacatcttaaagactgactcaggaagtgatcaaccataaacatttgccactgatcaaccgattatttttgatgctacacaaaaactttccagaagaatcgaccagtgaaagggactagctagctgatgtacacttgacctgtgaaaagaaaagtgattaaacatttgagaataaagcaatcgactaatgacttttctcttattagaactgcgaaatttgaaccggctcaattcaagagtccccagtctaaacctattagttactaattggataatcaccattcaactcaaatttcataatcaactcattcaagatccttcctttttttatctctattttttttgggcatgaggttgttaaagaggtgttgaagacttatttcaagtactttgtattgaatttccctttttgtgatttcattatatttacgtattaaaaatgtatacaattgttattatataaataaaatcataccatttattttgtactgatacctatactgtatagtagtaatttttcgctttcactgccactaaatgttcattaccgagttaaacattatattatgtatatatctactagactactacacaaaattttgattactatgatcactctactatcgacagagctaacgtaatgtcaattatgaaattatttatatctcattttacactcaatcctgtcaattccaatcgacttaatccatttataatgtttacatatttaaatcatctaatttatatcaaataagtacattatttttcaaataaaatggcaccatt

SEQ ID NO: 24794 - DNA, 856 bp, Arabidopsis thaliana landsberg
gttcttgtagaaccgttctattctgttatgaatctcgttttattctaattgcaaggttttttgtcgtttgagtaactgtgatgaataaaaactctttaccaagtttagtgaacaactgtctgaaatgtaaaaagcctcaaagcacaattgcttgaggataacattcagaaacttgcaaatctaatgatctccaaatgtgtttgcattcttcccaccttgaactcatcctctccagaaatttttcagcccacacttccttgctaccttccatactcagatcatatggcactgaaaaactgagtcgattcacaaaacacacttatttacttttacataaacatttttgcttaggcagtaaagttatcatcttggttttgaagttcttataccttgttagctcttctaaatgagagtccttctcggtggtaccattcctaaaatatcttgagttagacaccccagtaataataagaaacttgagttacaaatatacaatagcttgcctgcatactagaactttgaataggcggagggatttggtggataggttgtagattgcttcttctatgtgatctgtgccaaatagatacacaactggatagtccagcagccatctgcagatacagatagaacacaatggtatgataaattgaaataactaatggagtaatggtggacgaatcttaaaacgaattgggcaattacccgtttaaggttgggattgtaactttagtgtcttgtaaacaacagctaagatcaatgcataaagaagtctgagaagatttggcctcatcaagtaccgtagtggtatcagtattgctgtcatctaaaggaaatgtcgaagagaatagcttct

SEQ ID NO: 24795 - DNA, 846 bp, Arabidopsis thaliana landsberg
  unsure (1)..(846): unsure at all n locations
ccattgtatgagccaagctagtcttaccagacccactaggaccacctacagtgaaacagtgtgacaatatatactcaacataagctttaggctccgtgttaaaacaaaacagcacaaacagcaaacaagcaatattacctattccaacaataacagggggtcccttattctccagcaatgcctgaaaattacaagcaaaagaacccttactagaaagaacaaattctccgcgttaagtagcaacttttttacttaacagacgattatttcttctatcttcttgcaaccccattacctgtattgcttgaacagaaagtagcaaccctctatccaagtcgtatgaatcaggcataggaacaagccgcatattatccctgaaagaggaatctgtagctgcttgatgagaaagcctaggcataaatgcaataataatgctactgaaatacatttcatcgaccataacactaagcgagggaaaatatcaaagggaaaacaccatcaatcttcaaaaaattcggacatacctactacagagcttactgaatgaggtggatcataagaggtgaaatgccaagttgcaaccatcggttccatttgggatttcgtaggagatctagtccaaggctgcgataaatcctcaaggcgggtaacgatgtttggggtagttcggataggttttggtgcaacaatttgcttctcttggttagtgattacaggagacggttgcaaaagtggaggtgtattcaaagcgtgtacacctgcaaaatgggtaagcttacagaaattaagattcntgtgcactgcagagcacaagaaaggatagatagtggaaacaaacatgctata

SEQ ID NO: 24796 - DNA, 525 bp, Arabidopsis thaliana landsberg
tgggttttgagtttgaatttctctcttaatattctgtagcaggaagatggatactccgattcaacatctcccatttccggtgagtcattaataactaggtttagttaatatctctcttaagcggccttttgttgcagtttctaggttttttctaacatttttaattttgggtatttgttacagaaccaccagatattacgaattggtttcccagttatgtatatgaatcgttaccattgtcttcttcaatcaatgaaattgaaaacgaagtagatgtggtcaacaaagcaaatcttggtggtgttattgatgaatcacttccttctggtaaactctcttttggttgatttttgtgaatttatgtgctattgatggatttgtttgtaactttggtttggttcatttgtttctcagaacctcctgatttaggtaaatgggtttcgagctatgtctatgaatcaccgttgctggatacaagtgatggtcttgaattgtctgttcttggagaaagtgaatgtgtaaagg

SEQ ID NO: 24797 - DNA, 1349 bp, Arabidopsis thaliana landsberg
  unsure (1)..(1349): unsure at all n locations
tacttggaaagacggctggaaatcagctggagctccaccctttttatcaccacctcgtgggcctccacggtatccatcacggtcaccaaatctgggacggtctccatcagagcgaggtggtcctctgaaaacaaaagccaaaacaatatcagaaattagccaatccctcagaccggacaggtcaagnnnnnnnnnnnnnnnnnnnnnnnnnnnnnnnnnnnnnnnnnnnnnnnnnnggacgaccaccgggcttagcagacttcttcaaagtagcagggacaacatcggaaggaaggttaagataagttctcaagaactcaattccttcattagtcagaaaccaataataatgcatccacgcaaatgtctccctaacgtactccttggacttgaaactctgcatgagcttaatcacttgcaggtttggtacatcaatcaacggatgctttgggagattgaaatccttcttagcaaagcatactccctctacgaaacccagtaagatatgatcatttagtatccacacaaattctttctctagacaactgagtacagtactagataataaatccctcaacagttatataccaatctatcatactcttcaagaattataacttatgaacaaaccttgttagatccagcattccaattactctgaaccttacaatactactttataaacaagttcatatctaaaatcgtaggcctaaaaggagctgaaagcaagcataaatcttttcacatttcaatgcaattgtttctcactacaagcttagattcgaagatccctagagaaatgtaactagcttaaacctggttccactagctgaaaatagaaggaaatgaaagagagcatgactcacaaacctttgaaaaggtatttgcagatctctctgcgattgttctctgagataatctcataaaaggccgaacaagatcacaattaatactcggataattccttccattacattcagtaaatatgtaaatttagagaaacagagtagaagcagagtatgtgtataccatcgtcttgttggttgagctttcgctgcaaagaggcactgagcttgagcaaaggggagcaatagggttttctgcggataaaagacgattagattatatattacggatttgggcttttattgggctgataatctaataattatttgctacaaagctggcctttacatggtccggttagatggttaaccggttccatattagatttcggagtcccatagtgaattttcttctgtaaacgggccaatcatcccctgacctagaaaaaaaatgtcacataaaaaatgacacaaacagatgaatgtaaatacatagtaggatga

SEQ ID NO: 24798 - DNA, 5936 bp, Arabidopsis thaliana landsberg
cgatattttgagtcctgattgcgactagtgatatcgaatgattactattatctaataagtattacctgaagctttcatgaggcgtctgcttaaacattgataaatacattatacccaagttatttattctcttaactcatataatgtcagaagatcaatgacattgagcagacacgttgtcgcctttttactcgcttttgttattacacaagctaaacaaaaagaatgtcccatgaaagaaaaagcaaataaagagagtaatactataataaacacatgggataagaaagtggattaaggcatcaatttcgtctccattacactaaacacacacttttgattacgttccaagactcggcgccgttatcttggcgccattcacgcttcccttttatcttttgtctcctctttttaaattcaaaatcacttaatccccctaacctaattcaactatgcactccctaactatacccatatatgaacatattcttactacggtagatccattttaaccccgaaactgcccatttcaaaattttaaacagtctatgtatatcgtaactaggaaatatattaaaaacaaacttaggtttgcataaaaggaaaacgttacttgtttagcaagtattagatatcttagaaataaaatcgtttagttaggaatcatttccaattcagtaggtgtgattgaatgtcgattttatatggttcagttgatttatgagacaaatattaatggggtcataatttgtagcatttttataggaaacagtttaaatatcaaatattggtttgttaagttaatatacgttggatatttgctttgcattaaaatatgaaaccatttactttacaagtatattgtatatacacgataaattgaaaaaatcaatgattaaatgtcgtttggattttatgtaggaaaaatctcaaaaagggaacgaatctgattcgattgcaaaaaaaaatcggatcaaaatctcatataaggaaaaatacgaatcaaagacttccgcttcaaatttttttttttgaaatccatccgattaattttttttaaaatacatagatatcagtatatcaggaagctgaaagctcctctgtcttttgagaataaaagagtccaacttttgcattcgtcatttgactatatcagtagtatcttttcgagaagacgcaaagtcgttacgtgcgtttatatttcgtttattcatgtcccaatactacctcttaggaaataagagactattaagactttcttgcttcccaatacacccccactaatatcaaataacctagtttaatttcttccgtttctcaacacttttaagaaaatacttaacaattgacataaaagaaaaaacgtacagaggaatttgaatggacaaacaaaggtgaaacaactagaatggacaaacaaaggtgaaacaactagaatttaacaatagacaaaaaaaaaagaaaaggatttggttaagcaatattaaggtatgaactaacctaaaccataaaatagtaaaaaaggaggattaaggttactttgtttaggagcagcacgttgataaccaaaaagccataattatcgcttccttcagcgcaggatccttctctctcctatctctctgtatatatatgtggaccttcacgtaatagcttcgtacttcaaacctcaaaagcaatttagctctctgtcttcaagatgacttctcttttcttctttgttctccttttctcgtctcttctcataagcaatggcgatgccaacccaaattacaaagaagctctctccaagtcattgctcttcttccaaggtcagcgatctggtcctcttcctagaggccaacaaatttcctggagggctagctctggcctttccgatggctctgctgctcatgtacacaccttaaaccatatttaactttgatacagaatatatctttgttagtaacattgatatatgaattgcaggtggacttaaccggcgggtactatgacgcaggagacaacgtcaagttcaatttaccaatggcgtttaccaccacaatgctctcatggagcgcactggaatacggtaaacggatgggtcctgagctggaaaatgcacgtgtgaacatccgttgggccacagattatctgctgaaatgtgccagagccacgccggggaagctttatgtcggtgtaggagatcctaatgttgatcacaaatgctgggaacggcctgaggacatggacacacctcgtacagtttactctgtatccccttctaaccccggttctgatgtcgcagctgaaacagcagcagctctagctgcagcttctatggttttcagaaaagttgattctaaatattcacgtttgcttctcgcaacagctaaggatgtgatgcagtttgccattcagtaccagggagcttacagtgattccctttcttcatccgtctgtcctttctactgctcctactctggttacaaggtctactaatacaactaaaccactctttacataacattgtatccttgttttgaaatgagagaatttatgatgacaggacgagctgatgtggggtgcgtcctggctgctgagagcaacgaataacccgtattacgccaacttcataaactctttaggaggtggagatcagccggacatcttcagctgggacaataaatatgctggtgcctatgttcttctctcacgggtttgtctcactgctaataaaaactcattgagaacatagcttttagcatcacactatctaacttttacattttggcagagagcattacttaacaaagacagcaactttgaacaatacaagcaagcagctgaaaatttcatctgcaaaatccttccagattctccttcttcctctacccaatacactcaaggtaacctaattcacgatatagaacacaaattgctaaacaacaacctcttctaatcatatgtttaccaattacaggaggattaatgtacaagctacctcaaagcaatcttcagtacgtaacctccataacattcttgctcacaacttacgccaaatacatgaaagccacaaaacacacattcaattgcggaagctccgtcatcgtccccaacgccttgataagtctatcgaaacgacaagttgattacatactcggagataacccaatcaaaataacgtacatggttggattcggatccaatttccctaagagaatccaccatagagcttggtcacttccttcacacgcactacgttctcaatcgttaggctgcaatggtggattccaatcgttctatactcaaaaccctaaccctaacattctcaccggagcaatcgtagtaggtccgaatcaaaacgatgggtatccagatcagagagacgattacagccacgcggaaccagcgacttatataaacgccgccttcgtcggaactttggcgtacttcgccgccggtcgatcggcttgaaattgaattcgccgccgccacgttctccgatgtgtagttccattgttagttaaagatccgttggcccaagcctgaaaatcagaaagggacaaagttgtttaaatgtaaaactcttaatgggctaagacccaatactaatggacccgagggaaatatttctcgtggtcttatttaactctaaccatcattacgcgtttcaaatatttaaacaaggccgttaattaagcaccattgaattagttgatgtttggttatagcattagcatgaaagaaccatagaatatttacatgtcaatgatgtcatcagctgaaagatatgcattaagtaggaaatgtaaagacaaaatatcgttttctgctaaaaggaattatatgccaaacaatgggccgagagagaattgaaaataatgggccaagagagatattttttcttttagtgggcttttaggagaaactgtaccaaaaacaacagatttcgaacaaaattttgatgtaggtcacttcatagctaaaaaataatctggagtgagcgacaagcaagcggcggccgtcatggattcatcgccgccgaagactatcaccaaggcgctgccgcgtttctctgaactcaaacctccgctctcagaagatatcatcgaggcgcttgaccggtccggtttcgaggtctgcactccggttcaggccgagacgatccctttcctctgcagacacaaggatgttgccgtcgacgcagccactggttctggaaaaaaactagctttcctccttcccctagtagagattatccgtcgatccaactcctaccctccgaagccacaccaggtaaggagaattagccgaatatcaagagtagtagcttatgctatatgttaacaatttcaatctcaggtaatgggggtgattatatcgccaacgagagagctatcagcgcagatacataaggtggcaagagccgtttgtgtcgactttgcgaaatgtgaactctgtcctgcttgttggaggtcgagaggtggaagctgacatgaatactctcgaagaagaaggagccaatctcttgatcggcactcctggaaggctttcagatattatgaaacgaatggagtttctggatttccgaaatgttgagattcttatcttagatgaggccgatagacttttggatatggggttccagaagcaggtcaattacattatatctcgcttgccaaagcaacgtaggactggcctcttttcagctacacaaacacaagctgttgcagacctggccaaggctggccttaggaacgttacggaagttagattgggagatgagtcaaagtcgaaaacgtcttctggtctgtattgtgaggtattattattgtaaggtcaatatttatatacgtatatgtgtttcgggatagtaagtttatttcttcttcgtgcctctgcagtatttgaaatgcgaagcagatcaaaagtcatctcaactagtgcatctcctgatcgagaacaaaaataaaaagcttatcgtgtaagttttggcacaacagactcatcaaattaagcatccttttacagatagtttaactagtatctcttctgcagattcttcatgacatgtgcttgtgttgattaatggggactcgtacttccaaaaattcctaccctcaagtccatttccttctttcccacccatgggaagatggatcagaaagctagagacaaggcattagctttgtttacagaggcatcaagcggtgtccttttatgcacagatgtagctgcacgtggacttgacattccaggcatcgattacgttgttcaggtagattgattaatgtttgttatgccatctttgttgcaatggattttgacaggttattgtatgtaactggtgcagtatgatcccccacaagacccagatgtatttatccatagggttggcaggactgcaagaatggaaagacaaggtagtgccattgtgtttttaatgcccaaggagacagactatgtagagtttatgcgcataagaaaagtccctcttcagaagagaaaatgctctgagaacgcttctgatgtcatcccgattgtaagaaaacccccacgtatctcttttttctctctctctctctcgctctcgtccacagggtgtggtttaataataagtgctacaatgtaaaatgcagatacgttcagtagccatcaaggaccgggcagtgttggagaagggattacaggcatttgtttcctttgtccgtgcttataaggagcatcaatgctcttacattttcaggttcatttctttccttgagttgctaaaatatgttagcttttgtaactcaattctttttttccccttcaatatacagttggaaaggacttgaaatcggaaagttagccatgagatatggcatcttgtctttaaacttacatatctgaagttaaacaagacagaattggcattgtcggttttacacctgtccaaggcatcacgtttcgtt

SEQ ID NO: 24799 - DNA, 1132 bp, Arabidopsis thaliana landsberg
  unsure (1)..(1132): unsure at all n locations
cgttttttcctaggcttcggtaacctgtgaatttctctatctcactagcttttatgtagaagagagagaaggcaacattaaattcgatctaaaacttcaagaaaccaaaacaacacttcaaaaaaaaaaagagatctgttctatagagttttcatcttttctttcgactcgagtttggctcaacaaagtttatatcgatttggcactctaaaatgtaagtagaaccaaatgaatcttgtattttatgtacgttaataaaaaattagggtttcctagaggacaatctcgtcatccgtttcttctttgtctacctctgcgttttcttgtagatccgatgatgtgctcagtcttgtgactttcaagattgattttatcgttattgtttgaagatatgtggtttgattattttctcaacacattgtgtccttttagcgctttacttcagtttctctctaattttcataatattattattgaacattatgcttaattattcatccgaatattcgtgtcccattttttaaattgaatttcaggataacttgtattttatatgcaacgaggttatgtcacgtagtgttttgtatttatattcataccctttttgataaggtgagatgcatatgcttatataagcgtataggtataaataaccatcaaaaatagagaaaaagaccaatattttgcttttcggttacttatgaaatgtgaaaaagaccatataaatatatctattaaagggaagtatagtttcataaaatcttgaggattacattccataaaccaagattaccttccgtttttgctttgatcctcttcttatcaaatatataaacatgaccatttgatctttcattttggatagtgggatatacaggcagaagaaaatcgagataaatcaactaaatgatttggataatcatcttgaagatttgaaggaaaatccaagagcttcaaaaactccaaagattgataggcattcatcatcatcatgtatcatccaaacatgttcgagtctcatcatcatatgttcgatatgacgccgaataactccgatgacgatttgggtatcaccgggagccacgaataggatntcgagactaatccggcgcagaagtcaccatggagaatc

SEQ ID NO: 24800 - DNA, 948 bp, Arabidopsis thaliana landsberg
ctgcagagcttgttgagactggagctctagtgctcatcaatggatgattgagaaaattgggtcggctcataagccagttttagtcaagtttactactgacaaggagttatttagtaaacaattttggtttgataaaagatgggctgaagatccctctttctttcaagttatacaagatacgtggcagggaaataattctcgaaaattcaaatctgttgtagagagggctgctgattgtaaacaagccatcggagtttggaagaataaaatctggtctaattcagagattcgaatcaagaggcttcgaaaggaactggctgctcaggatgcatctttgactccttgttttcaaaggattagtgtgataaagcgagagttagcaattgcatttagagaagaagaggttttttggagacaaaagagtcaagaaaaatggcttaatgatggcgacagaaatacaaaaaatttccaagcctctgttaaagctgatggagtgaaaaattcactacaatttctggtggatgacaatggtatagatcagttttcagattgcaaaaaaggagagattgctgtaaaatatttctctgatctatttaaatctgtccacacaaaccaggttagtgtttttcttcataacttccaacctagagtaacagagactatgaatcaagatctcgctaaaccgatttcccctactgagattcggcaagctgccttttccattagtagttagagtggacctggtccacatggtttgactggctttttctttaaaacttattgggaaggtggttaaagatcaagttatctctgaggttcttcggttttttgatactggttgtttaccggaagactggaatcatactcacttatgcttaatcccaaaagttaaagacccaaagcaaatcacagatcttaggccaataagtctttgttcgagtgattata

SEQ ID NO: 24801 - DNA, 1017 bp, Arabidopsis thaliana landsberg
  unsure (1)..(1017): unsure at all n locations
tcgactctatccctacgttgtctacacactaaagcttatctcaaactcacgtgcttgtcaagtggagccattctccgccgttgttcgtcgtctcaacgacattgttaactcatctcaaccgttgattctcttccacacaaatcaaacggctgtaatcaaatcatacgcctctccaccaccttcaccaccaccaccacctccgccaccgcaaaccggtttccaacacgtggttttcggtatcgccgcgtcggcaagactatggaaacagagaaaagagtacatcaagatttggtacaaaccaaaccaaatgcgtggttatgtctggttagaaaaaccagttactgaagaagacgaagaagacgaaattagcctcccgccggtgaaaatctccggcgacacatcgaagtttccgtataaaaacaaacaaggacacagatcggcgattagaatttcaagaatcgttacggagacacttaaattaggactcaaagatgtgagatggttcgttatgggagacgatgatacagtctttgtcgccgagaatctaatcagagttttgagaaaatacgatcataatcaaatgtattacatcggcagtttatcggagagtcatcttcagaacatttatttctcttatggaatggcttatggcggtggaggatttgctataagttatccattagcggtggctttgagcaaaatgcaagatcggtgtattaaaaggtatccggcgttgtacggttccgatgatcgnnnnnnnnnnnnnnnnnnnnaactcggtgttccactcactaaagaactcggttttcaccaggtcagtaattatcacttttattttatgtttttactataatcttattagtaaagaaatattcctatagattcgtatgaatctagttaaattaagttggtttattaactgcaaaacatgttcagattattaatattactttctttacaccaaacacaatctgtaaatgaaaattctatgatttctaactaaatacatattttgat

SEQ ID NO: 24802 - DNA, 726 bp, Arabidopsis thaliana landsberg
ttagttaaattttccctgtgaaatgctcggtaggggctcataataagtaacagtaaaatcctttggcctataatgaagtggcccaacatatatgttttgtttgggcctattataataagtagtcagcactcagtaaaaccttttgtagtggcccaacaaaatttatcgtcgaagtctcgaaatcaaatttttaaattgattatgtcaagtgataacttcattgaaaaattctagtgtagggtaactggaagagaatatagattcttcaccaatcaggtgcaatcgccatattactaacgtaattgtacaaaaatatacaattacatcaatgtcaatagtttagtgtacattaacatattctcaatcagtcgttactgaagtcaaattttataatgagttgttgttatataatgggactctctacctagaacagttcgctgtacttatactgtagccactgaatattaccttttctctcgaatcgacccatttttttttattttttcgaccatgaataataaacatttttctttccgatttacacaaatacaaaagctatggagcaaaatgtgttgtttctttttcattattattgctatagactgtttcatacacaagttccagtacaacttaaaacaccatgatttcacagacaatttcactctgccgacctaatttggagagtgtgagtcgtcaatgtcaaagctatagtgtctttatcaatga

SEQ ID NO: 24803 - DNA, 912 bp, Arabidopsis thaliana landsberg
agaaaaagaaaattgagaatggatttagagagatagtttattgagacttaaggaaagaaaattgtatcttattagttatgtcttactgttttgttttgaataatttatatggtttgaaaaaaaaaatccatttattttatttgaaaagctctatttatttactttttcttcttgatcccaactttaactttgccttaagccccaataatcttgggcacgtattgcagcgggataagttatgaagaaccgagacagtgcttttaaggatagaatacgaaagtaattttgagtatcaatggatctcaagaaagacattcgtagctcggaattttaatgctattggagatcaattgatggattccaatgaacaaagccttcaaagacttcgtttgagaatactcttctcagtgcttatcaaaagctttttaatattattaatcaaatcaacaacttaatacaataagagacctaaaaaagctatatataataaaagcataaaaacctttggacaacactataaatggtgctttaatgcaggtgttccttgactagtttctatggttaccttcatgtgggtaactctttccaaacattagatttataagtgtttattagagttaaataccatttgagtcacttgattgtacgtaggttgggtttcactttgtgttgcttgttgagttttcactttcagtcttcttatccctagtcatttactcattctcagcatcaagagcagctaccactgtttctagtgattctgaactcatcctactagaataaacaaaatagaatcaggtttagagaacaatttaggtataattattgttaggttttatgggccgtaccaaactgcaagagtttaatgatatcatcatgcttattggattctgtataatatcaacaaataaa

SEQ ID NO: 24804 - DNA, 962 bp, Arabidopsis thaliana landsberg
ttttttttccgaccaatgttgtccgccactgttaaaatatacagtacatctacatcatacatgtttctgtcatgtggtagttcgatttgtagaatggaccaacaaactactctcacgtgttaccatacagatattctatcacgttctaccatacaatcttaacacatatagatatagtctcaagattgaaaatgaacatcgtaaagattactcaacttcagcagctctttaaaattttgtattaccaacaaaaattttccaatacaaatactggtggaaaaatattctcccgaattttgctttttcccttctactttgctcttttttttatttttcattgttcttacatcatttagccgtcacgcccggttgataaaaagataaaaaaaaccgtacccggattcctaggtataatgatgtctggattatctgttacaagttttacaccaagaatattaatgatgatatcagcatattggaagaagatgaagcactcattgattccaccggtggatgagtttctctcaagaaaccgtaatccttttgctttgcacccaagtcatattcttttcgattatcttaattagcgttagttctatcttgcattatgttggctcctatgtcgtcttttgaagaagagaggtagaccctattttgctaaacttatgtactgtataacataataatactattttgccccaaaaagaagaagttatgagcatgactttatatgaatacatcattaatattctaccggaacgacatatagtagctagatttctacggaatttcttcagtttgcgagttctatataatacaaaacttatcatataaagttgtatgttttaatattaatattattggtgaatgtggttagaagtttttgtccaagttatttagaccttatatattactttcatgtgttatattttacatgctaattcttgaatttgggcctcttt

SEQ ID NO: 24805 - DNA, 4936 bp, Arabidopsis thaliana landsberg
tcaaaggcaggagacacacctacaaggcacaggcgtgctcatggtgttaaaattttatacaaggtgaacaagggtgcagtataaaacatgttttgaatttaccatgtcagtataattggcttttctctcttcctcgtttcctccatggaagacatgatattgctcatacctgaatcaccaaatcactaaaaattaataatgtccaggacaaaaaaaaaagtccaccaaataacattttttttttttttttaattcatagaactctgaaaaactttggccaaaaaaaacaaaccaattgttctatatagatagatagatgaagtcaatgacaataagattggtggtcgggccctcaagaacgtgacagtagtgaaatacacgtcaaatggatcttttatagagccaaaaacgaaactagggaccatctctcactcatcatttttcttttttctgctgaattgaaagctcagttccatgaagcattaaaaaccaaaacaaacattaaaacagaggcgaaatccaatgccatcatggtattcgtggaattggtaaaaagcgtaaacgtatggaaatagtaggctcaaaatatacgttgattccaaagatatggagatgctacacaaaacaacaatcaaatcttaatcttaggagttgttcttttttaaataccaaggagatcaatatgcatgagacgaaataagcgaattgcaagtgaatcggagatggaaactacaatcaatgatgaagggagaagaaattactttttgacggcggtgagaacatcggatttatcgatcttaccaccaagaatcgacgcgagatccatagcacttatgcaacaacggacgagatctgcaaaaagtgagactgaatcagaataaggatcaaggagaaaagagaaatcggaatcggaacacacattggaggagacttacgagagagaggataaagatgaatcggagtggtggggaagagctaaagaggcacctgactggctttagtttataactagtaagatagagaggtcacaagccgtcaatcccagcttggcaatgagagtgtattaccattatatcctctctacttgtccaaattaattatgaaataattagagcctatataactctactctctagtgttaagcatattctccactatctcgtaatttattctagtataaaataaaacctttactatagaatctcaccacctaccaagaacaggcgcgacattcgagtggttaattggttttaaatctagatcaaagattgaatctacctactacttccttgatcttctgtttttgccatcctgattcctgaatgtttttaagtgtttgtagcaagaatatttgactttctactaactccaaacctggtttaaaattttgtgaaatattcaatggtttcaagagaaaaaaaaacttagaatttttttactagtccactacttcactcctactttaatctctaaactccaaattctgattcttaactcatactctatggtctgtatatgtttatagtttatacacatgggtatctcaggaacaattgctatttttatttttatcaatattatcggatttgattacatgtaaaacacaacaacaatagttagtctatgtcaacaatagttaattagaaaatgactaatctacctatcatttaattaaaaagttatagattacgttgtgattaactagagtagtactaatagttagtctatgtcatgattaacgtaggaaactaggaattgaccgtttgggttaaaattccaaaggaaaaaccaacttcaaccacacaccacatatttctctcccgcctaatcctccgcgttcccaagccgacgcgccgatctttcttctactacttgtcctccggcaataacaaactaaccatttcgaaaagtaattatctatggctctctcctcgttgatctcagccactccgctctccctttcggtgccgagatatctcgtgttacccacgcgccgccgtttccacttgccgttagcaactcttgactcatcgcctccagagtcatccgcatcatcatcgattcctacctctattcccgtcaacggaaacacgttacctagttcttacggaactcgcaaagacgacagcccgtttgctcagttctttcgctccaccgaatccaacgttgagagggtaatatcaatcaagcctgtttgtctctttcttcttctatatattgattttgagactttggaatatttgttctgatatctggtttcttggtggatggagcagataatatttgatttccggttcctagcgcttttggcagtaggaggttcgctggctggttcgctactctgctttctcaatgtaactaacttgtggtctagttttagtctgaaatgttttgccacgcatacaccattttagtactaatctcatggctcattgtgtaggggtgtgtctacatagtggaggcatataaagtctactggactaactgttcaaaaggcatccataccggccaaatggttttacgcctagtcgaagctatcggtaaaactaatttgctatatatatgattatgatataagcctgtttgtttagttataatactcatatatacttgtgtgtgaaatttgattgcagatgtttatctagctgggactgtgatgttaatatttagtatgggtttgtatggactcttcatcagtcactcgcctcatgatgttccaccggaatccgatcgtgcccttagatcctcttccctctttggtatgtttgcaatgaaggagagaccaaaatggatgaagatcagctcacttgatgagctgaaaaccaaagtgggacatgtcattgttatgattctgctagtgaagatgttcgagagaagcaagatggttactatcgccaccggtctagatttgcttagttattccgtttgcatcttcttgtcctctgcttctctttatatcctccataatctccacaaaggagagacatgaaccaatgtatatgtacagacccaatctatccaatatatgtgtttactctgtttttagtttatttgctattaatgagtatgaagaaccaatttatttgcttttttattcactagaggaatagtatattttcaaatcattcacattatgtacattccgtagcttcttcaaagcaatgccattgatttgcctcaccctctctctcgaaagcttcagcgacttacctatctcttcaaacgacataggagtctctccgttgagcccaaagtaaagtcccaatacacgagattctctagcggtgagacttcctaaaagttgctcaatctcatgcttcatgtgttcccttttcaccatctcctctggccttgtttcatctggtccccgtacaatttcctgaatatgataaatcagtccaaagtctctcttaactttctatgttcatggaaatttcaagtacctgcaaagtcatgcggccattttgagacgcaactcggtccaacgaaacaggggatctgctacgctccacagctagtctaaccgcggatacattgaggtttaggtgttctgcaatctcttcacagcttggttgccgtcttaggtttctggtcaacacattactagcttctgcaactattgccgtcaactcccacatgcttccttacacacaacaagctaaaacgatgtattcactaattacttcacttcccagaacaacattgcattttatttttctatgtaacaatataagatgacttggttcacatatagttaacatctatatatggtagcaactatacaatgtaacacatattcatctcaaactgtaagaattggaggctcaccggcaatttgacaagtctagatttatgcgctatagcccttaagatggcctgtttgatccaccagtagacataagttgatagtttgtatcctcggtcgggatcaaatctctcagctccacgaagcagccctatgcttccttcctgaataaggtcttgcaaattcaaacctttgccttggtaccctgttgcaatagaaacaaccaacctacggtaacaacgagtaatcttttctctcgcttcttttctacggcatagtatttcatttgcactacgcttcttcttccctctgccactggctaacaaaaccgataccatttcattctcttcaacacttgttcccaaattttcaagttttgctccttcctattaattaccagcgaaggtattattaccaacaaggatacacaatgtttgaatctttccattaatgggccatgagagatattggataagaaagaaatgatataccttgaggtacaagcaaagctgaacctcctctaaacgactcaaaaacccagatcgtgaagctccaacaacaggaacactaattgtctctgcttctgcttctacgccagcattttcctcttcttcaggctccaaacgttcgtaacctactcttcttcttcttctcctcttccttctcttttctgactgaattccccatttctcaggtttgatcatcacggagctatcaaccactctatccactgtagtgtcaccgcaaaccagagccgtactaagctttatagaaaacggggatgataaagaaggagatggttgacattggtgagtcgttctgagtaagggagagattgtagggacaggaggagacggacacatagttgcggtagctgtagtgggaatcgtcgtcgccatggatggatgagctgcagagcttcccacaccttagatttttctatttttgttatctatcttctttttggtccaataaaaatggaagaagaagataattctctcgtgtgttacttacttatatcatagagcctctctctgtgtcatatcagcttatccgcaccttaaatttgggtggagttgctaactttttttaataaaaaaaaaaaaaaaatcttttcgatatcaacgattt

SEQ ID NO: 24806 - DNA, 601 bp, Arabidopsis thaliana landsberg
tcaggaaaaaaccgtgtgtgtaatctccgtttattattgcccagtataatataaagtacaattataatttgggcttcggagttgtaaaattagggttttcaattaagaaaaaaggatttgcttgttacaaccttcagggcctagtttctttattgaggtagctaaagacatgataaagctaaaattgttcagcaacaaaattgggtaggatacttggtagtatatcgttattatttcttcacttttattttccttttatcagcaaatatagattgaggccttgaatggattgtttgaaggtgggtttttttcactgctgaggtgttattatacatccattctttccttcttttagtctgctagcgtacgtatcatacatttatccattttgtaaaacagcaaatcaaatcttgaagacattggcaatcagatcaaataaaggcaaatgcatgatcatgttaaaattaaacggaattgaagtgtgtatcatataataaggagattttatatactacaatttacaaataattaatcatctaaaccaatggcaatcatgataatcattattgatttatggcacgtagagaaatcagggaataaa

SEQ ID NO: 24807 - DNA, 1458 bp, Arabidopsis thaliana landsberg
tactatgcaagcctttatcattccctacttacgtattattattacttttttatgaaattatgaccatggaccgccaaacttagataaagttgctgattttttttgtgggtttggcttgaaactccgttggactgaaattaataaaaaaaatgatccttgaggaaagaaatatatcttagtttcaatgttatagtgctgtgtttgtgaaacgattaaccttctgtgaattatttttttgataaaattatagatttacttgtccctcaagaagaatgtacatacaattgttgtcataaatttttcccccttaaaacatactatttttaacttgtccctcaagaataattcttctttagtctaaaggtgtgttattgaatcatagatatttgttcattctttttgcccaaaaagaaaaggatatttgttcattctctaaatttaaaatctacaattgaataaagaaacaaattaacaaaaagacaattaccaatctctgttaattaagttttaacataaatcgatgcaatagctttctaagcagacctttgtaagaagagaaaaaaaggatagagacgattcaaaaattacactttacgaaggatcaaacataagattaatatgactccatgggagtctatcatttatgatcctcactcggtaatcggactatggcatatctcttcctcccttaagaatttaccacattatgtggatgtaaagttaagtatacgtttacatagttgattatatccatatgttgttaacttcaacattgacaagtcctagatttttgcacatagagtcatctatgtttccaaatgtaattaactttgcatccacatgattgttatattcccaaatagttaactacttatacacatagttacttcacttcctctgttttcctaattttcattttcaaccacgacttagatcttattgtaatgagttatcttgtttagtaacagccagacacaactcaggagtatcaaaaacaatcataagtgttgtaaaacagaaccaaaataaacaatctttttagagaacaagctattatgagctagttgaacaacaacatacttattccagaaaacagttttatgtattggattgctacaaatgttagacaaaaatcaacaaaagcagtggcagcttactgataaaatcactcttaaaaaaaagaacaaaaacaacagttctatggtaacaatgtcagatgagaagaagattaagatcaattcttaaaagaaaatgattaagatcttattccttatatattctctcatcaaccaataaaaacccctgagcatggagattctgcatttcctaagttctttattcaaagattccgagaaacaagaaaataaaaagaactctactgttataggctgctactatggctgattttggaccaggcttgtgtctgtggatacttttttccctcaaatgggactagct

SEQ ID NO: 24808 - DNA, 645 bp, Arabidopsis thaliana landsberg
tagaacaaagaaaaaagtcgttataaaaaatggttcgtgggattcggttttgagataggacaaaggtttggcagttaaacaataatttaactcgtagtagtgtcgtaggagtaggacaatagagagcttttttcctaaattttaatatctgattatcttcaactttatgaacttgtttatataaatgagtccactaatgggatacagatgttttgttatatcaaacaatggttttaaaacgggagaaagtggccatttccgccgtctgataccaatattgtgacttgagtattattacaccttttaggtcaaaattatttaaattaactttgtttctttctacaattaacaataaatacacacaaaaagttggagttggtttgtagtggatagtatatgtgcctccacgtttaatcgacaattgaaacctagtatttaataaattagaaaaaatatattttagtctattatttcgttttctataatatttagtcacacaatatggcattttagtattgttaaatttctaataaaaaaaagaatgtaaatgttgacaaataattttattaatacaccttcatattcacatacacacaaacacaccataatatatatatcgatctacactgaaatcactaaaaagtt

SEQ ID NO: 24809 - DNA, 758 bp, Arabidopsis thaliana landsberg
agctgagtgaaacattagctaacgcattgagttcaaatggaagaatcattaatctccaagggagagagaggattcctgtcgagtttttacctggtaggagaactgaacaaaccgatgtcaaagcggaaatcccaaaagctgaaccgatcaagaggaagactcatggtcaagagtcgaaagaagagaagaaagagcggaaaaatgctgtaaaagccgaaaagcgagaagcaaggataattaagaaacagacgaagatgctgtattgcggtgaaacgcagcgtgctcaaagagctgttgctacctctggtccatcgtcgagacctctaaaataatatgttactaaggtaaaacaaaacaattctcagactgtttaaaaccagtttttccagccatttcgtgtaatatttgctgtttgtttttttctttttcatcaagatttgaaaatcttgaatcttgttttggatgtggacgttttgaatattatttattacttttactagtctaatttcgagaaagtgatgagaacagagtcgtctcaaatcagaatttaacctttgttcttggatactaccaacggagtaccaagacaacaaatctggcaataagagctacaagatattttagctataagaactaaaactgtgacgaccaagaattccaaatcgatgatatgaactctaattcatggaggaatcatgatgtcacacttggactgccacttcataaattctaactaccgcctatcttttgaagggaaa

SEQ ID NO: 24810 - DNA, 1067 bp, Arabidopsis thaliana landsberg
ttagcagtggttatagatattagcgcattccccttaaatgtttttggtgcctaaaaagattctctcatgtcagcttacaacacatacatacaaaggaaagatgaaagtagagaagcattgtggatcatgtcacctggatgcaaagagcaaggacagtgttcaactcctttttcaggttatcccaaatgattcctaaaatcttttcaacatatgcttcaagttgctgcttgaaatgcaaagctggatccttggcatcaactggtcgaatagcttcagccgctggagaacggaaaccctgttaaaatataaggtaaggattgtttagcttttggagcagaaactcatcaatacaagattaaaaagaaaaaaaaaagagagaagagtatatataccttggtcatccatcggactaaggaaggtgactgtcgaagtggagtggccccggttccaccagatttcacactttgttggagcatgaataataatgttgacgtattggataaccaatatgccaaattcgcgtcggtatcttcatcctaaaaataagaatcactaatcattcaaatctgataaaaaccagatttgtactgacgtagacgagacagcatcccattttagtacctttataggggaaccggtgatttgaacgaggcgatcaaagacattgggtctttcagcttcaaaggacttccaatgaacaagaccatttgttgatggtaaatgccgctacaggcttgccctggctgaatccaacattctttgtgacagagctgataagggcatcgacatcctccttttccaaacaacccaacaaatctctcttgaaccaaagaggggatatattaaagatgagaagcacataactgagtgatttaacgaaacagcatacatgttgaggatcaatatggcatccccttgacttagtgacagagcctgattctcgtatccttggtggtgatgtgaactccgctccctgcaaagactgctattagagatatatatacaactggagcagaacttcatattaaaggcgacagcataggaatgacatacttttcactgcgttg

SEQ ID NO: 24811 - DNA, 825 bp, Arabidopsis thaliana landsberg
aatagccttttcctttcattctcatttgttacagttacaccattagaatagattaacattttactaaaattgaatatatatatatatgtatgtgtatttctaaatgagtttcaaagctagaactcgccaactttttaacttaactataaatccactaattaccaacataagtaaaaactaaaaacatatttgaaaaatgtgacttagtcatgaattagagcttgccatgaatatacaaaagaacgacaaaatgttaacccttatgagctataatgaaggtctggatacttttaaatatcaaatgtaacttaataccttaatttaaccattgaatcacttgatttggtacttctacgataaaactaatttacaattttagaactctgaactaggggaaaaaagtaaaaaagaagcaaaaacagtgatagaaaaatcaagctgaaatctaagtgggtcacagtggtctgttttgagatagacgtatcaggaaacctataactctgttccttacctgtgttttcctacctatatcgtgcgtgttatgtaaccagttcctatttaattcaaaaaaaataaatatatcataaattttcgacgagaagataattgtcactattgaatttaataaggtcaagaacttgcagccgcagaaatctacggccaacctcccgtaatcagagctcaaaaacatgggccccttgctactacttttgtttacataaccttcaattcattttgatggtttaacaaaagcaatgcaaagtcggttacgttacttctcaacattatttcgagtgtcaaacaaaaaaataagaactcaacaaa

SEQ ID NO: 24812 - DNA, 1066 bp, Arabidopsis thaliana landsberg
aaacgtagaaacatggaaagatagaaaatgattttcagatattgaaggatttataactttttgtggaatgaaattgcctaggtgcatggagaggggaaacttgaattcaatcatgtagtcatcttaatttgaaattattgggggtaaaaaagagttgtagcgaaatataatactaggcaattggacatgtctcttctctgtttaaaattgactcatccaccttatgtgtttctttcttccagctttgatccttttgtcaatgcatatactacttgttttctttctttctttctttcttaaaatggacatttcatacacgttgggccatatggcccatatcaatgtatcattttgtgttaggttttatccactggattctatgtcaccttgaacatatattattgctttgctcaagctccccgtgtctacgttctgtcaagtagttttcccctttctcacatagatagctagatgccttatgcatatcattcaattttaggcttcatacgcgtaaaaatggattttcaaaaagagaaaaagacaaagactcaagcaaaatctagggagccctcacgtggttcgtctctactaattatggtctctatatgctaggctttttgttagattagaaacataacgcaaagtcacatgatggcacgtgtccgatcctaacaaatgtgatactttttaacagactctaggaaaattcctggggatgggtatcatatcaacatgttacattgtactttataatatcatctaagaataaaatacttggatgtacggtatcggaaaattctacaatacataatttgcgcttataaattaaacatctatctatatggtataaagcttatattggatgcttactttcaatcattcatatcaatgtatcatgcatagggaatatctttgacatgtaaactttaggcgttatgcaatgatcattgtcaaacaatgccattcacaatcttacgaaggggagagactacatatattaaatgctcccttacgttttgccaatactaattcataaataatagtgtttctgactaaaagatctacc

SEQ ID NO: 24813 - DNA, 151 bp, Arabidopsis thaliana landsberg
agatcctggtgatgccttattgccgcttgaaatgcctatcgtgtgcctcccaagactagtttttgatatgcttttgaaacacccttcatttttacttccaaaagtggttacgccagatagagtgcgcaactttctcaaagaatgcaaaacg

SEQ ID NO: 24814 - DNA, 1149 bp, Arabidopsis thaliana landsberg
  unsure (1)..(1149): unsure at all n locations
tactcatgttcggtcagctcaccaaataatgatactgtgtggcatcgccaggcagttcttagattgtcgaagacatctatttctggagacagggagatggatgcatttactctggagttcttgagtgagtctgaaaagggaaaccaaactaaacggagaacagacaggttttacatagttcagacaatggcatcagcgtccagcaaaattggtttgtttgctgccactgcatccaaagaatatgatattcacttgctaccgtgggcttcagtagcagcatgcatatcagacgattcatcagaggtactgtgcaatattgattgtgcctttntgctatctgcagtaatattttttcccatgtcgcaccttcgtcattgtgtgtgtttgcctatcatccagataacatgtattaacctgttaaaaattgtttagatttttgctcatgttggaactttgtgtacattcttgcattactccacatacatttatttatctgtgttatcgtaatatcctccatcttcattcttactggtaatccatatatttgcattcttttcaattatcatgggattactctgtgccgcgaaaggaagtcattcgtcactgcttttcgattggagcttgcattcactcgtgttttcatatggttttgacagaataatatcctaaagcttgggcatgctttctgctttcttcccttgcctgtacgaactggattgacagtacaagtcaacggatactttgaggtgtcatcaaatcgtcgcggaatttggtatggagnnnnnnnnnnnnnnnnnnnnnnnnnnnnnnnnnnntggaataggcttctcctggaagatgtggtagctccctcttttgcacgattgctactttgtttgagagaagtgcttgattccagagattcttacttctccttatggccaagtggatcttttgaagcaccatggagcatattagttgagcaaatttacaaaaatatctgcaatgctcctgtactgttttcggatcttgatggggggaaatgggtgtctcctgctgatgcttatcttcatgatgaggaattctcagggagcaaagatcttggtgatgccttattgcagcttgaaatgcctatcgtgtgcctcccagactagttnttgatatgctttt

SEQ ID NO: 24815 - DNA, 1264 bp, Arabidopsis thaliana landsberg
acttgttgattttagcacggattttagttattatgagtgcgcccaaaatgctttcgctgtgacaaataagattatatgtcttagtggtgacagagactctgtacttataattcttcaatggttgctaaaacttttgcatttgttctatggctatatatacagtaacaagtatatttaaactgaaaggcataagaaacctaaagaaactcatcaaaagaggaaagtgatatcaaagatgaacgttcacatcagcactaggaagaatcaatccagaggttaaattctcaggaatagtcaagtgatagaaatcgccatgtaaccatcttcaaaatatgcgtctctgcttcttcttcttttggttttatctgacgtacactgcaagaaacataatattgctgaagtttctttcctcagtttcgctacagagccaccaataatcttctttgcagccaagaaacgtcttaccaaagccattttgtgttttcttttatagttaacctgtgtttctcatatgcttggtttaggagcaggaagagtgatttgaagttctgatctggaatgtcagaactcagaagtaataatgagaaaagtatatatcttcaggacgatccaaattctttcctctgctttatggaaaagagtttggaaaaaaaatcttcatgtatttgttttttctgaaaaacacccttttaaagtcttttcattgtcatggatattgttcctattcgttttattgtttagatatattataagctttacaattttgaagtttagattttggaactaacaataatttgtattgagatggggaaacaacaagagctctgtggttatctgtaaatttacaatgttttcatcaataatagtaatatgagaaaaaacataaataatagtgatatattcgaatgaggacatgatgatcaaaaagaacaaaaaagctggccaactgaacgatactaattttgatgaaacatgtaaaaaaactcaagaatattatagagatcttaaaagaattttaaaacattgactatcaagaatacaaaaaattttatgaaaacgcaatgtttataatacattgaattgctaaacttcaaagtaatgtgtaacacaattacgacttgctaatcttgacgaacatgctaaacagatggatggagctgacacattgacacacaaacttgtataatgaccaagtcacactgctagaccaaatagctcgactcttatggtataaaccttattcagacaacttcgacgttgttga

SEQ ID NO: 24816 - DNA, 1741 bp, Arabidopsis thaliana landsberg
gaagaacgaaaacaaggcaacaataaccaagcaaacaaggcaactacaatatcaagcaacaaccgcgaaaaaagatagcaaaaaagttgaatttttttgtcaaccacatattaattaaaaagtaactccattattggttatccaattaggaggaatagtatttacaaaggtaacttcagaagatgaaattctaaaaaagcggactaagcagtttactctaacattacatgaacgagagataagagaaagcgaaaaaatgaaaaaaaacgcgtaacactccaaaatcgtctagcaaatcggaaaaggcgggccattcttcaagtgacagtatcatggaagctagctctgaacaattagtttcaaacgactgataatcgatctttcttaaaatgatacttttcatagcccaaattaagttagaagatacccctcctaataccttttacaccgagcaatatcgtttaatcatttctttaaacaaggaaattgaattagacttggaaaacccaacattttttcggttactttctgagtttacattttttgttttactataatacaattaagtgatggtaagggttgtggaattaacaattaaattaactaaaaaaatcttcggtcaaggttttgacatatacgatagtcaacttgtgtggcattatacatcaaatgattacattttagttgagattgtaaatgccaaattgaaatcgtctacttgaatttatttttttatttgtctgaaaacttcaaaatgtatctgtttagccaaccccgtttgtcgctgataatacaccttcactagttctccttcaacgttaaatttggttttggtttgattcggtccgatttccgagtaaagttatggctaaactcgaaccaaagttttattagttcaattaagtttcgaattcaattcaatttggttggtttaattcggttgtattaaaacagcccacttcaaaccttgggcttattatattgggctcgaagatagaaatatatgccttgattgggttttgcattatacgtttgggtttttacgagtatgaacggtggaactttcattgatcattccgttcgagtaacccacgacgtatatggaaaaaggagatttacataaaatattttttttttcgctcgaagttgactatcatgaagttggatgaaaaattaagaataaaatagtactattgaaaatttgaaattttttggttgacgtttttttactgttaagcggatgacgttttagacgtggaaaattgcatgggtttaagggatgattaatactataggatacacacgttaactggtttagatgaattgctgacttggtgttgtaattacggacatccgatgtcgtcgattacatcattgcaatgagcgatatcatattaaaaaattgctttgttattgactataatgaatcatcgagagtatgttgacaaagttaaaattcacaaattcccctcgctaaaatttggttcgggcatgactgtgaccaacgcgaattattttgagtttgagtagcacacccaaccgagttattttgcatctgatgaaggtgtcgataaagaataatgggcccaaacggtctaacttgttatattccaataatcaaatgtatattaggtagtgataaattaaataatttcatatgtttagaagttgatcgttcacactttcacagggactggacaaaacgtggatcttgcttttttttcttaccgtaaatcagatc

SEQ ID NO: 24817 - DNA, 1059 bp, Arabidopsis thaliana landsberg
gaagctctttctctgctctagtaagtgtggttattcccttgttttagaggttattgtagttagtttctgtggttatggtttatgacgaatgaattaagttcttacattgtggtttggcaaactgtagaattgattcctttgctttatttttactcataggaagtgctttttatactgatgtgttctgtgattatctttcagattctgattcttgtagttcctctgggagtgaaacagattctattaaagcttcaaaacccacaagtagagaggtatatctaacagtggaataacttatgttatggagtctctgtgtttggatgttgctctaatttctgcaagatttttcatttactcaccaatatttccatggactatttgcaatcataaaagtgaaattactacagaaaaataagtatagtctcctctttaatttaggaaaaaaagcaaccaggagttggtatagacaaaaaagaggatgatagcaacagtgagaagatagttgtaaatggttagtctctttataattgatgtatgcaagttggagtgctcggatatagaagtcttcccgacactcattctttgttctctgtagattctttgaatgaattggatcaacttgagcatactgttggggaaaagtcaaccaccatggatgcagtagttctcgttccagatggtaagaaatgaaagttaaggaaggttggagatggtaatagatgtttattttcagatcatgagtttacctgtcatgctttggtattatagaggagactgctccacctgagaggcaaatttccccagattccccagataagcgttaccgcgcggctttcttgaagaatcgttttgctgataccattatgaaagctcgagagaaggcttttaccaaggttgaatttttaagtgtccgatctactgtgttgacgaaaaagctcgcctgaacttgtggattgttttaatcaaaaaatttaatgcccccaattcccgggtgaaaaaggggatcctgaaaaattgaaaatagaaagagaggagtttgaaaaccggctcggcaaggtt

SEQ ID NO: 24818 - DNA, 2386 bp, Arabidopsis thaliana landsberg
  unsure (1)..(2386): unsure at all n locations
gaaattacataagacaataagtcataactcataagataagaccagcagttatggcttgaaaactaacaaatttagttcaaagttaaaatattcataaggaagatctctcgacacatgaagcccatggagctgaagtcatcagctgtatgcatcaaaggaaaggtaaggtaagttctattaattttgtatatagacaacacgactcacatgtcatactagatcccaagttgtaaagccaatagagaaaaagatggcacttttaatttttggataaaaatcatactccatcaacatcattcttctgtgggccttagcctaaccatccggaccgaaaccttctcaaaaaacttgcgcatctttgcttggtaaagtttaggctctggatttggtgaggagatctttggcccaaaatgtgatttaaaacatataacccttgcacggcattacatttgcactgacataatccacaaactcaagttttgtatcctggaaaacaaaaacataagtataactaaattaagaagagagctgagtttatgtaagaccaagctcttacataatcgtcgtcgtgatccttcatagctgcgtctatgagcagagtacgcaactccaaattgctccgtgtataatcaagatctccttctcctgcccactcgaatttcatggcgaagaacttgtagtcaaaactatcccactccacatcaaaaccctaaaaataaataattgagcangaaccaaatagaaagagaaagttatgagtacanataccagagaagcacgattaagcattgacataacttgagtcacgtaacagatatcttagctaatacgtaatggaatagatatttatacctcactgtcttcaaattgatcgtcaaagacttgacgttgtctcacatattcaggatcactcaatttgccgtagcggagcatcctatcgccagctggacaaagccctggtaggaccatcgcatccaaatctgtcttctccacattaattttcggcttcttcggcagtggaggattgaaacttgtcgaatctccagccttgctcaaatcagtatcaacttcacaagccattctcaaaccctagatctcccttttcttgtttttttttttttttctcttgcggagctttttgtgtgtttgtagcgagtagaactcgacgggtcccgttttattatgaaccgtcggaatagataggttcggttctattagaattcggatcgggtttggttttcgaaccagaaactcctaccaaacccaaattatccgatcaatttaacaaaaccaaaacaatccacaaaataaaataaaaagacacgatctatttgagagaagtatcacataatgcccacataataaagtcaataatactatgtcctaaagttagatacccccgaatcaagacctcaaaatacacataaattaattagtttaatcggtttacgatctaaactgatcctaaaccacttcaaaacaaaataataaaataacactttattaaattaaagaaaattgaagatatgtcttgtctctcatagacttctccgttagtggacgggtgagaaactgatagacttctccgtgtcttgaagccgcatcaaccggaataaaaatttaactcaaactgacgttagaaaaaccatcatcataaatactgagttaaagtaaataccaggattctacatctcccaactcatgtcctaaaaagtccaagtttatatatgttagccatataaataaaatgatagaattaggtcagcttgtcacctggtttacatgaatgatcgagcaaacaataatagtttttgaatttgtccacatcgtcgaagcccacaataagaaccgcatgaatttgcagtttccatattgttctaaagactcggggtggtaaattccatgtgttgacaaacaatgtgctatttgtaataaaactagttactatataacattaacaaaagacaattcagttatgtaaatcacatgtctttggtcatctaagtcaccttataacttgagtgaaggattaaggttacatgagataagacaaggaatcgagaacaaaaagaaaagacttaacaagaaaacctgagatgagaagtaaccaattcttgattaacttccatatctcataaatgggatacgtaatatcatgaaaactttttattttcatatgtatatactataaagaaatagaattccatatgtatgtcatgtccctttgacatagttttagatatgccatagaaagttgctagctcctctcattctttaatttgcgaaaactcgaaatcgcaagatataatgcatctcaagaattataatattcttgtatgaccacttgagaggcaaaggaaaactatgtggttccggtctagcctta

SEQ ID NO: 24819 - DNA, 752 bp, Arabidopsis thaliana landsberg
cttttcatcttaaaaattcttgttcttattttatcatttatgaaactacatatatatattgagcgggggtaagaatgcaaatattcatttgaaaacaacattatataatgatcatacaatatcttacttcaacttaagccttttattaaaaaaaaaaatagatacctttttttgccgcatttaaatcctactccaaagacagaaaacaacaatttatagtggaaaatatcaataagactataacaatcataaactctcatctatattatcctcttttatagtaactttgataattttctaaaaatataaaattctgataaatctctcatgcagatgatcaacgagtcagagccagtttctgtttctggaattccgagggcaatttcacgtcagtggctaacccgagaacctcaaatagtcgaataagataccaagttatgtctatctgccaccactccaatccttgcctcgccgatgactcaaaggcgtggtgattattgtgccaactctctcccattgtaaataagcttagccaccttcaatatacattcacaattcaagatcgatactaagacgtttttatatatagattaatatgcatggggcgtcgtcttaatattaagattaccaaacgttacgagatgtgtctttagtcttccatgatcacgaacccaaaatatggcatgccgagttcacgagccatgtcacgtggtacccaatcacacctccaacgacctgttataacgtatatc

SEQ ID NO: 24820 - DNA, 1222 bp, Arabidopsis thaliana landsberg
gtctctccttctccggtcattcatttcaatgaatgaaaaaagcttcagaaaacgaaggtgtcggtggtgtggctctgatctcctcccacgaagatctctcacatcttctcgttcttccatgtaatcatcaccccattctcttccaattcttcatttttctgaggaccgttcctggttcaaaatatatgagattggaagtaaatgtttgcatgttgtttcttggtgtagaagcttgagtggggaaaggagtggtgagagaacggtaaagagactaaggttgtgtaaggctcttactgtaccagatagcacaactttatttgaagcttgtcgaagaatggctgctcgtcgcgttgatgcgttattgctgactgattctaatgcattactttgtgggatcctaacagacagggtatacatgttttcatgaacaggattctaaatgcaaactggatttttcacttatgtttttttttatctcttttggtttttttaaggatatagcaacaaaagtgattgctaaacaacttaaccttgaagaaagacctgtatctaaagttatgaccaagaaccctgtttttgttttgtctgatactattgctgttgaagctcttcaaaagatggttcaaggtttgttatttcttgttctttcataatttttgttggtcatcatggtatttgaactgactagtggatatgcaggcaagtttagacatttgccggtggtggagaatggagaagttattgcgcttctcgatattgcaaagtgtttgtatgatgcaattgcacgcatggaaagatcagttgaaaagggtaaggctattgctgcggctgttgaaggcgttgaaaagaattggggaacatctattgctggtatgtttaaaaatatggaattaagtatctccatttgaatccatcacaaatgtcttcttgcctgcctctgatgacgtttttgttggatataggaccaaacacttttatggagacacttagagaacgaatattcaagccttcactttcaactataattccagagaatacaaagtaggtaatatcatctctatatttattatcatctttgaaatcattttgatcttatacttgttttattgagacaaatgcaaagcttaacgagtaaatttggaatgaaaacgtacagggttttaaaggttggtttggatgagactgtgttaggagtaaccatgaagatggtcgaatatcagtc

SEQ ID NO: 24821 - DNA, 2387 bp, Arabidopsis thaliana landsberg
  unsure (1)..(2387): unsure at all n locations
atccgagtcacagcaagttcttcaaaacttcagaaaaagatcaatcttagtggtttgtgaaatcttcagactgatcagaggatgaacagttctaacaacaatcatatatccttagcagtactgattcatgataattgttgtgcttgttacttcttagtaagtaggatcacaaaagcttggtcacaccaacaatattcggattaaggaaagagatcagcgttttgatttgagatatttacatttcctcttctagtcttgggcttataaaggcccaaattcagggaccaaaaacgacgccgaaacttgcatcatattcgaactcgaaggctccttttgatgcttcttcttcctcaaatctcactgtagggtttttaggggttttctctctctttgcaatcatggagtctctagggaagctacagcttcatcagcaaccaaatcacctctctttcactcatttctcttcatctttccccaaaaagccttcgtctttctctctcagatccttacccagatcaacatcatccttcaaattcatttcaatcaaagcttcctcatccaagtctcaagactcgaagctctcaatcctcaaatccacatgcgtcagcttcactgcggcagcagcacctgttccttgtgaatctccagctcaaaccttcaccggcgattgcggttcctgtggcggcgacgccgttaatggaatctctcaaacaaagtaacggaaacgtttcatttgaagaagaagagagatcactcgaagagtatcttgcttctcaccctgatgatgttgaagctctacgatctttaatggaggtaaggatcgaatctcgaaagcttctagaagctatagaattgattgataggttgattgaattggaaccagaggagaaggannnnnnnnnnnnnnnnnnnnatatctttagttacagtggagatttagagtctgctaaaactggttttgaagagattctagtcaaagatccgcttcgtgtcgaggcttatcacggtttagttatggcttattctgattctggtgatgatttgaatgctgtggagaagagaattgaggaggcaatggttaggtgcaagaaggagaaggatcgtaaggacttgagagattttaagctactagtggcgcaaattcgggttattgaagggaagcataatgaagcattgaagttgtatgaggagcttgtgaaggaagagccgagagatttcaggccgtatctatgtcaagggattatatacacagtgttgaagaaggagaatgaggcggagaaacagtttgagaagtttaggagacttgtcccgaagaatcatccttatagagagtattttatggataatatggttgcttcgaagctctttgccgagaaggtacagcgagagatggctgaatgattgtcttacgaaatgctagtcgtgcttgaatgtggttttttttgtctcttttctgttgctaatggttttagatggttgtagtatgtaggttgagcttgaatttatgtcgtgatcgtgtgttgtagtacggatcgaatactcaatatgggaatcttgaattgcttgcactgttttttgagatgtgtatgtatacatcacgactcacgagtcattgtcccaactcaccttaaaacatcatttcaaaagcaccaagctgtcttgttttctcttgcttggtttgctgaaaatggttgaagtcgtgttggagtgcttctgaccaagccttggatacattgaaaacagagttgaattttggaggcatataattaaactaacaagacaccagtatatgattttacaacgcttgttcttgttgtcttgcagctggagctaagagcttcttctgatcattaagtaaattgtggatgtcctgagcgactgcagaagcctctgttgctgatgtagtgagaaactaagaagagaaaggcacttgaattattaccaaaacacatgctaagatatagaaacacagcaagaggtgaattagtatttcatagctcgattttgttcatactttctcaacagcctctatttgtgatactatagaagtgttcatcttctccagatcagaggaggctttcttttgtagcatttcagataactccttcaaggctgctattcctgaagtataagtgtctgatgttttcccaattcttgattccagatcgcgtgttgcctgcgtgagtaaatcaaccactagtgtgatcaactggttcaaagcaaaaagtgaattgacataagtatggtcttttttctacatcatatttgtgagcaagaaatgagtgggtatgttcttccatagttcttaattgttgctgttgctgagagactgatccaagaactgttctgtgcaaatctttaaggttttgatcaagttgtgatccaaa

SEQ ID NO: 24822 - DNA, 1849 bp, Arabidopsis thaliana landsberg
ttagaaatactgagcttcccctaaagcacacaagaaactccacaagaaatggttcatactcttacacctatctcctccaccagaataaaccaagtaatgaccttctttaaacacattttcagactcaacaacaggaagtgaatcattcactgcttcaccaactacaggcaatgcgaaatcatcaaccttaccaccactcgaatttcgaaacccgggcctcttccgcttcctcgcattcacacccgaatgatactcaccaatccccatcacactaacactacaattcccagacttttcaatcacaaacctcctataatccttataaaacgcagccgctttaccatccttaggtctataacgccaagccatatcacaagaactactactaccttccacaatcacaggtttaccaaacttataaaagtgaatgtctttaaacttctccatagtagctttcatcatcaagtgaaaaacttcaggatctttgcaatcaattgggatattggtatcacaatccaattgattaccatcagagtcattctcagatgtttcaacatcagctatattgatgaatccagcaaacgcggtttggttcgccgccatgaaatcttcaccggttttgacaatactgtcgtcggatttaagagtagcgtttgaattggatgtgaggaaagttgtgattttgtcagatgggtgaaatagtggatcttctggttcatatgtagcagcgataatggtgaaaactacgactccgattacgagtacagagaagcctatgcttccgattaaggatactgcgttttgccctagattctcaggtcggaaacctccggttctggaaaatgcagatcttcctgacatctttgtcttcaagattcgatgaatgtcattctcagagattagagacagtgtcaagaatagttatggccatgtcaagcggaggaatcgaagagcttggaacatttcttgtaatgtgtgtgtgtatttttttgcctacacgtgtacatgtggaggtggagcgactctacttgcgtcgtcatcgagacatcgactatagcaaaaggacgttactttagtttataatctgaggtcagtgtgggctaaaacgacgtcagtttgtgagtttgtacatttttccaatagttgctgtagttagaaaccatttttatgcactcggtgaaataagaaatccatttttgtccggtggtcttttaatagagctcaaggccaacatttatactgtgtttcatttaaactgtttaacagggaaagaccaagaataccaaacttcaaaacgaaaatgccgaatcaatgtgacgagacagcgtaaaaagcatgaggaagggttctgatatacacatgacccataaccaaaagtatgtacaaaagggaaagaaaaattcagccttcaaaacttagcaaatggtttttcttccaactccggagaggtaagactagacctaaacccggctctaattcttgaatttttccagatcagaacctgaaacactacaaatctcgtaatgcaaccttcttgcttctacgatatcaataatattaccactacgatcgttagctattcgatttggaagagatatcaggaatagatgcacaagacgcagccttgtgctggatgcttttcatgctcagctccatgcttctatgaaccatgtcctgcagcagtttcttagccgtttcagcagctttttctgccccgtcgacttgtactgcaatgccatagacaattttctctagtgttaatggagtcatttctttctcacgaggggtttctctcagtaggtccaagagaactctggctctatctcgggactttgatgttccatctact

SEQ ID NO: 24823 - DNA, 788 bp, Arabidopsis thaliana landsberg
  unsure (1)..(788): unsure at all n locations
aactactaattcagcattcgtatcttgtactaagctatcccgttggtcagtttcttgttaattatccgaacacaagtcatctgaaagagcactacacagcgaggttttagtcagaccttggattcggcatcctaaaacacgatgaacctgttaggaaaccacaaacaaaagaatgaaaagagatattaacaagcatgagcaacacatgagtcaccagaaatgagggcgcatcataatagataattctgaaggaacaacatttttattttgatggatacctggaggtttccaaccggaagagagtttgtatcttccaaacaactagaagatttattagtggcacgtactgcacgacgttcctccttgggaagcttctgcattagtacgtataagtggttaagaacatatactaaatgaaagatgatgcaagaacaacaacgaataaaaaaagaaatcaataggaccatcaagaaatttcaactctaaattcctaaagaaaaaaaatcaaactatttccaagctcctgcagttaaaagaggtatccataattcatctgccgaaacagaggtatagtcacatgtatcataactacttgtgagaaaccactatactaataaacaggcaaaacaatattgagtttgtgaagagtcgcaaaatgataagcaaaacaaaatgtcactctggttatataagaactaaaatagccacaatcttcaggacagaacangaaacactacatgcaatattgaccaaagactctttacattaatgcagaagatactcaacat

SEQ ID NO: 24824 - DNA, 986 bp, Arabidopsis thaliana landsberg
gtattgtggttgtttgtgatgatgtgtgcgcgtatagttctttgaacatcagaacgtggtggattttgtaggggggcgttgcaacatgttgatggacgattctgcaacgataaacatgatggtagcagacgaggtcgaatcgaagccgtacgggatgttatccggtgacatccagcaaaagggttcaaaggaagaagatatgatgaatctcccttcgtcttacgatatctctgctgatcagatccgactcaatttcttgcctcagatgagtgattacgagacacaacacttgaagatgaagagtgattatcatcatcaagccttggggtatctcccagagaatggtaacaaggaaatgatgggtatgaacccatttaacacggtggaagaagatgggattccagtgattggagagcctagcttgcttgtgaatgaacagcacgttggtaatgataaggaaatgaatgagaacggtagggtggattcagggtcggattgcagcgaccagattgatgatgaagatgatccaaagtacaagaagaagtcaggaaaaggatctcaagccaagaacttgatggctgagagacggaggaggaagaagctgaacgataggctttatgctctccggtcgcttgttcccaggataaccaaggtatcttggtttatttcttggtttcggagttataatgcgttctctgaaactagtttttgtggcatggaagttggacagggcatcgattcttggcgatgcaatcaactacgttaaggagttgcagaatgaggcaaaggaacttcaagacgagcttgaagagaactcagagactgaggatggatctaataggcagcaaggagggatgagcttgaatgggacagtggtcacggggtttcaccggggctttcatgtaactccaatgcatcccagcgtgaaacaagatgttgatcttgagaattccaatgataaaggacaagaaatggaggttagagga

SEQ ID NO: 24825 - DNA, 925 bp, Arabidopsis thaliana landsberg
aaacttctttttgttatcaagtaatgactattaaaaaaatagcaaaaaaagaaaagtaaaatgaaagtattttttattttttatatttttttcttttaaatgaagatatttagttaaaagtgggattaatgtatgattcaattcaatgtaaaactttaaattttttatcattaagttttgttattttttaatgatattaatttagaatgacatgtggcacttactggtgtgttgatgtgtcattcatatgcaaatagttggccaactttcatataatttttctaagccagtaatgaaaacattaagaaggaatccaaaactatgaaatgggacatgtggagagacatgcttaaataatattgacgatcgatttttttatcaccataaaataataaaaattgccaagcattatcgagcgccttcaagcaccactctctctataacccactggcaaaaacatacggattgtgcaaatgcaattcaatcaatcactaaccaaatcttccatctttcgacaaaacttcattatgcaaatgctgatatgcaacctaggatagattaagcacgcacatgatgggaaatttcttttcaaataacattgcttctttcttttttaaaaggtttttgtttttttttttcatttttctccatgttagtctttttttttttcttcatttgaatcaacattcgagaagactacgggtcaaaacaaattatgaacaatttcaaatagaaagtttcctttattagttatttataagtgtgaaacgaaattgttctttcttaaaaaataaaggagacgaccagatggggggaactacaacactcaacccctccatagagtaatgaataaatgcgacaagtattaaaataattatgaataagaaatgaaaattatagtctaaacctgtatttgcagttactc

SEQ ID NO: 24826 - DNA, 1127 bp, Arabidopsis thaliana landsberg
  unsure (1)..(1127): unsure at all n locations
aactttatttcctggactattttactaatcattccatctattttactttctcgtgttataatatgttaagtggagtgggtactgactaattatgagatcatttaggtgtcatccttagatgagcatgatttaacttatacatagtttctaccaatttcttatctaccaagtctgatcggcaactgtaagagttgttgtaaataataagtagaaagttgtgtcgtttagtcaagataaaaatattcgtgtggcaaaaatatgaaataactatgttatacgttgatttcaactttttagatgctaatatagtgtgtgtgtttttatatagttaatctgatcagtaaactccaaagttcatttgccaattctctatcacttactgtactgttactttttatatttattgttttagttggaaacaattccacaaaaaaaaatatatgttgattgatccaaaagagttattaaatatttcggatcataacaggaaaagtagtaatcagagtgctctaactaagtacactttggaatgcagttgaaggaattgttttattgatttggtctaccatctaagtttgtgtttggctcccgggtatatatcaaaatagtttaattagtccacaaaggagggcatatataaaagttatcctttggttcctatgtgaatcttattttaatagtatcttttactacatcttttcaatattttggaaaattattatatggtccaaccacgtgacttcacctatacgttttttttttttggacaaaaacttcacctatacgtatgtattgaatttgcagtttattgataatctgatgtaattacagtataatacgtaacaactactgataacgacatgtttgaatttcaattatatattacatcatactataaaattagttgcaataaatgatttaattattttccgatgtcctggacttttctgcataacatagcccaccaatatcaaaattattaaactataaacaaatttaattctttttttatgtgcttgtaaaaaaaaaactttcaaacacagccaaaacaagtcttaagacannaatacacatacttaaagtttgaaagccagacattcngatcattaaaacaatagacctaaatt

SEQ ID NO: 24827 - DNA, 1710 bp, Arabidopsis thaliana landsberg
ttttaagtttaacgaaaatcttgtcggaaagatgtcgcttgagttcaaggactacactcttcatatcttttggtgttttgcccttcagattcttgccacaaatgctgagagctaacgggtttccgttagcatagtcaacgaatttcatagacaactccaggaggttctgatctggtacatcttttccaaacgcacatctggagaacagctgcagagactcgtgcttgtttaagccttgaaccttatatatctcgttgacctgacattggacaagtacttgcttatcttgagaggttacgattatcaagcttccaggaccaagccagtcaaattcacaaagaaaactcgttgcacccagtggcttgcgcacatcatcgagaacaagaagaattcttttactgcgtaatgtttttaaaagaatgctcagtcttgtaacttgagggtttacgccaagctgtttctccaacaacccaaagaagcccttctcctgaaactccctgtcgaagtcttcgatgaagcaagaagcttcaatcacgggaaagttggtataagctgctctagcaagtgtcgtctttcctatgcctgccataccccatatacctaagctgcggatgatgcagcctggttgcttgcaaagcaagtattctatcttcgtcaatctggagtagactccaattctacccctacggtcaagtttttgacgcacgtcggcaacaattttttccacaagttcggagtcgctgcatttttatacaaatcgtcttattaaagatattttaatatatcaactaacgaggtcatggttaaaaggattttccggattagacattttcaacattttcggagacatatttattgatctaattcaaaaataatattaaatttgtatattattattatctatcttcatttcacaaagcatgaaggctaaaaaaaatacaaaaaagatcccttttaaggggaaaagggggaaaaaaatctaaattttagaaaagtaggctaattctctttattgttcagcagaattcaagatatttcgaaacgtttttttttttttccccactaatatttcaaaacgttttgtaaaatggtttgactcctaaaaatgaacacacaaaatatttccaaacgttttgtaaatctaaggacgccgttttgataagtaaatttgaacttcagaaaacctcaatcacaaaataatatattttcttgattaggttagttaactatatttgcgaaaagaagcaaagaagaactcaattttctttgggaactcatttaagtcaactgcttttttttgttctgaattaccaaattcgaacactaatcaagatataaaaatggttctacttgtacaaaccttcgcttatgagatgatacgtgtcctcctcgtaagtctgcgatgtcccatagagcgttccgccactcgtctaccttatcgtcaggatacatctttttcagttccaagcaatgtttcttcactatggaatttgtgagtccgtagaaaactggaaccacaactaggcccttgctacgtcggcacttagaaaccttcaaaaactcgtttaggcatcctttggacgaagcgaaattctcagagaaaatcaccactgaaacccttgctttcgctatagctgcatcactcttctccgcaaatctatcatcgcttgctgagtcttcactggcgaaaacagagacgcctttgcgttg

SEQ ID NO: 24828 - DNA, 1194 bp, Arabidopsis thaliana landsberg
tcgtgtcacctacctgttgagctcgagtatatagccatgtgggcagttaatctcatgaactttgacattaaaactacagaggagaagcggttgatcaaactgaacgatctaaacgagattcgcttagaagcttatgagagttccaaaatctacaaggagcgaaccaaatcttttcatgtcaaaaagataattttaatagattttaaggttggtgatcaagtgctgctgttcaactctcgcctgaggctttttccaggcaagctcaaatcgagatggtctggtcctttctctgttactgtagtccgaccttatggtgctatcattctagttgggaagaatggagacttcgcagtcaatgggcagaggctcaagaagtacatggcagatcaatttattccagaaggaacttttgttcctttggaggagcctgtaaaagcccaataagtgtgaggagtcaagctagagactttaaacaagctcacttgggaggaagtcccatgattatccttgtaaataatttttagtttcttgttatttttgatttgttgtgtttgtggttctcagaaaaacaaaaagggagtaacgtgaagttagagtaaaaatttaaaacttttactctactgatgacctaaagatcgagtacattggtcgagtatgagtgatgtttaaaacccaaaaaaattttaaatcatcattttactcgaccaacaggagctacagagtcttccagggagtttatcaagtttacagaagattgcgggatttcctggagctttcctagtgaacagagaatacagagaagagacaagaagacattatgggacccgccgctgacgcccaagtcctccatgcaactgaccagaagacaagaatctatcttcttcttctcctcaccacttgacctcaacgcaccttatccccaccactcgacctcatcttatcaattcactcgatcccatcgcccctctctccacaaatactcgacctcgccacttcttatcctcaaacactcttctctcaaacactcgaccaacactcttcaccttatcctttcttgtccgtcactcgacctcaccatctttcttccccacgcactcgaccgcttctcattcgcctcttcaccaccgtctctcatcactcggccacaacgctcatcatctctccatccacgacatcactcgacaacaccaccgt

SEQ ID NO: 24829 - DNA, 711 bp, Arabidopsis thaliana landsberg
  unsure (1)..(711): unsure at all n locations
gtaagaaaggcggtggtgtgagaatcagattcgatgtcaactaattgaaagagagtgcgcagcgtttttcttcacaattatatatattttgtggaaaagcttaccatacattcacaaagcattcgagatttgatttttatagaaaagtatttacataaagtattttctaaatcggtttctattttgtatgctttcagttttattttgtgttggggaagtgatccatgcattgagcttggagattgatggattggtaattaagcctattaagttaagcaggcctgtttctaaaatgggccctaataagcccaaactacaaaaagcaccgatatatcccacgttagatacatgtccacgtggactcctatgactggatgtaatctccaccacgcgcgatcaccagcttcgtctctcattttcattttccaatttattttcaaaaaaagataaatccagaaaaaaaattacaaaataaaaaaataaaaatctctatcttcttcttcgtctcttctcatcctcctctcaagctccaatggcgagagttctagtctcgtctccatcttcattcttcgnnnnnnnnnnnnnnnnnnnnnngtcatctctccgtcacagtggagtaggaagaggaggaaccgctcaatttcttccataccggagtaataataacaaactcttcactactttaaccaccgtacgattcagcttaaacga

SEQ ID NO: 24830 - DNA, 396 bp, Arabidopsis thaliana landsberg
tgtttcgtacaacatggaagatacttatgctgctgctgatccagtaccggctttagctgggcgtagcgaagttgatgacggaaactactttgcaactacggttagcagcagtaaggtcaaaaggagggtctgttatgagtgtggagaaaagggtcatctttctacagcctgtcccataaagcttcaaaaggctgatgatcaggcaaactcaaagctgggtcaagagactgttgatggtagaccggctatgcaaagctatggtcttccaaagaatagtggtgattcttactacatgaatgagacatacgcttctacaaatgaaacttataatggaggatactcagcatctgctgttggcactggtaaagtcaaaaggaggaactgttatgagtgtgg

SEQ ID NO: 24831 - DNA, 2119 bp, Arabidopsis thaliana landsberg
ccagttttgcacaacgcattgatcacaacattgaaagtgaacacatttggttgaatcttcctcctaatcatctccttatacacatattcaacatcagcagaacgattctccttcaacaacgcaatcatcaaaggcttacaagacaaagccgacaacttatacccataataacctgaacgcttaaacgcctcaaatcctaactcgaatctcgaattattcgcataagctaatactaacatatcagctaaaatcgaattgacacaaacattgccacacattgagattgcatggaaaatcgagtgaacttgatgatcagatccattcctcacaaacccatcaaggaaagatcgaatcttagagtaccttttcgcattggcaagagaatgcaagagcttaaatgtgagctctaacgaaacagagatgtcactgttcttcactaaccaggtatagtacctgagacacaaatctgggtcaagctcagaacttatcaacagtcgaaagagctcgttagggtttatgtctgtcacatgaactccgagctttgaccagtgctgcttctctatgagatcagcgatgacagctacgtcatatctaggtgggcaagggctcccggtgatggtagctgaagaagaacagagtcttcttaaaccagagactccttttgttaaattcgagatttttctacttacggctaaggatttggggaacattgattcgtgctggacaggaaggagacttgggattttgaaatttagggtttgtgaattttgcacccattggcatctctccttcgttttattttcgacctcaaactttacaatatacaatttcagatgtttctttgcgaaattttacgaaactaccactgaaacttcgtaaagatcagagtgtttgctgattcctaagttcaacatttgtgcttcgaagtggatttgagggatttaacctacattacttatcttgacacaaattatgtaaacaaaaatgttattttgaatcatttttaagtttttggattcttggtttacaaaccattacaaaaaaattccttctcatcactcttctttggtcgctacttgtttctggcgaagagctctccaaccaatatcacgcctaaaaaaaccttcaggccagttgatctgttgcactgccgagtacgctctttcacgcgcctctttcaaggttttacctttcgcccgtgaccccaagaacacgctttccagtctgttacaacactcccctgagagtctagatccgttcccgcatggaaaaccttcactccaggagcaactctttcagcttcttcaaggtttttgatgattgatcctttctcataagcaccaggataaccattgcttgtcattacaaccaccatggctgaatcttttgaccaatcaagtgatatgccgtttagctcgcctttacaagcaggtagcacaacttctgctaggtcagactctatacgcatcatcaatacctgtgtttaaacaattttctgcattggttagagcaataatcatacggggactaaacaagggtttttcagaaaaggtggcgtttctcacctgacattctggatctccaaaccgtacattgaactcaataagcttaggcaaaccggatttcttctccatcatgagacccgcaaacagaacgccgacaaacttacatccttcttcagccattcctttaacagtgggatgaattatagactccatcacaaaatcctgaagctccttggtcaagacaggtgcaggagaatacgctcccatgccgcctgtgttaggaccggtatctccatctccaacacgcttgtggtcctgagcagattctagaggaatggcgttttctccatccacaagtgcgaagaaggacgcttcttctccctcgagaaactcctcaacgaccacctgacatcctgcagaaccaaacacacctttgaccagcatagaatcaacagcttcaaaagcctcctctagttccatggcaacagtgactccttttccagctgctaatccatccgctttaatcacaatcggtgccccttgttcttgaatgtattctttcgcggcagatgcatcagaaaatgttttatactgcatttgaattccattcaata

SEQ ID NO: 24832 - DNA, 2981 bp, Arabidopsis thaliana landsberg
agtccggttatcaccagctttccaaaccttcagcagattgctcatttaattctactcaattccaaggtttgtgtaaaaagctctggactctaaatatcccagcaaagattaagatcttttggtggagagtattacataatgcaatccctgtggcagccaatatagctcgtaggcacatcaaattctccccggaatgtctcttttgtggtgaagctgatgaaaccactatgcaccttctctttcaatgtcgccttgcaaaagagatatgtgcactatcccccctacacataccatcaggtcagtatgaagaatcctcctctcttttatatataatgcatgaccttataactacccatcgatctagtcgtgaaaaggactatctgtttccgtatattggttggcatatgtggaaagctaggaatgatctcttgtataataataagaggtgggcgatcccagacatcattaacaaagccattatggattttgatctgtggaagttagctcaacaaactactgtcaaccaagagcctcatcatgaaggagatcccaagccaccaaatactcaaaatagccaaaagcctcgacctaattctcctttctactgctacacagatggatcgtgggtagattctaatagtacggcgggaataggatgggtgctctatgatgctcaaggtacctgccttcttaaaggctcggcagcactagaaccaatgaactcagcgttggagacggaggctattgcgttacgagaagcattagtacaaatgaggcggcttagttataagcaagtcaccttctgtggtgactcacgcatactctatggccatttggagaaggttagtaaacaaaacccacctgactatggaccttcagaaatctagggatacatagaagatatattgggcatggctaatcactcttacgatttctgtcatatctctcggcaagagaacatccattcagacaagttagccaaaacagctaggcagttgaacttaccttatattgtatcatggtctacctaaacatatgtcaaaattgtactttctgaatgtttttttgtactcagtttccttgtttaatggaatagttggccgacaaaaaaaaaaaaaaaactaatatttttgaaagtataattatattttggacattttcggttacccgaaatacttttgttcattaccggttcggttttgattattatgattatagaatttagtattcattcggttattttcaaattttcgcttcagtttggtttgatatttttcttttgttttggttcagtacattcggttcggtttatttacccaagcataaaatacaagtaagaaagctatttcaagagaaatgtaaaaaaaaaaaagagccgtttactacacaaacttgtttcagtagagagatgccatgatctttatagctacaccatcaaactttagagattatgttaaaaaccaatataagctttgattcccattttagaatttaaggttgctcagatgttgttgtcccaagcatctgctttctacgcgtgcttgctacttccttctgtagttctgagttcgacatccgttccacttccaaagctctctcaagctgatattataaacaaaaaaaactgattcattaatcaaattggtctactagaaaagatcaaaggtttgtttcttaagattacattcgctgcccgcatgctccattcactcaaaattgcccttagtctttcgttttcttcgatatactgcaccacccgcaaacaagattacttaagagagtcttgactaaaatctaaatgagtttttttcctacaatgccggtttttgcagaacctggttgttggtactgttgacacgctgcacctctgcatctctctcggctattaaagaacgagcaagccgtagctcagactgaagctgattcatctgcattgttgagatttacatatttttagagtttttgttttatcatattatagagatggaagcttcagaaattaagtattacctcagctgaaagtgtcctcagctcttgatctcgagcagctaaaagatgtgcgagatcaacctatcaagcattattatacatttaaatgaaccaatgaggaattcagctatttgatatattataaaggaaaccagaatcctcacctgaggtgtgcttccatcatcagattgttcatatttgctaagtttctcttgcaagcacagaatctttgaaaagcacaaataacaaagacaagagtgattcagatactatagtggctcacaaaacagcaaaggccaaagagaaaatcaagcaacgtagatggaaaatattttaagaagagtgtttgtatcggtagcatcacttacctcctcgtttagaaaatggagattttcgcgttgatattgtaacaaagccgtttgttgatcagaaagccgcccttcataatacctttgataccaaacaaaaatgaaagatgcaaacttgtacattatttgctgaagctgcataaatttataaaatcagatacattaaggacattcagtacctcaatccttccaaagcagctggttgaagaggagaatataatgaatttaagacatcgggctgagaattcactgaattatactggcgaacataacctaccagtattaaaagacagataagaagagctgcataataacctagcaacagaatctcttactaaagacaaacaacataaatattgtaaaaacatatgccaaaagaatgtattatactttagccaatagtttattttaaaacaccttatgaaatttttgcattgagaacaaagagttttcaaactgaaacccagaacataaattcttaaagattctttaatgatctcctgattttcaaccacaaactatagccaatagtaagaactgtttacatgataaatataaacacaaattgttgaccgcagatgtagacaattttgatagtgatttagcatgcataagaaatgaaaa

SEQ ID NO: 24833 - DNA, 2305 bp, Arabidopsis thaliana landsberg
gtcggttctaattgtctttttttctatctagctaccatttttttagtatttgtttttagaatattatcgttctaatcatcttttattttattttatcaagacaaatacaggtagaaaactatttgggatcctttaaggatatatcatttcttcgaaatattggagcaatgtaaagatagataattcactccttaataatgtatgcatctaaaaatagaggttcaacacccacccacacacaatagatattcaaaatagtaattccacatttgttcacacatcaaattaaaataaagtaaaaaattctaagatcataacaaatgtatttttatttgagatggttgaagcaagctagtatattgttgacataagaatttttccaaaatctccgagtacatttagaacatagaactaaataagatactaaaatagactaatagttatcaaaaacaattgaaaatgaagaaatcggaaatgattaccttcccacttcacagtttacactataaaagcattctcattggacataaaatgaggatgtctttaattataataaagataaataaaataataaaaataaaatcattcggaaaaagagaagagaggatgtctctccagagacattaaagacatttccagagacacatgtttacatttggtactcatgattggttgatgtttttttcataattaaaagttaattaaataataaaactgtattaaaaactaatatttttgttggctagactctgaactgtatgtgtcaccgatggtggtgctctgatggatttaggtattgattaattaggacatatcttactttgttttcattcttaaaattattgtttatgtacaaacaaatcaaaaaattatctttagatttagtgactaactagcgcgatgcaattcaagttaaagataatccgattaaaaacgaaaaattatatgttagtatttatctaacatcgatattcttcggaaaaataacataaaattatgtggtgagttaaggtttcaaataggagtgtcaaaatgggtcaaaatttatgggccagctcaactcaactcaacccatgaaccctaatgagttaaattttttgactcaaatgagttgataagtcaaatgagttattgggtcaattggtttgatgagtcaaatgagttgggttgtaatggttaatggtttcaatggtttacccaattaatccatcaagttttgtaaaattgaattaaaccaagtaaaatctctaaaccagtgccaatttaagcttaaccaacacatctaaaccaatttaataaaatcaatatttttccaaatttcttaaatatacaagcgatgaaattgagaaaaagtaaactcgtaatttttctaccaaaaaacataaacgcgtgattttcccgccaaaaacgtaaacccgtgattttcccgccaaaaacgtaaacccataattttcccgccaaaaacgtaaacctgtaattttttcgccaaaaacgtaaacccatgattttcccgccgaaaacgtaaacccgtaattttccgccaaaaacgtaaaccgtaattttcccgccaaaaacgtaaacccatgattttcccgcaaaaaacgtaaacctgtaattttccctccaaaaatgtaaacccgtgatttttccgccaaaaacgtaaacccgtgattttccgccaaaaacgtaaacctgtaattttcctgccaaaaacgtaaacccgtgatttttccgccaaaaacgtaaatccgagattttcccgccaaaaacgtaaacccgaaattttccctccaaaaacgtaaatccataattttcccgccaaaaacgtaaacccgtaattttcccgccaaaaacgtaaacccgacatttttctgccaaaaacgtaaatccataatttgcccgccaaaaacgtaaacccgtaatttttccgccaaaaatgtaaatcccgtgattttcccgccaaaaacgtaaactcgtaattttcccgcaaaaaacgaaaacccgtgattttcccgccaaaaacgtaaacccgtgatattcccgccaaaaccgtaaatccgtggttttcccgccaaaaacgtaaatccgtgattttcccgccaaaaacgtaaaccggagattttatggcccgctccttaatccggtcattttcctgcgattaatgcaaatccgtagtttttccgccgaaaacgtaaacccataattttatcgtcaaaaatgtaaatccgtaaaaaaaatgtgaatcggtaaatattcaaagattgatgataatgaattaatgatgataataattatttattattaa

SEQ ID NO: 24834 - DNA, 1318 bp, Arabidopsis thaliana landsberg
taaaaatacttatctcggaggtgtattatattagaattagaatctcactctaaaagttcttggacggagctaaaataacatataagagacatgtgcaaatccattcaaaaccaataaactcttcaactgtattataaatcttacaactattaatgtctaattttagctattgccactacggtctaaaatcttcgaaaccgtgtggaccatataaccctgatgagtgggactaataagatttttaacattaccccttagaatagaaaggtcctatgctatgtattagtacaaggaaatttcagcagccacgtttttttaccacaccactgcttatactaattaggaggattacttagcttggtttaagggtttagtaagaaaagtccatcttcttcctctctgtacgccctttgaatctcatctcataaagagacaattctttctagctcccatcacccttttgctgattgctgattagttttcccttttcatatcagatattatatttcgagatttgacatatataatacaatgttttcgataaactacaaaaccaatttcgaaaaacatataagttttgctggaaaaagccgtcgttgatcaaagccacacgacaggttttatgcctaacaacgttgacccattaatgaaaggactcaaaagcaaccctcatagtcacggcaagattcaattacttttcctcggacccaaagttggttcaatttatgaaccagtttctacgtctaggtcagtcgtctcaccttataatctttaaagtctcccgctgcactaatcactccgtttcatcgttttatatatcacttgattttattttatttcataaaatatttttttttaaatacagatttttcttcaactatgttctagacttctagaaaccataaaagattacaatattattaaaatgcgggacaaaactacataacgataccatttaacgtacgaaatatttctaatttacctattcgtttataaccagattttatacctgtttagatgtttactgttttaaaaactacacattcatggtcatggaggatatgatatctaaaaccttaggattcaagctttcgcgttcaagtagcaaatcaggcctcttatgtatgcatctgttccggtcttataatcgaggattcacaccaaattaaaaagcatcgatctattcgggtttcatacaatcatactcatgggttacaacagtcaacaaacacatctatctggtcatctggatctcaaactcgcaccttacaacacaatatctaaccgatccggatctcatattcaattcggggatcac

SEQ ID NO: 24835 - DNA, 1289 bp, Arabidopsis thaliana landsberg
gatattttgtgcagttaaacctgcctccagattggctgaccaggagccccaatcacagtagtttgactgttcttcttactgcggataacttgatcacctattcgtaaaataacatatggatccgttctacctgttacaaattatcaaagaacatgtgctgaaggaaggaacttgcaatttttaagtgatgaagcattcgctatatgtgatataagcattagtatagcagttcttattgctctaagaattcaaagatacttaagggtatatataaataatacaacaacacagactgctagagaacaatgaactgaagaagaagagagatgaggagtgagtatatgacttaccagagaacatgtatggaagtttctgggcatttacaagagtaacagacagttcccctacaaaatccttgttcccttcctgcatttctccagattttaagtcttctgaaacaggcccaacagcttttcccttctggaaatccaagacaattttctttgggcgtacaaataatcgaggcaaatcttctgtcagtagtttggtcaagaacctgaaagagatgaagcataggatggaggaaggaaactgatttatcaatacgtcggatgagagtaaacaatcaacagagagaagaagctaatacgaatacattgaggagacctacattgatataacaggaattcctgatgttgtcatccatagcattcatgcaaaaagaagaaaatgattaaagctattactaatgtacatgattataattttcattggagataatgagaaagcaacagacaattatgattaactaatacccattagattaaacaatcggaatggtgcaagctcaaatttgatctttggaagtgaaacaaacgcccatgatgctgctccaacccaaggcgctgacggaatcaatcttaatttaacccatagttcaccgtcaatgtcaaaatcccgaataccaactggcacaactactgggatgataccaaattttaaagagagcattaacaacatccgagcaccaccagtataccgaagaccaatctggtacctataagaagaaaaataagagtataagcaactttcaactgagccgtgaacagactgtttggagtacccaagctccaaacgaatcaacagagaaaatttcttagatgcagtgaccattggtgtgttgaatccgtggatcatgtcagaacaatcccatccgtaaaaaccaaggtagaacattcccagcatttgatccaccaacacaatgcattagcttcctaacatataagtac

SEQ ID NO: 24836 - DNA, 1030 bp, Arabidopsis thaliana landsberg
gcttcagcatcttggctaccactagcttctttcttgctagctagatttaaactatctttactcaataccggtctaaccaactttcgtttggttgtacaagagctaagaccagaactaactttaaccttggcagtatcaccagactgctgatcttgttgcgaggcagaattagccaatgctgttccagattccttaacattaataacatgtaaaatcttttctgaattctcaagatctttgcttacagcagaatcacaaagtttctgctccatgagatcatggtcttgtgactcaactttttcagattcaatttgcataggttctccttctgaaacagaagacacctcttttttagctattccactcttttgggtcactccacgaaatcttttaagattctccagagctcttttctttagaatggcttccaaatcatcatctttcaagctattgtctgtatgagaaactttgctagtttcagatttattatattccccaaatccgttgtcatcagcacgaattctagaataagagtcaatagattcaccatccatctcatcagagtcctcactatatcctaactctctattgccaccaccgcgtgtcatatagacatcacggtcatcttcttcctttctctcaccattcccataattatacgatacaacaacaatcgatttaagccttctaggattcttctcaggtataacttcatcttccccttgccagcattcatcaggttcttcactctctccttccaactcatctctacttctactccgggaatccttaaccttaccaagtcttcttcctctatccctagaccatctcttcccatcatcactctcactaccgtcattatcactctgctcactacttgtagagcttgaactcaaatctctcttacgtctctttcttgacacaactttcttcttcttcttccctacgttttcatccttcctcttagatcttttctttttcttttaaagacgatcatcatcactatcatcatcactctcactactagagt

SEQ ID NO: 24837 - DNA, 625 bp, Arabidopsis thaliana landsberg
  unsure (1)..(625): unsure at all n locations
ggccccaaccctcaaacggtcaaccctcaaacagtcaaacattatacccttataccctcaaaccttcaaacggtcaaacgtcccaacccttccaaaatcaattcccggtgtgacatttgtcacttttaccgaaagccataccaaatcaaaaaacagtatatttgtgtgtgctcaaaagaggtttgatcatactcttttgcctgcagctcttcgcaggaaacaatttcgccatggaattgacgaaattgcctttccttattcatcactatatcgagcatgaatctnnnnnnnnnnnnnnnnnnnnnnnnnnnnatttcctttggatgcattacgtggacaaccaccaccagaacaaggaaaagggccactgccatgaagaactgcctttcaaacactgtcaggattgttgccaccatgttgtcgtgaccttaccctgtcttctgcccgaaccggccaaactgcattttcatgccagtgaaaaaaccgtagcctttgtttataccgaccggtttttatctttttacgacagctgcatctgccacccgcctaaattaggttaacgtttttataagaaagatcttttctctctcagcgggtttctgcatacgcaggatcgtcgtgtttt

SEQ ID NO: 24838 - DNA, 3082 bp, Arabidopsis thaliana landsberg
acaacaggctgaatcgcagcaacagtttttacagttttttcagcagcagccgcgttcgcaaccactgcaggagcctaatgatgaatatcagggaaggcctgtatttgtgaagctgcaggagatgcaggacgcaacttcgtctccaccaccaccagagtctaaacctggtcaagctgatccacctgataacatattcaatgcattaggaaacgaattttcacatcctagtggagcaggtcgaggaaagcctcttgtggaatctgctccaatccgacaagaagataaccgccaaattcgacgccctccgcctccaccgcatcagcagagagtgcaacctcagcagaagcgggctccaacggtcaaagatggaactcctaagccgcaattgagtgcgcaagaggctggaagaagagcaaggagtgagctttcgcgtggtgaagctgaagaaagcagtgtgggaggaagaggagggagagggagagggagagcaagaggagcaagagggagaggcagaggaagaggtggtgatggatggagagatgataagaaagaagaagaaggtgaacaagaggctatgcgtatatttgctggagattcagctgatggagagaagtttgctgagaaaatgggacctgaattgatgaaaacgcttgcggaaggttttgaggaaatttgcgaaaaggcattgccttctactactcacgatgccattatagatgcttatgataccaatctcatggtaaatgtttctgtgttttattttctctatgaattgtctagaaaagtatacaacttgctactgagaatggtaacactgaaacttcaaatagtattaggaatattgaattctcgagtagcaatagtattagtattgagtcatactctataatgtggtagaattggttgtggtggctttgaagttgtttgactgaaatatgcacaatgtacaaaagtaggccaccatctcgtcttgtaggattttcagatttataatagcctctatggtttttgttctttcattgtgaaatcggtcattcagtcaaaggagcgatggagaaagtgctctttttgttggtttttgagtctcttagttttctctatctattttggtttgcagattgagtgtgagcctgaatacattatgccagactttggatcaaatcctgacattgatgagaaaccaccaatgtctctgcgtgagtgccttgagaaggtgaagcctttcatagtggcttacgaaggaatcaaggatcaagaagaatgggaggtaatagtgttcaatttgtgaatttgtttttatatgaatcgacgcaatattttgtttcagttgatgatcacttgaatttctcactttctgcaggaagcaattaatgaagcgatgacacaggctccccttatgaaagagattgttgatcactacagtggtcctgatcgtgtaactgctaagaaacagaacgaggaactcgatagaattgctacaacgcttcccgcaagtgcacctgattccgtgaaacgatttgcagatcgtgcagctcttactcttaaggtttgatctctttaactaaacactcaaactcttcatctaacattactctctttctatcagatatctctagagaggtattgatgtttttctgaaatacttttggcaatgcagagtaatccaggttggggatttgataagaaataccagttcatggacaagctcgttttagaggtgtcacaaagctacaaatagagaactcaggtttcaaacttcttaaaaaacttcatcgccggttgagtttatagatcgtactctagatcttgcctctacttaaaacggtacccatttcttttgaactagtactcaaaatttgggcgttagctttttcgtcatacgttttgagggtttccgtaataacggcattgttctttcgatctttgttactgaggagattgtattgtatcccttttcatcaatgggttattaagggtttaagcctgtttttggatgtgtaattgaaaagagaatggttcttgagtgttggttctagtgtcttatacatgccgtaatagagaagaaaagagagagagagtagtgtatttgttcaatgaaatcttatcgtatgaacaattccgtagacacacatatggtcacacttgcgataattgcagctgcggttgtggccgccgcttcaaccgtagccatgaataaattactttcaagtttgaagtacgagtattttattgagtatgctccgaatttccaaaacgaaaattcttagttgatacattaaagagcaaaaaccaagaaataaaatgttgtgaaacgtaagaagtaataaaaatcaattattacattttcgtaagtataatggtcgatggtagtgatcagtaattaattcgttctgttttgtattaactctattttggctactacgagtgagtgcgttgagagaaattgtggtcaaaaattcgatagtggtagacttattggacatccaataatgcatgttgtatgttatccgaatataggactacatttatatctctatgatttaggagtctcaaagtccttcccgtaattagattaaaatcaacaaatttctggtttccttattaaatgctcactaatccctcattatgtcatatgcatcttcctcattcatctttaactctgctaagttctatagagatattatcagttttccaaacgaaacaaagaaaccatgaaattcgatgataagtacaaacttattgttgtaggcatcagcggcgttttagcgggagttgttgtcataatgtttatctgttgttacgagaacaagaagaagaagtttcagctaccggagccgccacagacaccggagtggcagcgacaaattgtttctgctccgacacttcagacaagaaacattgatgtcggaaatggtacgagagaggatgtttcttttttaatttttttttaatcttttcattatagtgtcgcagatttgacgttgattatagtcatgaagatcgcttgtggggtaaaagcgaaaccgttgtgaagaaatctgtcatttcactgaggccaaacgcagtagacaataccttgcgc

SEQ ID NO: 24839 - DNA, 821 bp, Arabidopsis thaliana landsberg
gttttatatatatgtgttaacttacttcttattgttatatcgagaagttcttgtcgtccaaccacatacacatctcttggttatacatataactaaataacttctctccaccaagaatcaaattagaaaaactagaatacgcactttttagaggggtctaactctcaccactagctagtctagctatcttttggttatgtgttacattactattctaataattaatgttttagaacacaaccacacgtataatttgaccattaaaatgattaaatacgtatagtatagtatgaaaatagtctttacaagcttcgaactatccttttttcatacgaaacttcgaacctaaagaagatacgattaatcataacatggattaaccattcttaggctagggaacttctgtcttgccaaaaatatctgaaatcgctaaggaccaaattaaaccaatatatttgatcacaacaggttgccattaaatcttctttgttaagacttgtaaatggcaagtcggcaacatattagaagtggaacgaaaacatccaaacgatgatcgttgtctgatgttctagttttttgctctcttctggtggtgatggaccgacgtgtctaaacgacaagtactcaatgagtactccgaccactagttttatttaattcttgtcgcggtttggggaggaatcaaagatatgaatggtggagtcacatgcactgcacgagagtcattcacaaaattcacattatccatttctctctttaatgtttttttaaggaaaattaaatctaaaagtgatatacttcacgggttacactattctaac

SEQ ID NO: 24840 - DNA, 1296 bp, Arabidopsis thaliana landsberg
gaacgatcaagcattggggaaacttctgagtggtgtcacaatcgctcacggtggtgttttgcctaacatcaactctgatctattgcctaagaagtctgccactaaaccagctgaagaaaaggctaccaaatcaccagtcaagtctccaaagaaagcttaatctgctagagttttcgttgctagtttgtgtttgagctctggtgaatgtagaaatttgaagcttttggatcttagtttctatgtatttggtgatttagaatgttgttcaaaatccttttcctaatcataagactttatgatctatctattatacgcttcgtctaatcttttggtccactcgtcgtaatgtcattagtgaatatttaataaacaactttgtcatcgacattaacgaacccttttattcgctgtgctaaatttttcttttaggtgaagccaaatctaacatgttctcttctctctttgttcgttgtaattccataacatctctcattacgatgttttgcgattcgaggatcttgttctaaattattcgtcggaggtattgttgtctctcttcaattcggttgtttaacttgacttttgtgtcgaatgtcattagaattgttttagacaatctgtctaccgtagaacacaaagggtctattatgtttctttccgtgatgcgaaattgcactctaagtgtttgattaaatgcgtgaaggagaacactgaatgtgataacaccattgcagggctatcttatgacactaatgaacctgttttgaagaatgagtttgaaaagtatggtgagattatagaaggtaggattcgccaagaaagctattagtcttctacgaaattcctccatgcttaaaaccaatgcacttcctgatttgtattcgttggatgtgaaagttcagtgaaagtaatatgcgatcacaagagtgggaaatcaaaaggttatggttttgtgttatttgattcagaagaagctgctgcaagtgccttagcttccatggacaatcagtgttgtacacaaaaccaatccaaaaaaatacattttatcgaaaaaaaagacatgttcatacaataatcttgctgtcctgggcgcggttctgagaagaaagaaacatcagagtcgaatatgcacaacgtaaaagaagtttatgccagtgtccgcaatgattcttcagattcttgcattcgcaaggtaccaggtacctcggatctcccaggtcatgcataaacgttatagagatgtgtcagggtaaagctctagaatgagtgggtgaagagtctttagctgtagggtct

SEQ ID NO: 24841 - DNA, 1228 bp, Arabidopsis thaliana landsberg
aaaaaccatatctctctctgcttatcaagtcagtccaaagttttaagatactttcgttctcctctgtgatctttaacagcaaatggggctgggttagcttcacggatgtgaaatcccgttgcacgcttaacaccaagtctaaactttctgctcctaatccagctcgaattgtcagtgaaagtaagtattccaagagttcctacaccttctttaattatcacatgtctgtcaccagtcaagatgggacgttttccttcgcgttccttcacttcaaagctctcaaaatgttctctcgtccaatctttgtcgtcttcatcattgaagtctccatctaacacgacaatattcagctttgtcattgattcttctcctgtttggattacattgggggtgtttgcatctataagaaccacgtgaatggctgagccttgctctccctcgactttcccacctgtgaataaatgaggaggcattcgtgttctgaaccgaagttgcagatttcttccatcgaggccttgaatcttattcggttctgtagatctgaaaactcaaattgatgtaaagatcatggaaccagtccagaaaatgatatcgtatatagctagataaaataccttgaagtagatttcgagttctccaaccttgatatggcacgttccacctcttcactgacctgtccattgatcgacatcattaccaagtttatcgctcttacaggcttctcaagatttggtctatgtggaagttaaacttcggaatagtatcatactcacaattcttcgaaataatggttccaaagacgagcatagcctctgcagactatctaccttgacagcttccactatgacactgtaagacagtttttttttcatacaacgacgtctgagaaaatttgaggccttgcgaggctaagcaagactatcgaaaatttgaaaagtatgatatttccacagtactatgctctttggacagtgtaactaatgaacaactcaaaacaaggtccgatacaaaaagacttcagaattagccaaaacaatcgaatttacgacacactaacatataaaatatgagttaccttgccaaagcaggaagcttctgtctctttgattctggcaagttatctgcatgttcttgattgcgtccatgtcctcttgtgttcatagaatcttccatttaaagtacgataagttatcaacaatctctgtgcctagatagatacgaattaatg

SEQ ID NO: 24842 - DNA, 1071 bp, Arabidopsis thaliana landsberg
tatatgaaaactagatgtgtgtttcttatatcctttctacacttgtcagtgatgatatgtaagaattaatatggctaaaggtacctctaaagtcgaccaaaactagaactcacatctttatcaacaacatagagaaccttacgttttctggtttcataggtaggtacaatggtaagtcagtcgcaaggagcaagtgctttattttgggagagaatttacagcagccttggttgtcttgcagatggtaagtgtatcagacaaatctttgaaatcgtcccttgacaagtacacaccgtagtccaaaagtctagtaatctgagcctttcttcattgtccatttcatctaccgtttgccaaaatcagatgataacgtcatcgttcttatcaaatccatcatagaatgtatgcgctctccactagtctggacatatattttctcataaaatcaaacgactctacactctttggtttcgatacacttttagtacaatcatcttcttcattaggacacgaaggaattgtcattctagttgatcgtatgcttactcatatctgtttttattgccataaacttctttttgcatgtcattgctaatatgtgaacattagtacaatcatttaagttctttttttcctacattgataaccaatttattagtctttagccaaattaaataaaatataataactaattttgaaacatgtaatgactgaaaatgcaaagaaagaagacaaagatggtatacaataatagccttctaacaatttggaattttgatgataagaatgtttggatttctatatgggaactgtgctggcctagcagacataaatatagttaagatatttttcaaaataaaaaaataaaatgaagatccttatttcgaaagtaaatgtaatacaaatttattttaatttgattttaatttaattttaactatcaaatttttataagacgaagtaaaaattgagaaattagcatttgtctctgagctaggtttgataacatttttaaaatctggatccgaagtttaaaattctgatttttgttatttatagatatgaaatatt

SEQ ID NO: 24843 - DNA, 1986 bp, Arabidopsis thaliana landsberg
  unsure (1)..(1986): unsure at all n locations
atctgtgaacggagaaagggacatatgagtttgtcaatttcttttatagaaacggttacaagaatatccggggagggagagccacgtgggagatgcagctgaatttaagtaagaatgatctcataatcttgaccatccaccaataaaaagcttaattaatacatcatcatccaatccggtggagtaaannnnnnnnnnnnnnnnnnnnnnnnnnnnnnnnnnnnaaatctctgactctgattcagctttctatattcaatcgttcccattatctcattttgtagtttagttttatcctcaacaaccatcttcttcgttatattccttgagataacaacaaagcatcgttcttcacctttaccaaaaagataaaaaaaaagaaaaatggcaaaagaaaatggatttataggatcaatcgatcaaggaaccaccagcaccagattcatcatttacgaccacgatgctcgtcctgttgcttctcatcaagtcgagttcactcagttctatcccgaagctgggtaaaactaatcaccttttattgtttaaattcatgtattcattggttatgactagtagagtgagactttttatagtggatgatcccgatcttgtctgattggacactatttccgtatctttgaagctccatcggaccaaagttttgttttttgtttttctgtctgtgtgtctaagcgatctgttcgttttaccgttgggtcttgtcttcctatttgatttcgaatctgtgttcttcttcagtggattttggatgcatataccccatcccatctctagtctcttgttattgatttatttaaaatgtatttgaagatgggtgtgaacacgatccaatggagatactggaaagtgtgaaagtgtgcattgcaaaggctctcgacaaagccactgccgatggacacaacgtcgacggtggcttgaaggccattgggcttacagatcagagagagactactgttgtttggagcaaatccactggccttcctctccacaaggctattgtctggatggatgctcgtaccagctccatctgcaggtacataactttcattgatctctttcttttcttcttgtatggtttgtctactatcatcttcaggattgctgagggatttggtttctgatgaaagctttctttggtgatccttaattacaggagactagagaaagaactctcgggaggaagatcccattttgtggagtcttgcggcttgccaataagcacatacttctctgccatgaagctgctttggctcatggagaatgtggatgatgtcaaagacgctatcaagaaaggggatgccatctttggcactatcgacacatggttgatctggaacatgactggcggtatcaatggcggccttcatgtcactgatgtcaccaatgcttcacggacaatgctcatgaacctcaaaaccttgaactgggaccaggacactttgaagacacttggcataccggctgaaatcttgcccaagattgtcagcaattcagaagtgattggagagatctgcaaaggctggcctattcccggtatcaagattgctggatgtcttggtgatcagcatgctgcgatgttggggcaagcttgcagaaaaggcgaggcgaagagtacttatggcacaggtgctttcattcttctcaacaccggagaagtgccaatcaaatcaggtcatggtcttctgaccacgttggcctacaagctcggtcctcaagcacagacaaactatgcattggagggttcgattgccatagcaggagctgctgttcagtggcttagagacagccttgggataatcaaaagcgcctctgagatcgaagatttggcagcaatggtagattctacaggaggagtgtactttgtgccagcgttccacggcccgtttgctccttggtggagagaagaaagaacgtggtgtgtgcattggaatcacgaggttcaccaacaagtctcggattgttcgg

SEQ ID NO: 24844 - DNA, 1023 bp, Arabidopsis thaliana landsberg
  unsure (1)..(1023): unsure at all n locations
acatatgactcaattattatcatttgagtagacggttttttttttacttacttttttttacattttatactctgaccgttaaaaagtagttaaatttaggaattactaatatatttatttaaacacaaccaaattaaaatagattatattctagtatcattcaaactcccccttaaaatttgttgattagaaaaaaaagcaatttgagtgcgaataaataatatagataaatactagttttccatttttaatgtaatctaattactttactgacttgatatgctctgtgtaagaaactaaaaatcgtgtaaatcgagaaaaaatgtaacaataaaatatcnnnnnnnnnnnnnnnnnnnnnnnnnnctgatctgtcatgatgatgactcggtttcttcgatacttatatttatttaccttttttggggccctattttatttattttgcgagcaaaagaagtaacgtatcgatggaagcaatattaaagaaaataaagtatattaaagatgtctcccgtgagaattaattaaagtaaaccaagagtgaggcttcatgctgatgattcgtcagacctaattaggatctcattcacgtgtatatcaatgtttgcgcattatatcgcaaacctaacgatttaacaaacaatttatctacataaatacttgaataatttgttcgttttaattttgttggctacttaattagaggatggatctacatcggtttaagtaaccagattgacgaaaagatacaaaaaaaaaaaaaaagataaattattttgattatataccaaactcatctctaggttttaatgtttgtgcattcttattaatccattaatttattggcaattgattttcccacgaattaacgatatatacaaccttgtaaagatgaaccgctttagattttttattctagtaatcaagaaaattgatatatcagagacataaagaatataaagttctggtaatcatggcttagatctatacatattcatgatgtgatttgacatgcatcct

SEQ ID NO: 24845 - DNA, 1014 bp, Arabidopsis thaliana landsberg
  unsure (1)..(1014): unsure at all n locations
cataccaacgatcacaattttatatatttttatattaaattaaaattttgttatgatttatgaatagtaagtaggtgaggtaaaaaaatgttattaacgttaatttcaccctggtgaaacaatagcttctgtaaaacctaaaacagttttttgcagctttaaaatttcaagtgccagaaaacatgcggcataattattctatcaccagtaattttttattctacagttgtatgatgctgctcccaacaatcctactgttaattttttttactactggatagtacaatatattagaactactatgaaatttggaccatcaaaatcacacagagcagcatatgaacattgggtggtttgtggcgactcgtggccgtgactattagaacgacgtcgtgatgcaaaaaagtaatcgttcgcatgaatgacacgtgtacgtaatcgacggtcaggagagatcctagggaagtagagagaggacgtgtgtgaattaccaaggcgttgaacggcgtgaaagagcgcgtgcggctcgattcttacgtcgttgaatattgannnnnnnnnnnnnnnnnnncgatccacatagatgcgtgcgcgaaggcacatgccgttatgaagggttctcgatgaacatcacgtgtcctctagggattggctattattgcaaactccgttttatgaggcaaaaagacaatttaaccctttttaatttttatctatttggtaataaaaacatttttatttcgtttgtttattaattaattaatgaggttattaaaggtgccttagcaatagcaggtaggcacttaatttaatagtccaaactccaaagctaattaatttaaaggacacaaatcctaataaaccccaaacagttatttgcgaccttttcttatcgaaatccgttctttgaattgtttactttttgatcgattttaataacaagattcacaaacacatataagtgattttttaaaaaatggaatgagaagataaagaaaagaatttgaacggtta

SEQ ID NO: 24846 - DNA, 1841 bp, Arabidopsis thaliana landsberg
tcagaaacccaaattatccaggatcaaaattgatacaaagtgagcactgaacatatatattcactccagtttgttagtcttggaccatcgtacaataatacatgtagcttattagatgtactattttatttggaatatgatgtaagttgttaggtatgtttctgcatgttataccatatttgcaacttttaagaaatgacagtaaaatataaggattatcatttccacaccacatgtttcaccatatcacatccatggacgttacgcattaattggaatggattatataataaaaacatcgtaattatatagatccctaccgtgagtcacgaccctacaaattatgcatatcagcatgtggataataagagacgacgatgagaacttgacgtcgagacaaggaaatatcaattagtctctatgagactacacaaaactggcattaacgtcggatatatatttgtagccatgcaattgcaaacttagggttggttagtagtaaatgtgaaggggaatgttctcaaattgggaccaattcaataactcgaaacgagctaatttgttcaaataacgaataaacagagtatgggcattggatgcaaaatatataattaattggaccgccttagacagcactatatttattaaataaagttttaatacatattggtaacatcttaataaatctacatattaagatgttactgtataaacattttaactaatacacatatgaacaaaacttgacattctttttttctttacagaacaaaacttaaaaaaactaatattaagcgaaataattcattgctgattcgtttctaatggttcgacagaatatacgataattaatgtactaccatatttgtttacaattagtggaagccgaaaattatgtctatactaatattttctatgtatttaaatcaagtattgtggtaccaccagctgtgaagaatgttttcaacaatattaattactttgtgaccaccttacccaattccattcgatattaaataggaaaaagaagtatacctattattatgttttgtctgatatacatacacataaatacccaactagagccaaacaactccaataaatcaaccgttgaatatgaataatatgacacctttttattcataaatgtgatccttttaaacgtataaaaatggagtagttaataacttaataacttaacttaataacattggttcctttacaccaaaaaaaacaaacattttatttgggtctcaagaggtttattaatagtggcccatgtatagactgttgcaattacattatttcagtagcccgtaaagttccctgggaagcccattttgagcccatggataagaaatttaatttaatccacacagaaaattatataaagggtgggttgatcagataagttattaagaaatcatcatgattgtattgtttgatttgttacctaatattgtttttgtcaccaattacatgaattttttgttgttgtcaatacatgacttttgttgttgtcaacacatgactttttctttaatcataaaaaaacttaaacaacatcacatcatttaagctagatatatttttgttaatcacttaatcaccattaatctatatatggatgggtagattctattatttttaaatcactaaaaccaattatataaaaataaaataaaaaacctaaacaaaagaaacatatgaaattcccggctctaaatgacaaaaatacccttcttctgtaacgtgacgtaatctaattggttaacaaaacccccaaaaccctaaatcagtttgcccagattcacgcatcacacaatcgagtttttagggtt

SEQ ID NO: 24847 - DNA, 1136 bp, Arabidopsis thaliana landsberg
  unsure (1)..(1136): unsure at all n locations
ccaaaaacacttcatcatcggatgatatcttcgacattggtatgtcgctgtccaatcgtaactctccggtcttctgcgttgtcgagtcctcatgtacttaaacaaaacaaaaaagaaacaaaaaaacttctatttttacgaaatctcaagataaaatttatagaagaaaaaagacttcaaagaaaagaataacaaaggaagatagatagatgttttaccaaaaacagggttttcgacggagatattcatcttccaaaaaaaaaaaaagtaaaaaagaagatgagttatgaaaactaaagatcgagagagaatgtctacgaaaagatgtaatttgatggagacacaaaaagggtatttgtagtggtgatggtttaggagacgataggtactttcctctatatttagagagaaatccaaatcttttgaccacgaaaaataaactttgtccaagaaaataaaaactgtggcatgataaagatctcttaacatttatatacaagagttaattgttttgttttcgttttttttagtttatttactctactgcgtttgtttatgttttgaaatataccaaacatcctaaatccttaaatttactctcttcttgattggtcaactttttggcatattttcttccttttaagatttaggaagacatgtgtcatgttctaaaatagatatagtagactattaacatctatgtgatattcttatgaattatcatagacacatatgtccaagagagttaattatacttagattctccattttcttattcaaaaaaaaaaaagattctccattttcttacctttttatcagtgtttttcactttccccccatttttcatatttataacattcacacttattagtttctcccccatttatgctatttacagtatattctccttcaaattttggagtattgtggattttgaacatgtgtaaattgtaataaattggttgtctttttacgttttttttctttttcttttgattatgttcgtaactaattgactaactacctttagagccaagtggagaagacaattcgtgtgagtttccacggcccatgctttcgactcttgagtgaaaacaaatatttttgcattgttaaaagacaactcanaaatatct

SEQ ID NO: 24848 - DNA, 3062 bp, Arabidopsis thaliana landsberg
ctgacaaaatggcttcctttaatgaagctagcttttcagatggtacataatgcgtcccaagaccaacgaacagtgcgtctgatggcgcggagatccttttaccagtcaaaccaagataagcacctgcagatatttataccacagtagtagttacatatcgttgaaggtctccagtaatctttactttcgcttctaaaaacaataaacaggcttccatctacatgaattccgctctatacaaaacttaaaaagtacttaaacaaacaatcatcattttcaccagattatgagcatttttagatagcaaccaactaggaatgacctttaactggtgttgttgaccatttccttattcttttcaaaaaggtaaaactctagccagtgtaaaggatttggatatgaacataccaacagatcctcctccagggctatgagctgctatatatgaaaacccgacatcagggaacaagccaattccattttctggcatggcaagaaccgtcctctggaatagaacaaaaaatatgaaagagagtcaagagagtaataccaattattacctacataataagtacagaacaaggtttcttttgtttttgtacctctgttatcacacggtagcgaccatgtccagaaagaccaagaccaaatcccattgttataccatccatcaatgaaatatatggctttttgtacgcagcaattgcacatatcagtgtatactctgctgtaaatacctaaggaagcaaaatatcgaagttaaaaaactacattttggaggctatactcttaaaaatgctaagagcaaaccattcaagagacaaacgtaaggaagtataaatcaaaccattctagagagctcttggaaagaccaaattgaaagagatcacacacatgcatgttcatcaaattagtacaccatttaatcttaacaagtttgaaataatgctaaatcatcttttgaagtttgacaaagcataatttattttataaaccttttgcacaagaggtgtgtttttgtccttttggatttctgcagcaactcctttaatatccatccctgcacaccattcatatagatagtcactccaaaacacacttcccaaacgaacaaacaatttcaatttaaatgaaacaatctacataacatagcttccacataaaaagaacaaaacttgcaattacctgcacaaaaggccctagatgtgcttccctcaacgataacacatttcactctcggatcagattcccattcatcaagaaagcttttatactttatatccatatctgtaacatcataatgaagcttcttataattatatctgagcctagcaatcatttgttacatccaactatttcaaagccaattccttttaaaaaaatgattttgaattcagtaaacactaaaaggttcttactttatcaaacccaagaaacaaaaattcaaaagggtcacctaaattcatggcgttgagagctttggttcgatcgagagtgatgagagcgacaccattcggaaaaacatttcctttaacgaaatcatcgacgccagctccggccatcgctaagaatttccgacgatcggagattgagaatctgagggtttggtggaattgagaagagaaggtttgtgagaatttggggaaaaagatgcgatgagacaaagttttgatgatgatcatagtggtgaagaagatacagtcatcagcgacggagatagagatggtaagtgaaacactctttctgcttcagaggtttctttagaccgtaaagtcacttttgttgcctttgtctcggtccatttgattcgagcggttgagtccatgtaattgattttaaattatttttatttgacagaaaaaaaaaaaacatgttcgaaaatcagcattaaaataagaagattttaagatgatttatttaatagtgaaaatcctgaattaatagccaattggaaactaattataataaccaatctaacaaatggcttattccttacaacaatattaaatcgcaattaacacatatgcggtttacaatattactttagacaatatatatgtctaactagataagcattcgcatatatgtgagtttttggtttaaaattaacataatcggtgaaaaagtaaaaactaaaattatatgagccgcgaatacaaaatcacatcatcaatctccaaagtattaaatagtgcgcacaatcttgaatgatatttttgtaatctattctccatcctggagattataggtgagcagattcagtggggtgaatagattgagttagtctttgttcgtccacactggatctcgtaatgattgttgccagatcacaggttcacaactaccttcaaaaatatttgtttatttcaaaatttggtaaatacttctcatcgatatttttaaatattttcagtaatcaaatgtgttttgagttcttttaaaactacccaattatgtgataaaaataaattaaaaaattataagtaacacttagtcgttgtcttctataataatcaattataatatagaataccccacaattgtataaatcatcttacaattcgacttaaattttatatcaaatttttaactatttaaaattaaatttaattatccaaattttaaattcatatggcttaataaaaacaaagatcttcatttacaaaatatctattaaacatattaaatgaactaataaacaaatatcataaatttggacgtgtcttcattcgatttttaatcaaattaatcttatttacctaaaatcgtataaaaaaagttcttaatgtttactcaaatcatttatttttagttaaatactaattaatctatttttcgtaatacaaatcaatataaaaaaatatctacctactatgtattaaattttgttttagtttactaatatttttttatttgtttaaaagaaagaataattataaaattataaataggcaaatagcgtagataagtaagtcgactattgtctcattttgccgtcaacgagacagaccacagccgtcgacgtcgtcaacacccggtctacaaacttagattccacaaaa

SEQ ID NO: 24849 - DNA, 1003 bp, Arabidopsis thaliana landsberg
cgtaacatcagccgttaagccctttctatagagatcttcacagtatgctaacactcaaagaaaataaccatgatagattagatacaccatatatatctaacattaaaagcaaataatcataacatctaaaaggtaaaagaacaaacaaaagacaaaagctagacatctaaaatagtaaaatgtataacatcgaaccaccaatatcttttactctaagaatttttaccagactcatatactcacacactcacagagtcacacacacacatagtaatgatgtcttgatgattagatagaccacattgcacacaaaaagatataatcatgacatctaaaaggtaaaaacaaacaaaacacaaaaggcatgtgaaatggataacaatgaaccaacataaacttttgttttaagggaccaacagaaacttatcagaagtatctttaatcgaaagaatatttaaatagcagaaaaatatatatccttacatgttggtatttgcatgaatgaaactaaatatctgttggatggaacttgctatgtcttctgccgtaaacctcgtttcacttgttatctgcacatattttacatctacctcatgttagcccttgatagttattacatatactttaacaatacaaatccatatctatgattatattgaaaaccctaaataaaattataaatgtgttttatgacagctaatccagattagataattacatgtattatttgatgagtctagattttgcatatgaaagctgaatatgaatgatgaattactttttaacatataaacttgccttgacattaaaggagtagaggacggtttgttccatggtagtgatgttagtgtgaagaatagagagatgaagatcctccaaagcagctatagtcttaatcagctgtcccggccttcttcttgaaagtatcttgatcatggcgtcaaaccctagcagcttcacctccacgtcagccaagcacgacttgttctccgcagtctccttc

SEQ ID NO: 24850 - DNA, 1566 bp, Arabidopsis thaliana landsberg
atagcgcgtttctaaagccgaatgaccaacatattttgctgatgtatccacctgaaaatataaacgtttaagagattgatgtgccttatagatcgaacattaggtcacaaatagggtcttatagagtaatagagagttaagaggtcataccgagctcacaatcttttcctgaggcgcaccggaatcatttactggagtaaatttgccagcggttgctcccaagtcgatatccttcttggctgactcgtaccatacgttaacagtatgtgggcttaaaaggaatgaacgcacatagtgctcgtagagataagcagcaccgttcatgcccggtaagaccaaccaactagttagggctagctttgcggatggatataatgggatcctgatcataccataaatctcgaaacttcagtctatataattgaatcaatgaaccaccgttacatacagctcagtttatctcctgaagtcagtctaggaatgttaaacataagctcatccgttacctgaagtaccttacttggactacaagaaaggtgaatctatctaccccccaaaccaacttcttaataaatttcatatagtaaggtcggtaagtaaaatccaagtcatcgattatatcacaaattttaagagccctagaaacaaacatattgtgtgtgactgtgaccttactctcttttcataagtagtagcttgcgtaatcaagaaaggtttagagattttgtgtgaaagttaccattcgaggagtctgaaaaaagtgagctcaaagagtttgataagtgaatagagagcccaatacgtcaaccattgcttgtcgtctccatgactcctcgactctattgccctcactgatgcatatctgtgtaaaccaaaatccaaattaaaaagaactcaagatttgacatatataatatattctcaggaaaataaagagatacttgtatgaaacttacagaggataaaccaagctaatcacaggtctgcacaccaagaaggatcaaattaatggagaaaataaaacgagaaaaaaaatcataatcaggctaaataatactaattaaattacccagcgatgacatcgaagttcttaaagatgaccttcactaaacttccgattccggaactcatttttgcagttgaattgttttttttgttttttcactcacactctcaccagtacttaccaccgccttttgagttttcttagctttctctgtttgcgttttgggcaagactactatatgaagtaagtagggcttgtgaacacgtgttcgtgactatgagaggagtcaataggtaatttagccacgtggtttgatctgaaacctaaataagtaaagttggtggtagttttctgaccgttcgatttcatcaatctcacatttctctatttctcagtcctctgttctaatgaaagtgaatccaatgtttttttattctagtaaagggaacaaaataagcctttaatttagattacaattatttagttttggtcgtgatccaatgcattacgtgccactaaactcggtggataatgacacggcaccagtttattggggtttt

SEQ ID NO: 24851 - DNA, 699 bp, Arabidopsis thaliana landsberg
aaccttatttgggtttccatctcatgaatgatccggagaaggaagtacctacttgaagttttcaactgataaaactgtgaaatgtcagagcaatggtttgagaccatatcaaccccacaaatagtactaattactacaaacatgcacactaacgatcttataatgtcaaaacacacaaatttcaaatggaaacgtaccaagaaaacaaacaagacagaacattaaaatcactagtgatcatcattataacaatcaagcacacaccaaatacataaaacgaaagtatagtcttcaaagagcacaggcaggctcaaacgcgaagggaccaacagagaagagaacgtagtcgtgttcaccgatgttgattgtcttagaaggcttaagcatagcaccggttattccattgttgagctttgacggcacggtgcatgtcatcgttgcagtcgtgggtccaggattcgtaggccaagcccggcacgtgtggaaagcgtaggtggtgagtttttttggggctagcatgaagaagtatccgtttttgtctgtttttgtctccattgtcacacctctctttgtgttgttgcatgcaagctttacggtcgctcctatcattgaaaataacgaaaagatttacttgatgcatgaaagccaagtggcgtgagagactcgacgaatgcgaaatgcacaagtaccatgcatatt

SEQ ID NO: 24852 - DNA, 713 bp, Arabidopsis thaliana landsberg
acagaagaaccaggtgagactcttgtattgataagtcaaaaggtaaaatctttcctgcgtcttctgtatcaaaattgtcggggtggcatctaaaccccaaatatcagttacaagaaacccgtctttcccctttgaccacttatcgtgctgcagaggtctaataacacgacctgtgctactaccatttcccgaaggcaatgtaccacctgaaccaagagggggcaccgtagtagatctagaagatatttgaggtgaaccggatcccttgcgtagatatgaccaggaacttgtgccagatgatagcgcgtttgtggttaatctcatgacagaaaatgcaaacaagtcgacggtatcatcctgaaaagagaagagagagagaagacaaagactaaagcttttagtattactgaacaatatagtctacacagaccacgataatttaagaatcttaacgactcaacaatcttggcaaaaatgattaatgcgaatgagggatttgaaaacatacaggtgagagagttgttgacaccagtagatcatgaaatagaatcacagagtggcatcgaacgggcccagcacacgaatctagcacttcgacgagagactgtacatctaaataatacaattcaaaataggggacctttttttttttttcgaaacgcctcttctgatagagaaaccaacctgaactttaagtgcccgaatttttagct

SEQ ID NO: 24853 - DNA, 682 bp, Arabidopsis thaliana landsberg
ctacatctttacttattcctagcttcttcttttttctttgaggacaaacttattcttagctaataatttatctttacactaaaaaaagtactaattatgttatagtatactttattttttttgggcaaaagcttttctattatagaaattaaatagagagcacatcgttttcggctaacatcgattttttatagcattgttttttatagcaaaattgtgttatccatatctgtttgatggaatgagcaggttgtctaactcagattaatggcttatttcggaacacagatccaagtatttttttggaatcgaaagttgcatttaaacatacacattttcagccacatcaatttatgttttacaggataagaaatcaaagaaacagttttcttaatgtaccaacagaatcttctttatctaatagagttgaccttcaagatcgaaaagggtaagtacagttgacattttcaattcgatcgaactctcaagtacagtggacttatattgaaagagcagtacagtagtacaatctagcttgattagttatatttctaattatataaaaacacataccgattagtatataatatacatagtagtcgacaactttttatatatttaaatctcaacctacgaagtggttattgtctattaatgagatttatgcattaaaacaactgta

SEQ ID NO: 24854 - DNA, 859 bp, Arabidopsis thaliana landsberg
ggacttggcggggagcgataattaccatcgtaaagggttcggtcataaggaggagacactcaagctcatgaatcgagagtacaccagtaagttcccccaactttgctgatttgcatgctctgttttgggttgattgagctgtaatgaaatttacgaaatttgggtttgttgttgaaaaaaggattagactttcgaatagtgtgaagaccgcaatattgggttttggattagaaggtgttttggcaaaactaacacgatagaagtggcccttgttgtatctttgtggggtttataagatattgttctgaagaacaagaatcaattggatggtgatttatcttgctcaggtgatatattggagacactgaaaacaaatgggtatacttattcttggggagatgttactgtgaaactcgctaaagcatatggtttttgctggggtgttgagcgtgctgttcagattgcatatgaagcacgaaagcagtttccagaggagaggctttggattactaacgaaatcattcataacccgaccgtcaataaggtatgtcgtcactatactcagtaaccttactgtaaacatagctagatgcttttgctttgtggccaatcagtgtagttgaattgcatggaacattgcagaggttggaagatatggatgttaaaattattccggttgaggattcaaagaaacagtttgatgtagtagagaaagatgatgtggttatccttcctgcgtttggagctggtgttgacgagatgtatgttcttaatgataaaaaggtgcaaattgttgacacgacttgtccttgggtgacaaaggtacattcctcctgtggccataaatcccgaatattgc

SEQ ID NO: 24855 - DNA, 625 bp, Arabidopsis thaliana landsberg
  unsure (1)..(625): unsure at all n locations
tcaccacctccggggttgcttctacaaccagaactcaaactcacttatgtatctttcctttatacttctcttgtttcaggtttctgagagtcaatttgctgaatcatatatttttcttcagattttcccaagttagtttctgttagtaactctgggataagtttgaggattcagaatagtaaacctattagccctgtctttgctcttgaagcaacttcctccaggtattgtaatttggtgaatgtgtaaacaagtttaaggatttgggtttattaaaaattgtaatttttacaggagggttgtttgcaaagctgctgctggtgtgtcaggtgacttacctgagagtactcctaaggaacttagtcagtatgagaagattattgagcttttgacaaccctttttccactttgggtacttatgctatacctttctttgatgaagtttgaaactttttgtgagtttgataactgatatggagcaatgtggtttttggttgttgtgcaggttattttgggaacacttgttggcatcttcaagccatccttggtatgctntttatgcttctttggtatgggtcatttactgtagcaatctatgtttttggggcttataagattaagtttt

SEQ ID NO: 24856 - DNA, 1824 bp, Arabidopsis thaliana landsberg
agttttcagttaacgaattgcacgtgttaaattaaatgaacgggcatactattctgttattatatgtatcaagctattgtttaaaattttagttttcgtgtgggcacgatgtggtatcatatactatattaaatgatcttcattcatatgatatccaacttttgtgattataaaattgatacggatatcttcaaacattagttattgatattactcaataatcattaaaaatatttatgatatatataattctcattttggtgtgttcttttttaaaaatgttatttttaacttttcaaaaatatctttcattaaatctcaaaatattataaaaaaaattcatcaaatttcaaaagtaacaaagttttatacgagaatcttctaaatgatcatgttggatcttaaatttccatatggtatttttacctttttaattttttttccgataaattttatcaaataatccggtcagctccggtagaaacatatcatattgctttgaacttttttttgaagaactaccataatatatgttctgagttatggggtagttagatcgcctgttactaactaccagataaactggttgagcctttggtccaagtttagacttctcacacatatgtgagttttgtttttagagtggatttaacttgggttagttccttccaacctttccccaattcttccttatcactagtccacaactgtgtggacacctattgctatttcaactgctttaccattggagtggaacatgttatcattatggtagtcctcattactatcttttagcttatgtcattttctactttgtgccaatgttcggatagattatttagctaagaaaaatgagcatatggtgttcattggttatttatttattggctctccctagtctaacatatacatttttgcagccattttgtgaaataaatcttggagttgagacttatttacaatggctgccactaacatttattatttagttttacaaaatttaaaaagttattaaccaaacgatatcttgcctaatttgtttctaaaaatctctaacacaatctttccatatatcttcaaaaacaaaattccgtgaattttgctccacaaaatatgcataaatccgatttatagcaaatatttatattaacattttgtatagcaataaaaatactaatttataataatgaaaatattcacataaaaaatcatatacacatacagaaaaagaactatatctatcatcatttaagtcgttgctttatttaaataaaaaaaaacacaaaaatttgaaatcatatactttatatgataaatttaaaatctatattagtagtagaaatttaaaatcattcaagaaacggtataacacgggtgagatcctaaaattattgtatttataacaataataatttattttcttggattttataatactaatatttagctaacgagataatatagacggatttatatgggatgacgggttttgatcgatattaataaaaaaaggtatatcacggatgaaatcctaaaatttacaattaaaatacaattatacaacattaaacacaaaaatccatacaatattaacaaaacaaatatcttgaaatttaaaaattttagctataaaaaatagacacacggtattctgcggataaaatattcaaaattttataatccaccacacatcgttacataaaaaaatatgtgtttttgtatctatacttcaaaaattgaaacataaacaataatagtcatatactacataatacagagattgataccaaattaatatgatatatacttcagtaaatcgtttaa

SEQ ID NO: 24857 - DNA, 568 bp, Arabidopsis thaliana landsberg
gtgcaggctagcgggggagaagacctcgagagtggagagtcgatctgagagttcgccagaggtcaccgtaaaaagcagatttataagtttttatagccgtagctcccgtgatcggaggtgatggtcttgggacgattcgcgagggttacgtcgtgattggtgaagcattcttcgatggaatctggagaagagagagtcaaaacgttacggcatccgaatttgaggaacagaaccgggccgtagtttgaagagagatgatgtagagcttgtggtaaaggatacttattgatgagatgaagatgaccgatgatcggaagtggagtaggacttggaggtagtttagggttttgactccataggaacttggtgatgaagaaggtcaaagtagctgtgagcaagaagatgacccagagattttccattttcctttttgagtcaatctcgtaaactatcagaagaagaaaaaacatcatttaaatcacttttgttccatttttttccgttaaaaaaaacaaaactttccgttgaccaaaccgtttaactccgttagttaccgttgaaaattttg

SEQ ID NO: 24858 - DNA, 2215 bp, Arabidopsis thaliana landsberg
actttaacctcaaagtattaagtcaaacaatctcgagctctgaaaccgaaacagagattctgattacactgtcaaaatcaagccttcaatagttagaaacatcacactaacaatggataagtgtttacccccttagagtacaaaagtgcagatttagccttaacgcatcccaatttgattgcgaatggcttttcctcctcttagggttttatcttagcagcttttaggtcattgtattaatccacgtattaatagctttggtttagctatcaatttttttatttttcttggttggataattgtttgattttattttaataattttctggtctaataattaatcgattagcaatcaaattatctctatattttgttttttggtttcctacaattttggttcaatccctgcccgttgtagacctcgtttgcagttccgtcacactcctctagtcctcttcccacccataattaccatgaacagaacccagtatatattttgatactttaaccccaaagatttggtaatggtaattgttaggtaattttacatatttagaaatagtcaaattcaatgataaagtgattttttttgtgttacttgatccatatgtgaacgttacccatctgtttagttagaaaagagaaggaaaaaatgatccttactcaaaagaaacacacctaaacgaaacaaccaaaaaatctgactaatagtcttagaaccacaatacttctttacaagaaacacactggattaaagaaacctaacgagtcaagagccacaaaatgcggaaacatccaacctaagccacttatcttgcagagtttcaagaggactaaaacaccaaacagaactataagaaggaatctgaatactgaagccattaaacaatatcatcgaaggagaaaggagctctggccacagacacatctgctttctccttctccagctgagcttccaggtttgagcacttcagctttaattccttcaactcttcttcaatttcatgcacccgagtctcaccagcttcctcgttctccttcttttctgacacttcttccagtttctcctccaaccaatttagattcaaccccgcatccgtcaagtatgcaagagcagcatctgcgtctgacagatcattcttggaaagttcctgagtcgactggcacatagtcttgattaggctgagaaggacgttcatgtaaccagtcctaagacttgagttctttgggtggatttcagatgcaatctctgggtgtctttcaaaaatatggctaacagattttgcctgccaaatgaaaatacaagtataaattcgcatccctattcaaagacagtttaggagacatgcacctcagaaaagaaccatataatagaacactatctatctacacacaaagtctgaacattcttaaattgtatttttacctgtgaaggaagaagttgaaagccattaacatgtatggtttcctttactgttgaaataccttctgatacatctacgtctccaataacttcaaggatatctatctcggcaacaattttgagttccccgtttactagaaatccactatctttggcatggatttcatttaggggaaacatggatggacaaccccatttgattgagtcgtcaaaccactcttgtacttctacaaaatcacaaaacataatcaacatttaaatgcatctaatatatcacactacttgaactatgctctaggcaaataaataatcaccatttggttggaagctttttttcgagttttgatttactaaagttagggtatatcgagcatgtcttctccatccaaaaggcaatgatccattatcggcgacttccagatacagagacaagtaaccaataaagttatatccctttggataagcagttagacacctgcaagaaacacaaataatataaaagaatcagcaaaacgaagaagaatataatatcccctaaacctaaatcttcttaccatttgcagccatcgacgacaaaaggatgcagggataccctcaaaaggagaatcatctccgtaatcaaattctggctccgactcctcttcatacgcagaataatcactcatgtagttatctggatatgaataatcactatcatattcgtactcgcagtcctctgatacgcgttatcatgcttgcacaaattctctttatatgcatgacgatcgtaattcataaatcttctttagtgct

SEQ ID NO: 24859 - DNA, 874 bp, Arabidopsis thaliana landsberg
aactaccgatgtagcaaaggaagtaagtatttcctaagcatttagtattatatgtgggcagggcctttagtttttttttcttgtgagatgatgtcagcttatatataaatctttacgtggaatatgtggtgtgtacatttttttaattgtctaagcttgtttttagtaactcttgacggataatctattctaaagtttatcacttttgttggggttataacttataagtgcaacatataccttgagtttattcccactgtcttagctactatttgatagttttgatttattgcttttgcctctagagttcagtctttgatgtgcccctcattgcttcttctgcaggttgcttttaatcgggatattcggactccaagtgtcacacttgaaggtgacattttccagccaagtggtcttcttactggtgggagtcgcaagtatgtctttctttcttggacgcttatatctctagtgagagtcatctccttataaaagtattttggtcttttttttttcctttgccttaggggtggaggtgatcgccttaggaaacttcatgacctggcagaagctgaatcagaattacaaggacaccaaaaaaggttggctgacgttgaatcacaggtaaacccctattcttccgtgataagtctaaatacaacttggaattgaacaggtgctagccatattttgaaattactaagaaaatgataaggcagtagcttagtaatggtctctgattgctctctctagactcctcatgtcacacagttataaagtactttcagtattttaaacgtaaactgctgatttatcttgacatgacagatcaaagagcttcagcctcttcaaatgaaattcacagatgtttatg

SEQ ID NO: 24860 - DNA, 1139 bp, Arabidopsis thaliana landsberg
agacaaatatagatgatttagaatcaattttaataactgttgtttttattaaatagtttaggattaattgatggaaatctataatgatttggattatttttaaaatattgatagaaacctatatatttacatcaacagataatcgttgtactaatttgttattagcatcacttataaaatgatacaaattaaaatatcaattaaataaatgatacaaaattgatatcaataataaaatgatgctaattaactcacattcgatcaaaataaaaaacacgtagtccattttatgccactcaatcttaatttatcttaacctttttttccaaattttatcataatctatctgaaactactagttatctttatcgtcatcttcatcgtagttgaacggtaatgggaacggacttgaaggctcggttttttcccgacattgttcaaatgctcgttctccaatctgttttccatattccaaactaaaacagagagttactaattgggggattaatgcaacacagcttgtggactcaggtaatgttagttttgaagttttttttcacctgaagaaattccatataccacgacgaatgatctcaagactagcgacaatggcaaccatcgtctgtctatgcatgaaagaaaagttgaaatccaaaactgtctggatccacgcaaatctcaacaggacattcaaaacctgatacatgttctaagattagttgctgtgaaaaatctttgatttaatgaaaagtgtttttgcatgagactcaccatcgctatgaagtatactttcttttgaggaacaaggagtttatctcgaagccaacggtttttggatgtccggtttagaagaccccaatcatggacaaagtcccagtaagtacagaatattgcagctataaatgagaagacagcagctaaaaccctccaagcgacttgacctttttggatactgtaagccgttctcaagcaaaccgccactatagtcaagaaatacttgagtccgttgtacccttgttccgggtttttttcctcaaacagccgtcgcaggcactgtatgagtaacaacaagtttcgttatggactgcaagatgttggatttttctttttgaaaggagtagctatgtgctttacctgaa

SEQ ID NO: 24861 - DNA, 881 bp, Arabidopsis thaliana landsberg
  unsure (1)..(881): unsure at all n locations
cttatttgttccatttattgttactctagccccaaacatcgagttccctggtaaatgaagagtcaaacaagataccaagcttattcccaatcgagaatgtatatatatatttggaaactgaattataacggaacgaaatatttgcctctaacccttttttcaaaaacaaaattgctctctattaatcgctatagtatgacaggttcattgggctaataaatgaagaaagaaaagaaaccacgaaaacttcagaatttataaatttataagatatatactgtattaagttaataatttttcttgttgtgaattgttacaacagatataaaaaaaaaaacagtaatgcagatagtaaaaaatcaaacagtatggttaaactgttggatagtaattacatacacgtttcagtacagtggagacatgttcaaagtctttaatatttaaatagacatcaaaattacatttcaaatgtagtcgtgtgcatgggtgtgtttggggttgtgtccaaaaaagcgatctattggaattggtatgcgagcttggaaagctttggaaaacaaaagctaaatagtgatcttataaagttaacgacacaaatgcatagctttcgcaccaagtctctctatgttgcatagcaactgagttcgatgcatctaatcccgtaatttgtttatcacacaaaatcttatttcagaaatattcatgtctaccttcttttgttttcatcaaaagagacaatgatactacaaaaatctaaacaaacagattcagttttgtttactatattgtattattgggtgtatgcacataacactttagatatagcataattattacggattcagagagcanagatacttgtagcaagaaataaaagtagc

SEQ ID NO: 24862 - DNA, 1739 bp, Arabidopsis thaliana landsberg
  unsure (1)..(1739): unsure at all n locations
aagagaagaaacatggctccagctgtattcacgtacccatccatctatttttgtttatttttttgtttattcttaagagttaagataataaataacaaacgtttgtattttgttattatactgtttcatttgttattgacttcgattccattattattagtatcttttttccaccaaacactattaacctacctctagttcaataattcgactgcgtgaagttttataattgacaaccatttattaaacagatcattattcttcctcaacatgcttcgaggatgggtctattattttactaaagtataggtagagatattgaatcatgtttttctttgaatcatattgaacttagacaacgaatatcactttgatatattgagtattctcaatacatatcttagttacaaacttcaaattcatatttttgtgaaattttgcttacacttatttataaaactaattcagaatatttttgtttgaaaatccaaaatcaaaatgtatattcgacagaagaaaaatatgtatatatgtataagaaaaatgaaaaatatgatgtgatagaatttgagtggacaactctttaagcatcataacatattaacatgtttgttagtatatatttaagaaaccattttatttttagatatataaaataaaaactacagttctatttttttatgtatataatcataattacccatcttccatcatattttttgtattatattttcatttttttacgaaaaaatcattttaacaatataactataatttgatggatgaattatgcttttcataattattgattttacagaaactagtcgaatttcatattatattatttggagaaatgaagagattatgtttttgtaaagtacgttgacgttaaaaggataataaaagaggagagaaaatgcattaaggaacaaaaatagaaaccctttatttatgtttatattctccccgtcaatttcgtgcaaatatcacacaatttttcttcaatatttttacttatacacagcaaaaacgagagaaagagagagaagaaaagtttctctctttggggttctgtgaaaaccaaaatcgaaaatcgcatcataatcttaaatctctcttctttctacgaattttcatgtttatgttccctctctcttgattctccaccatttcactattcacatattttttttttattgataagttttctccttttttgagttttacgagaggatttttcaaaggtctaaactttcttgggatctatcagattgtcttgaaactaatgcttacgggttttaacaggtttgttgcttaattcttatttgactcattttggtaaaatcctaattccataaagtttgtggcttttttttctctgtttttcccttgacttcaattggttctggcttgttctttgnnnnnnnnnnnnnnnnnnnngtttgttacatgtaattgtgttgtttgtttaatctaaactaatttattctcttagagcttactaatggtataagtcatgtgagctttgttcttatggaagaaaaaatagacattaaattctctagcttagtggttttgtaatcaagaaggcagttataaaaaaaagagggaaatttcaatttcagtttgaggattatctaattagctgaagactgtgtttttgtcatctctcagccgtgttttaagtttctgttgatatgaatttaaaatgaaactaactttgttttatctctttgtct

SEQ ID NO: 24863 - DNA, 537 bp, Arabidopsis thaliana landsberg
actctgttataatattcactaattaagatacttattatagcattagtttcggttgtaaaagcataggatactgtacgttgttaatctaaatagtttaacaaccagagtctctacttgatgattaaaaagtacatttccgtaggtactcatcttcttacactattatttttattggatgttaattactctattagtttatgttaactctgtgattacttggcataactgcaacatcaatacacatggctagttcccggaaaaggtgtaaaatgcataacatgaaccttttgctttcttttttttgtaacaaagtctcctaagcctaaccctggaacctaaaactgccttatgaatagcaaatttgtcaatggcttaagttaagtctagccactatagtatacttaacattgcaccaccacaagttggttcagtctttttaattgatatggaaatttaggctgttttgggtctgatttctacttagagtttaaaggacaaaaaaagatgaagaaaaggaaactaaacctgtaataaatt

SEQ ID NO: 24864 - DNA, 498 bp, Arabidopsis thaliana landsberg
cctcacaccgttgtaaccaaaaacgctatcgtcgaatggatctcctttgttaccaccgaaaggtcctactttctgtgacatttttaactgaaagagtcaatagtaatgacatcaacaaactgaagaatttataataatctatcgaaacagaaatctaatgtcttagtgaaaaaagtattttacacatctaacatgaaccctactaacttctttattttattataaaattccagcatttggatgtaacactaatttatcaatcgttttcaactaaaacaaaatatgctaaagacaaatactaaattttagggaaaaaaaaggatgataataaggaagagcattttacaagttctttgagatggtcaattgaaattttcgtagagagatcaataatcacggataagattatgagaaagtgacaaaccaagaaaggcaggacttggttataagaaaaacaaaaaaccaaaagagacaggcatgacttacctaaataataaa

SEQ ID NO: 24865 - DNA, 780 bp, Arabidopsis thaliana landsberg
  unsure (1)..(780): unsure at all n locations
aagcaaatgaggatttcatccagaataagcaatttttccctttgcagaaggaggagcagacaagttgacaagtggtgttgattgcttagctaaagtatcttcaacataaccaatttatatcccctaaatatctgtaacttaagcaacaataaataaaacaagagaaagatgtagtacgaagaccacatattaccaataaaatttcctcatctccgctgctgtcttcttcctcatcctcctctgacgggattgctgcagctgaagtcgatgctttgctagtaaagtttcgttcttcttcagctgcaagggangccgccagcctatattacaccaagacaggaaaacacgaaattactcttcaatcaaataaacatcctcaatcaatatctcaattactcttcttacatctcatccaacttttcctgataatccttcccctgtactgaggaatcctgtacaagattatctaggtcatccccatccaacaaaactccctttcccttgggatcatccttctgcgaatcaccaacaaacaaatcatagtcgttatataaatctcaacaaaaaaaatcatttacaaattactgaagaaagaatgacagtaaaagaattgacatattaaggattgaacataaaaataccatgactaaggaagggcatgtgaaagcaaataaataacagggaagacatcacaacaacacagcgtcaaaaagatttcccagcttctgattcataccgcaagatgcatgactaatgccataaaatggaacaaaaagaata

SEQ ID NO: 24866 - DNA, 718 bp, Arabidopsis thaliana landsberg
atggtagaattccttctggaattctcttcaaagcatctatttgcccaaattgaagaaaaaaaaatcaaatgggaatttaaagaaatacaaaggattgataaaatttcttacggataaagggctggttagagaagaggattgcaaatgctttaaagaacaaaatgacgtaactttacctttctaatattttatccttacagccttttagttttttcccactcattatcctttctctttcttttcaagtttcacttttaaccaatctgagacccaaactgaatcccttaaccatacatgttgattagtgggccaaatttaggggcccagcctgagttagtactaatgattttattacttatgtattactaatgatttccgggtcgaatagcaatacgggtaacaggtcggatattttaaaaataaatctgatactcgatccttacgtacgggtaatagaattacattattttttacccgactaagtttactggtacccttttttcaagactggtacgagtcgggtaacatgtatcgtcctagttgacaaaattacataattaaatttatagggttcttgtttaatattagggttactgttttgttcatacacgcaaggcgaattcgatgggggatgatttaccaggtactgaggtaccaattcaactctgtaaaaatttgtttatatatcggaacaaatccctaataaaggtagatattt

SEQ ID NO: 24867 - DNA, 1603 bp, Arabidopsis thaliana landsberg
  unsure (1)..(1603): unsure at all n locations
ataacaatttattgttttcttccggttccgtttctctttggtttttcttccattgagaaagttgcaggtctcattatccactggatatttaaaagaacgggccgtcaccttttcttgaaggatgaagaagagggaaaaccaccattgcttcgacgcatggtggaagataccgatgattgtcatttcatgtgtgccactctatgtcccatttgtcacaagttagtttacctaactttgtctcgataatgtctcactagaaaatgttttcctcaattgcagatctgcactgcgagccttcaaaaggcgggtggcttattcaaatgtgggccatgatcgtatcctttatgtgtgttacttgtagaaatgtccttgttagcatcagacattacattttttttttccttcactagatctaaatagacgttgttggctggaagacggcatccattagacgtgacagtgaattgcctaaggtatctgactctgactggattacttgatttggttcaggattttgatataatagttctctctgataaatgaataatttcttgtttaccagtgggaagattctctgaatgagaagtatcctcatattgtttacgaagaactctgcaaggcatgtgatatggaggacataccagaaggcgagaatcattcagacgacatagaaggttagcttgcacttgttgcactgaccgtttaggcatttatcagtgattttgtagaacttaatgctcacttctcttatttctatttctactttctatgctttagatcttattagctggtaaaagaagtgttcagtccaaattcatatgttgatgatctaccatatgatgtgcataagctttcttattcatatgcatcatgatgtatataataacgtagtgcctcgtcaattgtgcagaagaaatgatcaatggcctcttctctgtctcatgggaaaaagttgatgttcgctttcacagtagcaggcagaggtttgctgcccatagtgttatacaggtctctcactctcacctgccatacctcatgtgtcttaagatataacatttgtttatcctcacacctaaggctttttaattgcatcctctcttgatagttatctttctgttgttatatacattgaacgataacatattgttcattcattttgataggattaatctccacatactttctagtaaaaccataaagtctaatagtctgtgttatgccgtttacaggttaaaaatgaagatatgcatatagaaggagcagatgtcatagagcatatcatcgatcatttccatgcttaaatcagtaaacttttcatcacccaagagtttgggacacgacattaaggactcaaatttcttatagtagagcaacaattttccagctggacgtttatatgtcacgtagttgtttacactataaaatcatctcattttgtctgtaattgcacaggtagcaagacgtcaattatgaccaatgtatttgatacatggtattagcaaagcanattgttcaattcaattgtatcatgtattcacaaatattttgcaatggaagctttgtgcctatatattcnttttacttggaagaatcctaccgactg

SEQ ID NO: 24868 - DNA, 2442 bp, Arabidopsis thaliana landsberg
ggtgcaaagagcaagaaaagaacaaatgggttgttctcctaggtggaagcaaagtatagccgttttagtgtcgccaagataagcaaaaaaggaagagaaagtggcggtgtttgaagatcttacaacaagttaaatatcacttgcaattgataagaactggaggccttggacatgaacaagaagcatatacatgtgatagaagccatctttaacttatgtggaataatcataacatacaaaattttacaaattgatacagtcagctatgacctatgatgagagatcatgtttgaagtcccaattggctctatttttgaccaattttctttgtagctagctatcacataacaaagtttagtattttacacacaatttttttttctgaatctaacgttaaactatattcaaagaaaaatgaacgtcatacaaattaaagcaaactttttaagaaaaataataaaccaaagaaattatctttcattgtgtgcctttgatgcaaaccaatctcgtaaacctacttcatacttccgctcatctccatattgtattgtacttaattgattattaatgttcttatcgatgattcttatcactctctcgcttggtgatggctcgtctctatgccttctattgttcctctctttcaaaatcaagtggatcgtgttttgaaacacataacatagagtgaatgtttttgttatgtcaagattgttcccatttaataattatttataaataatttagttaaacaattgcaaaataaaaaaagttatcaaaataaaatgacattatctgtaagcaatattccttagttctacttctttgaactctaattaaaatcggatgataaaaaaaaaacatactagtatattgcttgaaattggcaaaaataaacactcccataagttttacgccgttaaagagagacggagcgacgtttgctacgaccgtcaagattcaaatggaatcttttttaaggaaaaacaaaaattcctccaacggctatatctgatcagacatctctgtcttcttcttggatgcggaaaaggaaaccttattacttctttgagattctcaattcaattctctgagattcttaaattcaattctctgagattttgccctcttcataataatggagtctacgcctccttatcaccgatccaacactaaatcagcttcgcgtctccaagattcttcgaatcctccaagtctctctcttgatttggttctatcgtctcccaatactccaaccccatcatcacctgttcctcttcgcgatatcctcctcttacctccttctccacttcgaaaatcgaggacccgtttatccgatcgactcgaaatgacttctgaagatgctatggcggtggttcggaaacggggcaaagggaaaggagggcgaaagagtcttttagcatctccaaggaatccccggagatcgaggcgaagatctcaatctgtgcaagagaaagaagctaatttggtctccgaagaaatcaaaaagcatcctcctagaaagcggaaggttaatggcccacctaagaaggataagcacagttcagctcctcctctttgtcttcctcagatcttccaaggactcttctttctcttattatctgctttatgtgtttctctgcttaattctgatttgcttgtgtgttgggtttggtgaagatacatgtcagagcgatttgaatcggattggagagattataagtgatttggtaatgtggagagatgttgcgaaatcgactctctggtttggttttggatgtttgtctttcctatcttcttgctttgccaaaggagtcaactttaggtaccaaatctctagcttgtgtttgtaggctcaattagatttgtgaaagtcatgacctttttctttgttttgaagcgttttctcggcggtttccaatctcggacttgtgttactttgcgggtccttcttgtcaaacactctttgtcaaaggtacatttacttctgtggtctcttttgtttgtccttctccagaaggtaatagttagtgtgatccttcaacgtgttgttacttttaggaaaaatgaagacacaaagagagtgttccatgtgagtgaagatgatgtcttgcgtttagcgagacgagtgcttcctgcaaccaactttttgatctctatgactagtgagcttttttcaggagaaccatcaatgacactcaaagtaaacaaaatcaaatcagttttggtgattgctatatgtggtggtttacttgccctttcatctgctgtttttctttttgtcacaggtgacaccatttctgctactgggagctgagtatggtcatctcataacactgtggaggctatctgcatttggtaattaacatttggaacataagctgaaacattgttaagcatgataggaattgtgatgatgatatgtgtgtatgggtactgaaacag

SEQ ID NO: 24869 - DNA, 1272 bp, Arabidopsis thaliana landsberg
tcagatgaggtaattaataagctttggtttagtaagttcttgatcaaaagcagcctaggccttggaagaatcttgaagagacgtattattctaaccagcatgctgttttgttccaataggaagaatctgttttattcaatctgccaatgaatcgtattttagattgtctgctttaccacatctgaattgattatttggcgtgtgcttttgtagatcttagctgcaatcacttatcaaatagtccctgctgatacacagtatgctgagatacctcttgctgctgtaacatatacacaccagaaaaaggttcgttttgctctgactcttttgacacttactgttgtaatagctttttttgtgcaacgcttttactaaaggtcttgtgtttaatagttcatgtctataagtttatgtattagatattgcatacttggttttaagtgcttcttagaactgtaaactttttctttctgcaactggttttactaaaaatagcgtgctagaaacctcatcaaaaactaaatagatgagtttcttttaatacattttcagggatttggtaagctcgtctatgaagaattaatgaagaggcttcatagtgttggcattcgaactatatattgttgggcagacaaagaatctgaaggattctggcttaaacaggtgatattatcactttatcactatgtttatggttgttggtgttttatctttattagtttgttggattcaaactaaactatcttttttaagtgctttgactgtttggtttcttatattactttacgaattttcaggggtttataaaattagcagaggtagaccacaaaggaaaagcaaaggggttgcacattaagtctaatattcgaaaagccttgtgttttcctggcggttcaactctcatgctttctcatctgaacaaggaatttatttcaaaccttgagatttcctcttcatggaaatatcagtgtgagggatctccactctcggcaagaaataatagcacaggtcctgtgactggagattcagttaaactgagagagagctttggtgaaagcgtatatcttgactgtaagtttaaaactatttctttcgtcaaatagcctaagagaatgtctctgaagaagataccacatcatgaagcatttgaatatgtctctgaagtttctgctataatgtgccggacacaggtatctctggtatcataagtcccatggactcgatcacaggaaaggaaaacaacaccgtgatctctgatcaagctaccacagc

SEQ ID NO: 24870 - DNA, 702 bp, Arabidopsis thaliana landsberg
tatttcatcaaaggattaacacttacttgatgaatctgttgtaggccgaaggaacacgttgtcttttctccggtgctgccacatgaaaataaaagaaaattatggactcacttagcttggtgattgcatatattacacaaactttaaatactatgtacggaatgcaagaggtaaatagagagacatacggcgaataggaggcattctaggagcctcacgatcaatgttttccgataaattgttggtgctcctagaagacgatgcacaatctttccttgtcaccagagaggttgtgtgctgtctatgaggcttcatgatttcaaaaactatataagccagatttctaaatgggaataataaaaatgttgaaggactaatgaatataatatgatacctgaagatcttggtgaatgggaggagctgaggtttgatgaagtgaaactccaatgttgagggatagcaaattggtacaatggccacatctcaccgtcacaagtgtgaacaaacttgcgtatggtacacttacctaatcattcatacatgtcttgatcattataagggacacgttaattgtcttgttttaatactatttcataattcgagtggctggtctctaatgtaacgagagctcttgaaagagaatgttaagtactactccattataggctatagcacaccttgtttttggttaattgtagattt

SEQ ID NO: 24871 - DNA, 548 bp, Arabidopsis thaliana landsberg
gatacatgctggagactgtgtgcctttggacgaacttcgcggtgacaccattattttttttacttaaccttcgacgactaagattgaaagtaaaattaaagtatgactatttctccagcttaaggtatcgttttaagattaattttgtactgacaacaaactggatcataaatccagatatttaatgttttatacaacggtaaatacatatatatgtcaagaaaaaaaaaattatagacattgtacatttccatatgtatcatgtatgaacgaagttctaaattgttacaaagaaagcagagtgatccacatttctcggtcctcataaatatgactatgccattttgttgagcatgtgttatatgtaatctgttacctgttagaatcttataatattggttcatgcatggacggtgttattacttatctatggatgattttatacgtgaaccaagtattataatttcagaaatattaaatttcatgtaaagaattaagaatttgtcatttttcgaccttgtattattctctatggaaagtttataact

SEQ ID NO: 24872 - DNA, 1274 bp, Arabidopsis thaliana landsberg
caaaatatctgtgaattgaagttctagcgctaccttgctttctcgagcttaccaaacttctcattttttatttgagcggtcaagaattatccattcgaggggtactctaattgggcctttgtgatttttatactgttcgtccccatacattacatgtttgttcacatcatgatcggattattttgatactcagcaatagattttgacatttgctctaatagtattaaagcattacaaacaaaatcgtaaatacaatcattcagaaagaagaagtcagtcaacgaagatggagaaagaaaatctctcaaacgtgtcaacatcttcaatattacaacgtcttcacttgtgaatggagcaactctcctttttcttgtcaactcatctatgaaatataattacttacggaaaaaacaacgtgtttacaaagtgttatgaattcacacatatactactaactcacgccccttccgcttctatcgatcaaagtacccacttgttctccgcacaaagcttttgtgatgttcccagcttccagaaagttaaataccacaactgtttttttttaatccagaggacaaggaatcaggtcatttacattcaacgttcgattctatcatcaggtgctaagcactcattgcgggacaagtataagggtattgatctattatccactgatggaaatcaggattctagaggtcccatctcgagtaaaccatttgtataattctgtctaggtcactaagtttaaccatttatctcacagccagatctaagtaatctaaaacggattagctaaacatgataagagagagaagaagaatctcgacctggaatgctgttctcttcacaaaagttaagggccattgtatccattgacgtaagacctctagaagccaaatcttgaaatgatatgtgctcaaatgtcacgttactatcttgtgaatgacagtcataaacaccatcaacgtttgttcctttcaccactgcctccgcattgactgataacaagagatcttaggttaccacttaggaccagttactaatggaaagagaacaacactaagaggaagtaagagagttgtactgtctatagctcgaagggctgcagatgcatcagatgataaaagtggatttccaagcgtggcaccgatgccaccaaatattaccactcttcccttatctagatgccgggtggctcgttgacgattgttaggttccccgacaccctgaaccgattttgcagtttgtgaccgtgaccatcacactaattttat

SEQ ID NO: 24873 - DNA, 2612 bp, Arabidopsis thaliana landsberg
acaggttacttcttttagcttcaaaattttcaccttttctaactttatttgtatataatgcatatataacaaacacattatttcctccgtttcatattaaattgtataatgtatcaaaaaagggtataacaaacaaaaaaaaagtttttgcctggtatttatataattacttaattagcattggtgtgaatgtgacataaacatgtacacgatcaaatttgattgagcaacttctcaagctgcctagagctccctgcctctacttctatgatataaattataaatgtagtacttttttccctccagaaattgtcattagaatttcacattaaacatgtggaagaaggccttgatcagatcagatcgatatatagtagttcacacatcaatatacacaaagaaacaataaaataactcgacatcacatgcataaaattaattatataattattaaacatcgaagattcaaacatgtagtgagacttttcttctgaaacacgaggaattaaaaatgtgacaagaagttaattgctttgaacattgaataatcatgaagttggcttaaattaatcaataaacgaacaaagtaagtaacttccaccaatcggttgtgcatataaacccgacttttaatccaattagctcgaccaaatcgaatcaaccaaaaaaaaaaaaaaaacgaatcattgtctccatatagtatatgcaaatataccgacgaccttttgagacaaaaacttggcaatatcgaatctgtccagcagagactatggtgaagattcatcccgatctaacaacctccggcgccggagaagaaacaagttcaccgtacttgacgacggagcaagagagtttcactatatggatgaagtcgttggtgttcaacacaaatggctgcacagtttttgattccaaaggaaacttaatctatcgagtggataattataactccaagagttgtagtgaagtttaccttatggacttatgcggcaaaatcttgtttacattacgtcaaaaggtaaccaatacaacatatcatcttatgttcgtatagtgttcttaaaagtattttgttctaactcttttattttcttggttatagaaattgggcttattcaactcttggaaaggatataactcaaccgggacaagatttcaactaagaaaaaacttcaagatattgccaagagaatcatcttcatcatacaaagttgtaatgggatcgcgtatagttgatggtgatcaacgttcatgttataagattgtcaatcgtggatcagttttagcaatcaaggatggatcgggaagattaatggcagaagttaaaaacaaactatcggatattagtggtttggatcttggagatgatgttttgacaatgatggtggagccacaactagatcattctttaataatgggtattgttatagcttataaacttaccaaatgtaaattgtgataattatttcgttgagaatgcatgtaatcaggtggtaatcttgaaggtaagcatgttttaaagctaattaaacgttggcataaaccccaaatatctggcttgaaattggatattgaagattgcaccaaaatgtggagaagctcggcatcgttcatcctcataaaagtcaaaacaagcaatcagttctctctttttttttttggtatggaaacctagttctcttactcaatattcaatccattcttttcctccaacttcttcgtaaatggcggatgaacaccataaccctgtttcagcttattgccaaacccgaaccgcgcaccatggaatagtgatccaacgagtatgtttgaacaagctcaagctgccattcaatcatcgctatcatgaccgtgattactcgtttccccggtcgtgagaagaccctttaagcgtgatttttatacggatgtatgttttactaatactagtaccaattccacaacataaaccaaaagtgttttgaaattagggtcatgtttctgttaacaatatctttaactagctgagttaaccataattgaattactaaaatatccgatattatcaaactgaattaaatagatttggatggtaatttagtcagcagaaagaattggaattggtgaagaagataatagactaatagtaaagcggtcatggaagttatacgaatgcatgaaaagataatagagatatcaatcatacgattttattaaactaaaggaccatgtgatcagattgtaatttgtaatagcagaatgagccatctcatattccagacatggttttaaataggcttgtccatttcggtactgttcatatactgtatgttccaatttttatcccatatttgtgtgtttaaaaaaaataaaaatagctacttgaaattgtttatagaatgagatatatatatgtattattcgattggttattcagcttttataaaattaatgaaaatcatctaaatatgtaagcttttcacaaatacccgtatcgaaagtgacctttaatttaaccgtcccgacatcaagccttacccaaattagtaagaatttgaataataaattctgctacttagattttttgaactcgttccgcgacccaaaattctcggccctatcttatcgaaaat

SEQ ID NO: 24874 - DNA, 274 bp, Arabidopsis thaliana landsberg
atgtagtatgcttccatgtttactttctgggacctcatagcagcctcgagtccattcgtggtgatatctaatgcgcctcctaaccctaaccctagtgtgcacaacatctctactgctcatctgacaactgccagtagcggacccttaattcatgaactattcactcaatgatacactcatttgttcctctgcaggctgacataccgagagctcaagaacatagacaaagccatagacttgcatgaccaagggatcgggctcatacctggagaac

SEQ ID NO: 24875 - DNA, 1604 bp, Arabidopsis thaliana landsberg
ggttcaagcccaagatcaagtgcgatctcaaggttcctcttacctctaattcaaccagcggatttgtttttcagccgaccaagtgtgacgtagacttttgattgctagtcaagagtcaatgctattatagtcttcttcgagttcatcatattacacttgtttattgattcttattttagattgttttgctttattatcttcatacatatcgttggagagagatatttttcttatgtaatattttattgtatgcttccatgtaaataaataatcacattttctttaatgctaataataactatacaattagcattttgattgtctcatgaagcattgacccaactatcaaaaatgcggaatcttctgctttcccactgatccattttgtgtttgtagaatgagaacaagcaacattgtacccatggaggatttcttggcactttctccatctcttcacctcccaacaatctattcagcttcttgactagagcctcttcatcagattcatcacacccgaaaaacttttcctgtaaaaagatttacagatataagtattagacaatccttcaatgaacactaataattaatcgtgttttacttaccccttcatcagcatatagagaagcatggattctggcggttgcatcttctagtatagctaccaatttgatatttccgttgatatcacggagttttctgacgtctcggggatacacttgtatgaaccgaacaacacacctgaatttagcagtcacctgcataataagcatcagtaaaacatcaattcaagaaagttttcactatactcttttcctacaacttatgataaatccaaggtttttggatacattacattgtgataggtcaggatgtccatcagagaaacaaatggagcatcgtcatgggcaacccctagaaaagattaaaccataagtattatattaaacgttatgtcaaatttccacaattccaaacaattagctggttattacctgtgatttcagaatgtgaacgactaatgcaacgcgcgattgggttccatctcggtgaaaacttctccccacacattctgaaatggtaagaaagtgtgttttaaactgaagaacaaacggacgaagcagaacatcaactcacaggataagaaaaggtgtcagcagaaacctttgaggactaaaggcttccatctctctgctcattgtgtactgcatctttgtagagggagtaaaagtggcgttccataatcccatatttacttgaaagaaaaggttcagaagcttcacgtgttgaccaggttgaagacagtgaatggcctgcttctcactaactctatctactatgatcctcaaaacggaaccaaaagtaggaaacttacgtaacatgtatgtaggcaacatctcgggttctacacataaaggaagcctttctgacctattatgattgcaaacaaaaacagagtgagatgagtaacacgtttgggatatatgaccaaaatctagtaaatgaatataagacgcataagagaaacttatttatactcgttgtattttggatgaggaaattcagacttacttaaccaagatgttgcagggggcatctcagttcca

SEQ ID NO: 24876 - DNA, 466 bp, Arabidopsis thaliana landsberg
atcggtttgacgagttccgggaaccatgaactggaagatcactgtcaagcaagcaccttgaggagcaatcccatagaaagtagaatctggtttagttaagtgacattgaaggctctttgaaaaatgttttacactcacttgcacagactgagcatctcctctagcaatagctctctctgaacgagcctgagcacttaagttcctatcttcaacaggagcctgagatttctcaccaataaccgaaagcctctggaactcaataccaagcctaatcaaagtcgttgagacttgcacttgcagatcaccgtgcttgcttatcgtgacattaagaacatcaccaacatgtctcatatgatcaacaaagttctgtaactgattcgagtcttgaacttgaacaagagtcggaggaaagtctaaagccgagtcaagagcagtctgcagctcgataacttagacgagttgcggt

SEQ ID NO: 24877 - DNA, 1235 bp, Arabidopsis thaliana landsberg
aaaaaggtcacttaaatccgatttttttataacttggaaatattcgattcaccaaaattgtaagctaaaatttgagaaataaattttcccatatttggttaatgaaaaaaaaataaaaaattcccatattgaaaattgagtctaaaagtagaatagagttacaacattgttcaaccaaaaagaaaaaccgaaatcaaaccgtaaataaaatttataccatatttttagtattcggataaaatttgcccatcccgagaaagtcagaaaacgatcattttctaggaaaacgaacgaacagaggacaaatatattagataaacagagggaaacaagaacaaaaacgtttgcttcattctctaatggcagccaccacgagacggttgctttactctgtgtccaaaagattctctaccgccggagtgcggcggagctatggcggtctgccacaatcgaattccaaatctcctccgtcttcttctcaacgattgatggaattggaatctgaattcagtgcccacaagtaaagtctctttctttcctcttttggggttctgggttttgcacgttccatcaaaagttgtgatatttgggatttgtttggttcgatcggacttgtatgtatatatgtacatgccatagctgtatagagctcatgattctgaaacttgagaatatattaactggagtggtgatctttggtttttagttattgattaagatccatgatgacgactcataataaagctgataatcgtttattgtaacggttcatatccaattcgattcctatcctttgttctttcttttagaatttgaaaattatgaactttagcttcgtcttaatgtaattttctcttctatgtgttaaacttcagttaccatcctgttccggttgtgttttttcgcgcttatggctcaactatatgggaccctgaaggaaagagatacattgattttcttgcagcttactctgcagttaatcaggtaatacaattccaaatccgcttcccgtcactctaagatacaatatgtggagagtttctacttgttagactcattgtttgtgttttaatgcttaactttgtttattgttgcagggacattgtcatcctaagatcatgaaggcattgcaggaacaagtggagaagctcactttaagttcacgagcgttttacaacgataaattcccggtatttgctgagcgtctcacaaacatgttcggttatgatatggtg

SEQ ID NO: 24878 - DNA, 918 bp, Arabidopsis thaliana landsberg
attgcaagggcagttggtgggaaatcaactgaagaagtaaagcgacactatgaattgctccttagggatgtgaatgacattgagtcaggacgctatccacaacctaggtaccgtaacactaattgaagccattaataaaatgcctttctatcaagaagaggacatttgagagaatctataaagaactaagaatttcgatgtatttcttatattctatttgctttctttttttgttttttttttaatttctgtttggttttcagatatgtaataatctctctcaatttccatcctattctaatccaatcaatttaagttcatatagtaacagtctcggaacattctatcagttttatggattaagcatacgaaaaatcagaaatcatcgagatttgatcgatcaaacttcgtataagtcgaagtcattattatttatttttgataaattataaaacgaagttgatagagaaaagcaagacttatttttgcactataaaccaacatcaatgcgtagcatgagatcaataaacataatcttcacactgaaatcgaaggattcacgaaacaaaattattgatgttcaatgaaagaggagaagatgaatgtttcgaagttcggtaacggagtaattatgactgctaatatccttcgggttaccgtgaactacacgttatgtaagcaaattttggccgggaactctttcactcttttgcttcttaatatacacatttattattaaaatatttcagatgttgaaaatttactaatacactacaagctcaaatatttatatatttctctatatagaaataaatttatggacaaaaaaacgaaaatatgcttaaacgtgaaactaatataaacgatattattaaacacaatttgtataggggaaaaaaaaacgatcaaagattcaat

SEQ ID NO: 24879 - DNA, 1939 bp, Arabidopsis thaliana landsberg
aagccgccccgttattaaggccccatttccaaaaagggagtacttgcgaaaatatatcagttttgggcccaatttttatggcgttgccatttcccaaatgggcttttggatctgccatttttggccctgcgaaattacgtcttcacctttaggtcaatgtgcgggagggcaacgatttttaaatcgagatttcttcatcgtcccgccgtctgttcatcgatgtgactggcggcactgtataatctcggatgtgtgtggttcagattgcgtagggtttaagtttttggtggacctgttcatgtgtaacctaataatgaagaaattatatagtacttgtggtgcgacgtacactggtaagaattttgcgccttttgcaagaactttcatcatctgttggatttccgaaagagaaatgagtcaaaagtgttatggaaccgcatgtaaatgctacattgcctatgtcctttttatggaattttgtcgctggtcttccatttcttgtttatgttatagctatatagcatgtctcgtcttcctctgtatattgctatatttgaatgtgtttgggttatgtttggcttactgtccctgtatagaacgaatgaagatgcgtttgtgttatgtttggtttattgtccctgtcttagcgatatagtatgtctcgtctaccttttgtatattgctttatttctatcaacttggatgtgtttgggttatgtttgttttgttttcgctgtcttaccatatagtatgtgtcttcttcttcttggccttaagaacgttgattaatggctatgcaactactaactgtctttgtcacaacttgtgtttattcaggggaagtgcatgtctctgtcatgctggtaactgagaattctatgaaagggtatatgggatttctacatttcaacgaatgttatgcctgtagtatatctatgacttgtgatatgagctaagagaagctgctattgcgtgtgcgaactgagtttgagctagatggacttggtataaagcctaaaataagttactggctaccgtgtcagctgtctgtatttgtagtgaattcaagacctccagtaatgatcacaagcaacattagcatacaaaatttcttgactgtaaaggaaactgcaatgcatctgaatctgttgttgtcttttaaacatgaacgcgttgaggatgttggcatgcggatgagacagctttgttctgtcccagcagcaaaggctaacaacattggtggagatgacattggtgctgtttttgctactttggtgccaaatgttccaaccttgccgcaaaaaccgaacttagatgagaacaagttcagtagagttaggagaaggctatttggggacaatgaagcttcatgttcgaatgctacaatcgggtttttatctgttgaaactactgcgccaggcacttgtatggagagcgataatattaaagaatctggcgcgaatcatgtggctgcaactgatcagtgtggcattatcaaactagaagatgctgatacaccatcattgtctcatcattctaaagacatcaatacgtctggtcttgagtttgtgcaacaaattctatctgatgaggatgatgatttcttaagagaggttgaagcagttgagaaccgtgagaatcatgttcgtatgtttaagggaaaaggcaaatgcaaagagtgtgtggatgatattgtcaagaatgctagtgatgattcttacactaatggggtgggttgtagtggttcagatgtggatatctttgatgaagatatttggaccctagcttttgatagagagtatcctatcgatttcagcccatcgggttaagatatggctcatgccgtaggagctgagagctctccaattgttgtggagccagtttatgctgctagaggtgaggatattggcacatcagttttgttgtacctaggtagtga

SEQ ID NO: 24880 - DNA, 1213 bp, Arabidopsis thaliana landsberg
tctatgggtcgaacggtgtttttgtctcggttttagagtggcagagaccaatagatcaaagagatatatgtgcttgtacagttgggatgtttataccataatgcaacagctgcacattaatgtgacactttgccacacaacaataatgttagtttcttgaacccatgtgagtttggcagtaagtaggctatactaggaatagcagactgaacaataaaggaactaagcaagatatagaatctaactaaagaatgcaaaaaaacagagtgaatatttactgaaacacataagccaaagcaacaaaaacaagatcaaggtaccaaagttcctcaggcatatacatataaaaaaagataaatatgtaatgaagaaaaaaaacagtaattcctttgtcttttgtggatctgtgaatttgtttttcgttgtatggtcgagccaaatggttatgttgggccttagcctttttttttttttttggggcaaacaagaccttggcctttataatagttattacttctttgtttactatagttctttttttcgtaaatggaaatttattagtaatatatttcacctattaaaaaattgtttacttgattaataggaattttttttacaaaaatatataacacaaacatcgtgaagcctaaacatatacatatcttgataatttaatctgcataatttttaaaatttatgatatataatattattaatatgttttacaccataatttatatcaaaatttttgtcttacttattaaaacaaaattttagattaaaagcacttccgtaaaaaggaaaaatagtccttttgcatcaatatcatcaatgtatagttatttatgtgattactaaaatcggaaaattatattaaataatcaataaaaaacaaactcccgcgtagcgtagttcttccaactgcacttgtttgcaatagagatatcactggagaccttcgatgttctccatgtagtttttggtccacagagtgttgatggcagatctatccaagtgagttggtttggaagtctcaattgagaattcatttgttggtaagtggaaacaattatgtttccagcaatttcctccaatcatggagatctttcattcatggtttttctttcgatgcattggcttcacttaagatgaatctgttataaagtttgtttccggtggtctaattcaccggcgtttgctgggagagtctttg

SEQ ID NO: 24881 - DNA, 719 bp, Arabidopsis thaliana landsberg
  unsure (1)..(719): unsure at all n locations
atactaattgtatccaaaatggataaccttaacttattagttcttaatacatcaaaacatgtgaaacaaacattataaaactgccgggaagaaggagtaaaactcgcttaaaaccaatttctgttcggtagggatgatcatcggaccggtctaaaccgactggattaaaagtttcattttaacaacactccccctaaggactttcaacaagcgtaaaactaaaataaataattattacatgcctcttcctcgcttcaaaacggcaccgtttccacttgttattatttttctctctatcgtctaacaaaaaaaaaaactgacttgggattttttttcatttgtctagcccaaaagaagaagatagaaacgaagaaaaaaagcaaacacattttgggtccccggtggttaggatcaaattagggcacaaaccttatcggagaaagaagccatgggaagaagaaaagtcgagatcaagcgaatcgagaacaaaagcagtcgacaagtcactttctccaaacgacgcanaggtctcatcgaaaaagctcgacaactttcaattctctgtgaatcttccatcgctgttgtcgccgtctccggttccggaaaactctacgactctgcctccggtgacaagtaaacttctttcctcttctgggtctcactcgagtttttgggcttccttccttttttttaaatcctaatataaataaactttcaaa

SEQ ID NO: 24882 - DNA, 827 bp, Arabidopsis thaliana landsberg
tttgcataaaatgctgtagtggttgaacgaccaagtattaagaaaacattcataaacaataagtttgtttaaaatgtatgaatgactgatttgttgcttatgtatcttaacaaaaccttttttttgggtgctaatgataattcatgcccggttttgttttcaatggggtgccttgttgagtttatttctttttgtcactcttccgttgagtcttttataagagtaaataacttcagataacctaaaatctttaatgaaaaaaccaccccaacatttctccataatgttaaataagtaatactttttgagaaacgaattgagatgctctaagttattgatctaacttagaatgtataatgtataataatataaatgtcataataataaaaaatgtattctctataataataaaaaatgtattctctatagattcacacgaatgacacgtgtgtcccagtacttggcataccctgacacgtacaccttaaaagagcagtacttgactacttaccagatcaatctagtgccgtccttcgtttccaagatggacggttcacaatctcttattaaacaaatcatcgtttctgcgtcgtacgattcataattgattattctggggtccatttaccgaatctgctcagtcaagtctccccctgattttactctacttttctacaagttcttgtcaacgtagaagagaagattatttatgtttacatatattttaaattttttataatgtatagcctatagtatatatattttaagtcctgttttgaatttttcaacaaaattataagcaggcggtctaataataatattacacc

SEQ ID NO: 24883 - DNA, 688 bp, Arabidopsis thaliana landsberg
  unsure (1)..(688): unsure at all n locations
taaagacagaggaaaagagtttaggacacaatacttttatcaagtccttttcgagacgttctttcagctgttgcattgacgatgtgccaccagcaagctggcataatgcgagaagaaaggaaatgttaatcatccacatccaacgaaactaaaagtaggggtatttaagagttggcattgattgctattttaccagtatgctactatacaactctctccggatgtctacatcacatttgttgatgctctccatgacctgtacaagtcagtaaaatggagagtaaagttagaaaaagttaagagatggaagctttgcaatgactaaataccatgcatataccatgtgtggtaacccacgaacggaaggaatcatatcagcatacttctccattccaggaatcgtctgcaaattgcaataaaaacggagaagaaacctttgataaataattcgaggctcaaaacgctcaagataagaaacaaaatgtcttcagaatcttctgttgaatttatcgtgctcaaatggtgtacctggactatggacgggttgaacatcacatcaggaactttgaacctatcagcaccaatctcgagcgtccttcaacagacatggttaataagatattgagaaagactacaaaaattacaggtgcagcttcctgtcttcacatgaagctagcactgntgttct

SEQ ID NO: 24884 - DNA, 624 bp, Arabidopsis thaliana landsberg
cattcccttacaagtgggaccctagctcgatttctgcaggaatggactacattgcaccaacgagagtcgtgctggaagctcgctccggacagccccaccaacggtggcgaccacctctgcatcgacggatcgccggcagcagcgaccacctttgcaccagcagcgacaacgacctccgccctgcgaaaaggtcctcacccccgtcttcctgtgggggtgacaacgaggccattaaagccaaagagtcggaggtccgacggtagatggcgctgacggtctcgccagtggaggcaaccacctctacagtgggcagcctcaccagcggcgcgaccgcctctgcatcgacgacagcggccacctccgcaccagtcgcgtaccggcgaatggcggccgccccagcgcacgcgaagaggttttcgctcccgtcctcactgcgggagggggacaagaccatccaagaacgcggacgccacccctgcggcgtacgatgtctagtatgaccccccggtgcggccggcggcgcaggagaagccatggatgtgtccgacctgcgcacgacgcgaccgtcgcccgtgcagtggacggacagccacgccccgaccaagcagcaggagacagcgtcgg

SEQ ID NO: 24885 - DNA, 558 bp, Arabidopsis thaliana landsberg
cccaccctacaaatctatacctaattacaaccattttacaatgaatcacctattttaactataactatctgcatttctttttataataagaacccttaccttttttcatcctcttacttttttttaacctagattcacagtggaatctttccaaagcaatggctaaaatcattaacgtttaacaaactcaggtaaagtactctgatttcaaatttaaatatattcttatccagaacaagtggttgatattccctaatgctaaaatctccaatttttgttcccatttgctgaattcttaatctaagtcagtattactattgcaaatccactactgggtcagatttagtttcacaaaatcctttattgctgaatggttatgttgttacatagtgtgggactaattccatgttcaaaccaacaaaagtcttttctcttccatagttattaccgttacagatgcatagtttgttcatctgaaacaggtttgtccataagaagacaagctttggagcaagttgattctaagttgtctagtggagacgaaagagctgcattgtc

SEQ ID NO: 24886 - DNA, 822 bp, Arabidopsis thaliana landsberg
aaacagcgtccgaatcaaaacatctgtcacagttttaattttatcactttctctgcaacagcgcgtggtcggtgggcacgtaacataaatacgcgagaagagacgcgccgattcatttttcttcagaatctctcaattctcttttgtcgatttcgcagtagaagagtcctttcgccgtctccgagaaactcgttgcagcgtcacgaccaggtttccttctcacttttactaaattttgtaattgctcggttttttgtttagtgcgagtttactctggtctgaagagaacattttgggtctgcttatttacagttggagaaaatgtcttctagaggaaaaaggaaagacgaagatgtcagagcatcagatgacgaatctgaaacccacgcgccggctaagaaagtcgcaaagccagcagacgattccgaccagtctgacgatatcgtcgtctgcaacgttagtctacactttctgtctatctttcaatttcgttatctactctattagcagtgagcttatgggtttcggtcaagttttaattttgttgatgtgttttgctcaaaattagggttttaatcaaattagggtttatgttggttatacatcagatatctaagaataggagagtctctgtaaggaattggaacgggaagatttggattgacattcgtgagttctatgtcaaggacggaaagactttgcctggcaagaaaggtaactttattttgtaatttaaaccaatgccccttggctctcataattcattatttctagtaatatgtatacctcatctcttagttttatatttcgttactgttttgc

SEQ ID NO: 24887 - DNA, 1346 bp, Arabidopsis thaliana landsberg
  unsure (1)..(1346): unsure at all n locations
gcttttgtgttctcagtttcgtaaagtagatggttaatttttggatgtttcatcaaaaccacaatatcaaaagaaacaataataatttatgcaatatatgtagattaaaacttcaaatcacaaaatagacggaaaaaaccggccggtttttgggtcactacaagttggcgtttttcaaaatataggcttgatttgtcatttgtttctaattttgcatcaacttgacctaaaagtgaattacgcttaatgtcgaaatattccattgccttagtttatttcggtctttgatataataattacaactaaaaattaggataatccaagtattgtcataatacacaaactgacaaacgcaataattttctctcgtaagtcgtcgtacctctttaatccgttattgattggttcaaggttagatttttacatgatttaatcatcgaatagacaagaaatatgtctagccgtctaggtccatagagtatgcatcattttgtaatctattttaatcacattagcacataaatctagtcagtgcatattcgaaaaaaaacacagctgacaacaaatatagaaattgaaaaaaaatgtaaaagtagaaagagacaatgtacataaatctatatctttgtgtttgtgttgtataggtattcagtattctagttagataatttctctttagaagtcgtatagcatatggatatgcttctatctaaatataatatatttgaaatttgtaaggattttggagaagttttgattttttttttttctagtcagcgggtgagtgggaaaatatcattctttctactcagacccaatagtttctcgattgtttgtttctttgtaaagtaaaaaatgcttaatactttaatgcgttgtataattatgcaaaattttagttttagctataaattataatacacttatagctaatcaatatataggaatattcttactatatgtaaatattggagaatttttttttttactattaaaataaaaataagtcttgcttatatcatggcaggttgaactatatggggacctaactacatgtcattaggggaaaaacattcatatcataggtatcatatgacgctatgatatgaagtttttttaaggtggatcaacacttgtgaattgtatttactcgatactcaacatcaaaatcgcgatctcaacggattggcgcaattagaaagcagtttatggggtctaaccgtaagttcagtgttcccaagaatttgaatcatagttgtgtgcaaaaaactcattaatataaactatacgttcatgagtttttaacacatctactatttcattgagtgaagtngcaaaaaaaactt

SEQ ID NO: 24888 - DNA, 2200 bp, Arabidopsis thaliana landsberg
gcagatgatgtggtttggcgaggaaaaaatgacatttataaaccacagttctctacacgagatacttggaacaatattcgaaccactgcgaccaaggttacatggtacaaaggagtatggttttatcaagcgactccaaaattttttttctgtgtttggcttgcagctttggatcgcctctctacgggagatcgaatggctaattggaaaggggtttcttcaggatcatgtgtcttctgcaatcatcccacaaaatctcgtgatcacctcttttttaactgcccctattcttctgaagtctggacagtcacagcaaagaacattctaacgacgcgtttcacaacggattggcacctcctccttaacacggtttctagtttacagcaaaatcgagttgaaaactttcttgtgcgttatgcctttcaagcttcggtttactcaatctggagcgaacgcaacagaagacgacatgggaacactctgcattcagcaactcggctaattggttggatcgacaaacaagtgagaaacattctttcatcaattcgaataaagggagatagacactacgatgcgggactccaaatgtggtttgatacaagagcctaatcacttctagtttctaaattttcatttcaattctaaactttcagcttcatttcaaacaagttgcacatgttgtaaaaaaagataatttttcttttgaatataatttaacattatattaaaaaaaaataaaaaaaattcaatcattctaaatgtaataaattacagtttcaagaaactacgttacgggctaagtctgcaatttaactttacgacaattatgtccattgtgctagatatgactgtaaatgcttggcccaataaaatagattgcggagaaattctagttctcaatattaatggcagttttgtggttacgtgaaattcccagggacaaaaaaaagaagaagtacgtatcaggtatcgaggcattttcatgatatcttttacaaatgtgggtccagatcctgccttttactttacaggccggtcctttctttttgttgcttttcctaaattcgtccaacgtattttcccactggcgacgcttattaagttactaaattgcccatgcttaactactcatatagattctccgaattgattccattttacacaaaacaatccaccatgcaaatgtaatttatataactcgacaaaaatatagattagtaaaactaaaaaaaaaacttatgtaatttagaagttaccaagtaaatcactatcggtaatatgatatactccctttatttatttttgtttgattttctagaaaaaattattattctaaaaaattgattttttagattttcaatgcaattcttattaattataattgataaattgtaaattttaataaaaattattaaatactattagtttagagttattaaaaattgtaaatcacaaagtataatacatttaaaatcaatatttaatatgttttcttaatatttgtatattttctagaaaaagaaaagaagaccgagagtataatttagttgtttacactatttgcatcgttatgtcattatattaatattcatgttattataagattgaaattaatatcactataacaattgaggtatgaaaataaatgtaatgtaaacatcaatagactatgccatatataaactcataaacataaaacttagtacagaaaaaagacaagaaatattcagagtggcaaaatcgaaaataaacatgaaaagcgaggatagaaacaaaataagcttcgtgtcccgtctttctcttagccaatatatattcttcgtagctttattaaaatttagtttagctctaccattcactttatttattaattaatcatctcttttaatttcgatcaatacacacgattttagttctatcaaatgtttttttttggttttgttttatgtagcctctgtcttcttcttcttcaacttcttgattgcgagtgagtcttgacttctttctttcattctctctccttcaaaatccgacagtaattttgaccgttgttttctccaacgtctctctctctctctactgtgtatccctcacgctccaccagtctcttttcttttgactcataattaggttttttcttcttcttctttgtcttctctctctctttcttcaataacttcttttctggctttgctcttta

SEQ ID NO: 24889 - DNA, 1050 bp, Arabidopsis thaliana landsberg
caccaatcctctcttcccgccggtagacggtgagtcttcgactgagtctccggcgtcgtctccatctcggagtgggaaagagagcaggctaacgtgcgcggtggagaaagaggcttaggataagaatttctgttggatcggatttttggtaaagttaaaagagaaattacggttaaaggagagatttttgattaccggcggtgacgtcagcaacggcgattatcttctttctcctacctctctctttttcctctgctaaccgaatcaatcacactcatttctgaaaaaccggttatcgaaaacggttatcgaaaaccggtttaatcataaattgagagtcctactaactaggctactactagttatagtcaatttcaagcttcttttaatgcgtttctacgggtaatgatgataagattacattattaaactcatagactgattgataataacgattagggctagaatctcatcagttcatgtcattataggaaatcttataacgtgtatttttgtgtattctaggaaagacagtaaatatgaggttgtattagttttggtagtggttttcaaacgtcataataggaaagaaagaaatgttcccctaatattgagaatatatataccatttgagccttccacactcaagatcatttacgtcacaccttgacccattcaattctaattttatgcccaataaagcccataccgatgactttctaaattgtaacatgttttgtgcctttctaaattgtaacgaatacttttattttattgaaataatggatttagaaaaaaatagcatgttatttatacagaaatatagcacagaattttacatgtaactgtatcaaatatgaacatatcattgttttatcatttagttatttacctgaattaataagtccatttacccttataaacatctacacataaatgtctattatcgtatgtttaaaatacagatgaagtgattataaaaaccttcacaatcaattgattaaagaaccgaaatatgaaaaattaaaatccctttttatgaaaaaaaac

SEQ ID NO: 24890 - DNA, 727 bp, Arabidopsis thaliana landsberg
atctgatgacccaagatccgatccagattcttgcagaagagtttgggtgggacaaggatcttgccaagaaaatctgggcgtttggacctgacaccacagggcccaacatggtggttgacatgtgtaagggagtgcagtacttgaatgaaatcaaggactcagtggttgctgggttccaatgggcttcaaaggaaggtcctttagcagaggaaaacatgagaggggtctgttatgaggtgtgtgatgttgtgctccatgctgatgcaatccacagaggatgtggtcagatgatctcaacagcaagaagagccatctatgcatcacaactcacggccaagcctagacttcttgagccggtttacatggtcgagatacaagcacctgagggagctttaggaggaatctacagtgtgttgaatcagaagcgtggacatgtgtttgaagaaatgcaaaggccaggaacgcctctctacaacatcaaagcctaccttcctgtggtcgagtcatttggtttctcaggtcagctaagggctgcaacctcaggacaagcctttcctcagtgtgtgtttgaccattgggacatgatgtcttctgatccgcttgagactggctcacaggctgcgacattggtagctgatatcaggaagagaaaaggtttgaagctacaaatgactccactctctgattatgaagacaaattgttagcgggacatagctcctctaactc

SEQ ID NO: 24891 - DNA, 1270 bp, Arabidopsis thaliana landsberg
aggagaaagaacctgttgaagctcaacaaactaaagcgttaaagaaaaagacaaagctggagcttgatgtgaaagactttcaggatcgaattactggaaatattcagtctaaggtactaccaacttggtggcgacacatgtggtcacaagctgatacttactcacatttgcttaaaaactttgaagtatacatcaggacgaatttaaacgtcgcatatccgctaatgaatgtctaattgatattccatgtatatttggataatgtgcacttatgaagtcatatgttttttttcagaatgatgcacttgagcaacttaatacagtggaaagagaaatgcaggattctttgagggaactggaggcgattaagcctttgtatgaaagtcaagttgacaaggaaaaccagacatcaaaaaggtaagcatatatataatgtcattgtaacacggaaatagctttgttcatgtttacaatgaatgggttgtatgttgctataggcctcctgtttgagggaagtaatagtattaatatcctagaaagactacaacgatgattttgggtaaaagcttaaatgttgaattaaaatgtgaagttctactgtttggagtgatgcatattggaattttgtttctggttttctgttagagtcatcttacgttgataatcttgtttatggtttcttcttacagaatcaatgagctggaaaaaacacttagcattctttatcagaaacagggacgtgcaactcaattttcaaataaggctgcccgagataaatggctcaggaaagagattgaagatcttaagcgtgttctagactcaaatactgttcaagtgagtttgcataaatatggaagatgcatcgtagcataattagatcacatgatcgcacaatgtttaaaagttgagggtgtaaaatgtatttccttgatatttagatctctctatagtttcatcttttgtcagtaaatatatggaatcagtttcatgtgattggtgagctaatacattcattctactataggagcaaaaacttcaggatgaaattcttcgcctcaatactgacttgacagagcgtgatgagcacatcaagaaacatgaagttgaaattggtgaactggaatctcgtatttccaagtcccatgaactattcaatactaaaaagagggagagagatgaagaacaaagaaaaagaaagtaagaattgctgtcatttcaaaaattgttaagtatagtagacaatttttttgatgtaacaggataaatgtta

SEQ ID NO: 24892 - DNA, 1667 bp, Arabidopsis thaliana landsberg
ggaactcaaccaaaatagaggtggtatgagaaaagaacaggactaaaagaactttgttcctcgaaaaaaagtttgaatttctttattatgtaagtatttttttttatcttagaaattcatcaaaatatcttcctcttttattttgaacatgatacacacaaatgtaagaacccaaagaagccaaaacatcattaaattaaacaaaacaaaaaacaaaaacaaaagaacctacaaagagacttggacatcttttaatcccaaaccagacctaatcatacaatcattcatgatttaacttgcgatatacaaagctccatctccaacacttcaccacgtaataaactattaggaacaaacatgacatttttatctttaggggtttcaaaactcacttcaagaattctcttcatctccggcgattcgtgacaacaagtgcgtccatcaaaagagtatgagattcggtatgagaacttctccacttcaggagccaatggtgcaatacaatttacagccacataaaacaccatttggctctctaaaacattggacaacgaacaataaagtttttttttgttgtaatatgttctgatggctcgttgatatttactgtgaagacaatttttaaaatgtttgatgtttctgatgttacatgaaaatgaacacaaatggaagctaattaacaaaaccagcaatcaaattacatagaagaagtatacgaaaacaaatttaggtcacttttattaactcgaaagtttcttaatttgcgctatatatatatactagcaatcaaattaaaagataatgaaacatgggcagtcaaaatatatgaaaactgtataaaactgaagatgagatgctactgcatgttaaagttaatgcaagcttgcaaaatcatgatcgatcttatactaaatgaccataaaaaggaaactctatggattcaactaaaatgtaataatcaaaacgtaacctgaaataaaggaatagtgagtggctcgtagcaaataggacaatcaagaacatcaagatctagcaacgtccccgttaccgaacattttcgttgcctcttttgtgatcaagtctttctcgaaccatctccatcttctaaagaacacttcatgtctcagaaaaaagtatgagaggcttgagaatagtagggaaacgaattaggtttttttttttttttttttttgaaagtaatgttaaattagattcaaaagaaaattgcgtttttacaacgagtgcaacttataatttatacgagagagattgaaaacaggaagtagaaagagtaagctttgcgattaacttcgactttgaagccatcgttggaaggtggcctcatatcgatggtccttgtggcgttgaatggtggtgattctgttgcgcatttgtttgtcgatccattgaataagaatgagagcagattttggagcttcattatgacgtcttcgattcctctcatgccagatggtataaacggaggtttggaagatgtatttcaccaagaaacaagttaccttatccttgcgatgggctgagactaggttgagcagttggtgccaatcacttgtgtagtgatgctgaagcaatcctcgagcaagcgcttcccaaattccagctgtatagctgcaagaaaaaaagagatgatctctggactccaggca

SEQ ID NO: 24893 - DNA, 876 bp, Arabidopsis thaliana landsberg
taaagaccacggtatggcttgtcttacattgagtgagttaaacgcatggaatacatttccaatgtatgaggcatcaatacattcaactcaaggaaatctacagttcaacgacaatcaaagttacaatatggctcatggttttatcaatccatatatgcctatagagtcacaatccatgcctcacaagagtcaacaacaacttcagctcaacaatgattgtgtcaatcatgactcatattacaatgcaactgttttatcggccatggtaccaccaacaattgattctcttcatcaggtaatggtactaatatttttcagcacatgaactagatttgatagtttcaatatttttagcaataacatatattcatagaagtatttttttgtgatgtttttttttcaggacactttaaacaatacaattctttttccaacgacactacaagcaataccgacatctgtgtcacacaatacgtacatgagttcatatccttcatacaatactgttgaagttgttaaagctcagctcaatgcattacaagattcaagcactagccaaacacaagaaacattttctcgtgaaaccaacttatcgtctatagtcacaagggatgaagcagatccagtggataagtatattgattggaacaaagttggagaaactgatattgaacatgattcagtcgaagtccttgaggctttaggtttgaagtaagtccttaattaattaaccttagtaatgtaatactatttgctactcgtgtgttattttgtatagaaaaagacatcataagtttgtattccgaatcggattggttgaataatattaaagaatctcattaacgagaaacaaaaggttcttaataagaaaaaatt

SEQ ID NO: 24894 - DNA, 1461 bp, Arabidopsis thaliana landsberg
taaaaagaatttgctttatgctttatatagtaagaggataagctgggtttctgggcatgcattgaacactgaccttggcacgcataacttcctcttttaaccgcctatcctgctgaagttttctaaaaatcatattttcttcctctaaccagtaaagttcttcaggaagtttttgaggaacaagtgcgtggaagtcttggtaaccattattgtcatacagaaacgctcctttaggtggtccatcagcaaagacccagtcaatgactagtgcaccgccaggcactacaactgcatattgaaatgaaaaagatcaataaatcagatggcagttaaaggatatgttaccacaaaaatgtataaaaaaaaagcaggttcgttcaaaaagataaaaaagcttcacatatataccttcagcgaaccaccaatttccgctctttggatcaacatcctttaactcagcattaacaagctttacaacgatagataatccatcaacccaattattaaaccctccatgtaaccacagttctttggaattagtcagaggacctgaccttttattgtaatatagcttcactgtatcttcagccttgaaatcactcggctcaatgtaccaaacattctcagccgagactacagctttcttaatagccggttgaagcaattcacgtctcttctgagtctccgcctttgcttgtgctctatcagcttcaattgcagccttttgagcttcgatacttctcttctcttctttttgcctctccctctcagcttcttccttggctaacttctcttgctctcgcagtttctcttctagaagaaaattctcaaagtcaactttatccatcccaccttttatctctacacaaaaatcttttgagtcattgttgtcatatacactttgcccattgaaaaacacgaagtccatcttatacgcttctttggggatatgaaggagacatgacaaccaatcttcatggatccaggtcttttccaatctccttgtgaaagacttccatctccattcgttaaacgcccccatgatcaaaacatcgggttcgttattcagagtcgacagattcctgttgagaaacacttctatgtcttcatcaggtttcacaataacgggatacacaaacattctatcacctctcgccaaattttccgctgcaagcgtttctatttccttcctacgaagattctctctttcaagttttaacttttgttctaacaaatcatcatcatcggttgttttcttgtccaaacgatcacttccatcctcaatatccgacctatctaacacatttctctcattcaaaacaacagagctttgcttgtgtacatccactttagctgcgggcaacttactaatccctgaaaccttctttgttgctgtaaaagtggcattactatctttttcaccattcttcttctgaggtcttttttgagcactttctactg

SEQ ID NO: 24895 - DNA, 2134 bp, Arabidopsis thaliana landsberg
gacggatcacgtaacgctcttctagtaatagcagctttgataatctcagccacttttcagactgcagcccaactgctagacaaagaaaaactagataagttaaaaaagaatggtatgaggttttcggaattccaactatggggatgcaatacggtagcgttttccatagctatcctattttcatttattctcttaccagttggcagagcatatgagtggtggtatttcattattacggtgcccctcgtcttctcttatttccttttgatgtacatgatgcatggtctctcattcttcttcctcatcatatatgaagggggcttattcctcgtgtatctactggtattatatgtaaagtggaaacggtgtacgcagatgaaggtacgcaaacccaaaagcgacctgatttctgagaacttcaagaacatggtttaaccattttgaagcgtttgcactttgttccctcgaaactttgtttgctttaactttgtaacgtgcactcattttaaagattgtatcttttgaataaattactgtaggtgcttaaggttatggcggagtcattaatatgtttagtttttggttcagtttatttgataggccggtctaacattgtcaataacgatcaatattgatatagacaagactcaagagtacccggctttagttcgattaatatgttaaatcatgctaagaggtgttcatgaggggagcagaaatattataatttaccttaaaagggattcaatacatccatccaatgcataggtctattatatcaaaagtgcactgaagaagaaagaaatgagacgctaagatgcggaggtaactgcaacttgggtggtttccttatccttagcctccttaagtagcttccacttctcaatggtgtcgatgagttcccctgttttgatcagatatcttaccttctgtccatcttcaagtaccttgtgacccacccggcttactacgtctttttcttttgaatacaacatcacatttgagctgtggatttgtgcttctatctggaaagcataatacatttcgcacaatcttcaatcatcactccaatcttgcaaagtaaaggaaagctacaaaactatgatttctgaccttgacaatttgaccaggctctccctcttctcggctcttcatgtgttttgttttgaggttcacatctttgatcacaatggtactgttgtgagtgaaaatcttagtaacctctccgattttacccttgtcgcgtccagatattactttgactgtatctccaaacttgacatgcattttgtggagaatcggaagactgtttggtttgcattcttttcgttcccaacgcttgagctgaaaacgcaaaacacataaatcatcttccaatctcattgtttcaaaagaatctatcaacagttttcctttttgcttttgatgtgtacaaaatctaaagaattattgtggtttcaaagctagtatattaacgaataatgcagaatgttaatgtaatggatctgtggactaacctttgcaagaacaagacatgggttctcagcgggcttgaccttgcatgagtataaaataatcagcagagtaccaaagaaaccatatcctattgcagctattttgcatttcataagaaaatgcaaaaaatcacaaccaaatgaacaagatagccactttactcaatgtgagccatcacacgcacattttcgttcgtttaaaaagtataacatttacaagtactagtccattgattccaaaccaataactagtcaatcagtctaaaggatgacgttttaagtgctcataactttcatctcaattcagtagttacacttaaacatagacaatgcacaaaattttatatcccagtaagcaaaattcaaacttaaaatgagcaacaacacagattcaatttgagagttacttgatgaaatgggtttggatatgaaaagcgaagacatgaacctaatctattacgcaaacaagtgaactacataacctaaaagcttgaacaatgattaaaaacctgaattgaccagaaatcgcaaattaaagttaccggagaagtgacggagagggaaatcggggaaattaaacgctgggccgaggaaggaagagctgggagatagagaaagag

SEQ ID NO: 24896 - DNA, 387 bp, Arabidopsis thaliana landsberg
ataaattttggagagagatatttcgtcggaaattaattgacgttcaaaagattcgttaccggaatatttagtagaggcggcgatcgagttatggcggatatttgttatgaagacgagacgtcggcttgtgaatcaagaccgttgtggtctagccggaagtggaggatcggtgtccagcgattcaggatgtctccgtcggagattatacccacggcgtcgacgacggaggaggaggataaatctgaagggatttataataagcgaaataaacaagaagagtacgattttatgaactgtgcatcgtcgtcaccttctcaaagctctcctgaagaagagagtgtatcacttgaagacagtgacgtctctatctccgatggaaattcatcg

SEQ ID NO: 24897 - DNA, 1420 bp, Arabidopsis thaliana landsberg
gtagtacacaacttaataatagcctggcttggcttcactcacgactcacgagatatagtagcggcggtttaagtagccaatacctttttactttcatagcttgtagagtatttgcaaggagcgtaatcacactataatcggaaattaattaaaaagttaatgtcttctaagaatatatgcatgtagtttatgctttggttataatgttataaggtgttatttatgatattccaatttaaattaagaaatgaatgtataacaacagctagtgaaagctaatttggcaagttgttgagtgttgttgtgtgttacgagatgtcatggacctccactgtactctcagtctccaggaatagcatctctttctttctctatttttattttatttttttatgtttccaggaccactttagttttatttacttttctctaatgcaaaatggttcaaaaatcagaagaatatttcatatcatacaaaatctcttgattgagagctttaaatttctttttcttaataattttggtacaaatattatatgtttatgtatgtgtaactgtgtatgttatgttattttcgtactagtttatatcaataattatctattgagagatctaacgaaacatatcgattgattttaatttattacatgtgattactgtgtatatagtgacaaaataatatttattcaatattttacaaacgtgttaatttatctatatacgaaatttttagatgtaaaatttctttttgtcgttgtataaagaattgtgtgcgtatagtacttttaaaaatatataattgattgaaatttactgaattttgttttgtcaaagaaagacatataacttttttcaagacatttcaaatgaatatataacttcaaaactctgaatgcttctattttgttactttgtaattatcaaaacaagttggtattaattgtttttgtcatttatacaatgaaagtgaattattctctctaataatgttgttacaaagctgagtaatacactatggacactgaagccggctcacgagctaagtactcgaccacgtgaacccattttaaaaactgtgacttctttaatagaaacgcatgaattcaatgaaacagacattttcattcaccaattatatttcgttagttccattaatctgtggacccaccaatgagaaaaaaacgctaattgacaacaagaattaaaaactccataaaataagctcgaagttaatatccattgactacacgacacgtgtgataattaccggagaaattaacgtcggggaaactggccgccgcgtggcatacagatgctgacaaattcagacgggaacggtggtagacacgtggcaataaaagacaagaggagcgtggagggtgcttgaccatttatcgccttggaaatttgaaacttttaa

SEQ ID NO: 24898 - DNA, 796 bp, Arabidopsis thaliana landsberg
agcctaatcatctgccctggtatgccctatatctcaggctttgacttttagaaattgttttcatcaattgtgattatggtatatttcgtgtttatatgaatcaaccaacaaagtttcttttatgtggcgttgataattgtgcatatgctgcagttttctatatttggtttgcatgcgtatacattgattcttttattctgtcttctctccattgtgctaaaaagttatgaaaaatgtatgctttttttcttctttgtattaactgttatataaccatattgtttctgaagacattatctatgaagatatcttagttcacaaaggttgaacttagtctccgcttaattcactggaattcctgaacaatacttcttgtccaatctttcaggatttatgtgacgttggaaaccattcatatgtgacggatgaaagtaacggagaaaaagctcaatctccacttcaaggttctacagtagtcccttcactccgtgatacaaggtctatagctaatgaagttgactttagagaatcttttgaaactttgtcgcatccttcacctgataattcagtaacgtcacctgataagtgctgcaatatttgtggttccacatctgttgaacaagatgcttattcttctcgagacaaaggaacccatatctctgagagccctacacgggagtatatgcaaccacagaccaactaaggtatcaacgagcattcgccagcaactattcagtcgcctcctgtaacgcatccaaactcgtgaggagggtatgacggcagaactaccactacc

SEQ ID NO: 24899 - DNA, 1427 bp, Arabidopsis thaliana landsberg
gtcagaaaacacgaatgatagggctcacactctgaagagcttgtgaaacacaaattagcttccttttagggtttttttgcttttgctttctgcaaaatgttgatttttttttgaataaatctcagagaaatttgtttctcaggttttgggaaatggatagagagagaaggtaagattaaaaccctaccctttgaatgtgtgaacccgtaaactaaaaaaaagaagctactacctttttctcactctctctcttcctcaaagagacgacgtattgtagagagagaaaaagttcttgtggaaaaaaaaacacaattaatttaataaaataaataaagctatggttctgtccgaacaaacgctacacgcgcgtgtgaaccatgagccaatgagatatcaagtggtgtacacgctctgagtatttattggtcagtgagaatggaatgatttagatacggatttagctaaattaagatttgtcaaaaaaagacttacatctgtttttaattggtttttattacctgaatttatatgttatcttattacactcaatattttatccattccattattaatttagacaaaaagtgttaagggcagaaaacaaaacagaagtataatattgtgatatgtgtgattaaaagaaaataaaaatagtattatggtaggaaagaaaaaagaagaagacaagaatgataaaatagtacctaattcatgaataaatagtataattactaaataagtttaagtaagtcaaattcaggttataggctcaaagctcataaccaggaaaaaagaagtggaagaccaatgtctctgtcacaaaatttaaatcattcactatatgatataatacaaattagaatttttaaattgttttcttgtttctaatttctttaatcccaaatttaagccgattaagtcaaagatagtctactgaacatacaagaccatatttattttcaaaaggcagatctacaatattaatatttaactttttcacttaagaaaatagcatatttaaaattagaaggttgttggaaaagttttgttgtaaattcagtatatgtgtacttcataattgtatatgcttggaactttattgtgaaaaaagtggaaaaaataaatatgattcacccatttgcaaaagatcatcatccaaagagagacagttcatgaaatcagtcatcaccaaatacaattttcaaatgcaatccatgaccatttttagatcattttactctctctctctctaaatgagaagtcaaatttaccaaaaggtgatgagaaaacaaagtaaaatctctaattgtcaaaaaagggcattagagagtaggtttataaagagattaaggcaaaagttaatattaattccctgaaattatttgttaataagagtgagagagagagattcattcacttgtttaaac

SEQ ID NO: 24900 - DNA, 1083 bp, Arabidopsis thaliana landsberg
agtaaaggattcaactcggtgaagatcctgaaagaatttcggtgtgttcatttgccttcaaaaaatgagggttaataagagatataatatgttgttgtcgattcgggatctagcttggttttaatcacacctatctatttataggaaataaggaatagtgcaccgaatcatatcgtcattttcataaattgttgttattatagaactttaggttggctgtaatagcggtagatcgaatcaagtttacgtacaacaacttgttcgataattgataatttataattaaaaatgttaatattctactgaacgagattctaaatccaaaagaatgagacaaaggaattatcttcgatccaccaaaaagatcaagatgcttaattttttttttttttttgtctattgtatggttgatttatactttaattaatcttaaattcaaaggataatttcattatgcatggcaagaattatgaaacgcatagtggttttacttcaaaaataaaatattcaacatattgaagataattattaagaatcaagttagtcaatgtaaagtatcaaataagtagccaaaggtaagaaatagattgcttatggttctgtataactcagagtaggtttgtttggtttggaccgtaattttttttgaaaatagtaatgttagacaaagagtagaagaaacgcaatatgatttgattgattagtgtacccacaaggttaataaatagtataagtaataatcaattattgagactaatcaacattatagttcggcgtaagagacacaattaccctaaaacatttgagacactaatcatgcttagggactaaaaacatgaacaggaattaatcaaaagagaaaaaaaaaacacagatgattccaaagcgtttgttggctaatcaaactcattaaagcagccaagaaaagaagaggttatgatttgtttgtgattgcgattaaaacaaactaacacacttagtctaactgttccatacaaatacataaccttcactaaacaaaaaagaaacaggaacctttcaaccactggtgcagtttctaagtagctcaagggagagaaacat

SEQ ID NO: 24901 - DNA, 1010 bp, Arabidopsis thaliana landsberg
tcaaaatctgagattcattgttacaaaaatggagcggtgacgtcatcaatggcggcgaagtttgcgtttttcccgccaaatccgtcgtcgtacggcgtagaagtggtggaaggaaagctgaggctgattggtgtagagaacgtgaaagagaatgttgaagtattgaagctgaagacgaagagaggtaatcaggtggttgcggcgtatattaagaatcctacagcttcacttacgcttctttattctcatggtaacgccgcggatcttggtcagatgttcgagcttttctccgagcttagccttcatcttcgtgttaacttaattgggtaattagtttgttaactcttcttgcttggagtttgattgattttaagacaagatttgaaagctgtttttcatggattaggacaagttggtttttgttttgtcggaaattttctaaaagtagaaattaaaacatttgattgtctagaatcaaactgttggatctgttgtggttttggtggagcttaaagaaccaaatattggagctaaattgcctcaaaaacagatactttaggaatcgagattctatatattttgtctttggtgcatagcgttggattgatataagtgagtaattgagaaagattgtgttaatggatctgttgtggttttggtgaattttgatgaacttgtagagcttaaagaaccgatattggagctgaatcgcctcgaaaaccgacacaaataggaatcgacatattcgatatgtatcgcctttagtcagtagcataggattgatataaagtgagatccattggattgatttctgcaatttttggtagataaaaattcgagcaatcttgaagctgttctcattagggcaagtttttgttttatcggttagtgtaggctcatcttgaggttgtagatagttagaaacaaaggagaatcatgagtagtaattgagaatgaatttagaacccgcctcttagttcttagatcagacgtaagtgagatagaaagga

SEQ ID NO: 24902 - DNA, 1643 bp, Arabidopsis thaliana landsberg
gtttctttaaaacaatctttaaagttatagcaattttgatgaattttctattgaatccttaacatttaaaccgaaaagcaaattatattgaaaatagtgtcaaatcaaaaatattctatatattttttttttgtttattcaaacaagggataccgaattttgatatatatatatatatatacacaaaatatttttttgttagatctaattattactcatctgtgtggtgctagttggatacaattttaaattttatttgatataaaagacaacatatatgatcttgatattttacggaatggtggaatgattcaatatgtttttgtctattacattttcttcgaatcacgtttttattcatctatttttagttttttactgtttgcataatttgtgaaagaaaaaaaagtcgccatttccgtaaattttggacttaaatcaaatattttccgtttacctttatcagtaattactatagcctatactgaaatgtaagactacaaattttgtaaatcattttattttagttatttaacttgacactgtctttaggaggctatggctgatcggaaaatggtgaatctggcaaggcttggatgtcacatctgaggagaatcgtttatggagggggaggcagcggcgatgaggattatcgagagtgtcttgagaatatggagaaagactggcgattgtgtgcgcgatgaaaacgcttaacggtgtattatacattttaactccaccggaatgcgttgtgtttgtggcagcggcggctacgtttcaggttcagttacgtcggtggggaaaccgaagacattatgtttctcacttctgacacaaaagagttattttctctgttctgtttttttttttttcatattacaataagaatgaaatttttaacttccatcaactgcctcttgcgttaaaaacttcaaacgaaaaatagaatgtaatttcatgcatgaaatatatgaatgtgaagtaacaaattttatacatcaaagactaaaatataagcgaaacctaataatattcaaaaattagaatcacacatatatatcatcacaaaaataataatactgctatgcaatatacaaacacatatcgaaactcgtatatatcaaatccatagagaaggaaacactaatcaaaacaaactgaacgttgaagaatcaagaaaccaaatgctcatataagaaaaactgatccaagaaatcagaagaaaaagaaaaatcgatacaacgtatagagagattgagagcattaaacgaataggagaaacctctgattggtcaagtagcttcagaggacaagatttcgagctctgcccaccaaagaggagaggatcttggagtagctttctcaggagttatgttgataacttgtttcagttgttccgatacatctttcattgaaggtcgttgtctctgttctgttttcagacattctcgtatcacatcgcagatcacttcaagctcttcttctttgaatgtctttaacgatggatctatcatctctcccaagtcgtctttttcaaggtacttcgatgcctgaaacatggaccagacctttagtatatagataatatgctctgctctttttatttattagatagggattattatcgcttatatatataccca

SEQ ID NO: 24903 - DNA, 1246 bp, Arabidopsis thaliana landsberg
ccaacacgtttcaatgcgcgtgcctttgatttctaacaaactcatcatacactttctcatgaactaatgtccgagaccccgcgcagcaacattgcccctacaaaaacattactcaacattatctcaagaactagctaggaaaatgagtcagcttagctcaaggtgaatatattctactattgacaaaacctggttgaagaagagggcaaagtgtgcaagctctacagctttatcaatatcagcatcttcgaatacgatgaacggtgatttccctccaagttccagagttacgggcttaagattgctgttagcagccaatccaagtataactttccccgtatcagtcgatcctgtaaaagcaagctgaagcaaaaagaagaatgtaagataatttagtttcttaaagaagttagcagcaagtaaataaatatatctaccttgtctacatccatatgactcgcgagggcagcacctgctgttgcaccgaatcccgaaacaatattcagaacaccaggaggaagacccgcctatcataaatttcacaagaaacattgttactcatcaaagtttttcttttcctagagaaaacaataggagaatctatcggatgtatcttacttcaaggaaaagctttccagcatagaaagccgtgagaggtgtttgctcagcggttttgaggacaatggtgttaccacaagcaagagcaggaccaactttccaagcaaacatcaaaagtggaaaattccacggtatgatctgtccagctacacctatcggttcatgtaatgtgtgaacttgatagtttccatcagctggaattgttagtccatgaatcttatccgcccatcctacacatcaaagcaaaaccaagaatgttcattcacagaaagtaacaccaaaagcaccagaattctcaagatttaagttcgttttatgataccagcatagtaacggaacaatcttgcaaacatgggaatctctgcggtcaaggattgttggtaaggcttgccattgtcccatgtctctagagacgcgagctcttcgctgtgtttctcaaccaaatctgcaaacctcaacaaaactcttgacctttcctgaaacccaaaacaataaccatatgtgaccatccatatcacattaaagttcataaaactgaagactcaagaagagtagaaatatacatacataagcactcattttaagccaacgaccttcatcaaaggccgagcttgcaactttcacagat

SEQ ID NO: 24904 - DNA, 1568 bp, Arabidopsis thaliana landsberg
ctcaagctctgcaagagaaactggaagccagagaaaaggcaagccctcactctctctatctctctctgtaaaattatatatggatttcttctgtggataaaatctgatacctagtaattcagtttgataattagttgatgaaattgcttgctgacttagttctctgggcaggaaaagttttcaatttccatctcgattttgcgtatcctgcaattgttatcatgtcttaaaattaataagtattcctttatctgtattagtaaacagtgtttacatgttgacaaggttgatatcacgtttccatgtcatttgtgattatttacatgtgtgcattcggggtgttaattgtttcatgttggctaattgacagatggcagttcagcaactagttgatgaacaccaagctaaattggattcaacacagcgtgagtttgagttggaaatggagcagaaaagaaaatctattgatgacagcttgaagagcaaggttgcagaagtggaaaagagggaggctgagtggaagcacatggaggagaaagttgctaaacgtgaacaggcattagataggaaactggagaagcttaaagaaaagaaaacgattttgatctaagactgaaaggcataagtggcagagagaaagccttgaaaagcgaggagaaggcattggaaactgagaagaaaaaactgctcgaggataaggagattattctcaatcttaaagctttagttgagaaagtaagtggtgaaaatcaagcacagctatcagaaattaataaagagaaggatgagcttagagttactgaggaggagaggtcagagtatcttcgtctgcaaaccgaattaaaggagcaaatagaaaagtgcaggtctcaacaggagcttcttcagaaagaggttgaggatctgaaggcccaaagggaaagttttgagaaagaatgggaagaacttgatgagaggaaagctaagatcgggaacgaactaaagaatataactgatcagaaggaaaaactagagagacacattcacttggaagaagaaaggctgaaaaaagaaaagcaagcagcaaatgaaaacatggaaagggagctagaaactcttgaagtggcaaaagcttcatttgcagagactatggagtatgagcgttcaatgctctctaaaaaagctgagagcgaaagaagtcaactgcttcatgatattgaaatgcgtaaaaggaaactcgagtctgatatgcagactatactggaagaaaaagaaagggagttgcaagctaaagagaagctatttgaggaagagagagagaaggaattgagcaatattaattacctaagagatgtagcgagaagagagatgatggacatgcagaatgaaagacaaagaatagagaaagaaaagctagaagttgattctagtaaaaatcatcttgaagagcagcagacagaaatccggaaagatgttgatgaccttgttgccttaaccaagaaactgaaggaacagcgggaacaattcattagtgagagaagtcgtttcctttcttccatggaaagtaataggaactgcagtcggtgcgg

SEQ ID NO: 24905 - DNA, 1296 bp, Arabidopsis thaliana landsberg
aacgaccattaaacacggctactatgtattgggcctaaatgaaaggccaaagcctgaagaaatcatctaaatcgcatagttgccatcaacaagatctcagtcagaaccagaaaataggtttctgacataaaaccactgacccataattaaattgcaaccaaaagcgctttagttcctacaaaaagttgcaaactttatccataaaatataaaatttgattatccaagcttaaaaaaatgaaaaaggtctaaactttactcttacatgcgccattgaactaacagggctaatggctgcagctcctttactgctccaactacgatttccacagttgcagagatattacatccttcgaattcaagttttgggtattgatcgtgagaattcaaggaacatcttttcttcggtcagtatgtggcactctaagttagtgttcgtctctcggatcaaattttcgaattactcttgcttagtttctctgattacttgtgtagatgtgattacccaataagctgaaaacaaaaggcgtgattttgtgattactctggcgtaataatgcctcagtatgggtcaacgggtcaacactgcgagttcacggcggcgtcttacttctcgtggccgacttcaagcaggctaagcaacgccgcggaggaaagagctaactatttctcaaacttgcagaaagaggaggatgatgatgatgaggtttctcctgaaccagtctccacagagcctaaaggacaacaagccactactttgcttgagctcatgaccatcagagcgtttcatagtaaaatcctgcgccgcttcagccttggtactgcggttgggtttcggatcagccgtggtgttctaacgaatgttccagcgatacttgtctttgttgctaggaaagtccataggcaatggctaaatccaatgcagtgccttccttctgcccttgaggtggagttatcttgtgttctatacccttctacacatagcctttcagaaattttatcggagcatatatgataagcgatgtgttcatttcataatagggtcctggaggggtatggtgcgatgtagatgttgtggaattccaatactacggtgctcctgctgcaacaccaaaggaacaagtttataatgaacttgtagatggtttgagaggaagtgatccctgcattggctctggttctcaggtacatcgttgttttttccttccatcttctgcaacctataagcgtaaagtctcagttttgtttcatgttgtgtaggttgcaagccaagaaacatatggaacggggatcctct

SEQ ID NO: 24906 - DNA, 986 bp, Arabidopsis thaliana landsberg
  unsure (1)..(986): unsure at all n locations
gaaatgcgtctcgtggcttaacttttccgcaattgaagaactctttttcagtagacagcatgacacttgtgtgagttatgctcgtgaagttatagaaactttaaaacgtgatattctcaaaaaaggtaccatggggtgcacatagtgtcttcagcacttcgcacttttgtcttttattgcctccaaaagttcactctcagaagtttgacacttccttctgtactgcctgcttaagtttctatccaacttgtgataatctacaggtcatacttcttctgataatcctttagtcactcatgctcaagctgcaaaactgttgaactcgctcttgaaagtgcgccaagcttgctgccaccctcaagtaggaagttcaggtttacgctctttgcatcaaagtccaatgaccatggaagaaattttaatggtgattttgcaagatttagcgttttaatctccgtcacttatttgtgctaattgaagtttttcttaggtccttgtgaaaaagacccagagcgagggagaagaatctcttagagtgttaattgttgcattaaatgggattgctgctattgccatgcttaagcaagaattttctgaagctgtgtccttatacaaggaagcattaagtataactgaagaacacgccgaggattttcgtcttgatccattgttaaatattcacattcttcacaatttagctgagatactaccaatggccaaaagctacggtggaaaactttctgcatcaggaaggcctgaaacaaaaatagatgnnnnnnnnnnnnnnnnnnnnnnnnnnnnnaagaggcaaaggatcaatgagctcgagagtttaactcatgattcttcagaaactgtacatcagcgggaagctattgctccagacaatggtttaaagaaggatggagagtgtcatgaagaatgcaaaagtctggatatagtttgtgacacactgaaggttaagtatttatccgcattcaactcaa

SEQ ID NO: 24907 - DNA, 1471 bp, Arabidopsis thaliana landsberg
  unsure (1)..(1471): unsure at all n locations
agtgcccttagtattgcatcacctgataagaaagacaatcagttcttttctattacgaataaggccgaagcactagcagtagaagaagcaaaggaaaacaatatctcagtcgatcaaagggaaaacggtcagctagatatctatgttaaatgggaaacagctgctgataaccctcgaaagctcataacaacactgagagttacaaaggatgcaacactagctgacttgaggaagcttattgagatctaccttggatctgataatcaggcttttacctttctcaagctcggggtaataaacttgaaccaacaagcacaaaaagcttttcatttttatctgtttgttatgctctgatcctaaatgcagttatttcaatgtatgaaggaaccatgtggagctcaagtggcaaaggagaaagaatcaacagttcaagctacgagcctacctctctgcaacggacacgcatacctcgccactttgagaccaggaaagagctcacaacataaaagtcttcaacctgcaagcccacttccacttaatcccatagaaaacatgatggaagttacccccatctcaaaagtgacaccgaaccatcaagttgatgaattttcatcacccaatctcgtagctcatctcagctccactccattcatcactctcagaagacattagtcgctatgtcttgttttctctattcttcttttgtctgtccaaaggtagcttttgaaagatgtagcagcctttgtctatttctctgtgttgagaaaaaaaaaactcttatgtacgaccacttttgtagctatatatatgttctacgatgtttcagcagagtggtgtttatcagaacgtataactggtgtttcccaaaggatgcttagttctacttataacatatacataagtagagagaatgctgcagccacatagagctacttcttacctctctctgtcattgtaacatatggacaaattccaaaagccctattcaattccaaccccaatatctttatgatcatcatgataacgtggacaccaaaaacaagggcaaaaattgcaaaggcttttaaaaataacaatattccggaagcaaagatttcctgcaactgcactggaaagccaggccctattatagaaaagcaccttcatctactatgccctatctgtcaatatgctcacatgcatgcactgaccaaatggcttcttttatctacaggtactacgactctttcttacatacacactagattaactcagttcttatgctacctcattatcttcaaagtaagagaccactggccgtgacgtatttatggataannnnnnnnnnnnnnnnnnnnnnnnnnnnnnnnnntacagaacaacaaccagtctattatgaaagatgtatgtagccagtctatttctccgtgttgagaaaaaaaacgctatgtacgaccactcacatcagtcaaagtgagcgactagagccatc

SEQ ID NO: 24908 - DNA, 685 bp, Arabidopsis thaliana landsberg
tggggcgaggtcggaatctcaaggttgttttgatttgcatttccctgattattaattatgttgaacaatggtgcttctctggcattgggtattcctcaggtgagaattctttgttcagttctgagccccattttttaatggggttatttgattttctaaagtccaccttcttgagttctttatatatgttggatattagtcccctatctgatttaggataggtaaagatcctttcccaatctgttggtggtctttttgtcttattgacggtgtcttttgccttgcagaaacttgggagtttcattaggtcccatttgtcaattctcgatcttaaagcacaagccgttgttgttctgttcaggaatttttccctgtgcccatatcttcaaggcttttccccactttctcctctataagtttcagtgtctctggttttatgtgaagtaccttgatccaattagatttgaccttagtacaaggagataagtatggattgattcacatgcttctacatgataacaaccagttgtgacagcaccaattgttgaaaatgctgtctttcttccactggatggttttagctcccttgtcaaagatcaagtagccatagatatgtgggttcatttctgggtcttcaattctattccattggtctacttggctgtctctataccagtgccacaca

SEQ ID NO: 24909 - DNA, 1151 bp, Arabidopsis thaliana landsberg
tgtgtaacttcatataaaatgtaattgtgcgagaaaagaagaagaattaaaacacgaacacatttgacttaaaaagcaaaaaagaaaacaattgttgtgatacgttgtgaagagcaaaatgagttccgaaaccacaaacattatcgcatggagcatcatcttcttgttgggttttgtatcatggcggattagctttatattccgaaagaatgacaattgtggttgttgtgctgatgtttaggtgagttaataatttcttttttggatttcaagattaatataattaggaatttaggatatgacgtaatatagcaatgcatttgaagatacaggtactcgattttttttccttatttgcgtgggtctcagggtcaatgaatacataagtaatgatttcgaagacacaaatatgatgatggatgtgtgtacgtagatgaggctgtgaagataaaacatttataaataacaaaatagtgtttgtgaattttaatatcacattagaaaaagagaggcaatgttacataataaatccagtatagcaaactgtatatcttttaaccacttaagttgtttgttttcttttgtacaaaccaaaacatgagttatatcttttgctataacaattggtgtatttcaccaaattaaaatgaaagttgaaccaaaaagaagaaaggagaaactgcacaagaagaacaaaacatcgagttcgatgttgcctctctttttctcccagccatagcatagaccttaaggaacttctgggatgatcagagacaatgaataacaaagaaacaaaatggaggatcaattaatgtctcgttgtagcggtgatgaatgaaatagaatctggaaatctccgacgatttttttgttcttcttcgtcctctttgcttttactggtgtgttcttgaagggacagtacacctgtacagtgtcttttggtatcttcaccattatatcaagaaactgaaagctgggttttcttcaagttcttcagctggcttcatttccgcagagtccttgtctttcattgaactcgatagatcatcagccgagaagggaatgctaagcatgccaaaaaaggaaagttggctttgatcctaagcagtaacaaagctttgcatagcagatatagagtgtgtggattaggg

SEQ ID NO: 24910 - DNA, 1389 bp, Arabidopsis thaliana landsberg
aagtcaccacaagtttgtactttggtttgaatgctttttcacttcaaaataatattccgaaaacactagtgcttattgtgtattctatgacatcacttgtatgctaaacaataattttgttttcattgttctaaattttgaagtctctgtatatgcataccaaaacactcttcttttatccactgttattgctttaagtatccactcttcttgttctctacaacaaacccaataaacattcttctttcaccaaataaacactcttctttaacctaatacacactcttccttttacccaattaacactctttttcacaaactaataaaaatttctcacttaaggattccacttaaggattccaccattggacactaaaaattataaagattcaaccaaaaactctaaactctcatttacttaaaatttactattaaaaaattgtaaggagtccttaattaggactccccaatggggatgctctaatagactcgatggccagtctgctaggaccatcagcaaaaagcttgatatatattatttatttatttttataaaatttttgtaatccgtggactgatctgccaatctacatacaaaatccgtttaaattcgttatccgtttggattggtccgtaaaacccgctatttttagatatataatatgatatatttttaaatataatttaacattaaattaaaaaataactaactttttgtttttgtaaaataactaatagtaacattgctttatgctttttacatgttctctataaatcatgtgtgacttggttggtggacatagagtaaggatttcgtggaaatattcaatttttttgaatataaaattaattaaaaagaggaatggccaattgaaaatagacaaagcggcagcaaaattaaagagattggtcgtggacttggggtccctcgcacgcactctagacctttgattggtcttgcactctagatcagtaattgtaaatattcatttagtaaatcaaaagtgttttaatattatttgtgtattaccctccaatgattgtaaccggagcagtcgaatgtagagtgcgtggagcataattggtggcaatctattcaggggtactataagtcgagttgccaaaagaaggtgacaaagaaaacatgcttaagttctgatatggatttgagattcagaattcttgatcagaaaacttttaatatgatttattcatgaattcagaatttttaccgtatgtattagagtattagacaatgatatattaatatatcaacgaagatccgttattagagtcaaagatcaactaatgttattgtcttaatcaactaatgttataaccaagatgacccttaaaagttaaaaaaaaaaagatccttttagttatttt

SEQ ID NO: 24911 - DNA, 391 bp, Arabidopsis thaliana landsberg
tttcaggatcacaagcgagtgtgctaatgtggaggcgtattcgagatgttgtaatgccatagaagatatgggcaagaaattatgggccttgccttgttcacaagatgctaatataggcgatatgatcaaggtgcttttttttttctgtcttaaactgacttttccatcacagtatagtagacatagtaaagcctcatgcagagcaacttttagccattacattataaacattgttgtaatctgtatgaaacaggctcttgataccgcagttgcggagtatgaagcatccatcaacggtcctatgaagtggcagaaactatctttctttttgagagagaggttctcattatgcccttttacttccacaaaataaagattaaattttatgttt

SEQ ID NO: 24912 - DNA, 614 bp, Arabidopsis thaliana landsberg
ctttcatttgatttgttatagttcttgtttaacagttacaagagatatgcacttaagacctttcattagagagcacattacctgcagttaagatcctcgaactctcctgtaccaactgcaatttgctttccggttccaacacctacaagttacgaaagatatggatgaaatgttagcaaaatatactattgtatcctaagaaatcaccattctatttctagtgtctccagctaagcaatctacagaataactaaggtgcacttactttcaagaatggttttttgcaagtttacaccggaaacatgtccctttctttcatctgactctaagaactggtcaggttggcggaagaaaacaaagtgcagctctcgttgatcagggtctgcttcggatgtttttgctgctgctgcagccttggacaataattcatagatcctcttcctggctctactagttttcatttcttccttcgaaaaaaagaagagtgtcaagatacagttcgtggaggtataaacaaatttactaaaaatgcaaataacagggttcagccttactttaattgaaagtcagtaacacaagtacctcatcagcagggagtacactcaagtcagtct

SEQ ID NO: 24913 - DNA, 1181 bp, Arabidopsis thaliana landsberg
gatcgtcatctagattttagacgttaatgtaatatctaaaaaccgttttggctgtctaaattcccataagtttatattaagtttatttttagtttgcaactatataaatttaaattatagttttagctttgtaaaaattgtttgtttccaactatataaatttaaattataagtttaagctttgtatatattgtttgtttccaactaaatcaatttaaattataagttttagctttgtatatattgtttgatatgaattataaatgtttttatctaagttttgtttataatttcatattattatttttctaagagatagttttctatgaatttaatttataatataatatttataatatgttatgttgtaaatgtgtagccgcttaaaatctcctaaatcatgattagacgttctaggcgtagatcaccacctcttaagtagctagttagatttagcagattatccaggtatcatgcggattaattggattagatagattttggtaagataggggaatttagcctaatgcttttaaatttatgtattttaaaattagtgaatactgaatactcatatttcttgcttatgtatttcgattaatttaaaatatacaatttatttctattaacttgcgattattatgttatattaatacagaaatatattttatttttatttctaaactatttaaacctctaaaaaatcgtctatccactaattgactaattgttctagccctttaggcattaagcagagagttatagtccatttattgttttcttgacattggaaaatactaataatgcgtaattatattaaagggcttttggaccttgtaagttgtaggttggcagacgaaattggacagaaatttagcgcaagacgagaattgtgcaagtgtgaatcacatccatccattttaatatgacgtgctatctcgttctttcctatgaaactttaagttaattgaataagtcaaaagtggatgataagatatagaattactaacacgaaataatatgattgaagcaaattaacatgtcttctttttgttttatatacataattctcaaatcttttttttcttttaaaatcttctatatctttctaacacaaacaatatattaaacgagttaaaagtaaagtcattcacaatagtagtagttgtggacttaggttg

SEQ ID NO: 24914 - DNA, 790 bp, Arabidopsis thaliana landsberg
aatccatcaataacctgaaaccaccttacattaaccaacaacatgtcaaatgtttttgtacaaaaaacatgttagatatatactttgaataatagaaaagatcagtaaagaaacctgaatgacatggtttctgaagttaactttctctctttcctttctggttctgtattcaacatagagaatactgatgaggtaagcagtccaactacctaagatgccataaaagagctgaaacagaatccctgagagcatccccagctgtgagaacgagtatggcagtgtcaacagcacttgtgccacctatataatagcacattcatgaatcagaatcataagcagagagactaaatatatagttaaaccaaaacttgttcatcattttcatctgagagaaagctattacctgattggaagcacagctgaaccaagcatcataagcagagccaccatgccaaaacatgtcagatagcttagatttgatgtctgaagctttaccatccttctccatctcaacatagttcccaacaacgacagtctcagctgctttctcaccgttctccatctctcttatctctctttgtgatgaattttgaagtaagagagaatggagaagagatatgaatatatatagagagaaagaaagaaaatagagaagagtgttgtgtagacagagagggagacacggaagtagtttttcaaggcaagatgatgagagaagcttaactctctttgctttgtttttgatagctacttgtgagagtttatgtttcggggagtggacaacaacaac

SEQ ID NO: 24915 - DNA, 1163 bp, Arabidopsis thaliana landsberg
cacctcatgatggtgacagaaacataatgccaatttgctttagactaaccagttgaggtgcatctcacaccaaagctaaccgatatagaggctaatctcactcaatcaagtttactaagaaatgaaatgaaaaaaagtatcccaaaatggcaactttggagactcttgaggcaaaatacaagtttagaaaacccagcatcgtgactgagcaaaagagagactacttcttccctaactatttatgctgtgaagccttgtagcatgataggcaatatctaactaatcaactaacataacgcaagaaatgcatcaaatgaaagctttataactagtctcgaaagatcattgttttatatacaggctacagaaagtgacattgcgtttttcctgacctcaacgttttactcgcgaaacaggacaggcgcagtctatgttactggggaggaccaaacgctgcaaatttagcctgtcaaccaaaacgtggagagataaggtttttcagacaagtattagtgagagttctggaaaaacttttgcaatcatgggaacgaaatagaaacccaagaaaaaaagacagaaacgacatatctgccctccttgaaacatttcacttgctagattagcagtcatggctgatacaagcaattagctggtgctgtatttctcacacgatcgataagtaaagaaagttcttggttagcgtaatcaagtcgatcctttgagatcatagactctgtgaggagagtttctgtgagcgaatgaaatgtttgagcagagtcatcgccaatgccctgtccattctgattctctgtagctacatgaggactttcttgtctccatcgtaatagaaaatactgttcaggtatatggaagcagttcttcacggtcagtacccgaagagtgtgcctgcacaagattccggaatgctcaaattccttgcacgaacattggatctcctcgttttctgggttccagatcacacaacattccccttccattttcttatagtgatgtacgatgaatggaccattggccatctcagccacagcatactgcacagacaaaaccatttcgttttgcaatacgctaaaggcataaggcgtcagaatcccccgtgcttgatctttcataggcatacaggttttcaaactccgatatgtgaa

SEQ ID NO: 24916 - DNA, 609 bp, Arabidopsis thaliana landsberg
  unsure (1)..(609): unsure at all n locations
ttacttaactctacagagaaatgtgaaagtacagaataaattttggcgagaggggtaggtatttactaagtaggaccaaggtgatgtgtttggtctgaaaacctatattctcgatatttaccaacttatttacttttaaaaaaatatatatataaataaataatactaataatcttatccggttctcacattgaataatgtttcggtttacttctacagattatattttgtacattgtaacatatgtgtctacaaggatcaaaagttgaaggaattatgtaactaatcgaatataaagacacaagaacttcaattaacaaccggtcatgattactgctaatattcagtaattctaaaacgggaaatcccacaaaaaaaaaaaaattctatttgatctatgatccggtgtaccgattaaacgggttggatgattgtttacgaaatctatttgattttgaaaatatataaagttttgttttatatcagttatgtataaaaccttttcaattcttttcaagtggagacatacgacccaacgtacctttctcgtcttttatgaatatttagtctcttaagaatttctttcttctttttgtcatggnnnatata

SEQ ID NO: 24917 - DNA, 1161 bp, Arabidopsis thaliana landsberg
caactcgcatcgtgtatggctcgccttgctcaagtatctgaaccaacaaagcaatctcatgatacatcagctctattgatgtaactatccatctgtgataatccacaagaccctaatcaacaagttgcgcctactcatcaagaccaaggtatatatatacatgctcatatcgatctttgaatcttttttggttgaaacaatgttaggatatattgaaattatgtgcaaatttcatatcagaactaaatctcaaacttaaaaggttattattatactgtttatttcaatactcatttaccaaaagaaaaaacgattaggctattaccaaaatgtaatttttaacatggagattttgttggtagtatatggtttcagcaccaatattaggtgacgatatatatttatacacataaactatgagcatatacaaagtttacatactatgcacatgtatgagtagaccataccaaagattttctgatttcaacttttgtgatttcaataaaggggacttgaggaggagacattatagaggtgtaaggcaaaggccatggggaaagtgggcagctgaaatccgagacccaaaaaaggcggcacgtgtgtggctcgggacatttgaaaccgctgaatctgcggccttagcttatgatgaagcagccctaaagttcaaaggaagcaaagcaaaaactaattttccggagagggttcagcttggaagtaactctacatattagtcctggtaccaaattccacaaatggaaccacatcgtttaccgctctatctttaatactatcatgatgcgagtagtggtgacatgctaagatctaatttgggcggtgggtatgggagtagctccagatattcaatgtctcatgataatttttgtaccactgctgctacaactttttcgtcttctggtggctttacatgagctcgagaaaaccgtaattttgccaaatactggtccttaggggccagagaatccacatgacttgcgtgatcttcatctggagatttcaaccctcgcctttgtgttgaattaaaggaccaccaccacctcaatatggaattaccctacgctctccagacgcgttttgagtggtatttttcctcttccggggtaagatttaatgaacgggccctcctcgttttttgggtta

SEQ ID NO: 24918 - DNA, 2531 bp, Arabidopsis thaliana landsberg
aagctgggaagcatggtgggaagaagaactggtaagaactattctcagaaagttttcttgcttgtctgagaactaatttttctaacttagaaaataataattatatctgtgtgtcgacagtctcacattcggaccttgagcgggaggataatggagactattttaagtctacgattctttatcttccagtatggtattgtctacaaactgaagctacaaggatcagatacatcatttgcggtacagcgctccccttcattgactacttgtatctacgcctttgcatatcttagtctgctagtatttgtgcttaataatatcactcatctatctgcaggtgtacggttggtcatgggttgcatttgcaatgattatagttcttttcaaggttagtttattccatcagcatgcttcattttccgataacctttgatcctcggactaaatttgattacatgatctgagatatctcccatgtgaactttgaaataggtctttaccttcagccagaagatttctgtcaatttccagcttttactgaggtttatacaaggtctatccttattgatggctctagctggcataatcgtagcagttgtgctcacacccttgtcagtgacagacatatttgcatgcgtattggcttttataccgacaggatggggaattctttctgtaagttgttcttcttgctcacctcagataccttgatttctttctcatctctgcagattcctgctaattttgacaaacaaatcttctcctgttgtagattgcgtgtgcttggaagccagtcctaatgcgaatggggatagtgaaatcgattcgttccctagcatggttatatgatgcgttaatgggaatgctcaggtggcttcccgttgctctctgctcctggctcccttttgtgtcgaccttccagacacgtatgatgtttaaccaagccttcagccgcggtctcgagatctctcttattcttgcaggagacaatcccaattctggtctttaaacttttggaagctgttatgtttatgtttttcatacatttatttgtgtttagttttccgagtgtagcagtagtaaatgatgggagcctctctgtagctttaggcattttaagacttctgtaacatttgtccccaaaaaagaaaagactttttgtaaaacataacctagaatctttaagatattacgtagaaatgtctttggaaagaaagcgattcaaggaacaaagattaatttattcattaacggtaaaagaataaacctaattactggatccagtcattaacgcgcatgttatgtttgtcgttgttgacgaatccgtgatttggatcctttgaatgtttttggaagtattagtggttagggatcaaataaagcccaattattcgacaggcccatctaacaaaattggggacctaattccaggcgctgaaaggaatcgctggcacaagtagaaggttctagtcggaaggtctcagaagtctgtctacagaggtaccgttggggcagagagcaacatattactagaaaactccagagttcgttattggagcttctaagcagagagagatggcgggagactcaggtcggaggaagatcaaacttttctgtccctcggtatcgaagattgtggagtgggttgcttggaacgacgagaaactagactttagagccatagccgcagcgtttgggctcgaaccatcaacggtgaagctcaatggtcacttcataagcagaggttttgatctagttgccacttgtgtgacgtggcagtctttgctcactttcttctctgctagaggcttgtctactggaaaacacgaagccgatgctctgctagttcacggcaagctctctaaactcggtactaaaagtgagtctcttccttgtttagttttctccagaaagaataagaaaaattcaattttaaacttttctgataattattttatctcatgtttccaggagcacgctcggatcctctggaggacttcgcctgcaatgatcttggtctaatcaaaacgaagaagttgaaagataagtgctcaggtatgagaatattttgtcacaccaattggttttataaatttgtgtcttgagtttgaatctgacttttcaatttcatcagttggagaatcactgatctctggatgcaacaagagaaagctgttgtctgaagattcacacccactcaagaaactaaaactcaacatggatgatagtttcggagggagcggatctaaaacgccattgaaatgcagtttcatgagtgataatggtctgaagaggacaagagaagatgatatgattgcttctgcatcttgtaagaagataagatgacaaggggccaatgtagaaaatagatcaggctgtaatagtttttgtctctaaatatttgactaaacgagaatgcaaaattttgaaactatataagagcaaatcttacacggtcccaaaaaaattaccttgttgatacatatggtacaactggtatttcttcaaagttttagcctactcgtccgtgg

SEQ ID NO: 24919 - DNA, 719 bp, Arabidopsis thaliana landsberg
tggagagccaaccaaaaatgcagaacaaatcgcatgcccacaacgtctttaattgttattcataataaaaaaataaagaaaatttattagaatttagtactaagaaaataattttgaaagaaactagtgtataattctctatgtaatagtaattactaatttactagtatgattaagaaatagggtaaaatggtaatactcgtcttctgccaaggatgactgctaattgaccgctaaacaaagctcccaccgcacctcccaagttcaaaaaggaaccaaacgctgaaaactggaaaaaaatatatatgaaaatttgtgaagcacacttacttcatcaaaatgctaagttgttcctgacaaaatgcaatgctaaatatagtattttctctcaatgtagtgtgtacttgcatgtgtctcttaatatatttttccaagccatttttttctactcataactcataagtagtcataactgttggaccacaagaaacaactagatacagaagaaccacaataattcactactattatctccagttgcgaaagctatatcttatttatcattgatgtctttatacgtaactacatactatagatatatcaatttcattttcttcatatcgacctggcttgtgtgttaagagtctgatcaattaggattaaggggtatttaaatatttattacaaaagctaatttgaaaaagaaagaaaaaacaaat

SEQ ID NO: 24920 - DNA, 1161 bp, Arabidopsis thaliana landsberg
atgtaaaagatttaagttatgcagtcagtcagtcccttagctatgatcaagatgattaggtctatggcatatacattgagatggtttttatttcttgtaagtaattgaacgatgcaagaatcttgatgtttagagttagatagcatgagaagtgttttgtcgtggtcctcttcgtgttcatagaacggattatactcccttgcaagcaacgattggatgtttcggtgctgaggtatgtgaagagcattttgtataagctttgaaatatgtggtgggctcgctatcgacctgtagatagtagctccaagtggttcaatgtgaagcttagagcttcatccaatatatgatctgtcgttgtccgaaagtgcaatgcttcccagaaccctagcatacccttgacatcttctaataaaaaatccttgaatttaccatcgtctcctttgaatatcttgaaatcatctacatggaaatagaatttgaaaattcgatgcaataagactataagaactcatataaaatattacttaccggacaacatgtatatgttttaaaaattcttacccgaagacatgtagtaaccgtatgtcctgaaaactcggaagatggtggagattgtgtgcaatttattttcatcagcgatcaaatcttctatcttctcgaaagcatgttttaggctctcttcgatttccttctcaaaatgataagagagaccaagactgtccagaaaatgaatagaaagaattgtctttttcatcgcgtctttgtctgtggaagacgacacgaatatgttctctcttactttaggctttagtacttcaatctctctttcaaggacatcaaaatcctggaagttgatacaagtcaaagatctttatatagccatctaacgtacgtataaggaatacacaaatgtgcattgattgttaaaagatagtcggaaagatataaatgggctcaccgaatcagcaatggaaaacttgaggaactgatcaccccattgggaggatggcaattttgtaaaattggtgtagctttcgtaatcaaagtttcctaatgcttccatagatagagagagatgtggtgttggtggaaaacttgcaagaaggtagtcatatatataggattctgtaccacttcaatcggaaaagacgatcgaggagg

SEQ ID NO: 24921 - DNA, 1761 bp, Arabidopsis thaliana landsberg
tgaaaaaaaaatactattgtgaataaaaccccacacaacacattactataataagttaaacttctttttctgtaggcgcctggaaaaaaaagaaaagcaacaagagggctgtgaggacgcatcaccggtttcgtagcacacatgtgcatttgtctctttgctttttcggtttttttcttgccaatcaatttattttgttcctcagaaaaaagaaaatctaaaaccaaaatatatattataacctcatttaataaacaacaaaaatgtttgttgaaaaaaaaaaagtttttatttatcttgaccttatttctttgaagaaaataaagcttggttattaaagaagtccaagttagttgccaccatcagtggcataacggtaaattaaagccaacttcctctaactaaagttttctataaattcaaccactcacctcccactctaaaacccaacaacataatttcacatatctctctttctttctcttgaaggaaagacgaagatctccaagtcccaagtacgtaactactttctccatctacattcaattgtttctccttaatttctctagtacatatttacttgtgctataagtaattgattttatatcacccatgtgcaggttgttaacacaagacgtaaacatgggtcatcttgggttcttagttatgattatggtaggagtcatggcttcttctgtgagcggctacggtggcggttggatcaacgctcacgccactttttacggtggtggtgatgcttccggcacaatgggtaaaaaccgttatttacataactcattccttacaaattatcatatttactaatcttcaatgttacttctttgtaggtggtgcttgtggatatggtaatctatatagccaaggctacgggacgagcacggcggctctaagcacagctctcttcaacaatggacttagctgtggttcttgctttgagataagatgtgaaaacgatggtaaatggtgtttacctggctcaatcgttgtaaccgctacaaacttctgcccgccaaataacgcgttagcgaacaataatggcggttggtgtaatcctcctcttgaacactttgaccttgctcagcctgtttttcaacgcattgctcagtacagagctggaatcgtccctgtttcctacagaaggtaacattttattcagcttctctgtttcaaaacagaggatatcaaatttctctagatgctctgtttttttttcttaaaacagagtatatgctaagtttaataacagagttcttgaaaaaaaaagatcctaaatataaacttttcgatactttggtgttttgtagggttccttgcaggagaagaggaggaataagattcacgataaacggccactcatacttcaaccttgtgctgatcacaaacgtcggtggtgccggagacgttcactcggcggcgatcaagggttcaagaacagtgtggcaagctatgtcaaggaactgggggcaaaattggcaaagcaactcttacctcaacggtcaagcactttcctttaaggtcaccaccagcgacggccgcacagttgtctccttcacgccgctcctgccggctggtcttatggccagacttttgccggtggacagttccgttaaaaagggcaagttggttaatctctctccatatatctaaagtaactcatttgtgtggtatattggctcttgaaaaattcggttttgagagagtgatgcgtgaggctcggttttcagaagcttgatggggtcg

SEQ ID NO: 24922 - DNA, 1673 bp, Arabidopsis thaliana landsberg
tttgagagaatcgcaattaccgatagagaaaggtccgatgccgacgccgggacggagatcgaacacggtggcgcccatggcggtgccttccaaacgtcgtctaggtctctgcatcacaagtttatcgccgatcttcgagtaatctttcatttgttggatcaatttcctgaatagaagagaataatacacaattctgtttttgctttctgatttctgaagttctgaattaagtcgggtccactttagttcctctttttacaaacttttgctgcacgggtcgggtttgggttgttgtttgacctatccatatatgatggtacttccccaccaatcagaatttaacacctactccctctaataaatttacgaaaaattaagctatataggcagaaataatttcaattaagctaatgagtaatgaccaattgaccatgtaaaaatgtacaaatatgacaaatatgctctagctgcctaccattacaattttgttctctggttactaaaaatgtacaccttttcaaaaaaataattagagatatatacttaatgttttgttaaataattcataaattatgtgatgttggtctgcagacacttaattaatacggttttggggttaacatcattagttgagaagattgtgtgttagaaatctttaatttgtaaggtgacaaatatttatatcactctaaccaaataaatttgagatctttttatttttgaaatcattccctcacgttggattgtactcttttttccttgttagctcgtttctttttttacttcttagcatcatcataaatcaaagatattgactcgattaaatagtaccttcaaggtaaaagaaaatagattgaattttgactataataatctcagtagctatgtcacctacaaaattttgaaaacttcaaagaaaatataaatctacaaaatgtagttttaacagaaaatgtgttttttccaaagtttgtaagactccgaatatcaccgatgtatacttttattagaaatagtaaaaggataatatattactataaacaaaaagatcaaagttcaaaactttataacaaaagtgaagtctaacatgcacgtgaacaatgcccaacaaaggtacaaagcctacctacaataccatgtgagtgtggcgaatgaagttattcaagcatagatgaccaaatcatgaaatttctatgagattacactcctttgggttacaattttatgtttttattttagtaaatagatgttttaaggtacttgtttcttcaaccttgggatactaattgtgtgaaatgcgtaaaatgatgtaaaaagttagaacatattgagtcaaaaaaaaattctattatcctccacacttgatttcttggttggattctttccttttttttttttttttttgcttgttggttgttaatatgtaagaatattcatagtaactaccaagttgaaaaaaacaaaaaaatcatagtaactacccaaattgtagaaggttatttgcaaataactttctattttattatttttttttattttttttgctaagcaactttacaaatatagggtttttaggtggactgttaacaaaaattacattgttttcgcattacagtttttttattaaaacatacaagaatatgaattcttttgtgtgggttggtatttatgaa

SEQ ID NO: 24923 - DNA, 1151 bp, Arabidopsis thaliana landsberg
  unsure (1)..(1151): unsure at all n locations
ctccattgttgactctttgcatccgtaatcgtctaggtccacagagagaccagagtcgtagctcttctgtgccacggtcgagtggacagctacagagaattgttttggttcgaagcaagttagtacctttgagacaagatggctcaagtccatggttgtgaaatcatatcccactgcttcaaagctagcgtagctgaaaccatcctctggagttacatggatggtagagattgcgtcaccttcgatgctgttcattgagtagccacagggctcaaactcaaagtcacagatttgggattgaggcagtatctttctgatgccagagttatcagtcatagaaccagcagagcttgactcgttcttgtagaagacagatgccttgtctttgtctagaccagtcatacacatctcaagcgtgtagacattgttcttgttgttgctgttggcagaagaagcagagtaaacatgccatttcttggtttcatcgtcattgcccatcaagtaggcaacactgcttaaaccaagcttagcaaagtgaccatcaagaacagagacttcttcagagaagttgcggtgagggaatggttgtcctccaggacagaggaaacttccacgagtgtacctcacagccttaacgtcaagagaaagctcaccggctaacctcaagagaggctcaatagagaggaggagcttagtagtaccgcaagtcttgatgacgatcttgtacgggaagataaagagactggacttagagagaacataagagtcaagctgatcgttcgagagagatgagacgatagtgcactcagctggctgaagaatctcatcgatctgagacttagctaaagcacgtagcccttttccttgagtgtcaagaaagagaccaggctcaaagaaagtaacttcaagccgcttctcgtaaccttcgaagccaatagcagacatggccatctctgcgttgttgttgttgttgtgagggcaaacaaaagacgaggatttggggaaccagagctttgagaaaaggagattttggtaaatgaaaagctatggagggaactggctagtactcaagaaggcctcttagcgcagtnggagtacacagaagatctgaataacttgattccaccggaaggacgaacgtattcaatgct

SEQ ID NO: 24924 - DNA, 1228 bp, Arabidopsis thaliana landsberg
atgctgtaattatgacggttagtgtatttttttgtcagatgtgagatgaaaattatagaacctctcaattaacaagaaatttgtgtaccataggctcctctgtgcaatgtgaaggagatgaaggttatgaaaggaggacaaccctttcagctaaactttctccccgaggtaattgtgtcttttacaactcagaagtttatgtttgagagtagtaggcctacatctagatgtggtccagtattactccaaatactgataatgaaccttaatgtgacatcaaagaactaccttgcatgattagttatcttttatatgtactatttatcccaagttaattgcatatcgatgttgatcttgttcttttctcagattaattacatgcccctctcggttttaatcaccacattcacaaaggagaaagtaaagagacctcttgaaggctttggggtactcattccatctaaggagcaaaagcatggtttcaaaactctaggtaacttgttggtgtggccttaactcaaacaaatagccctatacttttccttctatatttatcaatacttcatactcctctatacgcaggtacacttttttcatcaatgatgtttccagatcgttcccctagtgacgttcatctatatacaacttttattggtgggagtcggaaccaggaactagccaaagcttccacgtaagtgaattttgattgcttacgaaaagctacaaagaatcgaggcatttataccatttttctagtttcctactttacccaattctgactacttttttttctttgtggtttaatcttcgtagtgacgaattaaaacaagttgtgacttctgaccttcagcgactgttgggggttgaaggtgaacccgtgtctgtcaagtatgtgaactttggagatttttttgatttgatcgttctagtgtgcgaaagagaagattaccacccttatagataaacagtgtatgttatctgcagccattactattggaggaaagcatttccgttggatgacagcagctatgactcagtcatggaagcaattgacaagatggagaatgatctacctgggttcttctatgcaggtaacttcaatttaaaggttgagtcttatatgatccatgatgatgaatgttgtcagtttatgggctcgagacgattcattgcagttatttatctattgtgcacggaccaaaataaacacgtaatcatcgaggggggc

SEQ ID NO: 24925 - DNA, 936 bp, Arabidopsis thaliana landsberg
ccaagagggggcctaaagaggcttcaatagggtttatgtatgcttagacctacaagaaataaaggacaagctagagtaaaagtaggctataataattgtatacaaattggtctgaagtaatagattcatgattcaaaaatcaaatcaagcccattcaattggctttgaaacgctctgtgtcaaaatggacaagacatgacttccttcgggtctttcggatgagaaccaaccatctaaaagctgtcttgctttgtctttaccaacttttgtcttctatttaatttaccaaatcatgggaattaaataattagatgaataaaggatcggaataacaagttctatcgcacactgtaagagcaaaaagaagaccgaaatcttggttgaaattgttgtcgaaagatctcattcacgtgatcactttttaacttacgtcaaaaacttatatcgaatcgaaagatctttttgatattgagtaacgtgaggattttattttggttaaagactaacatatgttgatctttgataatcaaacctagtaaaacaaaacatactaaagggaaatagagacgatacatgcaattaatgatttcggttagaaactttttgctattcattttggatatcgaaacgtttagatcaatgcaactaagaataaatgtgtgttaaacagaaaactatgaaatctcaagtgaagtgatatatcaaggttttaacttttaaccgagtttttggtgttttatgattgtgtttttattcgagtttttggtgttttaattagtatattagaatattttcaggttaaacatatgaaaatgatacaaaacttgagtcaaatggtaaaaagataaatttttttgaacaagacattataccggtccatgaactattaatcaggctaagactggtccactctcaaagctgcagaccggtctgagc

SEQ ID NO: 24926 - DNA, 961 bp, Arabidopsis thaliana landsberg
  unsure (1)..(961): unsure at all n locations
gcataaacgacaaacaaggggtgaaattggtaaaaaagatgggatttttcttataaaacaactgacggtgccactactatttcctctcgctcttctttctccaccattttcagatccatttctaagcttcttcctttccctttccctttctacattgtcaatggttaattttggggattttgttttcggggtttatcactttgtttaccagtttgttctccatcccatttaccagtatgttatgcgtcctatcttcctctttgtttaccagtttgttctccatcccatttaccagtatcttatgcgtcctatcttcctctttatattgagacctatttacttgggtatcaatagggttttgggagggatctcgtggttgtatgggtttagatacactctgatggtgcaaggtatactttgttactggagagcgtttctatactttgagagatcgagtttgtgggaaaagtttgtagagaaacatgagagaaatcacgaaaaatcttatttaatcccacttttgtggactatgaatggggttttccttatctttatcatccttctggttttggctgcaactcttgcgggagaagccaatatgaggaaagtttttaatattcaaggacagattttaacttttattgtctaggtaagagtaccggggaagtatcaattttaaggttaatggtttatataagtgatcatgttgcagataaatcggtagctgaaatgaatgttgcttcatgctttgtgtgtagttatctaagcgttgttagtcttatgaaactttgctatgtggggaataatttagggttcatagatgggatagcttctgtagccttatctatattcacccattattgtgaagcctatcattgtagagtactagggatcttcatatgttggggtatgaantagctaaagaacattttattcaccgcttgaagtcgacgttgtgatg

SEQ ID NO: 24927 - DNA, 615 bp, Arabidopsis thaliana landsberg
tcataattacaacgtgtcgtttgaaaaaaaaaaatattgcaaaaacattctgtaacgtagaaagtgggagaggtataaccattgataaaacattccctatttttatgtaacaattctttttaatatttaaaaaacagagccgaatctttgaaccaaagagacgaataaaaagaagaagtgtccattaataaaactttgcatataaataatactatagacggtcacattttggtcaacgtaatattcattaacaagaaaattaagagaacaaaataaaaacaaaaaaccttaattcctctctctctgtttctctgttttcttctccgatccgtttatcttcctggtgcgttaggggtcacacagagatgggaaacggaaactcaagggaggctaaggaatcgagacggtcaaggctacgacataagctacaaaagtttcgcattcaccgtcgtcatcttcgtagttctcgaaactcggcaggaatggtgatacaacgaactgtttccgccgaggatttctccggcattgcgcttctcactctcattggcgtacgtcttacgttttttttttttttttttcgttcttacgtttgtgagtagtgatgttatgttttag

SEQ ID NO: 24928 - DNA, 569 bp, Arabidopsis thaliana landsberg
gccatgacaattccaagtggaagtttcaatgtaatagtagcatcccaaatttataggggccagtggtgattgccaacccgaaccaaccgcaacacctaagcaaaatcaaaagtcaccacacaaccgttgaacacgtttatattgggttaacaaagaaaaaaaatccaaatcaatttgtttatgtagcgtaccggagagaaccggttggacactgttgagaagaatcgcaaaggataaaagaatagagagattattgactgcttttaggacagtttcacttgaagagaacatccaaccgatttggtcaagcagaaaatatatgagcaccgaaatgattattccaatgattaacgattgtgtcactgatatgatcattgcgaatcttgctctttttccattgccttgtactaattcatttgccactcgtactctttatatacgataggactttcatcatatatatatctattaatgttcttattactcatgtgtatgtttatatttattattatcattacaattatatgtttttattcattttctactttgttttttttaattctattttt

SEQ ID NO: 24929 - DNA, 1491 bp, Arabidopsis thaliana landsberg
tgagtcgatttgtaatatggatcaagagtgttaatttatttgtgaattaccagcaccatataatttatttggaaattgattgcataagaacatgtgtacaaaaaagaagcaccatatgtgtgttatagggggtcaattagtgtgttaagataacatgtttaatatctgcatcgaacacacttgatgcactatgtatatgctgaataacgtggagcggatcacatgctaaacaacaatcacctgtacatttttggacgcgtaatgggccaaaggttcttttttataattatataaactatgaagcgcacataagattttaattattttgaatacgtaacttaaatgcgtagtttccaccaccccatatgaaccacccttctcctgtctcttcattcaagtccatgtgtgtcgagctaatatacaaggtagtgtgagtacgcactataagaaaacacgcaatttgcgagggaaaaattcttagggaattccttgcaaaacgtcaattgcaaggaatttgcaacacagaagacttcctcccaaattgggcctcacaaaaagaaaaacattacaattccctcgaaaacttgcaagggataatccgcctcgtaaattgcgggggttttgcgaggaaaacaaaattatcgcaaacagcacgcaaatcatgcacgcaaatcttgtattttcttgtagtgactataacttaattaggtcggataattgagtttgtatgaagcagtactcttgagtgttttcacctacatttgtttttcatttttttggtttaaaaacaagtaccaaagcgcccaccgtggggcacgaacacttacttttttgttttcttttaatttgacagctcgttgacaagataatcacatgtgtcgtcaactcgtaattcatacatgctttagagcccaagaactccttcaacattatgtttatttgtttatatttccaatagacattgagcatttggtttagtcttatatattcttgaaatgtttgaaagccacatagttagtttcaaatttataaacctcacacttgagtaagtttataagatagtttctaagtttgaagacttaagactgtttcaagacttttcagagcatgaatagctcgccatgtccaccgggcactgactagtacttttttgagcatgaccttaccacattatatcgcgtaatatgattattctttttgaagtaagaactcatttaacatgcggcctaatagttttaagttatttggactaacacaaagtcgagcctaccaacttcaaaatcatgtccaaaaatttaatgtaagcaataacgctaaacaattggtctaatctaaataagtggtgataataagagattcttgtaaattaggagacaatatttaattcatacactttttttctttattagcactagctaggtatccagtcacatatcaaggtccaagttaggagccatcgcttgttatttctggtggggagtgttgctctct

SEQ ID NO: 24930 - DNA, 2639 bp, Arabidopsis thaliana landsberg
  unsure (1)..(2639): unsure at all n locations
tctcataatcggaaaattttgattgaaacgaaacgatggtgataattggggtttaatatgttttgactattttacccttacacttttcatttcagaagttgacaatttggattcattccactatttgagatttatgagtttttcacacgtctaataacannnnnnnnnnnnnnnnnnnnnnnnnataggcttaagccttaaaggcaacactaacgatgaaactcaacttaataggatagattcatgtgtctgtggagaacaaagttcaaaagtataactgtaatacctaaaaacttaaaaggaagttgcatttaatcctcagagaatgttacaatctgtagcttaaacgaacagtgaaggaaaaaagaggaaagaagagtttaagctgcaacaagatcaggtgtctcggcctcaacagataacaatgtggtgtgaaccttatcgacccagctgtctagctgatctctcaatgacttgatctgcggtattcctaacaccctcggttgcgcccatgagacgtaaactgttccattcacctgatctagtattccctctatcaagtgcacctgcaataactcattctcctcagttttcacgatcaaccaatgcagaatcacacattcaagaagatttcgagtctgcgtcttgccaatcttctttagatttttaatgttactgatagaatgagacagagagaaagagagaggaaagaaaaaggtactcaccgataagctcttcatgagaaggtgctcaacatcttcgattgaaagtttagtacgctcggcaatgacactcaaaggtatggtcctatcttcagcaggtcggctgtggcaaagatgttatatacaagttaagtactaagtttgttttcatctgtatatgggtataagatgactcctacagagaatgaatacctgaaaatgatctcaataaggcagagaatgttgatcttctctaatagtttcttctcattctcaaccagtgctggttgagcactcaacgatgcattgtgcacacgacagagttcttggtactgaactaaatctccgtggttgaatgcttgtagaatgtggtaaagccattccacatttgttccaagcagacttttcaactgccataacatatataacatgtcagtgttcttttatctataatggtgaataaatctgtggtttgctaatttggaggatgaagggaaacttacaattggatgggctaacagttccccaaagttatagatattctccccaagtagagctgaaagcgacaaatcaaaagccaaatcctgaaagaaacgaaagtatatgatattaacattttgattggaacacaaagcaatttacagagataaagcatttttcactgtaagtttccttccatagagtgctaatacttatccaaaattgctaaaagaccatttggtaacgtaacgactacatatatcatatatgaatgattagaacattcagagggacgtaccagcttaaatgattccgagagtgactccacagacgtataagcgaggtaaagaagagcatttttatagaactcagagaactcttgacggactttatggtactgagaagagacccaaaagaagttggcataaactgatggatcaatgtcagtcatactatcaagcaggctttttccatcgtccaagattttcttgcactccttctggtcaccttgctcaagcttgaacaaagctatttgtgtttatatatagctaattggttcatttatccttgactctttagtagctttaagtttatcgggcacgctggccaaaatgagacctgcagcttcttttgcaaagacaaggacaatgcactttctccgctatttgtgttcgtttcacattatacgcaatcccttcgtcttgattattctacgagttccacagtattaattagcgatagttcaatgacaagaaatccagctttgagagtgtgtggttttattttgtattttttctcattactggtgacagtgatgagtagtgacgatgttaaagatctaattcccagaatgaaaatagagaaaattaatgaaaatatgttgaaaacacgtaggaggggaagaaaatatatattaacaaaacctaagtaaacgtgaataatagattgtggaacaccacatcggcgatgaagaaaataaagaaagagaaaaggaaaatagcaatcaaaattagacaattgactaacatataacttctgaagtgtgggtttattttcacttgtgctttgaatgctttacgcaagggcatgcggggttaagtttagcaaattttctatttaaactgaattggtaatgtgttgattgcttctcttttatacattaggtctcaccttatttttgatataaagttcctaacatatatcaatactaaaaacgataaatcagttacaaaaaaaaattagtaattaaaaactaatagtgggtacaaagctgaaaccaaaacactttaaacttttcaactaacatgttgctttctaatatgacataaaatgcgtgtattatatagggattaggcctagtagggattagattcgtctacttaatatctaaaattgagggaaacaaaacanaacaaaaaacatttctaaaatgtaaaaaagattgttgatattgatagg

SEQ ID NO: 24931 - DNA, 1146 bp, Arabidopsis thaliana landsberg
ttgattattaatataatattattttcttaatgttatttttacaaaattagggaactttgtcgtaaagtttaatttggtaaattccaaaaataaattcaaattattttttatttgaatgtttaatacccaaaaaatattggaaacctaaaacgtctctcattaatattttggaaacttatcaatttacattagaagtttatacaagttaatattaataaacctaaaattcaatttttttttttaataattatatgtatttatatcttatacaagttaatattaatatactccatgataataacaaaaaatatatttgataaattaagttatgtttgtaaaaaaatagtcaaaagctagcacaaggaaacaaaacgattgtgccctaagccctaagttaacaatttgtcttcatatatctagagagaaaagagtgggcatgcgtagatagttaaaaacttagtttgaactttgtaagaataatgacgactttgtcagatctttcagtagatttggtaggggagatattctctagagttccattgatatctctgagtgaagtgcaatgtacttgtacaacgtggaacactttatcctggaaggttttgtcggaaaattatgtttttggtgcttaaagcagatacaagtaagcaatttctaggtttcgtagtaatgaattctaaggtttgttccctgggacttgatctccaaggaatccacaacaacgatttcgttgatccatctttaaaggaaataaatatagttgatcaatacgatatatctaatatatttcgctgtgacggcttattgttatgcgtcaggtggatccaaccaagaagcaaataccataagttccacagattagacatgtatgctttcggttacgacaaacaacaacaagaaccgtaaccacaaattcttgatcaggaagtttttggatgatgatgaatacaacaaaagcagtaaaataaattttccttccaagttcgagatatattattttaacactgattcatggagagttcttaatgtcaatcctgactgtgatttagaaagagatgtgtctttgaagggacatactatattactatgctcgacaaaaagaggtcggagagccagtttcaaatcgtattggttttttactctgtt

SEQ ID NO: 24932 - DNA, 1290 bp, Arabidopsis thaliana landsberg
caaattcatgaatgctaccaccactatcctccttgttgatggtacttttactatcccctttctcgatgagttgcttgaaattttgacccaattctatactcgcctcactagagttcccttcattttctgccataaaatcactagaaccttctggtggaacaccgagacttgattcttcaatattcccaaaggacatcaaaccatcatctaatttatctgaatagttcattctcacctcttcagaatcaacatcacctataaaagaatccgaacactctggttcatcaaccactcccttatctccaaactgcgaccctctatcttcaacttcagcttcttcatcacctggagccttagttacacccaacagcacagcctcttcatcatcactacccaaaatttcatcaaactcatcatcatccaaagacaaaacagcccgaggaatgactacttttgctttcatactacctctttcatctccactaacttcactctcgcaaacctcatcactgttctcaccatcttcctccaaagacgagtaattcaccgacgtttcctcgtcaacatcacctgcaaatggtctataaatcccactcccacctgaaaattcacttccatctccacctaactcttcccctagtagcctatctaccctaaccccatgcaaaaccacattctttaacacagtctcatattcatcagtctcaaaatcaagtccattactataactactagcttcactacttgctgagttatgttcatcagttacagtaccagtatcatcatcatcctcattaattgtaacaggtgcacgaattggaacagaaccagcagatgaaaacgaaccagagagagtacgcgtgagaagaaacgaatcagctcttgccgccgcaatcgctctcaccgcagaaattgaaacgcgaggtttctccgaatcgaccgttgctgcagcgagaattgaaacaatcccaggcttctccgattccataaaaccaaaagcttccaaatatacaaaagatgtattttgtagttttctgtttgtctttaacagtatttttagggtttaattaggatttatgtgaagcttttgtggctatggaagtgatagtgtggaagacgaaacaaccacagagaagagtgagagcgatgatgctacataacaggcggctcaagacaaacataaagattttgcataatcattcacttttggggtcaatattgaaacctttcacatttgaaagaggaatatacgaatattttaaaatgtttggggctttaattgtattacta

SEQ ID NO: 24933 - DNA, 978 bp, Arabidopsis thaliana landsberg
caacaccatataatatgaaaccttcaacgtttcactcacgagcacccacaaatagttgtttcccgacgttcttaccttcgaagagtcctaaaagagcagaaggtccactctcgaatccttccgctatatcctcaacgtatgttatcttcccttctctaatgtaaggaagcacaaaatccaaaaacttaggatatttgtcgtagaaatcacaaaccccaaacccttgaagttgtatcctcttgtaaagaatggtgggtaagttgtgtacgccttctggatccactaaattatactgtgagatcattccacatactgcgacacgaccatgcaacttcatgtttatgagtacggcatctaacattttgcctccaacgttctcaaaatatatgtcgatcccttccggaaaatacctataattataataagtcatcgcttttaattatattatgtatgacttcctatctatatataactagagatagatgtgtaaactgacctctttagggcagcactaaagtccttctcttccttgttattgaaagcatcatcaaacccaaactttgtcttgagttgatcaaccttagagaaactccggatcttgagaaaaaggccctcttatatgcattaaagttttgacaagtaatgtagagttttaagtaccttttctttactgccagcactaccaacgacataacaacccatcaactttgcaaattgtcccacgagctgaccaaccgcgccggatgcagctgacacgaagacagtctctccttttttaggtgaacaaacttcgtaaaatccagcataagcagtcataccaggcatacctgttccgatcaaatgaaacagttaaaaacattaccaaactaagcgtgatacatatatagagcaatgaacatcacatagccaagcttttttcacgtccaaactaattagagaggaataagatattatgccaagaagtccagtgtagtaaga

SEQ ID NO: 24934 - DNA, 1206 bp, Arabidopsis thaliana landsberg
gatatgagtcagtaatatttctacatatgaaagacgattttttgttttatttcttcaacccctttaacctattacctatacgtgagaggaaattaagtttatctttaaatttgtccaaaaaaagaagaagttaacttcaactcggataggatttcgaagtgttaaatgatcgcattgaatcctaaactattagaatttgaacctcatatattatggttttatttctatacaaaatttatgactaaaattccaactgtacagggatctggtgattcccaagacctaaattcaatactattgaacttttcctccatcgcaacatgttgacttgactagaatgtaaattttccaaaaatttaaagggaggaaatgattgttaccactacccatacgaatttccaatcattttaatgagtcagttccttttttgattgatatgggcttggtagaaacttatgaattaataacttttgtacccaacaatttaactaattaaccgtattcttgtttacatggccttgatataatttagtaatgctagctttatggtaccattatcattaccctaactattacacaagcttacgtatagggtttggttgcgttttgttttttttaagtcaaaagtgctaaatgtaaagttgtatatgacccaattaatgttattgcttttagttttgtcttttgtatttgaccttttttgtcccgcaaagattattgtagatgttgaatggcatcttttaaggggttgaaaacaatttaatgccgtatatattaagaaggtacactataaatcgtactagtgtgtttttgagtacacatttacataatgatgtgaaataatagttagatttagttagagtacttgtcatctgaattagggttaaaatatgaggtctaacctaatcccaatctgatcaaagagactgaaaaatgggaatttttttgccatttaaatctatattatttagaccggttcatcatacagtatatagttggtttactctctattttaatggccatggactcatggacctattcactgattatttcctcattaatcaattttttcaaaacttttggttatgattagtttgaagtcaaaacatgtacttttctttttttttacactgaagactataataaaagagcaccctctatttggtttacggtataccgattagattttaatgagtatgaataaaa

SEQ ID NO: 24935 - DNA, 1196 bp, Arabidopsis thaliana landsberg
tttttgaaaagcctaaaagtaagaaataattgtaatctttttcttgctaacaaaataattgtagtttaagacctctatcgaccacgaagatctcgtagattatttgactaaccaagatgtacgaataatttttatttgaataaagtttcccaactctcaagttgcccttaagctgacagaatgtaacaacttgaatatctaattaaaccactattccaagatacagtaaaagatctatctatgagttcaataatattattttctaatcttaatattattgtaattgctatgaatattttaataagtcttagcagtactgtttacaactagacttgagctgcaaaaaaatattcttgaacgaaagcaaccggtcaaaagacacaaaaataacttttttaaaaaaatataaaaaatctccaacaaaccgtgcatgaaaacaaaagtatttatttaagaattacctatgattcggtacaaaatccataacattgaacatgataccaataattgttatgattattctcaagcattatactaccatatagtaacacagggcaatggaaaagagtaaccctctttctagtatatgaagacaaaaacatttgatttatgggaacttgaacttattcaacattgaaactagctgataaaatcataaaagtatgcacatgagacatgatgactgactaaaaataagtgttgaccaacaaaaaaagttcataaaaaagactgaaaaaagttcataaaaatagtctttatacagtatacagtttttcacaaataaatgccaaatagaattgaatgaatgattactaatgagatttaccagacaaacctaattcattaattatgaaaacaagaaaaagaaatcatgaaaatctgtttttcgaggattttaataacaaaaggataaaataaaataaaaaagagagaataagataaccccaaaatgaaagttgtcactgtcagctcggattgtttagaattggaataattacgtgtttaattaaaccatacacagatttaactaatcaaatcacttttaaccaatttttaaacctttagctcacaaaaaaaaaatgtctctgcaaattataatccttgaatactatggctatggcggtgtttacgtttaatgatcaaaaagctctgttttttatgcaagcgtgggtataaaatccagttcctttaccgat

SEQ ID NO: 24936 - DNA, 860 bp, Arabidopsis thaliana landsberg
  unsure (1)..(860): unsure at all n locations
ttttcgatgaaccagttcctcagagcaaatcccctgagcatgctttattcaccaaaccagtctatgaccaaactgaacaattgcctcctgctccatgggagactcaggagccccggaagtatccaccctcaatgtctgctagaaccaacaagaggccagaatacttccagcataatgttccacaacactcaagcagtgcctctgaatcttcatacgatgatcttttgggacaatcccggaatctctctcttaatccaacagcctctgctgctcctgttactccaccaaagaaagatgataaaccagaggatatcctttttaaagacctgatggattttgcaaaaaccaggacatcatcatcttcttcctccaaacccaacaatcagaacaacaaaccgttttgagacagagctggcagttgttacttcagtaaacaactactcttttactattcttttttctttcacttgtgtacttgtttcctttgactgaacatggatntttttaccaaataaaaaaaatagtgaatagagatctgttattgaatagaaatgtcaaaattttattttacgtaaaaaaatagtgaatagagatcggtttttcgacaacacatgaaagcagaatacaaagattctgaagttttctgtataatctaaatatgttggacagtaacaaaaagaaaaagagtttctctaccaacaagctctttgatcaagtattgattcctctttaagtatagatcttatacagattagccccatgggagagagccaggaaaaggagctgaaccacagtacctgaacaatcctccatttcagggcaaccatagggtaaggtatagcctaggaaagggtacgatt

SEQ ID NO: 24937 - DNA, 2663 bp, Arabidopsis thaliana landsberg
tgcactggagaaacccaaggactatcagagataggatagatgacaccagcctcaagcagtttcaaaatttcttttttcactaattctttcaaattgggatttgacctcctctatggttcaatgctagaataggattcgttttcaaggtggatcctatggttgcataaactaggtgaaattcctttaatgtcagataatgaataaccaattgctctcctatactttctaagctcagataatagtaggttcacttcatcatcatttaactcagcattaatgatcacagggtaagtagagtttggaccaaggaatgcgtaccttagatctttaggaagtggttttagatcaacttcggccccttgagttcagaccagtcatctgaagttgggatgattggctccctaaattcattggcagacaaggtcgagtggctggtcgagtatgtcctcgagtgtgcaggttgaactcgtgttgacccttcttcgctcattaccattacctctgttgctggtccaatcaattcctcaaagggttctgattcttccagcgctttatgggagtctaacagcttctggtatcccaaagtttccaactgcagaaacccatctttgccacttttggttaaagcacagttaagatgatcttcttctgccagctcttcctgtaactcatcagctaactgatccatttcttcaatccaaaagagttgcccttctatggtaggcttcttcattgcgtcttcgatgtcaaaggtcatcctaaagtctttgccaagatttagatcaatcttccctttcttgacatcaatcatagctcctgcagttgctaagaaaggtctccatagaatcaaagggtccttgggctcttcatccatctccaggactacaaagttagttggtatctcgacagctctaatcctgattggtaggttttcgagtaaaccatgagggattcttacagtcctgtccgcaaggataagggatatgttgcaggatttgtattgagtgaaccccaatcttttggcaatagagagcggtatgagactgactgacgctcctaaatcacattggcatcagttgaaagccaatggacctaaagagcatggtagagtgaatgaaccaggatcactaagcttcttaggaatgatcttcttctgtatgataacactgtattcatgactcaatactaccatcccttgcattttttgaattctctccatgatcaagtctttcagaaacttgtgagaatccgggattagtgctagagcgtcaacaagaggtatccgcaactcaacttccttgatgttcttggcaaacatagctctatacttatctgccaatgctttcttgtgacggccaggaaatggaagctgtggtttgtaaggaggagggacaaagaccttttctttgttcttgacagcaactggttttggagcagttggtgatgttgctgggaaggttgctcgagtagttggtcgagtaaagtggtcgagtggcagctcgagtggcccatcttgatcttcactgtcgtcagtgactgtctttgggtcctccctagtttgaagtgcttttccactacgcagagtgatagcgtgaacatattcttttgggttctgaattgctttgcctggtagtaggcttatctgttttggagctgaagaagatgcagaatatccctctaagtatcggactttggtattcagtgtttccaccttgacattgagatcattgtagctacagtgcagcttgttatgtaacttagatatcttctttgccaaatccatggagccagaggcttgcccgtgaagcagttgttgtaccatttgtttcatgtcagccttaggagtagcaggaccttggttttgctgaggtgcaaacccaggtggtggttgcggctggtaattcccctgaaattgctgcttaggagcaaaaccttgattgtaaagaacaaaaggtttgttctgaccttgttgttgttgtggaggatacacttgatcttgaggattagcaacgtttgtgctgcggtaggagaggttggggttgttggttttgaagcacttcactcgaccccgaggtcgagtgtcttcacctccaccacctgaccatcactcgatcacaccactctacctggaagtcgagtatcaccaccaccactcgactacatactcgatggcgagcttcagagtcttctctattccgcactcaaccagacactcgagcacaaggaagaaaagaagactccagctattcactcgacctctcactcgaccacctgggtcgagtacagttcttaatctgtcccaatactggtcgttttgagtattagggtttcagaatattttgctataagtagcatgtactttacattttcgagaacaagtttttatctagttttattccgcagacactgtgttcttgaccttttgtaatccggatttctctttatctattcagtattcagtatttgttcttgatttcgtttactgttgttcatcctgttatcattttgctattactgtgttgttatcatgttttcatcttgttcaacgtttatgttctctacaatgatgtcggagtagtgtatatgcttctgaatatgggttagagtagtttagaattctcagtatgctaggtggttgagtttcattgccccatcccttctgg

SEQ ID NO: 24938 - DNA, 763 bp, Arabidopsis thaliana landsberg
atctagtttcttgtatttttgcgggtggagaaactaataattccaaagtcatcacaagtgcggccaatagaatgatcaaaagaagaataattgatgaggagggtaaagtagaggtaaaggacaaagattgaacaaatgggtaaaatcaaggacacaaacacatgcacacatgcatacatacaaaatatgcattcatattctcatacaatatacaagcatatgtgtggatgatgcgtatagagagagagatcgggcatgtgaaggcattaataggaggtggggtttgagtgttgatgtcttcatattcttgcaatggagccacatggtaaacagggaactcaagccccctctctttagggtaggtatgattcatccaaatttagagctcttccatgtgactccatgtgtttttttcttccatcacccattattcatttttttctttccgctctttaatctcaatcttgctcaatttgcttccaaggtcttataccgaatattgttgatgttaattcaaactaatggcatttcattttgtaacatttgtatgcttctgattttttgttaaaatctatttaatttcaaacgttgtctgaaaggaactatataaaattttcttacatattagatcgaaatttggttattgatcaaggtttttttgttcattaaagatttgcaaccgtcaagtaaaatattaagaaactagatcaacaaacgtatgtgaatctttctttcgtttctttggttgctaataaagaaaaag

SEQ ID NO: 24939 - DNA, 685 bp, Arabidopsis thaliana landsberg
gcaaacatctggctataactaaaaccacataatgactgaaacaactcaaaaaccatactttagattataaaaagacaagcttttttgagagagaataaagtgacagtcaattctacttagccgacactctgatttgatttccatggattcagctcttcttaccaataatggaaacatattgtctgaacaagaactgaaatctaaaaactttctactacaggactaagcaagtgtgaaagaataacaataattgaaatctttctacaagatatcaatcaccttcatcaaattaataaataagagaaagacaagaaaattgaccaaaggagactcacatgtactggaagcaatatctgttttaatccgattgctgaaacaacctcccattaaaactccaagaaaccaccaatcagtcactcagctctataatcttctcgattgaaagaagaaaaaagataagagctttatgtgtgtaaacacaaacccagttctatgcgtacaaaatggagcgaaaattgaaaaagaccctcaagaaaatcccaaactcccagagaaagaaagaaagaaagaaaaattgagctggctagtaatcaataaagcctaaccttttgttctctcggagaagaaaagtcttttgtgataataatgaaactaattgaaaatgaaaagaaaagatgtttttttt

SEQ ID NO: 24940 - DNA, 1912 bp, Arabidopsis thaliana landsberg
aaaacaaaacaaaacccaaacatcttactaaatcaatcaattatcgagaatcttccttcctttattcctttaaaaaaacaaaaacctttcttcacctcctttccttgattcatcctctaggttaatgggtgttttctcgaatcttcgaggacccagagccggagctacccacgatgaatttccggcgaccaatggctctccttcgtcttcttcttctccatcttcatcaatcaagcgaaaattatcgaatttattaccactctgcgttgctctggtagttatcgctgagatcgggtttctgggtcggctcgataaagtcgctttggttgatacgttgactgatttcttcacccagtctccgtcactctcgcagtctccaccggcgagatccgatcggaagaagatcggattatttactgataggagctgcgaggagtggttgatgagagaagattcagttacttactctagagattttactaaagatccaatttttatctctggtggggaaaaggtaaaacattttgtgttctgtggaagatggttatgatcattcctttttggttttgattagtcaatagaataaagattgggcgagttgtagtagagtgattgattagtcaatagaataatgatttcatttgtgttcacaattggtaggactttcaatggtgttctgtggattgtacatttggagatagttcagggaaaacaccagatgctgcgtttggattaggtcagaaacctggaactcttagtataatacgttccatggaatcagcacagtattaccaagaaaatgatcttgctcaagcacgacggtgggtaagcacagtctcaacaagacgttatacttttgcaggacatgtaaaattatgtgattagtatctgactttttatcttctgttgtttcatcaggaaaggttatgatattgtgatgacaactagtctgtcatcagatgttcctgttgggtatttttcatgggcggaatatgatattatggctccagtgcaaccaaaaacagagaaagctcttgctgctgcttttatttccaattgcgccgctcggaatttccgcctgcaagctcttgaagccttaatgaagacgaatgttaagattgattcttatggtggttgtcaccggaatcgggatgggagtggtatgtattaatattatgcattgctagcgaaatgttctatgtcctaaccatatcaagtcattgaaccaataatttacgaaaattcgttacagtggagaaggttgaagctcttaagcactacaaattcagtctagcttttgagaacaccaacgaggaggattatgtcacagagaagttcttccaatctctagtcgctggtatagatatatctcatcctctctctctgatgatcttgcaaattttagtatttgcttcattagaagaattagcatttgttatattctctgccacctcttagctactgttagtcatcttgcatgatctgagcttattatcatgtcaattgatgaagggtgatatgcggatttagatacatagattatcatatatgtgagcattgaacctaccttgttttctacttctgattagcactaaatgatcaaatcttcttttaggatctgtccctgtggttgttggagctccaaatatagaagaatttgcaccttctcctgactcattccttcacattaagcagatggatgatgtcaaggcagttgcaaagaaaatgaagtatcttgcggataaccctgacgcctataatcagacgctaaggtgcggtaatatgtaaaatatttgccggatggaaaacaaaataagaacatgtattgaaaacattgctcctatcatcagatggaaacatgaaggcccttcaaatacttttaaggcacttattcatatggctgctgtacact

SEQ ID NO: 24941 - DNA, 722 bp, Arabidopsis thaliana landsberg
cctacattcttcgctttcgtcgtcttccgtttcttcttctccggagattcgatcttcatgatcttagaagaagaaccatctcgcttagtatcgcttcgggtctttcgatccatgcttcgaagcatcctcgtattcgctatagctttcccttttccttctccgtcaaccttcttactcttcggcggtgccatttgtacggaactaaagctctgtcaacctccgcaccaaatgggctctctgtctctctctagatatttcactttttttatatttttacttttactttagttaaaaagacgttagaaggttaaaagttaccttggaaggacacgtcatcaaaatttttaatggacagtcaagattaactgatgaataataaagacactgacactgttcgattatggtcgctgtgataataaaaggcgtgtgtttaagtgatcatcagtataacacatcttgacgttttatttctaaagattagcacaacatgctgtttgggtcaatcaatggaaagaaaacgttgcagaagttgctgattaatcagtggaaagaaaacgtttcatgattagtaaaacatacttaaaagaagatagttaatgattatgaaaagaccttaaacaagccaagagtagtccaagactacttggaaattggaacatagggagtattcgaagagtcaaaacataaaatagccacactggttcacaacaaatttaagctct

SEQ ID NO: 24942 - DNA, 672 bp, Arabidopsis thaliana landsberg
cctgtctttgtcttactttgacagtttggttttgagtatatcagctccgaatctcatgtacttgtatctagacggcgaattcaaagacattttcctcgagaatacgcccaagctagttgcaatatcggtttcaatgtacatgcatgaggatgttactgattttgagcagagttcggattataatctcgttaagttccttggtggtgtgccccttcttgagaagctcgtcggttatatctacttcacaaaggtaattttgcttcatcctaaatattttgagcaattgccgttaatgaaaaaaactcttttctttgatctcagtacttgagtataggagatgacccgggaaggcttccacttacttacatacatcttaaaactatagaactttaccaagtatgctttgaagatgccgatgaggtgctagttcttcttcgtttggtcactcactctcccaaccttaaagagctcaaagtttcggtacgttaactcgtctcttttgtaaggtgaccataaatcggtattcttccaattcattatcttctgtaattctgtttctaggctttaccagtccaaccattttctcttgaagaaaaaggttttgaccttttccaaagagattactttgactaccaactcccaagccttgaaaccgtgaagataacagacgcc

SEQ ID NO: 24943 - DNA, 2559 bp, Arabidopsis thaliana landsberg
aatattcctgtttttagttaaaagattaattgaggtgtcatgcaacattaccacttatgtggagagtccaaagaatccttagaccacctctttgtaactttgttgcttgtcatcacttatgtaacgtttggtttttatctttaccagcctctttcttggagtctttaccattctgaccatctagtacagattagccatgggatgaataaccgaactgaaataaccaaattgggccgaaccaagattttagctgttcgctttgaaaagttacatgtccttaacagattggttaaatttgaattttacttcaattaaccaagtattttgctttagttcagttatcacttatcagttaactaaattatatgttgtttataaccagattataccacaattataccgttttttaccaaatttaaactagttttcatcgataacctagccaaaattaaactacccaaatctaaccgaagaaccaaaattattcaaatataattgaaaaatcggattagaaaataatcaaatattcggttaaattacattttggggataaaatttattttttaggtatatatttttgatctatataagagagtggatggatataaaccacaaatatatgtacctacaataatgaatccaacaaaaggtagttacaatccacatgaggtaggtaccattaaaagaaaactacaaaatcttctatttttgttacgagggtaaatagaaatcaaaagatgtgtagaacccaagaaactgtcataactaaacttttaacgttggtccactaaccggagcaaaccggtagaaaaccggaaaagaaatagctgttgtgagatggaaatccaaaagtcaactttatgaaccatgtgtacagcacatgccgagagaaaattgagttggtagtactaccctaagaacgttgtccccatcattatgaaactacattactcatgatcattattatggtaaactgacactccattgatatataataatacatatatataagttatatgaccggccacgttttgatataatatcggaaaaagtcaattaacaatcttttttgttattcttggttttacaatatgggtgtgaatggttacggcggttggggcggacacaaccgtcaatggatcaaaccgctttttattttccattcatcaattatagtccgcagtggtccggacaaaaaaaaataaaaaaaaccgcagcggaccatctgcgaaccatttttacatacaaataaacttggtccgcaacaatttattgtccgtcccaaaaatgagatggactaaaccgcagataaattagaccgttttgtccgctgcctccattaatagcctatatgtttttttttttctcatgtggttgtaaataatttcttgtaatgagtggctcaccacattcattataacttgttaaaccaaatgtttataaactataaccaaaaaagagatattttaaaaaatccctttctattttggtataagaaaaacacccgatttaggaaaaatgctaaatgggctttatataaatgggcccgttaaaagccgacccgagtggaaactatggaagatccgataatggtttcaagagagaatttctgaaaatcattggcgccaacaaagcgaacaatctctgaacattgctacttcgtcgtcttcagcagatcttcatcaacgaatacggtaagaaaattccccatttttcacatagttttctgggtattttcgtacagcttcatttgaatttcgtatctttgtctccttattgtcaatttgattggagcgaaccttgattttttcaatttcatgtactcttgtttacttcttcttggtcattgtttattcccgatacgtaattagttcagaagataatctcatttggttgatgcaaagtttccccattttggtatctagggtttacaatttcgttcgtccacctcataacttgtttatcaatttctttatttggagattagtgaccatattgatgggagtttctagattactactaaggatctctctttagctagtcagtaaagtactgttacacgtactgctttttttaaagttctacttctaagtaattgatattgcagctcttcataatccattatctatgaaattgatcttggtaaatgccggttgttgaattattgtggtcactcattttcttcatgtggtcagtataacattgaacctccccttttagtattatttgatttgaccatatggtgggattcgtcctcggaccccattcgctttgtgctgtttcttatggtggtgacctctctctcttgttctcctttcgatggattatattattgcatgtttctctcatttgtgggccttgacatttttctccggggcttcgcattgtcacagcctacaacttaatttgttcaataacaaagcaagaagactcttctacctctggaagggtacattatgttattgtatgatttatataaaagtgtagcaacccttatgataatcagtcaaaataagctagtggcagagcctgactttaatacccttgaaacttcataat

SEQ ID NO: 24944 - DNA, 1483 bp, Arabidopsis thaliana landsberg
  unsure (1)..(1483): unsure at all n locations
ttgtttttacggtaaaatagttataaactcttttgaaatttctatgttgatataaatccacggctcaatggtaatatgaaagtggctttaatttctttgcactttgattcatcctctggaaaaaatatgaaaatagtggctctaatttttttttaagaatgaattacttaatgaatggccaaaagtcaatattcacaaaacattgtctcttttctctgtttttacacggtggataccggtcatctataaaggcgaagtagacggattacttacacgtgtcatactcgtggaggatgccattcgtgtgggagtctactcacccanaagtttcctttaaattaactttctgatcaaaaataaaaagtggacttgacccttttcagcttatttgtctacttttcttccattttcatgtcacttttttctaatgtgtgatcgaaagtctctttttttttactaaatcaaaaccttctttaatatttattatgtgctttgtgttgaaccttttttttgcaataatacatgagataataaaatttacagaaattgtttgaagacacaaattcaataacattcaatgacatcaagacacaaattcaatgacatcaaaaaaaaaaaagatatctgaataaccaagaaaaatggttgaacgtggttacaaagctgtttgattcaaatcgactctagtgatcgacgttaaatactgtttcatatatgcattcttattttgttccatatgtggaggaaagaaaataataataatgtatgaacaattagagaatttatgatattgaatatttttgggtcgcagagataatactgtctatattcaaaagaatgaaaaagcaacgtgtcctgctctttactttcagccaaaaaaaataccctgtcccacgttattaacaatttcaaaggaaataataaaaaatggtttaggataatcacatttgtggctaatattagttgagctgtccaaaatatctaagttgctatcagacacacagaccaaagttcataaaaataaatgaatttgggagcacaatgatccatctttttcagcataattagtcaaaaggaagtaaaaataagcaaacaaatgattatatacagactgtctcgacgtctatttctgatttttttccatatattcctcgttttaatctaaaaaaacctttataccaggttttgattagagaagtattcgttaaagtacattcgtttgatacggttggtcaacaaattatccaagaactaaattttttaatcaatctaggatatttattatccaaaaatactatgtactttaccaaaaaaacattacacgaaaatgatctaaaatacaacactccattaaaaggggctaagttgcaaagaaagtcaaaataaaagtaaatagattaactaacgataatttaaaaactctgcaaaacttgattaaatctaatttcattatagnttattttattngttgcctgttgctttg

SEQ ID NO: 24945 - DNA, 658 bp, Arabidopsis thaliana landsberg
  unsure (1)..(658): unsure at all n locations
gactatttacgatctttgcaacctgagaaggtttgtgtaaaaatcgctgaagacatattcgagcttgtgggatatttttgcttatctttccgtttctctctgaccatctaaattatattcttaacaggtagctgagttgtcagaacctgcggctcctgaggtgaaagagactattcattctgttgttcacggtcttttggcaactctatcaccgaagatgcactctaagtttccagcatcagaagttccacctactgaaacggcgaaagcaaaaagagatgaagattgtgctgaacttgtagagaacacttcgttgcagtttcagcctcttatctcactgactcgagactaccttgctcgtcttctcttctggttagaagaactgcctagctctacctctctttctcttgcttgctaggatttagatggatatcgtatatttacgtataaactacaaacacaaatagatcctctcaaaagaaactttagtgtttctttggttgtattaccaaagacatcttataccacagtgtctgctttctattgctaggtgcatgctattgggacattatctcagaggtttggaatatcgaatggaactgatggaggtcctgtctttgancatgcgatgcnncaaagggtctgagaacgtcgctgc

SEQ ID NO: 24946 - DNA, 1522 bp, Arabidopsis thaliana landsberg
ttgaaagatataaaaggtacgtatagtagtacgtagtagtaagtaaagaaaccaaatgggtgtatatatatatatatactttttaacaaaatatgttaattagtcacaaaattagttgaagtatatacatcctttagtggttgggtttgccaacaaagataatttggacttctatatacctcatctccaaattatatttttttcgtatcacacaattatgtattttatttttgacagattaacattgttatgaatttaactaacgatgctaattggaaattatagcatttttctccatggaaatagctagtacaagaaaaacgtacgtatttggtaaaagaacaaaagcattaagacatgtcaaagaaattggttatgaattaatgagagaaataactacggttggtaatatagcaatcccttaaagtgattatctcgtgtatctctctgctttctttagcatttactcttttttgtcgttggatccgaacgtgtataaacataattttttttttttttttttattttgtgcatagatgtgtatgactgtactatagatactccatagtatcataattaacaatttctaaagctacacataatagagtacatatgtaaagttaatagttgcataagtaaagcggttttcggaaaaaaagaaaacaagttgcataagtaaaagctaaagtggtctttggtcaaagattaaaaatgctcaatcatcgaggcacatggtttctcgccgttaatgatttgtcaaaaacttgtaatcatcgaatttttgtctctttactttgtatctattgatcaatggtttacgttaactatcattacaaagatctatgtcaaacttaaatttctatagttggtgtaaaaaagcaagagatcttttctatataaaaaaaacaaattaaagtctatatattgtcacatcatataaaagcaaaacttattgctaaagaaccagagactcaatccgtttagttttaattagccataagttaatgccttattccacctgtagagtttcttcaaaggtaattttactctgtttacgtgcgtgttgcttgtccaaatcagattaattctggtgattatgtaagctgtgcgaaaaatgttttttaaatgcaaatttgaaaccaaatacagaacaagaagcaaaagacctcaattcaaatgttagcttcttctgcaattcattagttttcttctacttagcttctaaaccaaattctatctccagctactacttactgtacatccccctcaaaaagatccttcctgatgttaatgctgttgtggttgcggccctacgtttgcatcttcttcagcagatgttccctcctctgtttgaatccaagggatgagtaagacttattactcaattgttaagaaagaactgcttaatcatgtcttttcatgtttcaccttgctttcgtgtcgatgaatctactccaggatcagcttttgcagcatctgttgatatcacattcacctgatcatgagaaaaccgtatggatct

SEQ ID NO: 24947 - DNA, 1814 bp, Arabidopsis thaliana landsberg
acaccattatccctaacaaaaccctttggaaatctctgaaaaattcattagaatacaacatgagttcagaccctagaatgagagtttcttttcgggttcttaagagtcaaataccatcaagtcataacgtagactcgaaggcgcaacattagccacaaaacaagagggatctcgtgaagaagactctgcttctccatttggattctccttcactttctttttctctgaaaaataatagaatctaagtgttatatagtcaaactggttatctctactcactgatccacattccaaaagcaaaccacgtttcttgaagagccagagacagaacacaactcaccgtcaccgaggttgttcttttcgactgaacacgaaccatattgaatcccacaacaactaggtcccaacagtgttacatggaaagccaagtcactctcttgtctgaaaacaacaatgtcaccgattggaagatcatgtgagacagcaaactctttccaaccgtcggtgagtgtatggcccacaatcttcacttcccatgttctcttcgaagaatctgatctcaatttgacggtctttcgttcgtgtttccccttgatatacttggagaagaacttcacaggaatgttgtgcaacaaacgaatagaattgtgacatgagtctatatgttcagatagagagaaacagagagattacttacgatgtggctcttgaaaccgggaagaagaggctggaaaaagtgtggactttttggagcaaagagtgtcggatgcttcggtgccgatcacttcgaattaaacatccaaaaagtgttcttggggagattcacagaaattttggagcttttgagttgctttggaagagtactactctgtttacttctttaattttacaattctacttaaatccaataatgcaaaaagcgaaaagatagtttttactcttttggttttgcttacttcgaagtcttctgacatgccctaatagaaacagtaatgggatcctcaataaaattaactatgtgaataaaacttacataatttttgtaaacagtgtcttcattagtctctgttattcaacttatgaaaaaactaactaaatcacataaagcagggaataaattgaccaatcttatgcatgttaattaaatggttgacaaaaagataaatcactatgttaactgttgctatcaaaatttatctgtcaatatataaagtttaacgtaaaagaaataaatctgttgtatatgaaaaaagaagaagtaacacaataaactcattacatttttcttccaatatctctagatataaatgtaaaaaaagggttgaacaaaaaaaaatgtagatataaatgtgttagctaaatgaatcaacaacataaagatccaaataacttaaactttacaaagaatatatgaatttttattttgttgactcatttaattaatacattaatagtttgatatcagttatgaatgaacaaaaatttgttattgaatagtgttgatttttactatatagatatcaaatagaataaaataaagtttttaatcctgggaaaaaaataatcaaatcaaactattagatttttagaaattgggttgaaacttattcttctgacttacttttcagtcctacatcgatcaaatcagaagaaaaaaaaaagccttcggttattaatgcgtttatcaagaaatatctttgtcattaaataattttgttcaccaagtcattatttagtttttttagttttttttttaacacagtcattatttagttaatgacaataaatcaggtgtttaatgagaatgaataacg

SEQ ID NO: 24948 - DNA, 1186 bp, Arabidopsis thaliana landsberg
atccttggctgagatcaactccgcgacgtcgggtttcaatgagaacgcaattgttggtcaaggatgctactgctattgtctatagaggctctattccttccattggatccgtggccgtgaagcggtttgatcgagaacactggccacaatgcaaccgtaaccctttcaccacagagttcaccacaatgactggttacttgcggcacaagaatctggttcagttccaggggtggtgcagcgaaggaacagagacggccttagtgtttgagtacttacctaacggaagtttaagtgaattcctacacaagaaaccctcatctgatccatcagaagagatcatagtactctcttggaagcagagggtaaacatcattctcggtgtggcttccgcacttacatatctacacgaagaatgtgagagacagatcatccaccgtgacgtcaagacctgtaacataatgcttgatgccgagtttaacgccaagcttggtgatttcgggttagctgagatatatgagcacagtgcgttgctagctggacgagctgctacactcccagcaggtactatgggttacttggcaccagaatacgtgtacacaggtgtgccctctgaaaaaacagacgtgtacagctttggagtggtggttctggaagtgtgtacggggcgtatggcggtgggggatgacgggacgtgcttgagacctatgtgagccactggagacaggaagttgctggatgggctgacatcatgctgagggaagagttcgatgcagaggaaatggaaagggtgttgatggttgggatggtttgtgcgcatcctgacagtgagaagcggccaagggtgaaggatgctgtgaggattatacgcggggaggcgccgttgccagttcttccggcgaggaggcctttgttgagaatccgaccggctaacgaagcggaagagatgattgtcgatggtttggttggggaggatcttccttggatgactcctaaatcgcactttagctgattcctttttttggggctttctgtaattggttacattttagtttgagatttggaaatttgtaatcttttttatttgtctagttttggaaactaaagattataaacctcccggagtaatcagtatttcataactcaaataaatagatacatcaagtacattttgttatagtctaacaaa

SEQ ID NO: 24949 - DNA, 937 bp, Arabidopsis thaliana landsberg
atgaatccgaagtagacttccactacatttcatattctatagatattttttgttataaaactaagaaaatattagaataataagtaaataatttactaacatatatgttccatctatgctttgattcatcgatttatgtgttataataagcccctactgaacctagctaccgcctactagttttccgaacatcgtcttcatctattatgtataggattagttaactgtggctaaaattcaacgaaaataaaaataaaaatcacataaatcattctttttaaatatgaaaagttacatctcaaaattatactttagaaaaacaacatgccaaaatatcaaaatacttcaaactaaaagggaaaaacgtggcagatttctaacacaatccagagaacaatagattagtcttaaccctttgaaaaatattgggaatggacaacgacgattgcatctactgcaaacgggtcgggagagagaactgttgagatggactctaataaatatcctttccatgtctctaaaagtgtgaaaagtgagatgatctcgttctgtttcccgaggtttgatgtacatctctcccccatgtaaacaatctatgtgaagagtggtgcagcagtcattgcatttataaaatcgtttttccacattttgcatattcttattatatccaggcttctttacatcttctattttgcattcgcacacctcacaccagtctggttgatcatttgcctctttcccatcacagattgtgagaaaatgactgtcatgcttataccttgccttgtatgggaaggtagcacaacggagacatatagaataatcgcattccatgcaaattaactttgagttgtagcttttgtatttgcacacttgacatggtgtcttttcctctgtgtaccaaggtaggaataagggatgttggtggccttgatat

SEQ ID NO: 24950 - DNA, 1862 bp, Arabidopsis thaliana landsberg
tgtgatatgttcaagatatatggcatttatataatcgaattaacagtacaagactatttttagatacaaacttgattaaattgtggactttattgagaatccgtaaatgtgaaccaatataatttttcaaattttagtatttagggtttaggatttagcgatagtgtttctaaattttagagtcattcgtagagtttaggagtgtataatatcctatccgacaaaagtaatgtaccttaaaacataaatcttttgtattcatatagatttatatctcccatgtaacgtcatttctgtcagcgccgacattgtctcacgtaactttttatattaaatcatgttaaaaatgtagtgctgtcatcatttttattttcatattggtatattaaaccatgtgaaaatataacgccgttttttttttagcgtcgtcattgtgtcacacagaagtttaaataatatagtgggaataaattgttgataaagaaatcatagcattaaattagatatttaaaattaatgattattaatttaaatatatttaaatgaccaatctaagtctcatgctatttaaaatgtaattgatagtagtatatagaggtcttaaaatggataactcaactcaactcaactcaactcataattaaatgagtttagggttaaatgagttatgggttgacccataactcatttaatttgatgggttgagttgttaaatgggttaacccatttaagtaataatttaattaattattatcataaaataataataaataattatcattattaattcattatcactatcatcaaacttagaatatttacggattccacttttcacgggtttacgttttttggcgggaaaatcacgggtttacttttctgcggaaaaatcacgggtttgcgtttttggcgggaaaattacgggtttacgtttttggcggaaaaatcacgggtttacatttttggagggaaaattacaggtttacgtttttggtgggaaaatcatgggtttacgtttttggcgggaaaatcacgggtttacatttttggcgggaaaattacgggtttacgttttcggcgggaaaatcatgggtttacgtttttggcgaaaaaattacaggtttacgtttttggcgggaaaattatgggtttacgtttttggcgggaaaatcacgggtttacgtttttggcgggaaaatcacgcgtttatattttttggtggaaaatcacgggtttatgttttttggtggaaaatttacgagtttactttttctcaatttcatcgcttgtatgtttaagaaatttggaaaaatattaattttattaaattggtttagatgtgttagttaaacttaaattggcattggtttagagattttagttggtttaattcaattttacaaaatttgatgggttaattgggtaaaccattgaaaccattaaccattacaacccaactcattttatttatcaaaccaattgactcatcaaatcatttgacccatcaactcatttgagtcaaaattttcaactcgttacggttcattagttgagttgagttgagttgaccaatgaattttgacccattttgatacccctaattatagtatagcattataaactatggcgaatataaaactcaggatacatgttatagtagtatatcacacaatatcagtaagattataaatacatgcatattcacacaattaaaagtatatatatatatattaaaaataaaatcaaaagaagtctagactaatatattaataacaacttacgcttttttacaaattttcatttagttttgagttgaaagcatatgctcacactaaatcattgaacggaaaaatttttttttg

SEQ ID NO: 24951 - DNA, 657 bp, Arabidopsis thaliana landsberg
tacgctggtgttgattcgcagagacccgcttcaatatttggttatcattgatcaaactctgtagactctccttcatggacgcatattcaagctgcaatgaattgggagctctctatttgttatattatctaggcccaagaaaacctgagcattatcaatgtcatcaatttataccttcttcgaggcgttggtgttcttctttatgatactctctaaagcttctaagatcactgcaacacgtcgcctcatgtcatcaatgtttatcgcttttgtcatctcggatacaagtctatcaacccatttagctccatcgatcatatcctcatcgttccaactttccacagatccatcaaaaaagccagcttctgttctatcagaatccccattgaacaaaattgagcttaaactctcttttgcctcttcaaacacgtaattcttgttgctcataacctctctgacaaactaattcaagatcccaccaaaaaacaaagactacattagcaataaactcccaaagacttttgtagcaaaacataacagccaagatcaccaattttcataacacaagtcacaaagtaacaaagactaatgttgcatcaagtttctatgcaatcaatggctacacataactgtcgccaattttcagtttttcacaac

SEQ ID NO: 24952 - DNA, 941 bp, Arabidopsis thaliana landsberg
gggcgtgaggctaaacacccgggaccacttccttggttcttcatctcattgaagagatctacagcttcgctgagcttcccgcatttcccaaaatgtttgatcatcacagcgtatactcgagaacttacattgccgaagttttcttttagttccttaaatagctcattcgctgcttcatatcttttcgcctttccaagagcgtttatgaggctgcaatacgctgcaggacaaggtggaaaacctttctcatccatctcctcaagcagcaacagagctttctctactctattcgttttacaataaccatctataaggattgagtaagtgaattcactaggggaaacactgtctgctttcatcttatcaaaccaagagcttacttccgaaacaggtgcttttgactcaaacagagctttaatcacggtattgtatgagacaacagtgggtgtacatctccacattcccatctcactgaagacatttgtcaactcctccactcgacccactttgcctaaaatgttcatcagattgtttaagaacacaacatcaggagtcaatccatctctaagcatgtctttatataagccatatgcttcatctaccctcccagctttgccaagtccctttatcagttccgtgtacgtataaactgttggtgaacaacctgctcgtttcatctcctcgaaaagatctaaagctttctcaactttacccaccttaaagtaaattcccaacaacgtggtgtatattttctctgtaggctgcatacagttatccttcatttcatcaaacaaccttatcgcagaatcattacgacctagtttttcatacgaggatataagcgcagagtaagtaatcgtgtctggaaaacagtcaccttcgttacacatctcagtataaacctcatggactttctcgtgctgtccttcttgcatcaacat

SEQ ID NO: 24953 - DNA, 1708 bp, Arabidopsis thaliana landsberg
aactttcattgtggtaatactaaaagatagaaacgagaatatgaatatatgatgtaaactaataaaagcatgaaagtttctgtgaagaatctctacgacctactcaaaacacaaagtctaagaaaacttaacgagggtataaatctgtatgttggtttcttcaagccattccatgtattgtcgtgtggatttacttagaggctttctttacgtatgtctaatgtatgatccccattgccaccatcaaataatacaaaaccacgtataccaacacaaacaacaatgccgccacccacagatatactcgccctgcaatttcatcgtagaaaaaccagagtattaggttatggagaccctgttcttaaaatggaaagataataggagaaaccgtaaatgtacatacgtttttcacccttttgtttgatcacggttagccttgctcttgagtcaaaagatactgacactaagcacctgcaaaaccaaacccaaagtaacacttttgaatggtttcatcttttcttccttcagattcgtatctgtttgtttgtttggcatcattgaatcggtaaaggagtagagaaaaaaccttgaatcaggggagaaagtcagtgcggtgaccaaaccgagatgagctttcttgacgatttggttagtttgcatctttgtcgaatcaattattaaaacatctccttcgagggttcctctgcattaagaaaaaaacatgaaaacaaaatatagtatttctgtttggccccataagtgagaagaaagataaacttacactgcaagaagcttcccatcagctgagacattaaaggcagatatagagttgtttcttttaataagctttgaacttcttcttctccatgatgttgtatcccatgttataatactcccaccacgttctacacaaaacaaatcaaatctctcaattgttggctgagacaaaaagggttcttatgttcttgcactcgcgagaataaatatgagttaccagtgtttacaacaatgtaaagaacttcattgcctgaattgtctacagagaatctacaggaggcaaacatctcgtccttcattcaatattcaaactcatcagatccaatacaataatgttggaagtgtgtatgtaaagttgaaaagacactaagagccaattccaactgaccttctcttttgatagactggcaacagcagcagaagcattcacgtcccaaactcgacaaactggaccgccaagagatacaagaaattgaccactttcgctgcagacgaaaattatcattatcaggatatctgtttacaatcactgttcaaagatgattcctttgtcatccaagagaatgaaccacttttcggatagcaagtatttcccttatttgataagagaaagcaaacctgaaagtaaggcatttaactgaagaatgagcctgggactcattaagtaaagtattcatgctaggccatttaaaaaccctcaaagtcccatcctatactgcatcaaaacaaaatgcataagaaccactaaacgttttatgtctctgttattaaaaagagattgcatcaaagatcctttttttacctccgcaccagcagcaagaacagacccctccggattaaacgccagagccaactgttgtccaacatctcttaactctttaatcacttcctccgactcaccagcctgattatcctctcggctcataatgtc

SEQ ID NO: 24954 - DNA, 1203 bp, Arabidopsis thaliana landsberg
agcttatgaaagtaatgcatattggattgaattttgttgcttataactcacgtcgctgaattggttagaacttagaactgcagaacattaaaagaaaaaatgtgaataagtagtgttaccatgaagaataatctaaaagaatttctgtattcgaagtctatgaccaaattaaaaagttataacttagaagcattagttacatctttgttgaagagatgataataaaataagataatgctaactagagagattaggttttcgttaggataaaattggttaaccaccaaattaatatcccccttaattttgttctgactttcacttttcttctagactctgccaatgtgtatactattgtatatacatagaataaatttaccctagtattaaggtattagtatctatgaaatgctgtcatgcttataggcagcgtcactaaaaacgccatgtggcggagtgatgagccaggaacacggtgctaaacacgttaaagagtaatgagcaacatgttgtctatattcaaagattcgtgaaatgtttaagatcactgaatcttaatgtctgtttcacttctcattattattatttttttcgggtatcttataatccggatctgatgctcaagaacattgcctgttaatgatttagatgattattatatcacgtcttatattttgaatgtgaaagaaattgatatggttaaaccgagaagagacaacacaaaatcctatacagattagaaattggtgaagtaatctttacagactcacttaatcagatttactcgatataaagacaaatctttgacatgacactaaacaatctctaaaaatctatccaaatgcactgaacactctgttccaccacatagaacaactttcctcacgaacaaaactcacgaaacaatggaatgggtttatcagtgcttcttgattcgttcatgaggctaaaatatgggcttcttacggatggcccaaatgatataagaataaacaaaaaatagagataacggcccaaaataatagtagaaagagagaggagtactaatgacttattcaaatatttattagttgaatttggagtaacgaaaagaatttcacaaaggtgagatgatcccacatcttttattatgtatgatgagatgacaagtacatataaacacacgcacacacacaaaccaacatagcaacaggttaagagggt

SEQ ID NO: 24955 - DNA, 839 bp, Arabidopsis thaliana landsberg
attcatcaagaatgggtggttcttccagccgaaaatgccacaaatgaaacggcgaaatgtagttcagcaaggacaagataaactgaaaagagtgtttggggagacgcaagaaagggaggcggctagaggatttacaaactctgatctggggaattttaagaggcagaagactgatgattcccatatgcgtggtccatctgcaggcaagttgtcgaatcaaataggtgcaagtaggtccagtactcctttttatgctgccaatgaaaatactgaatcttccaacaccataggctctcgtcatccgtatgtacaagcattgttacgttctgatataaagaaagctcttatggacagaggccagtcagagatttttaagagacttcctatgatgatcgctaaaatggaagggaaggtgaacccaactgaaggggagaagaacagtacgaaggcaatgagtagcaaggcaagtgaggttgaaaggagcaagatgagtagcacggcgaatgaggttgaaaggtcagttgaggtaattccccatgattcagatgaagagaaggatgatgaagtgaaggaaatcgttgttccagattcagactttcacaactttgatcttgaccgatctgaaagtgcttttaaagacgatcaaatttgggctgcttatgacgatgctgatggaatgcctcggttttacgcccgcatccaaaaggtgatttctgtgaatccttttaagttgaaaatcagttggctcaattccaaaaccaccagtgaatttggtcccatagactggatgggtgctggttttgctaaatcatgtggggattttaggtgtgggagatatg

SEQ ID NO: 24956 - DNA, 1303 bp, Arabidopsis thaliana landsberg
gtctcctaatgccttttgtgacctcattggaacttttaccagtatcatgcagaagactgcgttccgttgtcaaatcaattttggctatgaagtagaaagaatgaatgttcagttcatgaagaggaagaaatcaaaatcctgtggaaaatcttcggtaaggtggaaacatgttagcggaaaaaatgcaatcagtttcgaggaagattattcggttgctgtaggaatagcatggcaaataaaggatttactcactaccgaagatgcacgtaaatctttactcgagtctgacattgaggagctgctcctttccttaaaagtcgtctcacagactagcattttgcaagccacttgttgcaaatacatggacgtgaatccagtactggcatatacttctctttctttgcacatggcccttcagaatctcaataaggatgctcagaagaatgatatgagaatcgctgaggcaaggactttttgctttccctcttggcaccttcctcttcacataatcagattactaattatcaggtttcccattttctagcaggatattatggaccaaacaatggatcacatcctagtctgtacagatgaactatttaaggcaggtgacattggaacgctaggcaccacatctccagaggctaaccttagcaagaaaccgactacaagtaacggcaaccaaccaaaacgaagacattcaaatgctggtgatgatggtgagtggagaggtgagttcattacaaatattaacccaacatattgatatcttcatgtgtaactctgctcgtggtaccagttcccgatgaggcattcaagttttctgacattgcttacatgcttcatgcagcttctgagggatcaaaggaaggaggtgtactgaacaaggtcaaaatgctaactgcgttttcaagtttttcgttgagtctacagagatgggtctagcttcccactttcaagcaagtatgtttaagtttacatctgcgtatataaagtatgtcatctccattttcaacgaccattcaaccggtaagttagaatttgaggccgcagatatgaaggccatgattctgtgtacaaaaagctccaccagttatgccggaaagttcataaacctagtgatgagacatgcaaccgaagtttcaggccctttctttgtttcatttggccatgcatattacttgcttgatctattgtccgtggttgatagtatcgttaagggtagcccgtctgcatcttataatgtgtgttagtctttaaaaactaaaattgtagatttggttcttgcactagtaccttgttt

SEQ ID NO: 24957 - DNA, 1241 bp, Arabidopsis thaliana landsberg
tgctaatccttagggctaggatcactaatttaagctaaatatacactaatcaagcaattaacatcaatttccgtttgcaatcacaagacttttttaactgttgaaaggcaatattcttaatttctaagcctaactaaccacctagcaccataatcatcaattttccattggctaaaaatgctaaacactcgctaagttctttcgggaatttcatccaatacatagagagtaaagatcggtatattaatattaaaccctaaacatcttaaaacaatcaacgtaacaatcaccataatctactaaatccaaaggcccaaaaaagactactcactaatagccataaaaatccaagaagttgtcattaatccttgaagactcatgttagaagaagagtagaagagagataagagatgtaatatgaagaaaaaacttacataaaacaaaaatcacaagaattcagacttgattagaaagtgaaattaataaaattaggcttaggtagcttcccccttctctctaattagctttagagtatttatagaacaaagaaaaactaaactgggttaacccataacagatggatcggatccggttttcaaattggggtcatggggaaaatcagcggaatgaattcagctggagtcttcagggtaggtcgcatcatggtggatacgtcgatgtagaaacctgatgcgtcttcttttccttctttttcacacttctctagtttttttttacttgattcacttcttatgattctatatgtgcttcatttgcttccaaaactccaaactccactcatgtacctacaaaagccaaatccaaatgcaatactatataccaaaatatgaatgtaaagcaaacaaaactaagaaaaattaaagaggctttaaaaataaccaaaaacactagacatcatcatgcatggctaaatatacaaatatttagtgtgtgaaacctgctatgaaaaaaatataaaaaagaaacctgctatgagctattttctgtaacagtataatacatttatacttagtattataagcaacatgcttttgatgattaatccatagatcatcatttaaataaaaatcatttacttttctttgttgttgataaactaatttaaattccgttgtacaaagaaaatggccatacagccgccagggtgttacactcagcctaactatttataatctttcacgaattaatatatgatttaccacaaagaccaatcaatctta

SEQ ID NO: 24958 - DNA, 1427 bp, Arabidopsis thaliana landsberg
tgccctttcattgcctggatcacacaattcacaggtggaggcagctttgggttctagcaattacgttgataacatcatgggcgacgcagacccaattaacagctactgtgtagctcttgttgttccatcacgaggagcattatagaaatgggcagaggaagctggagttaaacacagcgaattcgctgagctatgcgagaaaagtgaagcagtcaaggaggttcaacaatctcttaccaaggttagtattttcaatagctgtctcaggtttttcacaattacgtttggtaagtatatgtattacaaaatattattatcatttcaagccgggaaggcggcaaagcttgaaaagtttgagctttcagcaaagatcaagttgctgtcagagccgtggacaccggagtcgggattggtcactgctgctcttaagataaagagagaacaaataaagtccaagttcaaagatgaactcagcaagttatatgcctaaaaacttttcttggacttgtgacaaactccatatattttagtctgactttccacattttgttatatctacaataaacttgatgtttttctccttttgttaattcaatacctatatgattccacttccatcagctatagcctatagaagagagtaaatcattgtggtatacaaggagctgaagtattcgaaaagtagacgcggatcgaaaaactcctttaggtaaaacttctctgctttattaaccatatgaaatcctctgaaaacaaaaggtacaaatgaaatcctccttatgatccggaattaggttttgtattctagaatacgtttgtgacgttggaggtttatcatgttcataatgttatcattagcattcatgcataagaaatatgatggtcggtccttgtaaatcttcctggggcttctggacaatagtcttgtcatcgagcaaaagagaaagttgatgttgctattgatttgggtcagatgatgcagtatctttgggagctatcgtctctgacactgctggtcgtaggagtagatacaaagaaggtcccaagaatggaatcaccgataccggtaacagccaactgcctttatcaaacctgataaagaagcagtgcgtttagagaaacagaaaaaggtttgagtgagtaaacaccgcaaactagttgtacatagaactcaccattttcgggtggtcatgtcgttgtaaacccaaaacggagcatatgcagagagtaaacagaaatcaagacttgtaacatgaatctgcattttagtttaggtcaaatatgaggacagatacgaaaacattttcagggaaatgaggcttacaaatttgctctctcgaaagtactgataaaactccgttcaatcaccggcattaccgacaactgaataaagaattatacccagtcctgcaactagagtgacctga

SEQ ID NO: 24959 - DNA, 1198 bp, Arabidopsis thaliana landsberg
  unsure (1)..(1198): unsure at all n locations
tcgtctgtgtcagtttagtctttctcattaatattatcttattttattgtctaacagacaaggggacaaacagaaatgattttttgaacaccaaactctctctcttttggggtcaggagaacaatgacaacatgccaaatgattccctttgacttacgtgcaaagtcacaggcctataatggatcattggcttattgtcatttctgtcgagatacatgtttttggaacaatttatgtatctctcgtatttcatttcggctaagttattgagttgttgatgtatactcatgatggatgctctgaattgattaactttttgtnagcgtgattttaatcgaattgcttcactttttgttagctagatttgcgtcttgataatgtagaaaaccgattaaaccgaatgtcaaataccgaataaactgtgtccgaaccgaaccgaaccgaattattattcggttctattcggaataagatttaatttccgaataaaccggaaaaccgagaaaccgaacccgaattaaccgttcggacagaagtcgcaggcctactatatcacatctccttacgagactgatgataatcgctacattttatttttctctccctacttctctcaattgcaaaggatacaaggaaacaactaaattgaaatacaaagagcccatacctctaattattgttacgaatcccgatctcactggttaaaagccttgaatctgctttcaatctaagagtcactcaaacccaaaaattgtggagaaaaaatctcatagaaaaaaaaaacaaatgcgttaaagaaccctaatcaattgttttattattcatttttaaataaggaaaagatgacaccacagtaattaataatatcttccatatctctattttaagctatatataaatattcatttttgatattgcatagtatatagtattaattagatctctactcttcatagtcatcgatcaatacacataacattccctaataagttaatttagtggctacgtttgacggaaaaaaaaaaaagagaagaaggaaatcaggaatgatctgattcttcgacgaaaggggaagaggttgttgaattcaaaatctctctcttctttctggctctctcgcgtgagctaggtgcagattttttccagatctcaacattgaaattcaaactcaaagcttgagagggagagattttgagag

SEQ ID NO: 24960 - DNA, 848 bp, Arabidopsis thaliana landsberg
  unsure (1)..(848): unsure at all n locations
ggttgtcacacaattggaaatactagcacccacaaatgataagcaacattggcatctgtgtgagccatctcccttaaagggataacaacatcagcaacctatagcgggaaaaagagtacatataatttgttcagattaatgcagcttccaaagtgaataaaacaccaaagagccttaaataattcataactattttcgatttaacaggacaaacgaaaacaccataacgactcagcaatcacctgaagtttgcttgccgcgctaagaaattgtgaatgcttcataacaatgctatcaaacattgaagcaacttcttcaggtccctccggcataacaggtggttggtgatgtactccaggattttgtgaaggtaaaagtggtactaccctggcagaatttggtgctagagtaatgggcttctcctcgattaagatggctaggaggagatcaagaccctgtttgagccaaaagacatcactcatagcttcccaatcttggttttggataannnnnnnnnnnnnnnnnnnnnnnnnnnnnnnnnnnnnnnnnnnnnnnnnnnnnnnnnnnnnncttcgcatatcaggatcccttgcccgtaaaccaagcatggaatgtctctcaactttcagagagatctcttgtcggagtgccaacggatacctatcagtgaaacagatgatattgtctctctcataaaaagctttgaatcaacataagattaaaataagaacttactttgttgaatcggcacaaagtccatataaaagctggagatacaccttatcccactcatccaaagcaacagatgagaaatgctgcttatcaacctgtgaaagcttttgaagaaa

SEQ ID NO: 24961 - DNA, 674 bp, Arabidopsis thaliana landsberg
cacccgttttactgcacttgaagactagtagtcctgaagaacaagtcttgttggatcctgtatattaattatcctcctatcctcatcggacattaagctattccataaccactctacagaaacatctctaagaaagcttttccaaaaccagtatggagctggagctcgttgaggatatgctagaagaattctgtatccccaattttttagttcgcacagcgtacgagctaacccttccagttgctcagaaccgattatgagcattatagtagctacgtgtttagtttatatgggccattacgtgtggcccaaataattacttgtgttaggtttaaatcgaagaatatatttgattgggcttataattacttttacaattggcccagtccaagaatcagatggatctgaatccgacccgtaagaagatgtgagtaaaaatttcatccacttgcgtgtctctccctttcaaaggctcaaaatttaaatctctcattcttcttgtgcggcgtttctttttctccgtttgtccgtacgcgttttcttaccggtgacctgaaagtctcaaaaaatggcggcgtatagagctgacgatgattacgatttcctctacaaggtggtattaatcggtgattcccgcgtcggtaaattcaatctgctttctcgattcacgcgca

SEQ ID NO: 24962 - DNA, 9794 bp, Arabidopsis thaliana landsberg
acttatgggttgtggatgttacagagctgttgccgctttggaggccaaccatggaatgctactataaaaatgtcatgtaagtagcaggaaattctgcttatgcataccgcatgcttaagtctaattggtcactctagcaccatagatacttctaaagctaaagatgtcattgttgtttcctttttgtatattggatcgttttttttataatggtctttgttgcttcttaatagggatgttggtaagaaattgtttggcctagtggctttggcattgaatttagaggaaaactactttgaacaagtgggagctttcaatgatcaagcagcggttgttcgtctcttacgttattcaggtcttttaccaaatcttgtagcattttggggattgattagagacattttagcaactgttctaaaagaaaaatccactgctagtttctttactttactctttgtcacattattaaaggagaattaaattcatctggagaagaaacatgtggtgcctctgctcattcagattttggaatgataactcttcttgcaactgatggagttgcagggcttcaagtattcatctcataatctttttgaaactgaaaatgtcttcttttgttttcttctacttcttataacaatgtttacgtatactaaaaaggtttgtagagataaagataaagatctcaaaagtttgggaagatgtcgctggggttaaagggtaagttatataaacgctttaaaatatgctttttgattgacactatttgtaattaaggcctaaaacttatgagattttttttttggtaaatccacaggacttttgttgtcaacatcggcgaccttatggaaagatggactaatggtcttttccggtaccccaaaaaaaaaatattccttacttttagtttacaatttcatatataaggtggtattttgatttaagatcgtttcgtgattataagatcaacattgcatagagtggtatcagtgggaaaagaacgttattcggtacggtgcaaattatttcaattagtctctgttttactagttatcactttatcatcattattgtagtgtagtgacattaacttattgaactaattactttgaaggtggctgtatttgtcgatccagacccaaactgcgttgtagagtgcttggagagctgttgtagtgaaacatatcctcccaggtaagtaataactctcgttatttttgttgtctcatgttataaatttttgactgttttcatccatcatgctgggggtgatttgtgataactagaaagtttggtctatttattggaaaaacaaaaaaatgttggtttgtcaatttgttgcgtcaggtttccaccggtccgggcaagagattatttccacgagcgattcagtcaaacgctcgcctcgtactccggttccgactaaaatatatgagaagctccacattttcttaaataagacatgttcaaatgtttgagttttcacttttgcatggacatgatataactaattaactattataaaccaaaaggattaaaaacacttaaaaccgtatcatgtaagatgtatgtttcgattgataaatgtattcattgtagactatgatttggtatatattacttacaacaatatttagtggagaaaagacccgtttttctaaggtagaccttttcatatacggtatcatttattcttcgaaaatctttgtctgaacattcaatatttgtttttgcattatacacagttacaattatatttttaaggtttttaactgcggttgatagtacggataactgttcggttaaccatacagttaactaacgattttgatacgtttacgagtaatattcttttaatgaaactaatttgtttgttagttaatggttacaaatttttactgttttatatagttacgattgagaaacagtcccgttacaatcggaaatacggttattttggttatgccttaagctgacgaccaatgtgggcttaatctgtgatgtgagattgaatgagcccattagagcccaattctaaattggtccatatcagtcagaacgatcagagcaaattcaatttcgaaacagagtgactattacgagaagcgaaatggatacgtcgcttctacttccgatcatcgacctttcttcgccgggaaaaatttccactgctaaattgattcgtcaggttcttctcctgcttctactagtgtagaagcagtacttctcctgcttctactagtgatataggatttcagtgaattcaatttttccatttcactgttttttttcgccgatgggtaagtgacgatgatgatatgactagtacctgtagcatcaattgacgaagattggtttatcttttttttgaaaaatcgctctaaatggcgtttacattttgagtatctaattatggtctgtgttatctatttgaaggaggtctttgtgtatcagactatgtttgtttgagatatgtctctatgattgctgctgaaatgttttttttttgttatgtctgttaaggcatgtcttgaacatggattcttctatgtaaagaatcatggaatctcggaagaattaatggaaggggtttttaaggagagcaaaggcttctttaatctcccattagaggaaaagatgcctttactccgccgtgatttgctcggttatactccgttgtatgctgagaaacttgacccgtccttgagctccagaggtttgcatttttgcatatgtggcttgttttttgtttgctgagctagtctataaagttgatctttccttgttaggtgattccaaggaaagcttctattttggctctttggaaggtgttctagctcaacgttacccaaatcaatggccttctgaaggtaatttcttcctaactgtttcattaatctgttttaatttcaatctctcacggtcacggattatgtgtatgttaaaggtatcttgccatcatggaggcaaaccatggaaacttactacaagaatgtcctgtaagcagttgctctcttgtcgttcttcttcaaagtgaatctcaaactaaaacttcatacctatattctcagttgagaataggtttcaagtttatttcaacagttagattttaaaccttgatggtaggaattaatgtagtctattttagccaagtacatcggtagtacaaatgaacaattcttttcaggtcataaattgtaagtagattatgctgtttcatgagtatttcctctattttatttgcaacttccatattactttcctggatcaacttgctagttgtgtgtttgcattgctgctttaaggtccgtgggtagaaaattgcttggcttgattgccttagcattggatttagatgaggacttcttcgaaaaagttggagccttgaatgatcctacagcagttgttcgcctcttacgctatccaggtttctctatgtacatcaccttctggttggattgatattaaccttaatgaactttggtcagagttagatcttaacatatgtaatcagtggaacttaagccacattccgggagttcgagtcaggttttgatctctgcacttgttatgattataggtgaagtgatttcgtcagatgttgaaacgtatggtgcctcagctcactcagattatggaatggtcactcttcttttgactgatggagttccaggacttcaggtcaatatctctgaatttctcgtcataatcttcctttagtaaccttatgttcttacactgtctttgaactaaactcttaggtttgtagagacaaatcgaaacaaccacacatttgggaagatgtccctggaattaaagggtaagtctagcttttcttagctactagtttatgatgagaaatgattgttgaaatccggggacttgctctaaccgcagggcgtttatcgtcaacattggtgatatgatggagagatggaccaatggattgttccggtaaacttaaatcaacttacttaggcgtgattgcttttttttctgcgtttcttcacatttcctattttattgtaatgggtttaggtctacattgcatagagtgatgccggtgggaaaagaacgttactcggtagctttgactttttctttctttctaatttctatacaaattgataaagttttgggttatttaaaggaaaagatttttgtaggtggtgttcttcttagatcccaatccagattgtaatgtgaaatgcttggagagttgttgcagcgaaacttgtcccccaaggtatttcttcttgaatcttaatccaatttaatggtgtgagaggcacattacacgtttgctaaatcttttgatattcaagtgtaaaagaataaaaagttgagtccttttctcatcggtgcagattcccgcctatcctcgccggtgactatattaaggagcgtttcaggctaacatacgccacttcctagtctatgtttgttgttacgaaatgtaagaaaataataatgttcaaacttctacgtaccataatgtttaattagtggaaacttatggaacttgaaaatgattagtcagtcaaagtctcaaagatagacacgtttaaaagccgtggaacttgaatgggcgtttacgtgtttggaccatactcatacacgtggagaattttctgtggtttatagcgacattactgtttcaattcaaaagacaaacattttactttttacaagtataatacgattatatacaagtgtaattacttaactatactttgatggaaacacaaatcttaatcaacttttaccacacagttgacaagcaaatgcgtttgacggagacaaaaaaacaaaagggttaatatttataaaatgatattgaatatagatgcaactattcaaaactggaatgctaaaacattaatacatgcttgcatcacccaccaccgggctatgaatagttacaaaattagttatataattataaaattggtaatttatatattcaatattgtaatagtaaatcacaaaaattaacaattaacaagcatgattctcttctttaacgattttctttgtagaatcattgaatcatgcgatagtaattatagaaacaaatgataagcatgattctcttctttattgaatcattgaaaacatgcttttaccgatctatactataatcatcgatcggctcatattgttttgtttcaataatagaaaataagtactatgaaccatgagtcgataagtaaacatggttcttaaaaaaaaatgtaagaatctctatatctaccttttagagcgtgctgataacgtgttataaacagagaaagagatagaggaaatgagtgtgttattccattgagataaagggttctttatataggagtacaaggaaaagggtaaaaccctagaaacatctagatgatgggcttagatgatgggccttataatgggcatccatctttattcataacactccccctgatgaccattatagtatcataactcgtaaagtatttgaaatgctgcctcattaaaaaccttaccaggaaaacccaatgggaaaaaccatggttaagggaaaaagagtgcaacatacaattactcccccttatgagtatattcgtcgagatctttgagacggcgtaatccgatacgatagactaacttcttgaaagtagcagtaggtagcgccttggtgaataagtcagccagattatcattcgaacggatctgtagaactcgtacatcgccgctcttttgtagatcgtgtgtgtagaagaattttggtaggatgtgctttgttctatcgcctttgatgtatccgtctttgagttgtgcgatgcatgctgcattgtcttcgtacataattgttggagtctttttccctgcatatataccacagtcttcttgtatatggtgaactatggatcttagccatacacacttgcggctagcttcatgaattggtaaaatctctgcatgattagaagatgtggcagagaataaacagtatttgagaataagtctgccaaatcttctcttgaacaaatttctggataaagtacaacgccattcttctgctcatgaatcttttagatgattcatcttgaccatcttatttatttctctaaatatcattagtgtataatattcatttggatgattgatagaatttcttaatattcatcaagtgtattatttgcgtgttctttaatgtctcgttaaaaaccttgtcatagaaaaatcataaggaaaaagggtacatccacgcatatcattcaatctccccctcggaaacatcttcttcaggagatgattttcaatcaaatacaatatctcgttggaattaataaccataatcttaatgatcaaaattatatgattttcatatagacttataaatatcattatctagtgatattttatcatagattattgtcatcctattacttatgataactctgtaggagttttaatgattttcaaaacaaatattagtttgatcaatatattttgacaaactcaacgtaaatatacatttatatgattatatgtcatgttacatatttctttttattcgatcgagtagagttctagagaacataattctcatataattaatccttcagagattatatctttcaagaatttcatataaatgtcatatccagtgttccgtctcttattgccagactttagatacatttcttcataatacatccaccacaagagaatatatctcttcataatacatttcttatctttgtgaaaatctcattaatttcactattctttcacataaagactcatttattttccactggttttacacatcatgtgcatagactactagtccaaatatctctactagagattataactatatgtctatttcttcttttccatttttggctaatcattactttgtgtacacttttcaatagacattctttcatgatcctcctttttgtctataatatcaactgctcatagcatgcaaatatattacgacgtcgatttgcttttgattccattatattttgacatgacatagctagctagatctcttcattgtcaagtacttgaatgtttcatttgtcatgtttatgtctcttttatagatcattcactctcttcaagagatcatcaaaatatttatttcctcaatttggtcatttttaattgttgtgctccttcacttttacgaggatatttatatttggaaccaaggtctattacgcttcatgcgatcttaagactcaatagcagtttgaaattggtccttacaggacactcattatattctggagcatttaatttacaactggtataagtgacttcatcactttatttaggtcagcaaatgcgtctggcaattacaacgctaaattctataattgaattatcttttggactcttaatatacattctttactccgaggatcattgataattcatttctatttatctttttcaccagctgtatacattctcccccttatgttggaatagctgactatataatatgatagtcttcaaaacgagcggtatataaatccttctaggatggcttagttatcattcatatccaacatgtattcttatcctcctttgaggattcatctttacgtgctgtggtggagcacttttcacattcaaagcttttagatgaaaactatttggtttctgacccaaaaccaataataatggggaaaactattaattattcattggcttgatgcgtatcgatgttactaaaccattttgtgtatgaacatgaatttcaaaatgttaaacacttatcccaacggatatccaataatggttattataaataaacactgaaatactcttgtactttaatcaagaaagtaatctcgcaaactctatgttgcgggtttataacaaggataaatatgaccttcttgtcgatgcaacaatcgattcaatgcgtccattgaatcgatgcatcttttataaccattaggtatctaaatgtcatatagtgggtgatcaacccataatcatctccttgtatatacttacgaatagataaagtccaaattacttacactggtaaaaatcacattatcatattgctttctgagcaagtaacatttgataaatcattagggagaatcttctggtttttcacctaatgaccacataattctcaatactttcacatcatcattaaaccaggatgaccaatccggttaagccaaatatactcttgaaacttctaatggtactatttttttatgaagtgagaaaacttctgatttacttttcgttgcttatgagttactcccttaatgagatcttataatcaaaattacttccatgtattttaataatcaatcatatgttaatatagcaataaacgagacaataattgaaattttatattctaatataaacgatattaaatttaatttgactagctatgtaagatcttatattcacttcagaatatgagtattacttatcatcaataactcatatattttcttagcctttgaaaaacactcgattttagttcataatagttcttaaatttctttcaaaatattgtgtgtacaggacaacgatacttgcgtaaaagtttaagcgtctgttttaccatctccgcatcagagatattctcttaacaatatgagttatattcacaaagagacttcaagtcttgaagttttagtaataactaattataacttattttatctaataacacattcatataagaattgctttatacaacttttagatctttagtagtcaaagattgaacataatcttctggatatgtcacttattatccatgtgagattcattacttctcctcctcgagatgatgaaacttcaagttcatccatctcgtattgaattccactctagaatcataatgtatttatatctcatcatattaactttgagatttggagaactataccgcatcgatgattttaattttgtattcccatagaaaacaatgtatatgctcttctagagtcttttaataagattttatactacttgatatactagattatttcatcgttaaaagttagaaattttacttatttttaccatatttattttctcaacttttggtgataatttaagttcttgaaaaaactttgaccatcaaaaatatgatatcttcttaagatacattaaactagtcattcatgaaaatttctataagtgattatacctttaaattaagttatttatcaatcaatttatttcataaaataatcaagtattatatactaatacaattttaatgcaatattgtaaaaccaatcagaataaaactattttgtgcaaaatctggattttacatatatcttgacaaaacttttatttagggtaatatgaattcgtgcaaaatttgggtaaaatgatttcgtgcaaaattagggcaaaaccatgaacattttttttttttttttttttagaaaccacaaagatttagtgaaaagaatcttataaaaagaaaaattatcttgcaacatttttagtaaaaataataataacacaatcaaatatataaaaatcttataaaaagatttagataataataacacaaagatttagatatatggaatcttataaaaaaaaaaattatcttgcaacatttttagtaaaaataataataacacaatcaaatatatggaaatcaaatatttaatatggaaaagtcaatatctaaaagtgataagatatgtataatgttttaatcaaaggagttaaataagggatatcatatcaatcataaatagattttagacaatataatatttataaaatgatattgaata

SEQ ID NO: 24963 - DNA, 1426 bp, Arabidopsis thaliana landsberg
ttgcatctattaggatattagctgtaatttacctgtttatatagaaaaatataatacattttctcagtcaacaattttttcctttcctttttttgggaaaattagtcagcaataatcataatatgtgtcatacatctgtgaacacgtgtacgaattaagagtttgattatcaatgtaaaatcttcttatttgtatttatattcacatgtgaagtattctcattgactttttctaaataaaactgctttatcagttatctatatatatatttagagaataatatttaatatgatattagcaatttttcagtaattaatgaaaagagtcagagttgttagcattccaattgaattgttatatatggaattggttgcatttcactttaagaaatttaattaattaattcatatttgcacatattttatttaattaatattttattaaatatcatttctaaattataacgccaaaatctatttacccgtgtcgaacggtattaattaggattttttaccgtttttagtataagttatattaagaataattaaaacatattaaaaaagttattggaaaaatatattatacctcttgttgatacaattcctaatttttaatctaattaattatttattttaaaaaatgaattaaaaatacaaaacgttatttttttgcaagtgttaaaacgatacttattgtgcaatagatgaaatacaatgattgtgattttcgtatatgaacaatagttaaagaagttatgactagaagaattttgaaatttaatacctactgatttttgtaattacaatgaggtatcgattatttcaaacgaattttttttttaatactatgtattatgagacagtgcaactataaattcggtggtgacaagaaaaataaccctgacatgccacatttaaattattttcaaaaattgtatagttagttagattagttttaaacaaatcaacaagtatgttataaaatcatgtgatttaattaattttagtaatattttctagtgtgctctcatggttgtacgtaagctagtattcgaggttaaaaacaaaaaggtagaagaaaaataatgaagtctttggtagtttaaagacaaaaattatgagttaaatggagagaaagagagaggttttgtcttgaagccattagagagacacgagaaagactctgaggtggccccctgaccacacccgcatgtgcccacatttcaccgttttacaatgacacccaaaccgtaaacccaaaccttctttttaaaaatatttaaattgatattatttttttaaaaaaatgtttttttatacctcaaaaaaataaaagaaaaaaaaaaaaaacttaaccattgtataaattaatttactaatcgattttactatgcttctaaaattttactactaataataataaaaag

SEQ ID NO: 24964 - DNA, 1281 bp, Arabidopsis thaliana landsberg
  unsure (1)..(1281): unsure at all n locations
taaaaaatataagaaaaaaattggtgaacaagtataagatatctttaaaaatcttttaatcgaatcaaatatccatagaaattttatctttagcaacaatttaatcttaggctttagcacaaacacttaactccttatttcacccctcttcacctaattttgtaaaactgaaaaaaatagattattgatttcatcaaaatataaacatatagttttgtaaaatattaatttcatttattaattttatctttaatgacaacttaatccttccttataaaaccttagcaaaagcacttaactcccttatttcacctctctcacctaattttgtaaaactgaagaaaaacagattgttaatctcttcaaaatataaacatagttttgccataaacgaaaggttggttcttctcagttgattagaccgatagattccctttttgtagttattttatttagataaattatattattcgattccttatgatgtcaactaaaaattaaagaagaattgctgtgctgattgaataacttaatactgtactacattggttgttttgataagagattttcaattactactgattattcaattaagtgacatcgttcaagaaaaccctaactaaatgctaatatatataaaatcatttcatttaaaaaatctcctaaaaacacgaaactgccctaaatcctggtaaccttatttaacttttactccgttaaaatagaaaactttacgttatataaatctttatttctgttatctcataaacgttagtttactaaatatatttaaactaatgctattgaatgtaagaatattcatacgacagacacaactcaacttatcaattcttttttgggtccgtctcttgcgtgactcaagaatcaaacaacacaagtgtcaaagccaccaagaacacaaatcgtcgaaaccccaaagaaaaaagtctcagcaaaatccttctttcatcgtctttcgattgctccaaaaaaatggaagacattttattcgatgagattctctgcgagatatttacaagactgcaatcagattgttcttcttcttgctcatcatcttcgctaccttctgtcnnnnnnnnnnnnnnnnnnnnaaaacgatggcttcggctctacagagcatcaaagacttccatgtccttacaattcaggcctcacgacacctctgtaattacccttttgccctctatcctcaacaaccatccttgtctctctatcctctatatctatcgcggcgttaccataggaactaccccaagtcgt

SEQ ID NO: 24965 - DNA, 1175 bp, Arabidopsis thaliana landsberg
  unsure (1)..(1175): unsure at all n locations
ttgcttactgattgtgattcatatctttataaaaacactctataaatcacttatctgtgcgttttgtaggaggcttcggtgcatcatcactgttcaaaacctgactctcttgtggggaagatccaaatgatgtaccggtaggtaatcaagcttatctaaattttgggtcaactgttgtagattgtatggagtgtttacagtctaatgttgtttgtgcagagcctgctcagaactctgtgaaatacttgacctggcttaggactgaatcttcacgatcctcatcttctcggaatcctctcggaggaatgaattctgatgatgtggaagagctcaatagtaatctctttgaaaacatttgcatgattgctggaagccatgcctcaacgctagacagattgtatgcatgggagcggaagctctatgatgaagttaaggtacttatagtgcattgaatangttttttaagaaaatcaagaaattgcagtaaaagtatgtggatttgttttcttcacttttttatcggtttaaggggagtcagactgtgccgagaggagtatgacgaaaagggcagaattttgagagaacttgaatcaaaaggtaaaggttcacaaagaatagacaagacacgtgcagttgtgaaagaccttcactccagaatcagagtggcgattcataggatcgactcaatatcaagacggattgaagaactccgtgacaatgagctccagcctcaacttgaagaactcattgaagggtatgtgttaagtcactctctccagtatactcaattcgtttgatttcaaatttgacctgaaccattatatatatcatttcttggatgtgaataggttgagtcgtatgtgggaagtaatgttggaatgccacaaggttcagtttcagttaatcaaagcgtgttacagaggcggaaacattaaactcaacatgcaatcagagttgcacagacaagtaacatctcaccttgaagatgagctctgcgcattggcctcaagctttacaaaatggatcacaggccagaaatcgtatattcaagcgataaacgagtggctggtgaaatgtgtcgccttaccacaacgatccaaacgaaaaaggcgagcaccacaaccgtctttgagaaactatgggccccccatttatgcaacctgtggaataaggct

SEQ ID NO: 24966 - DNA, 535 bp, Arabidopsis thaliana landsberg
ccctggatcaacggtctgttgcacctttaacggcacagtcctttctgtaacattcttgagccactccttttgcataagaccttgtgtgatctctgacttgaaaagccccggtgcgatcgagttcactctgatcttatgaacacctaactcaattgccatcatccttgacatggtgtcaacaccgcctttggaacaagcataagcaagtccaccgggcaacataccccggatcccggcgatcgatgagatgtttatcaccgagccacctcgtttagcgtcacgcattaacatacaaacatgtttggatactaaccaaggacccttttaagttggtcttgaagacgttgtcccattcgtcctctgacaaatccaaactcgacttgacattgcctctgattccagcattgttgatcaatgcatcgatctttccaaagatgtcccaagcttccctgaccgctttttgaatggtggctgcgtctgatgaaacgtctaactcaagagctccggcttgaattccagttgacctggacctgtt

SEQ ID NO: 24967 - DNA, 635 bp, Arabidopsis thaliana landsberg
  unsure (1)..(635): unsure at all n locations
aaagggaaagatggatatggactcttgcgtcagaaaatactatgtgagaaatgaaatttcacatcctccaatatttttctaatgttttttacatgatgtttttcatttatttttgtagagctttggcttctgatgtttccagttggacaaaaatggaaatgcttttagaagcaaatggaacagataatggtgcaagacttcaatttacaactacaaaaaaaggttcaatttggtttgaccaagtctcagccatacctatggatacttacaaggttttgtttacttcattgagacgatggcttatagagtctagcagcattttcaaagcagagtaattttgttttttcttgatttggtcacagggacatggtttcagaaatgaccttttccaaatgatggtcgatctaaaaccgcggtttatccgattcccgggtaatttctagagcgcaaaatagcatttcacttggtaaaatatatatgaataaaagaatgagaaatgctaaaagaattagcaatgttatgggagttaggtggttgctctgtggagggtgattggttaggcaatgcattccgctggaaaagaaaccgtggagcttgggaagagagacctgcncattatggtgatgtttggaagt

SEQ ID NO: 24968 - DNA, 1032 bp, Arabidopsis thaliana landsberg
  unsure (1)..(1032): unsure at all n locations
aatgttgtagggtcgaataaaattgtcaaaagtccggtccaaattattttgtccctcactaatcgtggctaccatgaattgatacaactttattccattttcttcttaattagttttacaagtatatcattatcataaataatagctggctccgttcactgtgttcgttgagtcttattttgtcttctttccttttggtttttcattcttttgtgggttgggtaaccataatttgacatgatgttttaaattagcatatcatttatttgtaatatacataaagtttttaactcttctgtatataaatgtatgcacaaaatatctaacgatgtgtataagttttgtatagattggagtttcatttgtttgaatcatagttttgaataatgtatagtattagnnnnnnnnnnnnnnnnnnnnnnatcataatgtggcaggtcataattatttgaaacaggttatcgtgcatgcttaaaatttataaagaaaaacagtgactattttctaaagctattcacaactcatcaggagtttgatactcatcctaagattgctactgaaccacacaattaaagtgagcgtgataattgtcgtgtcaaacaacttacaatttctcccaatctttttactccattaatcgatgttcgatcatccgataatcttttgaatccctgagcagatcataacaaaaacagagccgtgcgtgaacacaagcaaaccataccaacagtcgagaacatgaaatatttataccgcgattaattcttcacgtgcttcttctatctcgtcattgcttagacgttcttttatatatgacgaggatcgtgtttctaatatctcctgtagctttattattcaattctttcattttcttattcacctcctcatcatctccatcatcagcttgcttcatcattttttttagttttacttggcatgtaccagtaaagttctagttccaagattggccacacaaagttttaactaaagcaagcctgacaagtaatcacccctaaaagacggaaacgacac

SEQ ID NO: 24969 - DNA, 657 bp, Arabidopsis thaliana landsberg
gtccatcttcttcctttggcttgcaaacatcctgctcacagctattattgctccaactgcattgttaattttgttcttccaagaaaagttgcacataaggaatcaactttcgcataaagtctctttgagagattaaaaactgccctccaaaagtttaccatgccatatatcactgaagagataagcttaatgttcccagcaaatgatagaaacctcactgtccatatatgtagcttgttggttatcttctcaataaaaggctgaagggttgtatagcatattctggcctggtttaaaggcagccccagataccgagtaggaaatattccaagctttgtcccttgcaaatcacttagaacaacaacttgaatgtctgaataactaccaaagaagagttctaactttgcttaatttacatccaacccacttagttctttgaagtgtttcatgacttcagttatactagtcagagagtgctttgcttcatcggagaaaatcagcagagcatcagcaaatagcaaatgagttactcttggtgagtcacaaagtgggtgcaatctgaactttccttcatatgtagcttggctgaggagattggagagcactttcatgactataatgaagagatatggagaaattgggtcaccttgacgtagt

SEQ ID NO: 24970 - DNA, 668 bp, Arabidopsis thaliana landsberg
caaacaaaggccagtggaatggtttcttctgtttgtattcttcgtctttcccaaaaaaaaaaaagaattcaactttggcgtaaccaatccatgaacccgaaaaaaaaaaatcaacaaaacaggtaaaattgaaagaaccatcttcaaagaacctaatgaatatttttaccaacaagctcccctatcattctgtatatacataataacaaatgtaaatgatatttttttgcttttctggttatcaagattctgagtctgagtcacttgaactgctgtaccttgaactctctgacatgaaatttggaggcagaattggaaatctaactgcgttcctttgcggtgcagcagcaacgctcggagtttctgctggtgaacttgatgctcctgctactgttgttgcaggtcgttgttgctgttgtttccgttgattccttgcgatctcactacatgcattatcaaccatccctaagaaatcacggattataacaaacagttgaaacaggttcctctctttcaatgctccagcttggtaatagtttgtagttttcttcactaactccattatcctaagctgttcttccgtaataactttagttcttcctccgcagattcaaagaaagatctcagctttgttaaacacccaatttccttcccttggctttggtcta

SEQ ID NO: 24971 - DNA, 1408 bp, Arabidopsis thaliana landsberg
  unsure (1)..(1408): unsure at all n locations
tcgaagaaaatgaaaatcaaaagttaaaggaaaaaagggaaattgcatagtcgtatattttcaatgaatacttagatagaaaatagagtttcaatatgatacagcaaaagaactttcgatctgctattttgtaggtaaattaaaaagaaataactagaacatagttggaagcagcaaaatgacaacagttatgcattagagtcattagacttaacacagcaacagcacgtgcgacgtatataagagccatacaagtaccaaacaaggattacgatgaggacgcccannnnnnnnnnnnnnnnnnctgacaaataattctcaactatttttatcatcttcgatcttcaccacaccaccaatctctaatccttctaaacttgtttttcttcttcttattattctcgtatacagttcaatacttatatacatgtattgtggtcactaactttacatttatttattttggtgaaaactaacttaacatttatttattttggtgaaaactaacttaacatttttgtaaatacaacaaccccagttggtaagtttacattttgttattaataaagatgaactaaaaattggaaatgtttacatttatggtgttttattgcttctttgccatatcgtaactttctaaaatactccagaaactgaattgtgatatttactactagtaataatatacagtatttgttagatatgcattccattattcgttgtgattatttatgtaattataataatgttaatgtaatttgcatgactaatatggaccggtggttgcttgtttcatactttcatatattgatggtttacataaaaagaagatatcaatgatatctatatatctattactaaccatatatgtggatgtgatatattcttttatatatgcactaaatttctttttcctcaaaagatgacttattttagttatttgaattcaaagttaaggaatgaggaaggaaaatagaaaataagcagacaatctacatattattattattttttttgtcgtcaatctacaaacttctttgcatacttttcatatatatatatatatatattttttttttaaaacgtaatagtataggatgtatattaaatgatatgaatagtggaatgattcagtaaccaaaacaatatagctaaagaaagtgtatttattaacatatataaaaagttggttttagggtaagactaatgcctcgaatttactagttgtaacattttattctttttaaagagaatatgtgtctcgaatttactaggcgggtgtaattggttgtagaaaaacgttattgttaaagatggctttgatcagtgcacagtgcaaacaagtgacgtacgtaaaatagatgtaaacaataccaaattaaacataagtcgttatttgaaaagaaac

SEQ ID NO: 24972 - DNA, 550 bp, Arabidopsis thaliana landsberg
ctcgtgaatggcagagaagctatggtctggacttgagaactttgtttttgattggctaatcttcgcttacaggtagtgatttcagaatctggaacggttgaattttatatgattcgctaaacacttcttttatcctttggcattcctttttcgagttgtaaaaacctgaatttctaagttctgggtgcttctccgttacagggttgttagccaagtggaatacccatcgctggtcgatttgaggggtctccttcttgacttggttgctcaactcctgggtgcactgtcccgtattaggtaattcattttgtaagttatcaatcctccaagcatgctaaagtataaatgaaaagaatatgtggacttccattcacaagtttagttggcagaaaagaatttgtgaaagtgatgatctattttaagccacaaccactcttatccatttatttaattttcactaacagattcagctctgtcacggagaggtttttcatggaactcaatactcgcccgattgatacaagcgttgcaagaagtgaaactctcagca

SEQ ID NO: 24973 - DNA, 587 bp, Arabidopsis thaliana landsberg
tctctccttgtccccaccattttcttccggttccatatctgtgatacaacaaagtgttaaacccgatcgatcacaccgagttgaaggatagtagacagacagagagaatctgcaccttgaaaagaagaggaaagagtgtgataagtgaggaaacacgtggataagtctttaatggttcttcccattggtatatggtaaatcgggtaccatgctactgacatccaactagctggagaaagatcaacgcttctcaacgacatcaatcccgggtatctttgagccaattcattgatctggaatcatatcaaaacatcatttgtgatgcttattcgatcggatcaggtgaactaacgcaaggctacataacaaggtttatattatgtaccttatccatcagaggaactctggtataaggagctgatctctcaaagtattggagataaagataacccaaacgatcacttggatgcaagagcgtgttgttctcaagtccttcctcagagacactctcatcgctacctgaatcgctaaacggatctctaccctcacattccccatcttcagactcttccctaatcaacccaaca

SEQ ID NO: 24974 - DNA, 996 bp, Arabidopsis thaliana landsberg
gcttcactctcatggcaaaagcatatgttcaaggagacagccaaatgatactatctaaccgttatgaagctctcatggctctttgttgatgacaagattaacagctgtaaaaagagaaaccctataatgagtagtctatataaagtacctcagttgtaatcgaaattcactatcagataaagatcaataagaaaagcttttctacttacctttcccttatcccagttcttcttcaaaaaagacgatgatgacaacgattcccaatcttccagacgaattggaatcggaaatactctctagggttccggcgaagtctctagcgaaatggaagactatttgcaaacgatggtacgctttgttcagagatccgagattcgtgaagaagaacttgtgtaaatcagcgagggaagtgatgttactgatgaatgatagggttcactcaattagcgtcaatcgccatggaattcacgagggcgttgatccatccatggagttttcaggttaactcatccggctaagcgattcgaaagacgtcgtagtatctaaaatctatcagtgcgagggtttggtgttatgcaccacatatgggaacaatagacttgttgtttggaacccatgtacgggtcaaagaaggtggaacttgttaccggtataatgatggctatgctcttggatacgttaacagaaaatcttcgtgtagctgagtttgaaatctttgattttggatctgattgtggaagggttattgatgatgctatcacttggggaatattctctgctggtgtgtctttcaatggtaatacttactggattggtggagagaaagaaactggttttttcttgatggattttgatttcacaacagagaggtttgggcgttttcctcttccgtatcagagttatgattatgaagatatcgcggttctaacggtagttaaggaagaaaaactctccttgatgaatcagaatattcatagaaattcttcagagataaga

SEQ ID NO: 24975 - DNA, 1762 bp, Arabidopsis thaliana landsberg
tgggtggcaaaaacagaatcgcgtggacttcgagagataatagccctttagttcctgcaagtttgatatatatatatatatatatatatatatatatatatgtatatatatataaaccatagatgagtacaacaagacacagagaagacactgaatgtagaaaaatcatgagatctcaactttgcaggaatataaacaatatataaatcacacatttggttaatctgatcaaaacctgctgaatttttcggtaaaaatcggcattgtccactataacaatgaaaacgcgagcaacaacactataacactgaaaagagaattcatgtacacaacagacaacactaccaccagagatgcctaatgtgaaaaacatatcagatatacgattaagagtctttgacatagataaaacttgcaagaataattggatcaatacttacatcttactcatgtacacaatgccttatttatggatcctgcgaatagaatataaagatttttcaaattttgattctacaaatggtaactaacacatgtaagcgttaagtgcctttaaccgtgctttattttaagtcttacaagttcaatataaaaactaaaagagtattagtcacgaattcattgatgttaggccaaacattataactatatgatattgtacgtgatattgaacattcactacaacaattcaaacacaacgagtaacactataatatttcaaactcagggagagaagtcaaacctgagaaagatcacgtacacttactccattttcttggtcttgtgaaactaaaaaaacagataaatagttataaatgactatgtgatctaaggttgtaatcaattaacgaactaaaaactccatcaaggaaaaatattacgaaaatcataccttgttttggaaggcgaaagagacacttacctgattaaaagagggaaagatacagtctgcacgttggactttttaatgcagaatattgtaagctagaacaaaatgtcccactgaatatcatatctcagtgagattcgtgatgacttacctttggtgccttatctctctctccctttctcgccttgctcgagcctcgacccatcaagcgttgcacaatgatgtgccttcgctaacaggaagagtttcaagagctatgcaaagaggattaacaaaagatgaagttttctttatagcagaatattgaattttaatgctgcccagctccagcaacatatcttccaattgtccatcaatttgcagttctccatatgagcagatcattgaatttatccccatcaatatgcagatcattgagtttttaagcagatcattgaatttagatcacgctgcccagccagcaatatatataactcttactgtttgacaagtcttacagtgtttatcacacagcttgcccaatctccattatctataaaccttttcaaaggcaatctaagcagaatatcgaatttttatcatgatgtcccactaacactacaaggcatatgcagacacttgaatttctctgtcccagcccagtaaatatgcagaataatgaatttttttcgtctcagaacatcaatatgcagaagatagaatattgctccctcatgttggcccagtccaacaagttatgaacattcctcagcaatatataaaactgtttcacaagtcttacagtgttaaaaacaacttgcttgatttttcgtgttgcccagccagcattattgaatatcatatctcagtgagatgtataatgaagtgacttat

SEQ ID NO: 24976 - DNA, 1659 bp, Arabidopsis thaliana landsberg
aattgaaataactaccaaactttttatatatatttgcaatcatatacaagaaacttatgttatgtgcattttatttttatataaagatgagcgtaaggcatgtgagccagatggatgacgggagggcccaacagcccacaactttttttctttttttttagtaatcaaaatatcgcatcgtactgtttttttagcattgaaagtcttttccttatcttgaagttacatactttaagttcactactataaatagaaacttcttcccctcgttgtctatcaagtcatttactttttaaaaaaatttacctaaacaaattgataagttccaaacataaataagaagacatgggtttaatgaggtcgatgcttccaaatgcaaagcaaatcttcaaatcacaatctatgaggaacaagaacggatcatcctcaccatcaacaacaacaacaacttcagggcttgttccgaaaggtcacgtagcggtttacgttggagaacaaatggagaagaagaggtttgtggttccaatatcatacttgaaccatcctttgttcagagaatttcttaatcgcgctgaggaagaatgcggatttcatcactctatgggtggcttgacgataccttgtcgagaagagtcgtttctttatctcattacttctcatcagctgcattgaggaacgcattaagtgatgtaatagtcttgagggatttaattaagctgtttttctttcctcttttaagaggagaattatagggaagttacttatgtgtgtatatggtgacacttgttcagagcttaagttgtattttgaaataagtttttttttttttttttaaataagatttgaaaagctagttgagctaaaatttatattcaaatcattaaaagcttttaacttttagtcttttacagtaaaaatgggggaaaataaacgaaactttaaatgcggtaaaaaaaccacttattatatatatctaatggttgaaaaatccatcttccatagatgagaatttttttgaaattatcacacagtaaatcatcatttgatgatctcctgcaacatgtgacatgcctagacgttattttactatctattacattagcgtttagaaaagcatcatataataaaaacagaaaattttcacataatggaaatctcaattataagttttcatttgttttgtattttatatacccagctctgacttacatcataaatatagtatctcaaaaaaaaaaaaaaggactttttcaaggaattgaaagtattttaaaggatggtggatcacatgcactctgaagaaactaaaatgggttgtaagtgaataagtgattaataacattagtatgatctatatatgttcttcaaatgcataaatcatatttattgaaaatgattgaaacagtactgcacaattttatcatagtgagctttgtcacaataaatgaaataaatcatatccaaattattgcatatttagattgtcaagctcatgttactctccgttattaggaagagataattgtgatcacaataatggaaatgaagcggagaaaaaaataaataatggaaatgaaacacgtgaccatttttcaataacaactgaaatttcttagaataagcgtaattgcactaatttatatatgcgtgcgaataata

SEQ ID NO: 24977 - DNA, 818 bp, Arabidopsis thaliana landsberg
  unsure (1)..(818): unsure at all n locations
ttggcatatacccctgttgtttcgtttgttctctcaggctctttcatagctttctcaccgtagattgatctgatgtaacacaatcactggctcatttaagaaacatgtcggactaaatgctttgagaaacaaaaatgcaaagaagaaaaggatcataataaagcctactctgcataactttgacgtccagcttcatcaattggtggtggagttataagcacaattagcattgtaggtgaacatttctacaaaacagagtcattagtcttnnnnnnnnnnnnnnnnnnnnnnnnnnnnnnnnnnnnnnnnnnnnnnnnnaaagaagcatatcaaaaccttgaaatgctgaacaatctttctgacattatctgtgtactcttccaccggcacatgttgtctatcactggttcttcctttgagagctgcatcgtttgcaccgaagaatatcgtcgtatcaacaggaggagacgaagagccctaggcaaaaagacagagtagaacacatactgagataggcacaccaaaacaacacgcactacaagaagagttctcatgatatatgcacatgtaattgccttttaccatctcaaaattcaaatctaaatctttcgtacttcaaccaatccatgacaatgtcataaaaccaacacatgctagaatcatatcaaaaccattcagaactgaaccataacaagcataagcaaaacaaaaaatgatgcacaagagacaataactcaagatctatatccacgcagatcatacacacaatcacaacagctgatgaacaaaatcatgccactgactaccaaaattcgttc

SEQ ID NO: 24978 - DNA, 648 bp, Arabidopsis thaliana landsberg
tatgctcgatttgatatcatgagtggaaattattttaaaaaataaaataaaaagagagaaagaaagagacaaagaggtagtttcatgattaagagggagagaaagaggaattgaatagaggctacttaactcatgatgctcatatgcctgcaatgtgtctgcttgttactataattggaagttacttgagaccaatgttattgtggtatgggaactctgtgttgcattaatattttgtgtcaaaatcttgcagggagataacttgccatttcattttcatcatattccatctctggctccacaaatctcttcattatatatatttgaacatctattatatacacacaagatagcctaaaaatatgaacatgtgtttagttttttgatatggagagattgtagtgaatagtgatggagggccaaaagaaaccaaaactattactaattgattttgacattgattagaagaaactgtaaaggaaagaaacaaggcttgtgtatgcattaaggacatagacaatgacgtccctgatgtcttcagagttacggcagcatatatccatagctaagaaaaaaaacatattactttataactaagtaatataccagtgtcgctaacaatcgtatgccacatctagacaagtgtca

SEQ ID NO: 24979 - DNA, 743 bp, Arabidopsis thaliana landsberg
tgctaaatccacttcttctttctactgttttgatttctcgttttcgtgatcgattctactctagattttgaaattaagtcttgtattcagtagggttcagcaaaattcaccctcgtgattccaatttcactgttccgcttttgatccagggtttttcaattcaatgagctgatttgatagttagtgtgaagctttgttttgattagttttattattaggttgacttctcaacgaatttgtactcaatttgagaattttatctaatagggtttgatgtttaaccttgcgtgccaatggcattaatatagatcaaatttatacaatttttcggcaggagtgtgattgtctttatgctattgagcttatgcaattgaataataactatgattgtgacaatggaaactcatggtttatcaacatcttcaggttcgtgggatttgtgtgtgtaatgataagaatatagatacttcatcaagagataggaccataagggtttggtcactggatccatctgataagcgcaagtatacctccgagaaaattctgctgggtcatactagctttgttgggccccctgcatgggtcccccccactgatgaaaatcccctaaagaaagacgtgtctctgggagtatgaacactttcgtttttgtttggaatctgatgaatggagagaatattcagacattgaagggacaacagatgcaagtcactggtgtcgctattgataatgaggacatagtt

SEQ ID NO: 24980 - DNA, 1189 bp, Arabidopsis thaliana landsberg
aaacctcgtagacctaataatccaaccctaaaaactataaaacatgcaaaattttgaaactatttgattaaaatcatgattacatatacctgtttaagaaatccagcgccaaatgcacgagtgactttgagataacctttcactctattattctctatcgctaatatatcatcaggatgttccttcttgattcttctcacttcctatcacatcaaaagatcgttagtgtctaatgttcgcaaaacaaaacactgaatcaggagtcgcgaaaagattcacctcttcaacacttgtgctatgttccttattgagctgaacagggaccagaagactcagtcctctttcggtgatgaacaagttctctaatggactttcttctttgattctctcaagctccttttgcatcttctttttctcgacattaggtcttcgagcaagaaccgctcggctatccccaacattcatcacgtaaacatcttctcctttcatcaatgtcacgagaacacaagaccccatcaatgctaactctggattctctttaaccatttgatcagctagctctaaatacgcgtcttcggttttcctcaaagcttgtaaaagagctttaagaacatctttatggtttgttgtcgtcgaatttgatcctttctgatcacacctgttatcagatttggtcttgttatttgacttcttctcccattcacatctccatttcacactcttcgcttggtttcttgcaccggaagcaactgcatcatcattgtttatcacaggacaattctcttttcctgactcgggatcttcctcatcagaacattttccggttttggtcatgccgttttctcctaaagatctaagcttttcgtcgttccaaagtaacccattgagctccttttgcacggcggtgtaaagattgttgaggagataatccggcgcatctggaccactgaatccgtcatagattccgacaaagacccatccgttgtcttcagatacaaccacgtgtacacgatcctcccctgctttcccctgagcccattgaacatctaaaacagagttcatgctctgtttttcatcttcttcttcaagatcagatttagggttctcgttgcttcgtgaggaagtaatcacaggttcatgatgaagacgaccagaatctgatgaatcagagccgttgatcggctcgatc

SEQ ID NO: 24981 - DNA, 856 bp, Arabidopsis thaliana landsberg
tcagtaattggataggttttttgtgtaattttatatttaatattctaaactaattctcaagtttttcctaggacagtacattattttataagaaaactagtattaaaactggaacgatacatataagattagtaaagatggcaagaaaaaatcgaaaaatagtctaaatttttttctttaacaaaaaaaaaaaaaaagtattagaatatcaaatgtgttcaatgtgaaaactgatgtatcaacaaacttaatttgacgtctaaaataatgtaaagaggaggaaaattctttggagaatgggaaaggaaacctgaagcaaataacatagatatgttacactcctgtgtacacgaccaaattgaaccatgaaaggaaactgtttgatctatacaaaagagtaatccatataatttaataatttaattatggttgttggtttattggttgaaacacaatatttaacaaagcaaatggaagtttcgtaagcaaagtcaaaagagtggttcaaaatttcatgtatgataagctaatgaatgatgaaatgatgcttgaattatcttatcatagctagtgtccaaaaatcattcaatagaaatacataagctggtccaatatttgaaacacaagaggtgactttttatgacttcaaaataaaaattaactttatatatgacttgtacacggtcgatatagttatgaaataatttaagtttgattgttatgtattctagaagagtcttacggctgctagagtcttggggtttaaaaattcaataatgggccagaagatcaagcctatatacatgcaaaggttcggaaatgaagcctaatataaaaccaaactaagagttacggc

SEQ ID NO: 24982 - DNA, 892 bp, Arabidopsis thaliana landsberg
agagaagggttttagatatttgacataaatagtgagccccaacttttcttttgcagaagaatgaagcaggggttgataatgaaggtacgaggaggagaagggttttggttccttgcagattctctaaccgcgggtaataaatagaaaactttttagttataacaatttgtatctatctatctatctatgtccaatgggttcggtttgtcttgggtttcatgtgttgaatcagtacctggctaataaaaaaaatatgaaatcagttatttgatcgcagaatccgatcctctctcgtttctttgttatgttgatttaattatctagctattattggaatccttgatgtcttagaatatgagagagatcatcacttacttaggttctaaggttgtgaataaaaacacattatgttgtcttgctttttttttaattactgaacctattgtgcaaaagtaaagtctgacttgctctgggtatattatgggatatataacagctccggagagggacaacagaaacaggaggatggagcaccaccagtggtacctatatatctatatatatagatgtatattcactttgtctcttatcttgcctctcattgcttatgttgttgcagtcgcgaaggcagagagaattcgagaaacgaaaagctgaacctatgcacagagaattggagagattatggctgttgaaggagtaatgacatttcacacttgttgctctgcaaaatagtgtctgtcactttggttcttatgtgtttcttggaatccttacaggagaatgaatggcacagagctgacaagtatgagttacatggagctgaatatactttgggatcacatacaccacggatttcatggtttgcatgagcatctaaatgtctaatatg

SEQ ID NO: 24983 - DNA, 451 bp, Arabidopsis thaliana landsberg
gaactagaggctctacacaatacaccaataaaaataataaagggaaggctttatggagagagagagcgagtgaactagagtataagttagttttttttttttttttgaaaaaacaaaattgagagtagcagaaaaatctttcccaggcccattacctgaggcaccatggaaccaactaatacccagatctgaacagtgcaatccctcttttatccattgggcttaagtggcagcatggtaagatccaacggtataacgctttccccatatgaatgttcatcaatgttcatcaaagttcttctccgaactcctttctctcttgcgcaatctgcattaaagtctcagaaacttctttaccaaagctgttttaccgtctaatctcccatttattgcaggtagaaggatatttaagctctctcaaccgtttcaaacttttaaaccctacctcagc

SEQ ID NO: 24984 - DNA, 1157 bp, Arabidopsis thaliana landsberg
tcacagaactactcatttgcatttaattaaagatccaaattttgttagaatatttacagtttttgcttttagttttacttatgatttttttctccaagtaatttatgcttttgaatttactcacttatattaaaacaaaattatgattaatatatgcaatttaaatgtattaatctatacaaaaggaagtacttaacattttgtgtatctattaatataacaagatatatatcataaaccatgataaacagaaatatttatacaaaataaaaatttcgctaatcttgataattattaatatacaaccgtttgtccaatgatataaaagtcgaacattttcaatatcattaatacattaaaataatttaataattgttttgtaccgcacaaaatgcggattattgtctagtgtttcttttaaacaaggtctaaataaaattaatagagaatcggcttggcgatctcccttcttcttcttcttctcttgttcttcgtaacgattagagatagaagtggcacagatagacggtgcagtgaacaagctaaaggaactttaaaatgtcacacagaagtgatctattaatgatttaaacatattcattgaagtgtttattactacttaactaatctggatatccctgtcatattcgctataacaaaacccacttaaagtgtgtattttctataaatccggtggggaggatatccagtttcattgggtttgtcagcaagttaatgagctacaatgatcttgtcagcccattgcaaaccaggttctgcagttcatcatcgaagggtggtacacgcatcatcctaagacaataatacaatttcatcacctcttgggcgatatttcttttttatataacatttttaacatcatataatattaaaactcatcattatcataatcatgtatcaactacctaacatgatatctatcattataaaatatcaaataagaaatcatcttaacataaaaaaccacaaccatcaattatacgcctaattatgcaacatataatcctatgatatataatttttgaatgtaactgtgttttcacatatcatgtacttacattaccttctaaaaatccattgttgtgagcaaagacgtaacacatcaaaaaatccataccactaggattatcggttcc

SEQ ID NO: 24985 - DNA, 1391 bp, Arabidopsis thaliana landsberg
tcccaactctgtggtggcttcttgtaacaattgattataatgcgaagttcatcggtccggtcaatgaccgcaattagctacctgtctaataaagtgggaataggtgaaaaagagttaaccggtttatagaaacccgggaaacttatcccgaccctatattgtcaaacccgttttgtttgcggctattgaaggatcttgtattgaagagagcagctagctaaaaccctaaagccctaaaatcaaaattacgctaaacagagaaggcgacaatggatcatgatctctcctaaagtagcatcatatcattgctggtagactaatattcccatagatagatggatctttattaatggcgtacgtaacgttacgagataatgatcaggattcaggagaatgaatatccagagtcctcgatgctcttaataagtaggcttatcctcatcttatctgtagagaagtcatacgtaaaaaaatatgaatatggtttcatgattcatggttgaaaaactaattttgaagttaggagatcagggtttgagtcattccaatgcaattcaatcataggtcattgtgaacgttttaaaatgacaagaatatccagtactcaggttttggaggttagtatgtgctatggctcatgatgatctatcagttacgcacggacaaagccggatcaatgaaatccggggcctcatttaaattaagaaaataaagtattcttatcgttgcagaaaaaaaaaaaaaaaaaaaaatgggagctcaattgtaatgtttcatatgttcatgtgctatagtccagttctgcgcacggaacaagtgcaaggtgagagatctgagaaggaaaccttgagttgaaaaccatgaaccttgacataacacttagcttgtgcatgtatgattcatccatgtacgactctttaaccaaagaatagacatgctataatctatcattagagctataaccacttggttaacatgtttttaataattatgccaatgcgaagaacatttctactaaaagcaaattgaaatcaaagataaataggggcctagtgcatgcatgtagatatgcatggcgaatgtttacattgagagtggagacaaatggaatgcaatcaaaacaaattgaaactaagtacagatcataggatactgatgaagttatgatgtaagagtgaaaaagaaaggtaagtgtgggaccaaaggggtcgacttatcttaaattcttgatcgttaagtgcgtttgcattcgcaagtcacgagccaaaggaatggaaggggaaaaaatcttacttagtggagtggccatagaggaagtggtggcgtccacgttacacagtctcatatctgtctgcttacttcactctaatctcttcagaattttgggtcct

SEQ ID NO: 24986 - DNA, 994 bp, Arabidopsis thaliana landsberg
actccagactcttgttgtcttgtaatatcccaaacctagtggtataagatttttaatcagaaagaacatcaaatttttgaaaaatgatctttacaatgctagtcaaggaaaactaaatagatgactgctccctgatttttgatcaaacaaaactttcactttcaatcattgacagtacgtaacttaatattttctggcatgagttcatttatatctaagggcttatgatctctccttgcatgaagcctatgcagcgacctcctccttcatagcacttaactacaactgcatagtaacaagtaacaacaaaaccacacgtttacaaaaaaaaaaaaaaccacataaaattatatttctcgaaaatatcgaaattacacaatttcatccagcacaaagatcgtaatatttcattgcttttattagtcattttttcttacaaatcgatcccataaaataatccttattattaccacatacaagaatcaaatgcatgtagactattgagcatattcgtgtaagatatgacctcaaataatggggtagtgaaatgaaacttgactttggactataagctcaaccagaaacaaaattaagtctaagttctaaaaaaaattctaaagtacttaacagtgttatatctaaataaaaaaaagtttagatttttgtaagataaaaaaattaggtaatgtgtagtggaatttcctaaagatgatgatataagaaatacaatattttctaaacttggaacatataaagagttcttctttcttcctctttctaaccaagtcaaacaagttaaataaaaatatatgaggatgttctttaaatttctcttaaatttctttttctattatttttttttcatactaagaaatttattctcttgctttcttctgatcatgttccgccattacaattttataataatggtaagcactatggaagtttaattacacttggggcctccataaacaataagatggccttcgtttct

SEQ ID NO: 24987 - DNA, 833 bp, Arabidopsis thaliana landsberg
cgactccaattcttggaaaaacgtgcttcatctacacgttcgtttactagtgtatctctcgaatcagctggcttgaaaaagtttccggatgggcatagtaaagtacaaagtcaggcaacaaaggtcagaatttatgctttagtaacatattgtactcctctcaaatgtattttcttagtctaaccgtaacgcctaagtatctatttgtgactgtaggtacctaggaaaccattgcagccaaaaaacaagaagctttcagatgaggaagattcttgctctgttgcttcatagtatgttaccttataagcaatattaatttcttagtaacttacaattgtctgcccatttatcaagttttgacttttgttgacagtgccacgtcgggtgcaaagtctgctaaatcaagaactgttgtcaccgcagctccttcgttccgatccaaagagcgtaccgagaagaggaaggaggtgacatttctttttctttattaatcagtaacatgtctcccctttccactcttaagaagtttttgatacattgtgtattgaattttaagtggtttatgttatttagttctatccggatgtggaggaaaaacacctggccatgtaggcctagaaaacgcaatgtgaagcaaggaactaggtgctattcgtttttttcaatatgcttcagtaatatgttaaggctcttaagcaggtcacatatgttaaatgatacaatagtatacttggctatgtatgatcatgctgtttccgcatcctttgtgcagcgagcagttgttttccaatgtttttttgtcaccatgttctccgttctctattgaacgcccg

SEQ ID NO: 24988 - DNA, 1978 bp, Arabidopsis thaliana landsberg
aagggacagtaaaattaatacagaaagagctttatattttgtgacaatcgcaagtttctcattgatggttttccacgaactgaggagaaccgtgttgcatttgagcgcatagtaagtagtgtagtatcttctcttacatgaatatactcttggaacaaagctttgaacatgaaataactccttgatactattgcagataagagcagaccctgatgtagtactgttcttcgattgccctgaagaagagatggtgaaacgcgtcttgaatcgtaatcaggtgcttatttcactgtactctttttcacagtactcttcctgtaatatttttcagttaacaatgccatgaaactgattccttgctgatgcagggccgaattgatgataatataactacaatgaaaaagcgtctgaaaatcttcaatgccttaaatcgtcctgttattgactactacaaaagtgaggttagctccacttactcgaatcatatgactccacatgtgaagtttttcaccactttggatagatcaaggaaatgtaaggttaaattcatatctggagataagagtgagaccacagtggcaatggtagaaggaattggagatgtgactttcattactaacgagggtaataagacgatcaagaatgtgcttcacgttccagggatcgagggaaacgcgttgagtgtttctcagttgaagaggaacggctttgaagtttctatggaaagaagaactggatgctttgtttgggatcggacgactgggaaaatgtttggtaaaaacatgtgggaaaagagaggcttttgcctgcgtttcagtgtgattgaaggtaattttcaatgcaagaagcgaaaatttacacatgattaatgttagaggcaggacagttagattattttactaaataagattggactgatggatggatttgcttcactttatttggttttcattttgtttctttgttcgaagtaagctaatgattgcataaatatggggtattgcagacttgcggtattggtttagtcccctagccgaagagggaaaatcgtttgaattactgcgtcttcctgatgtgatcatgtcattgcttatgttagccaaagtatgatcaatggcggattatcagatagttgaatgtattctacaattacccaactaggcaaacataaaatatacgaatccaactctgatttttaactatggatattcaaagtagattagtagattactgttaaacgtaacctaaaatcaatgtgaaagttgaatgattagtgcagccgtttttgggattttgttttgtgattaaccttttaatttattcaaggatgcatttaattagctatatattaaaggcaatttaactatattaaaaggcaatttgtaaaaaaaaaaaaaacgcatattatttgacgtaaaaacagaagctgagccgttttcaattatttccttttggtttgactatgcatatcgaattgccaaaccggattcgatctcccttaattaaacacacattctttaattgcatgaaaccggaccaaagatagatccaaaaccgagtctaaaatcaaatggtttacccctaaaccgatcacattgtgatttcaaattgtaaattactaatttagggtttaaggttaaggttaatgagactatataaatagaaaatgttcgggtcagcgaatcgaagaataaacctgttcaccttctccgagagaatatagagaaaaaggaagtttaaggaatctccgacggttacggctatggcggcggcgaataaacaacacgacgctttctccgatgactttgactacgaaatctggtcgtccgtcacgaaagctacactaacggagaaagaactctgggatgttgtcgagaacggagtcccgccggatccatcgaagattccagatttagcagcgaagattcaacccgaagaactttcaagatggagagatctcgctgtaaaagacatgaaa

SEQ ID NO: 24989 - DNA, 4104 bp, Arabidopsis thaliana landsberg
ttctgcaatcccgcaacgaaatgaagtaagatttatttttatacataaattctaaaattattttcggggggggacatgttaaaacttttaaacagaatgctttcgccaaagaaaacaaatattatgaaaaggggattcgctattacatctaccaaagtctgcttcccgcattgttggaccaattcctttaatgcatcctgatcaccactctgtttataattaaaaataaatcacatataaagatgtgttagcagaaacaaggaatacatacatgtttgggtgttaattttgcacgacactgacaacgatgtcatgccaacctgacaatacattaaatatataccaacatctatattccaaatagcatctgtttcaaatgatcctagttaccagaagatacatgaataatctagaagctctatcccctgaatctttaaatacagactaacctgcagttctgaaaatccaccaatgtcctctaccgaaacaattggatcagagtcgacaggaaaacaacccaagtgatgccattgtttcatatcaaagccacggaagtttctggtcactagccccaacctcagttcctttgcagcgatagtctgagagcacttcttgcatgttgatctgctcgatttcgcatactcagaaataacttttgaagaatcaggagaatttttcacatccttagtcttctgctcacttatttcatctgatgcaggctttttactctcttcatcctcatccttatccgatacaagcagttaaaagaagtatttcagtcaaaaatctacatctaggttagaaaataagactgaagtctgcatatcatttcttcctcgcataaaagaagattgttgcttccagaacttacttcttttgcaggctcgccaggttgttccaccaattttgcaacaggagaatgttttccttttttggtctcctccgttagctcattatcagctatagcttcatcatcaccttcatccatcttgtggacatcctgccagcaaaggaagtaagaagttagtttcaaaaagcctgaaatggtaaagttctctacatttgcagaaacagactataatattatgacaagggatatggatagtacatctatcaaagttttatccttcttgtttacttcggccaaatactgtaattccatctggtcacctttctgttgagtatgacaaatgaatcaaataaaaaagatattgttagcgaagttaccacatgtcatatgcaatcatccaaaagctctatccactgaactggaaattcctaatatgtaaacaaaaactaacctgaagcgatgaatatccaccagtgtcctccacagaatcaattggatgaaaatcaatgggaaaacaaccccagtgatgccatctggttatatcaaatcccctggaggcttcagtaaccagccccactctcagatcctttgaaacgatcgtctgagaacacctgttgcatgatgatctgctcgatttcgcattatcagcaataacttttgaagatgttgccgccttcgtaagccccttcggccccattatatgctttttagccttccccttcttctcatcaggctgctttaagtttaaaccgatacaagcagttaggcaaaagtagatatgagcaaatgagactaaagagcatcactttccaaagtcttactttttttgcaggtactttaccacattgttccaccaatttcgtcaaagcatcttgatcttctttctgtaaccataagcacaagcgttaacacaaataaccgaaagtgaaaagctttagacgaaaaaaaacctagggagtccaaaatacagaaatgtaaggaaaccctaacctctaaagcggataagccttgaatatcatcaacggaagcaatcgactcagaatcagtcggaaaacaatcgaaatggtgccacctggtcatgtcaaccccgccacgtcctttgctaatcaaccctaacctaagcgatttcacagctatcttgttcgaacatgacctacacgacgaccgattcgacttcgcgtactcagcaaccaccggcattgttttcgccgttgttctcaaaatgtgacaggtgttgtagacgagatactgtgttctttctcggaaaaagagagtggagcgatttattatataaagagggaactggaaacgaagagacacgaagggggctactgtaatcatatagccattggtggggaatcgagaaaaaaggtattagggttcagttcacgttcccgccattctcgaaagtagagtctgtcggtaaattgatgtcggtcataggggtataaatgtaaaacacaaatatatgcgttagtttgggccaaatctcagtgtctcctcttttgctctttcattgggcttatttgggctttaaaggcctaacaagacacgtttttataatacagttttttaaaaaaaaaaacaggtttactagcatattaaataaaaatgaaacgaaataaacaaaaaaaattgtgacacatcttcaaccaatcaaaaccgctataatcgtttttaggtctcttctcagtttttcttgtcgttctgttgtcaccaaagcattatataaaagggctgatagtatttttataaagggtctagctagtttaagttcaatattttagaaaatatataaaacttacacgaaaataaacattataagagcaaatttatgtaagaagaaatttgtcatgtcatcatatctttcgattaaaaatgagattctttcgaagaagaatcttaaaactaaaccaaacaaaatgtttggaatcgacaccgtgataggaggacgcgtaccacaccaagtgtcctcttgcatgtcttcaagagacatggcagtgccacgttcacttcatgtctttttctgtagctgactttttgttttctgtttatccacttggtctatagaaaccaacaatgacccatgtccccgattctctgtctttagtattttttatatacaaactatcagaagccccaataaggtccgataattacctcataaaaaaaatcaaacacacaaaattctaactaaaaaaggtaaactaacaagcaccacacgtgggttgatctttattgcaaccgtagagacataacatatgagttttttttgttttcataaccatgtaaaaccaaactcagtctggataaccaaaaacatggtaaaaacatataattaatatccaaaaactatttttcttcctcgattctcattacctttagaccggttttagttagctttaaacttcggaacttcgacgacggtcgtggctagtcccccaaccagcaacgcctgtacgaagctcagccgcagcgacaagaaactccgcttgttggagcggactcaagacctccaccacacgtgtgatcgttctcagtcgcagatcatcagttcggtggacgatttctgctagccgtcggatcctctggtcgggatctgacgatgtccccatgacaaggtcactcgcatcgtcttgccactccgacaactcttccgttatcgcattctcttccttcacggtctcacattgtagctcacttaccgtcctgcctttgacaaatggaaccctaaatattaaatattaagtaatcaaaatatatttagttagtccatatgttattgtttacacattgaaaaaagagaaagtaaaataagtgttttaatctctcaaatttattgttatccctcaaatgtgtttttcactttctaaaacatttttggtaagaaaagtaaacaaataaacatcgtatgttctaaactaatctacatatttgatatctctaggtgtaggagtgaacctgtattagttttggtaaacaataacacgcgcaaatcacgatattacttcaatcaaattacaacgtaacttaaggatattttattaaattagataaaaaaatctttactagtagttgtgattagtaaacaaagtagctaattaggggttcgtgtagaacctgaactgagaaggggagagatcactgagatcggcggtgcgaaagccacgaagtacatcacccatacgagactcaaataaaatactaaactcaatgtaaaccagatggaacaaggtggtggtcgccaaccgccg

SEQ ID NO: 24990 - DNA, 976 bp, Arabidopsis thaliana landsberg
  unsure (1)..(976): unsure at all n locations
aatactgtgttgggaaacactgactattggatgacagaacaagctgtctcacaaatcttgaaatctgtgttctttctctaattctcagctcctttttcataaccttaattttggaagaaaaaatgaatatcaatgttttattctattacgtatctcttaaactttttttttcttactctaaattctagggctagaagttggcaatttcccggcggaggtgagttcatcggcggtgtttaggtgcgtgcgtgtgagctcagtagaagatggagaagaagagtttgcttaccaaacagctgtaagcattggtggtcacattttcaaaggcattttatacgacctcggtcctggaagtagtggtggcggaggctacaacgttgttgccgccggtgagagctcctctggtggtggtggagctcaacagctgaatctcataacagctggctctgtaaccgttgctaccgcttcttcctctactccnnnnnnnnnnnnnnnnnnnngctcatcagccgcggcagccacgtacattgatccagccgctctttatccaactccgatcaatacattcatggccggtacacaattctttcccaacccaagatcatgaggaaaatctgacataaaagcaacataactcttttgaattcttagaatagaattagggtttataaacgttaattgtcggatcatattatataaaaaagtatgcagaagtggggaagtgaatctgtttatgcttcccctacttttagacactcaaagttgttgcaagttttaggggcttttaaatggaaattcaattcaaataataccattgtctttttatatggttttgtgaggatatagcgttgtgtatcatttaaatgttaggagcacaatatagctcttgttgtctgaatctttgtttcattaatgtgtctgtttctcggttgtgaaacacgttaccctaaaaacccgggaaaatgttttcatctta

SEQ ID NO: 24991 - DNA, 974 bp, Arabidopsis thaliana landsberg
agcttaagtgatgttctcattctttttatctaagaaatatatttttaaatatttatcttgtttgtgttataaatcatatatttttgttattgattgcagatactttcttaaacaataatttatgatttataacacaaacaagataaatatttaattcacgtagttatttaagatgtgtgtataataaccttatacatcacttaatttgcacataggggattagcaaaaaaaaagtgatttataattgtggcgtgatatatagtttgaatttagtatttttttggctatgctctttacttctttagttataaatattaattatacgctacatttataaaattataaatcgatattagaagatatatgattggattgaaactataaaatcatgtcttctttacaaaagctacatcttttttagcactcacggaattatactgctcaacagagtctctacgttgaatgactagtcttcttcataagcaactcagctcataatggaagctccaagagttacattaagctcttgagcaattgtgtctgtcttaaatattaaaagtcttaaaaaaatgaggatctttgcaacattgtcattgtttaattatctctctgtgaccacgaacacggcaagctcttagattattcttatcatcttgtctccataattgtctattattgcttccttcatattctctagcgtacagagtcatagatatgcaagagatatataagaacatgacagctaggagaaacttatactattcaaagaaaaagctggaggctatggtaaattcacgaatcgatagattacacaatgatgataggcgaatcatgtattcgtggacctcgcggtacgtacatttcttcctaatatgtatatctttctgtagcgttctattgtttaatgggggagacaaagaaacagatgttgcagcaaaatacactagataatgaaacatgacaggagagaaatc

SEQ ID NO: 24992 - DNA, 973 bp, Arabidopsis thaliana landsberg
atcctgatgcatctctttctttgatctttatagctttggcttaagttttcttttcaaaagatctgttatgatcacattattgtacctataaactttgattctttaaacaccattattacctctccaatcattcattctacacacagctgtttttgattcatgtacaaatttctgattttttttctagggttcttgtttttccccccaaattgacttgttctcctctctgtttaggtttgtgtctctttaatggtgtgtgaaaggtgaaagctttaagcttttgtgtgtgttttaacaacaatggcggagatcaagaatgctaaagtagaacaaaggcaaacgaagattaggaatgttccagtagctgtaactcctgaaggtttctggtgttgtccttctcctgttgcgtttcaaaagactcttaaatctcacaactctctcaccaaacacaagcaatcttctcctcctcttcaacctcctaagccggagaagaaaccatcttcgactactattagatccgtcattgcttctgatgaaactcaaaaaaatttgggtagttttgatactgttcatagtatttgtttttcctgtttcggatcaagagagaccacaggggcaaaaggttgagactttaccgtggaaagttgctattgagtttggtgaaccgggaagtagtgatgctaaagtgattttggttgggaagcaaggtttttgtgtgaagcttagtggtcataagaaagttttggccgatcatagttggttctttgctaagaaactagctgagaaagattcggtttttgcttgtcttgagattgagagctgtgaagatgctgagctttacgttgagaccattggacttatgttttgaaaagatatgaagctacggcttatgaaacataatgttagcacagttctttcggtgctcaaggtattgcagctctatccctttattagatgctggtcttgatgttca

SEQ ID NO: 24993 - DNA, 1272 bp, Arabidopsis thaliana landsberg
ccatgccactgagaacagctcctgataaagacatcgccatgaggactcttaaagatgttttttgggaggaaaataaatacaagaaagagttttaagatggagaaagtgagatgagaaaaatctaatctccaatagtatcgttttatagatcgatagacctattacactccaaaattacacgtattaagagtaagatattttttgcacattaccgagtttctgttcgttcttttcaggccacgtgtaatcatatttgtggttttcagaaagaagaagaaaaaaaaagcaggtcggccatgaaattgtggctacatacaaattgcatttttggtaacaaaaacttacatgttagcatttctagatttctttttttcaatttccagtactacttagagggtcgttctcatttccttcacgtgtatttattgacgtttgttgttaaatttgtaatagaaacaaatgtatgtcggccaacaagttaatttgggtttgcaagcccaaatctaccaaaagcctacacaaaataaaccgacaaggttgcaagcctaaatgtaaaactaatagcccaaatgagttgaaaccacaaaccattttttacatgctgaaaataatcttatctcgtttaagaattttagagtggtatagaattcaattctcatagaaggcgaatatatacggattaatttaaataaatttatgccattgtctaacgtttcttgtggatttttgttgtgaaaagattgtcaattgtaaaaaaaaaaaaggttaaaatcattacttgtaatagaatcgtttcgtaataatttttctctctgatgtatttccttaaagaaaaaaaaaattggaattctgatcatagatcagtctttaaaaaaaaaagtctagagaatctgacggacagtaacatctcctaattcaatatgaaatagaaaatgcaataatttaattttgtaaaaatttaaaatgaagtccattaaaaaaaaagtctaaaataaattcaacggacaagatctattattacttgtgaacagcggtagattatggagcgtgcttacactctctcgacgtttataagtcacagacttgaaaaaaccctaaagctaccaaagtttcctttttaactctctctatctgtcgctgcaacttttcaacccactcgtttttttatagggtttttaattacagtaaaaagtaaccaaaaaccttgagagatactaagagattcgaagcatacataactcttgttgttgttcaaaagatgcaggctcattc

SEQ ID NO: 24994 - DNA, 527 bp, Arabidopsis thaliana landsberg
cagttggacaatatataccttgagtaaagccaagattttgatgacattttcaccgatcaacttcttcttgagatcatcactatacatcaaaacaacagtctctacataaatctctaaatcatcacactcacttatctccaccatgtgagaaactcctttctctcttctagaattcatcttctccataaaaaacctactcttctcagataaaaccttccgatgaacatccatagtgactctgtaaccgtctttgcccaccacagtcagcttaacgtctcctggcccgaggctgtggccgtaaacgacgccgttcttgaactccgtcaagatttgagccacgcgcgcgtgagatttcctccttggtagctcgcggttgtgctcgtctgacatcatatcgaaaagagtcgggtttgagagagtcgattcgtttggtggcggaggaggtggcggaggaagaggaggagaggcggtggagagtttaatcggagatgagattcttgacggagaaaaagagagagaagggtctg

SEQ ID NO: 24995 - DNA, 782 bp, Arabidopsis thaliana landsberg
acgaactcaccctctcttggtgaaatccatgtagcttgggagcgatttctgcccgtttgtactcatctgttggttctttgtggttcccaaactgattcattgccgattgctgagatgagaattgagcacggttgtaagaatttccattcccctgaggaatttctccagctaccaccttaagtcggttcagttcatcccgcagcgcttcattcaaagctgaaaattacaccgaacaatatatatcgtaatgaggactttggtttacatattgagaacgacccaatgaaaaagaaaatggctttaccatccctaagttcagcttgttgctctaaagcttgaagccgcattttgaggtgtttattttcagtgttcagctctgatgttcctctctacacaatataagaaaaagcacagattagagatgcaagagacatgaatcattttatcttactcctatgttgcttttatcactaaagtggaaacaaaacttacactcttgcaagtgtatacattacactattgacatatctcacatgttgattaatcagctaaattaacatgataataacatatcttataacactgcatctatacttgttcctagtagcaaacacatgtcctctctatacaccaagaagcaatcttaaacacactaagcaacaatacaagcttacaagctgccaagctcatatcaggatatcagaaatagtaaatagagtaatcttcactagtcacatcagcttcgtaaaacacaaagctttgtttgctattatagtaatctc

SEQ ID NO: 24996 - DNA, 885 bp, Arabidopsis thaliana landsberg
  unsure (1)..(885): unsure at all n locations
aaagttttaacaaaggtggttgcgtgtatttgttaaaaacaattatgaaggaaatcagtgacctcttttttcgcggcgtttgatgcactgtgtgaagaagggatagcaacctcggtctgtagagctcttgatgaagtagctgatatatcagtcccaggtaaagtctttcttatttttgtattcacttttgctttttggaggattcatattagttattcatagaactgaacttgattaaattcattcgacgaattatttcttggacgaaaataagcagcctcaaaggaccatgttaaggtgcagggtgagatattagagggtcttgttgctcgtatcgtgagcagtcagagctcaagagatatggaaaatgtcttgagagatcatcctccaccaccctgtgatggaggtgcactatttatcatattttaattttacttaagttttcatgataatccactctatcaagtccgtgtagaataaaaaatgttatccctggattttaaaatttcagctaatcttgatctgggactcagtctaagagagatatgtgctgcccatagatctaacgagaaacaggttctaaaagaaatttaaatatgacaagctttataaagtggaatttttatgctgnnnnnnnnnnnnnnnnnnnnnnnnntctagagggtccttgacccttgcttgtggagctatagcaaatgagagcacttttaaggagtgttgggccaagcttttgccccagtgacgtggaatggttcggagatgaatctcatccgaaaagtgctgacaaatctgttataacaaaattcctgcaatctcagcctgcagattattcaactagtaaattacaggtaaattgagatactgtgtcttcgttgatttcgaatc

SEQ ID NO: 24997 - DNA, 5735 bp, Arabidopsis thaliana landsberg
  unsure (1)..(5735): unsure at all n locations
ctgttttgacagcatggttgcatctgctacttgatccatacgtccaatcttctgacactttttcagcacttagattttgttcagcttctttcacttccaacttctttaaataatttccactgctcccaacacctttgaaaaacctgcaacataaaaaatggattcttaatttcctaagaaggctctgaagagtgaaggaactcttaaaaaatcagaagaaaagacggtttaaataggttcaattaaagaactaaccttaagccacacttgagcacttcgattctcggtagctcactcgtaccatctatgaccataaaattaagagaggccttagtaggactacatttactagattgcgtggatcttgtaggattagagctgctaaaatactggttttcaagacgtttaaagatctttgaacagctgatatacccaataaagacatgctctgatgcaatattcgcaactatattgccctgattactccatcttccaactgggaatgaaaattcgatccacgacccttcttttacttctagtttgaatgtgcatttcactgaaaaacagttgatttgttcttgagattttggaaatgtgacaacagcacatagagctacaccggcaagcctattttcatgccaatgtggaggcattctgagctctaatacaggtccaacagcttcatgacagaaccatgaaggtagttcacttccaggaaagcatatactgaacaaaggctccgaatcagaattctgcaaagatatagacaagaaaatgcatatagacacgaatatttttgatatatagcaacatatactgaaggagatcaaggaactgacattgcagcgcttttgtgcatctaaaagtagctgacatttcctttgagcaaaggaagatatttcttctttagcactcctttcgagtttgttgcagttcgtgaggatgaatgtagaataaatctgttgagccgtagtaagacatgccagtggattcgagactgtcttaagtgagcaacagccgtgtgcatctaagtgttgaagatttggtggaagctttggaatagatgtaagactcttacaatacttcaagtccaaccattttagttgagaaagttggctgatgttatctggaagggagctgatgtgatcattcttgcttaagcataaacattgtaacgacgatatcatcggaatctctgttatggttgtagtatccaatcgtaatatctctaaaaccttgattctttcacagattgccggaaaattttggagcttccaacaatctgagagtatcagttctttaagagctttcaagtcatcgagacaatccggaaactccttcagcttcgcgcatcctttcatattcaatataacaagtctctggagtatattgaagttcaaaggaagttcttttattgaagtgccatccaagtatagagtttctagattttgtgagatcacccggaattccttaaggtttgagcagttgctgaggatgagaatttctaaagagactaaatttatctccggaagagacttgagacttgtacacccttttagatttaggaaaacaagactttgagcctttgataaccccgaaatgtcccacaagttacttgaatgactgagattgacccactttaattttggtgtatcctgtgacaacacaagttttagccaccagtagaaaaaactattcattatagttttactcatacagtcaaatgataggaggaggcacaccttatgcttatcatcactccagattcgttcaatcttgctgtggggaagcttaaggtcgacaagattttgcgggttgaaatctggtggaatttccttcaatgggaactctagccagtggagatagcgaacctctttcagtgggaagtttagcccatcagggaggtttatcttattgttaggcttacattgctgaggacaatgtgagctatagatcttgaggtatcggagaccacacatcgatttgaaagtgcaactgtctaagctcatctccctcttcatttcattcatgtttaggaaaatccctctgacttctgcgccttcctgggagacaagtcacggtcgtcaaatctattattcattatatacagtaagtcttgaagaactttgtaaaatatatgaaaagttttcttggtttaggctcacctctatgttctttagcacatcagttatgtcttggtggtgccacaacctatgtggcccccttccatcttgagcatatgatcttcggcaaagttccctagcgaaagtatatagctaatcatgcatctctactcggtcctcggaaacattaatcatgaatttattcatgagagcttttatttcacttgcagcttcagatgaatccagtagactagcaatgtaactctcatcttccgatctaaaacaagctatgtcgagaaatatatctttatgcacttgactcagttcatcataacttacttgtaacacatctcgaatactatggctggaattttctgctagtgtagccaattttgttttccaatggtcctcgtctttcccattaagatctgcccccaacaactttagaacgagtggatgacctctaccataatgcacaaactctttcgatagcttcatgatgacttcattgttgtgtatgttggaatgacgatcaaaggcataacgcccaaagtgacctaagccgtctttgtggttcaactgtgggacaacataagtatagtcagccacatcttgtattagtgatttgtcgcttgttgcaatgacaatcctgcttccctgcctaatccagttgcatctccccagaagaacatctatctgttccttgtcactcacnnnnnnnnnnnnnnnnnnnnnnnnnnnnntatgtagttccatcttgtaagattcatatgcacatcgagtagattctatgtctggaattgtcacaccgagcaactcttccaagagtaatgcaggcaagcaatccaacccgtgctccttcgatgttctacgaatatcttggattaatccatgccttaagaacttgcaccgcaaagtttcataaatctcccttgcaagagtggttttaccaataccgggcatcccaacaactcccaaaatccgagtctcctcacaatcaagatctagcttctcctttaattcttctaaccgttgtttgagtccataaatctcgtgcttttctcttcctacggacattgaattgtttttcgaatgatagacgaaagcatctttggttttgtccaacaaaatcttgctcagcgcttctttaacctcttcaacaataccattgatgaagttgtgctcgtcgctacaaaaatcagtaagaaaaaaagccaggcagatccttattgagaaggtcaaactctaacaaagtctcaaacttgtgctctagataaactctattaggaaactaaaaaaaagatacctctttccatcaaaggagaagccgatccggtctgcaacagagctcaaagcttcagaccactggtttttcttgtgaacatcaacattgcgcaaattcttgaaaacacaaccaaaccgtcccttctgataccgaacttcgtatgctttaaccttgtagaaaatgggaatgatgaggagctttcccttgtccatgcattccttcatcttcactagctcgttcaagcaccatttcgattcggtgtacctaacggaaaaaatggccaaagcgatcctcgactcttcaatcctctggaaaaacacatgtaaaggtttacctttttcctcattcgtgtctatgaagatgttgaccccatgcctaaccaatgcacttctgagatggctaacaaagctgttccgcaactcttctcctctgaaatttacaaacacttgatgctgcggcggcaaaggaagtgcttttacctcggaagaggaagaggcctcctccatcggagtttgtttggaaacaaatcgttcttgagtttccttttgagatacaagacgacatgcttgcacaaacaaccttagagataccttttttcaaaatcttgacctgttctactcatctacaaaacaaaaagaattgcttcgaattaaactaactataaaacttaactatcattctggttttatttaagttcaagttgaggtgttgtgacaaagagaataagcgaaacttccgagaagaactagtccgccttcgatcaaataacacaattccaagaaatttgtaagaaaaaactaggtcaacactctacgcggaacgacttcttcatcgtgaggcacgtctctttacgaattcactaattccgacttgatccagtctaaatgaaaaaaaaaaaaccaaactgaaaatcccctaaatctaggtgcaaggaaaacgcgcctaaataatcatggtggattgcagcgatgtttacatcagcttcgacagaagtgaggatacggtgcggtactcttttgtcagccacctctgcgccgctttccgccgcagaggaatatcttcgttcatcagagaaaacggctccgattcggaaagcaatggattctccaagttggagacgtctagggcttctgtagtggttttctctgagaaatactcgtcatccaagtcatgcatggaggagctggtcaaggtttccgaacgccggcggaaaaactgtctcgcggtggttccggtattttacccagtcacgaaatcgtttatgaagaaacaaatctggaatttgggcgatgttagaagcgattggccaagtgctctattggaaactgtagacttaccaggccacgagttatacgatacgcaaaggtttgaactttgaagcatttttaaatcattaacttcactagacctagaccactttggaatatttactcattctctacaaaaatatgcagtgactctgactttgtggaggagattgtggctgatgtgcgtgaaaagctcaacatgtcagacaatattggaatctactcaaagttggggaagatagaaacattgatttacaagcaaccgtggggtgtccgcagcataggaatatggggaatgcccggcataggcaagacaactcttgctaaagctgcttttgaccaactctctggtgactatgaggcttcttgtttcatcaaagactttaacaaggcgtttcatgagaagggactttatggtttgttagaggcacactttgggaaaattcttagggaagagcttggcataaaaagttcgattacaagaccgatcctccttagaaatgttttacgccataaaagagttcttgtcgttcttgatgatgtgtgtaagcctctagatgcagagtcctttcttggagggtttgattggttttgtccgggaagcttgatcatcataacttcaagagataaacaagtattttctatatgtcgggtcgatcagatatatgaggttccaggtttaaatgaggaagaggctctgcagctattctcgcggtgtgcattcggaaaggagattatacatgagagtttgcagaaactatcaaagaaagtgattgattatgctaatggaaatcctttagctctgattttttttggatgtatgtcaaggaagaatcctaaacatatagagattacattccccaaagtcaagaaatatctggcacatgagattcatgatgcagtcaagagtacatatgattcgcttagttccaacgagaagaacatatttcttgatattgcgtgtcttttcagaggagaaaatgtcgactgtgtaatacatctgcttgagggatgtggttt

SEQ ID NO: 24998 - DNA, 2399 bp, Arabidopsis thaliana landsberg
ggattacttcttaagaagctgttgagctgctgctttctgacaaaaatgtagatgaaaacacatttcatatatatcaggttgtgtgtcgtcgtaaaatcaactaacaaaaccttgaaatattcacagttctgaggcaactactaaccgatgatatctgcgaaaagggcacaaatccacgaagaccttccacaagagcaaccaatccacctttgttagcaccaataacctacacataacaatcaaattcctgaaactataaccacagaaaccacaatagtagcaaacaagtttcaaacataccttagccttgacaataacatcctcagcctgaagctgcctgcaacgttcccaagcaagttcgtattgaatattccttaagctcaatagcaaactgtcatcactttcattttcaccaatgatgacaaactcttccaccataccaggtacaataccagcttcttccacatgcttaattctatgaatacacgcttgttctaccgacaagtaagccgatgactttgcagaaatgtcaactaatgcaccatttgcatcagtcttgaacactgttccttttacctaaaacaacatcattaaccacaaatgatacacaatttctacagaaccaccattgtcatgtaataaaactcatatctttagaactatatttcaaattccacaaagaatctgaagtaggtaaaagagaatagacaaaccctagtgccgatttcggaattgaagtcgtattgttcaatagcagcagcgaaatcgtcgacggtgaaagcaacaccttccataggagaagttctacatcgttcataagcatcttcgaacatcttcttcagctcaagacgctcctttgtttgaccgctagacattgcaaccgcggcgacaatagtcggagaaacagaggcagatttgttctggggaaagttcttcgaagctctcctcgataacctagaagaagaagagagtggggaacatctcaatcccgagaattgctgagccaaagacgccatggttgagtctcactcactcacacagagagttttatctgttattcttctatggctcctgcgttttatcgttgggttagataaggccataagggaatggtagagatgatgatctggactgaaaactacatgccgttttttagtcatctaaacagcgtgacgttagaaaacaagtacaataaataaatgtactaggtatcgatccaagctgcgcagcgcgaaagaatatatgtataaaaaaattaaaagtaacgatcacaatcatatagtagagttcgttaaaggtttaaatataaatataagttttatgaaaatataaatagattatgtaagtataaatgttgtaaaccgatgctcaaaaccatacgaaaccttaacactttccaactcaatctctctcaactctcaagaatcaaacactcttttgaatcgtgaatgaaaacaaaaagaaagaacaaagacacaaagttgtttactcagtttaatccatcgatgtgatgaatctatgtctggggctgaattcaatccaacaatccactatgaagatttaatgtctttctccagaaactcaagaacagagcttttcaatggagattacaaacgaagaagaagaagatacagtacaaagagaaagaagctgagaatacaaagtatttatagaaccattccaaaacggcaaacccctctaaaccagctggattcttctgatctttttctcaaacacttaaaaccagtcttctaaaccttcaattgatgcttaaaccaacaatcaatcactaaccaatactaaccggtctaatcaagtcgacatcagactaaaccggaagaattggatcacaccttcacaaaaaattgtatacatgtgtggtcatgatccaacaatcatataaacatatatggaaaaagacagatatgttttaaatcatataaactaagtagtagaaattctaagtagtaggaatttcttgtaaagtaacagcatttgtacacatggttgtttgattaacattatacgtatgttttaaatttgttgaatataatttgaaaataaaacagaaatttgactgttttaattagagaatcatattatttctaaggcccaaatgtaaattgtccaatctcagatgattaattaattttggtacattgtgttaacaaattatcagataattcagcctatttacgatcacccgttcattttccttgtctctttggcaactacagcaacaacgacctgaaactaaatcgatccagatctgaaaaacatgtgagattgaagctcaattccaaattcgaattttctcaagcttgctactgcatcagtcgagtgtttcttactggctagaacaatattgaggcaaatttccctttttttggttctataca

SEQ ID NO: 24999 - DNA, 1021 bp, Arabidopsis thaliana landsberg
atgaatattgggcttttcacatgtaataagcccaacgataagaccatgacaatttctatacgaaacatgatataaattctttggatatacattatgaatttacgatatacaattagtttgtttaaatatcaaaatataaatgcgtcaatggttgttgttacttgtgagattatctttctatttaagaagaataattctcttcgtagataaatttttaaaataattttccgagttttctaatgtttctagatatgatttgatttgaacaattaattcgtggttctttgaatgaatatatcgactgtatttgatttcagttaaactgataataattgtcatttacgtctcaaaagaattgaaatatcatgtctctcaagtctcaagatatggacttacatattgttatgcattatttatcaaaatatgtggacaaaacataatatcaatgtcgctttcagaataattgaacaacagatattgagaaatcaatttttatggttatatcaattgtcattgccaacatctattacatagtaacagtccaatttacattacaatggtaattcaatgaaggtaatttactttttattggtttactcgtgaaacgacgttctcctcctcacgtaccttatcttaatatcctgatcaacggacaccaattttcgacaaaatatctgagaaagaggacacgtcagcaagcctttcgcttttggctgcattgggccgtgacaatattcatacgattcatgaggttcgttccttttttaaaggagcctaatcactctgagtaccactgactcactcagtgtgcgcgattcatttcaaaaacgagccagcctcttcttccttcgtctactagatcagatccaaagcttcctcttccaggttcgaatccttgatttctccatgaatgtgcatggatagtccaacaattgtcgatgtttttgatagagagtttgtaaattttctccggcgaatttccgatttgttcttcaataatatgtgcatgaaactttttttt

SEQ ID NO: 25000 - DNA, 2160 bp, Arabidopsis thaliana landsberg
ctaaatcattgctataatcaaaaactcaaaagattagatctatatgtagttttgggtacattacgttgcaattattctttacattacttataatattttgtcaagagcattgccattgacttacggtgagaatctgtaataaacacaatgatattataattaataaaattattttcatcaacaacaatcaaaatctatttgtattaggtaaagagaatttttttattgtgaattattttaagattatggagattaatgggacaacaaacatgaactataaaataaaaggattgattatgattcaacattctacaataatactataagatatctactacacttgtcacgagtgactattactttttgatttaatatagattaacccaaaacttatgtacacgattgattgaattaatgaattgaaaaattgaagaacataatttgatgatcttaataattaagggttcttacaagaacgattttcccctaacattctggagtatattatatgtacaaaaatcacgatcataaatatctccagaaaactctacaaaaattaaaataatttcaaatctaatattccaacttttaagattccagattctgttacaaaaggaatcgaatcaaagatcttcccggagaaaaggatgagcaagaagctgcggcgccgtccacctctcactcgattctttacggagacaacagtcaacaaaactcctaaactcgtcggaacatccttccggcgcacgcggtggttctccaaagcacacgacgcacattaacgtcgcccagtcaggtctctgtccctgaggaagcaacggaaaatgtccgacgaagagctcaagtatcatcactccgaaactccagatatcgcctgcgtaaacatcggagttttctccggcggcagagtcaaatctctccgggctcatgtaagcgcaagtgccgacgtaggaattgcagtaatctaacgatcgggtaatgattttgctcactccaaaatcagcgattttaacttcgtttctcgagtttaagagtagattcgcaggtttgatgtctctgtgaacgatcttgagcgagtggagataacttaaacctttcaaaatctggcgggaaaatcccgctagttgtttctccgtaacggcgccgcggagagattctaggtttccaccgtccatatactccatgaggatcgaaacctctccgacgattggtttctcgaagatcccttgacacctgacgacataaggagaatccgtgcgacggaggatctccatctcgcgcgctaattgtcttgtgaaagcaggactcatgtcgccgttgactgatttcagagcgtatatctcccccgtggttttgtggtggactttgtatacgatcccgctgcttcctcttccgagaacgtggagtttctcgacatcggaagctgagattccgttgttgatgacgggggcggtggatgaggcaaaggagaaccaggggaggtgaacagagagcggtgggacagggagacggaggttgatttgacggcgtttacgaacaagagccatggaaatagaagagagagagagagagagtgatgatggtgatcgaagagtgatggaagttgcagtttttatatggagacttgagtgggatttaagtgaggagcctgggaagctaataaatctttccattaaatgttaatcactcttttttgttctttatcttaattattatttgttgagttgtatctaaaaatggcaactagtgtgtctagcgtttatgtatatcttgcacgaggttaaatgcatggaactgctatctgtcctacttacccggaacctggctatagtggcttgtgtatattgagataaatctacgcaataatgattagatttatatacatttaaagagtttgttttagtgattttgaatggtaactcaattatcaaagtttgttacagcctgtatcgtgataattacaaattacaaaggcgttataatagcgttacttttaacgtcttgcattaatgattagatttatatgcatttaaagagtttgttatagtgattttgaatggtaactcaattatcaaagtttggtacagcatgtaccgtgatattacaaattacaaaagcgttataaaaacgttatttttaactttttgtactacttattta

SEQ ID NO: 25001 - DNA, 1492 bp, Arabidopsis thaliana landsberg
gttgtacataatcttgaaatactagccatcatataaataggggtggacatttaccgaccaaacgaactcaaaccgactcaaaccaaatccaggcttagactcaaactatttggttatgatttttctcaacccaggtcggttgggtttcggttaaaaaccaaaccgaaccgataattcaaggcgtttatttattttcaattgagaaaaatccaatttcgtgaaaagtatcaattatttatgttttttaaacaaaaattaacactgaaattttggctaagaaattttgaagagaggtactagtttagctttaataattgagtcaatcaaaagctacaaatgaacaatcaacattgtatatctcttgatatatgcacgaactcttattttttctttgtaagaactaaacattttggattcactatatttatatccaaaatcttcaatattattgtagtaacaatataatagaagtaataaaaaaaaaaactgttgtggaattggaaaatcaaaaatttcagaaagaaagaaatcaagaaagtgatgaacataataaagcggaagcaaaacatttagtcagtaagaaaaaataaatttgggcctgccttaatgcctatctccaaatttgggctttcattattggtgaaacgaagaagcccaaatgttgacctattttataaacactgaaaacattcgtactcaaaagtgaaattttaaaactatgagggctctttgtcaattgttcatggattcatcttctctctttgaagtttgaactttgaactgaagaaacagaatttgaaatgatacaaagttcaaagcttttggaatttcaaaatcaaaagtttcaagaagtaagaaagaaatgaagagagtgatcagattctttaagcggaagtctgatcctaagcaaaagcttcgagattggcaacgaaagctacgacaagatgtccgtgacattgaacgacaaattcgaggtttcttgctgcttttatctcttgtatttgatcagattcttaggaaagtttcgaaatttgaggaatttagttagttatatgatgatttatattgatgggtttagggttttagattaaagatccaatttttgagaatgactattaaagtatgttcctttcgtacgaaattgcttcaatttgataatttggatttagggtttagtgtttgaggattagggtttatactgagtgagagtttgctttcagatattgagagagaaaaaagaaatgtgcataaagctatcaaagactcggtaaagcggaatgatttggtcactgctaaggtaaagtatgaaactttattagtaaatctgattcaatggtggaagaaattggagtttttaaagtgtttctctgcattgtgtgtttaaaggcacttgctagggaaatagtgagttctagaagaacggttaaacggctacacgagaataaagcgcaggtgatatattagaggttcctttatataatatatatctgta

SEQ ID NO: 25002 - DNA, 665 bp, Arabidopsis thaliana landsberg
tatctcttgttggtaaactcagcaacatttacatggtcaatcatagtcacaggttacactctctaaaacaaatacttgtgcttacaaccaaaatcctactttccattccctaacaaatttaattttcatacattttcctgacaccaatttagaagaaactcactattccatcttctgagcaacctctttgtcagccgagcacattgtttcttcttaaatccagagtcctttgggtttcatgaccacagaatcctgagtaacatacagcttttctctcatccctgtggcattggatgatcatgcgaatatggtggatctccatctgatgagttacaagcagataaatcaattatagattcaacatgaggaagaagtatgcaatcgaggttcaagaagctgggcaactattcagctgtttacgaagttacactgaagtgggcaagtgtgcgttaagaagaagacctatatttcaagctattcaactgtttacaagttacgctgatatcacaagctgagcaagtgtgtattaactctcttattatttttcctaggattaagtttgtaattatgcttgatattatcatcataacacaaaaattcaatggtaaataatatattattctgaggttgctaactatacgtagcgtgcttttgttattatcacc

SEQ ID NO: 25003 - DNA, 1011 bp, Arabidopsis thaliana landsberg
cttcggatccggcgaatgatcaatctggagtgataagaagaagaggaaatagaaggttattaagaagaagaaggagacgataatggagatggaggtgaattgacggcgtcggcggcgtcttcaaccaggttttcagagctaacgaaatcgatgttgagagcatcaagcgcttcccaatttacaggtgtggaatccatagttgctttcctcttcctcggctgttcttttgtcggcgacgagaatcggccggcgatcttagagtgtgggtgggatcgactatgtcttgtggcttgtgtgggtgaattttgtttcgtgaggagagaaagaagttgcaaaaggagaagaagaatgacgtcaatggtctaaggctagaagcgtcttgttacatagggagagtgcctaaatccgaaaggcatatgcgaaagtacctaaatccgaacatcattctaagacaaatgcctcatttttaaaagaatattacactctaaggcactttttaaaaaacatttccgtgattagacactttctaaagagaaggcactttgaatgaataatttgacctatttaccctttaatcagatatcgttctatctctctttctcctatcctttctctctctttctcttactttctccaaaaataaacaaaaatcaagccaaaaaatatatttcttcctttttctttcttccctcttcaacaaatcatccgcttttatgagaaagagagattgagattcagctttttaaattttccgcgtctgctttgatctgatttgaaggagaattttttcagaccatcaatttgagaatctgccctatctggctgatttagttacatgactcgttgaatgcttgaattggatttgcggtttgattttcgttttatgtttttgctgtttgttgtaaaattaatctgattacttgctctttgatttctttgtcttgcttcttcaatttcatattcgagattattctcttgaattggagattaaagccttgtagtggacttcga

SEQ ID NO: 25004 - DNA, 560 bp, Arabidopsis thaliana landsberg
cacgcgtccggtggatgccggcgccacagcctctcctgcattcgcttctggtcgccgtgctagcggtggccgccgatgttgccaactccggccacgccaagcccctgacgcctggcgggcgcgtggtacaccacaaccacggcaagttcacggccgggccgtggaaacccgcccacgcgaccttctacggcgggcgggacgggtccggcaccacggcgggcgcgtgcgggtacaaggacacgcgcgcgcaggggtatggcgtgcatacggtggccgtgagcactgtgctgttcggtgacggcgcggcctgcggcgggtgctactaggtgcgctgcgtggacagccctagcgggtgcaagcccagcgcggcgacactggtggtgacggcgaccgacctgtgcccgcccaacgaccagcagtccgcggacagcggcgggtggtgcaacccgccgcgggagcacttcgacctcaccataccggcgttcctcaagatcgccgaggagaaggccggcatcgtgcccatcacctaccgcaaggtggcgtgcgaaaggaaaggcggc

SEQ ID NO: 25005 - DNA, 1120 bp, Arabidopsis thaliana landsberg
  unsure (1)..(1120): unsure at all n locations
ttatatagtgttgaatggtgtggatttgaggggaatataataaataatcggtcctgctttgtaataaatatggttgtgctgagttcggtaattctgcctaaacctctctacctagttagatgttattgttaatatggcctttgaccaagaacaacttcagccgtgttaaaaaacattgaaaccaaaatcaatggttatataagattaacttgcactactaggatttgatcacagaagaaagaaaggggtttattaatttggttactgtatcttactctttttactttcggataacttcaattggcaatggcggttcgtaaagagaaagtccaaccattccgcgaatgtggaattgcgatcgccgtcctggttggaatctttatcgggtgcgtctgcactattttgatacccaatgatttcgtcaacttcagatcatcaaaggtaaacttagttcttatactctaatcatgtacagtcggtttgttttttgaaattctgtggtctagagctctagagttgtgttctgaattataagatgtcctctggaagctagccattatggcatttgagttgatttataatgctggacatggtgttgttctctttgttgtagattatatatgtcaaaatgttgatgaatgaagtttgaatactatagtaaattttagaaccaaatttggcgggagatggattttagaatttaagtctcttactgagtttttttgttttgaggctcataccttttgagtaggaaacgctacatgtttaatcatcatcatcacgcatcctactcaagactgataattcggacatcaaaaccaacgttcaaatggtgaactacaccctccctctgcttatcccttttcaaagaccnnnnnnnnnnnnnnnnnnnnnnnnnccagctaagatgttcaaagcaaaatatgcaatcatcttcaaaaaaaatggcgaagataggaagcatgtcacagacctaacagaaaacgcacggttggcggaacaaaaagaagtgatcaaggcatggcctcttggcactgtcacgcgtctacatactaattcaactgtggctcccgacaagtctgctcaccccacattacctaaacttttacataaagaacct

SEQ ID NO: 25006 - DNA, 1420 bp, Arabidopsis thaliana landsberg
  unsure (1)..(1420): unsure at all n locations
tgtaaagagctgacatacgtttggactagatttttaagccctgcatggctcccttttatagaatccatatgtaatatgcacggtactttttntgagtcatccaagtctagatctgtagaatgatacaacataaataataagaaactggatgatcatgacttagtaaaaaatgaagtgaaatgtgacattacctgtacgattagccacttcaccagggtggcatatgactattaaactccagtgaaggctgttataagaatttagcaatgtcagatttcgaactcatataattataacaaaaagagaactgccacagtttttcgtacttgtagttcacaggcacaaaaatgtagtcctttccaaacatgtccactttccttgtccactttcggacacgtagaaaagcagcctttccatcagctatacttgatggatctttgtcaagatcagcgagtttccggaagaaaaagctgttaaagaaatggaatctatgtttttcctccgtttgaatctgattcttcaaataactgtaaataacaaaaaaatacaccaaaaaaggttaaataaggtacattaagtttatagtatgatctgcttgtcattgcactagtaaaattgtgagaggtagtgcacatcaaaacagcaaacccaaaaatagttcacagcagcacatgccagagtatacgcattgcaagaaattaactttaagaactcacttaatatagaagtcaatgattgtgtcatttacaaatgtctctggctgcaagagctcaacatctcttttgcaaatggaaacagcatctgggtcaccctttggatagacaacatcctcaaaaggttcatcaaagctgaaaagacaacataaaactagcaactcaatatgaaatgtcacctctcaaagagccataaagtacaagtaatgatgtactttggtacatgtactcctgaagtaaaacagaagacaacatcttaatagacaaaatacatctcctatagagcagtttttaccttggaaaataacgcttctgttgattcaagttataccctgatacttccacgtcatccctacaataaacaaacaggacgaattgcaacaaaaagtcacaatagtgcctaaaatgtaaccaaaactaaatatgaacccagtgttagttttcttaggatttggtccacttttccctcaagaagtcaaaattatttccattcatatgcagattgcttttcacttaatgctttgtctattttttaagctttaaaggcttactcgaatttccttattaagtttatattctcatagtgttctaaccaaatgaatcatactcataatgtagttcacaatttcccagatatcagacatccagcaaagaatatttttccttataagagcatgcaaatacatcttctaaatgaaaatgggcag

SEQ ID NO: 25007 - DNA, 1316 bp, Arabidopsis thaliana landsberg
tgactttaacaccagctcctccaaagctgcaagcaacgtctgttgctctgttctgttggaaatagctattgatcacgaaagaagcatgagaaaccaaagtatctggttgaaaacaaggctggcttggctgaatagctgtgcaatcaacatttccaggaccacaagcccaatccaaagcacctttcagatctctctctgaagctttagaagaagcaatgcaccagctattactactcccacttgagtttgtaccactcgaattagagtgaaacccgttgctctttcccgtgaaatccaactgataaacacttgtctggtcagggtagaacaatccccagtttctctctgaatccaaacccgctttccgattctcgttgaacaatgagaatatataaacgttcattgcctctcctggctttgcaggtgtgccttggttggtaactacatgacggattatgttttaattgtacgtctccgcgttgtcagaagacgcatcagctttctctttcggtgaacctttggtgggccatccagtctcagtaaccataatcttgattgtcctgaagtttaaagccgtgagagcggtaataaagagcatcaacttgagcatcaaacatgttcttgtaaagcaaacccgtgtttgggtcaatcacttcagaggaagactcaatcaacacataatccaaagacacattgttcggagagtctctgtaagcgtagtacggataaagatcgatcatgaaaggagacttattctatgcaagaaactctaacattggtctcaagaaataagcatagctgctgttgaatgctccagcagaaggagggaaagatctagagagaattccgagggaaagagtagtcgaaaccttgattcttctactcaaaccgacttttctcagagcggttaagacattctgcatcgcggggacaacgaaagacgaagcattgatgtgtggatcatctgtagattcagctccaacggtaatgtaagtgatcttggtcgttggatagaatggtaagacgctgttcttaagccaggtgtccacatttgattgggattgagagaaagcgtcatgaccagagtttggaactccaatcattagctcaatgcttgtgtttcctatatgctttgaggacttgagaattgtaatcgtagattctaacgtatttgatgttgtgctgttgaatcaattgaacaacttttgacggtgttggatgatcgtcggcgcttttttcgtaacaaactccgaccttgcctccgtaacaacagtctatataaattttggattaattacttactttatttacttttt

SEQ ID NO: 25008 - DNA, 854 bp, Arabidopsis thaliana landsberg
ttcaaacacttggactttttgcagttgcttcgcttacacgactcgccttctccagaatccaacttaaccctgtgtgtttatcatgccaacagttattgcgacagagataaaaggactctacacagaggagttactcttaaaggaaaaaatcttacctcttcttcttagggctgctcaaatttaactcttgcaaagctggttcaacaggaacatcttgatctgcatcttcccggatttcattttctgtttggtccaaagaatcttgcagtgtagagatggacctttgtaaacccacttgtatattcgcagaacatgagtaatcttgagtaacattggttttacagtcctttgaagacattaaaatggcatttagatgaagaccaatactcggtacaacacatctcgaagaggattcacaagccgcggtgttattctcacttgatgtttgcttattcccgggcatctcaaagtcaagacaacgtcttcttataccgcggtgcaagagtgaaacagcctatcacacaaaacaaaaaccaagaagacaactcttttagagacagtaagtatttataaaacactgaagataactacttgtgatattactcctgagtttacctcataaggaatcgcattcgcggactccggttccttgtttgaatcgtgctgcattgtttgcttctccacaccatttctaaaacgtgcttcagagtttgatgctctctgcatcataaagcatctaaaagcctcagaagcatcatgtgagtcaaagattaacagctcagaagcatctgcaatcaaactttcccaatccggagtttcagttttcccctgaacattatcatgcatcttctgca

SEQ ID NO: 25009 - DNA, 1254 bp, Arabidopsis thaliana landsberg
ataacttatgaatctaacaataggcggcggcttatatggccggtcataatctcctcttatgtgttgattatgctaagttgactccaatcaacaattaaataatttttagtactcgagattgaagagataatcaattacttgttaaaaataattatggtggggtgaatggatcgtaattaaggattttgaggagggcgtcggtggtaattggttgagctaatgtggggctaaaattggaaagaaaaggaaaaggactagaaaaagtggcgatgtaacatggagaatcaaatcaatgtgataactttgtagcaaaacactacactcaccaatcaccatcaccatattcaaaatgtggagttttacccacaattgattaacatggtagatcatagatatgctctcataaattagggtcacgggataatcaaaaatcaaaagtggaatgagtgataattgactccacgggaaatcgaaatatatagtgggggttggttaggccatctaccaatgactttgttactcttatgtgttttcggatattattagttcgatcaacaaccattatataagttttttccttccaaaattgaaattaatataatgtacattgatacaaaaaaaaattatactcaataatgtatttattcataattataatctacatctaaaatgtatttattcatagaaaaaattatactcaataatgtatttattcataaaaaaattcataattatactcaagctatactacacatctatttgtgactttagtaaagtgatgaactagtaagtcataaaagaaaagaataaatttgggataggtagtctttgtaagtgttttcattaactaaatctgtgataatgaaattaaagatgtacaagccatctttaaaactctcttacaaaacacaaaaaaaaatgttgagaacgtacgtgaaaaaaaaatgagagaaaatcttataaagtagatatgtaacaaaacaaaaggatatatgactctagtttacggcgatattactttgttactctttttcaaaaaccactagtatgctctcgttttctgtcaaaccgcgtatatatcatatctgtatattaggatgaaattacaagagcaaaaaacaaattacattattcattcatgatccaactttgtcttattgttcttcgctcttcctttacgattcatgcgcaaggagccaaacaagctaaaaggctaggccttctattcggcaacaccgaattgatgtttaaact

SEQ ID NO: 25010 - DNA, 733 bp, Arabidopsis thaliana landsberg
taaagtcattactcagttctttgcatgaactatacatgtatagaaaaattatacgtcagcatttgttatttgaaaaatgaaaactctttctttacatgtatacccttacatcaatgaatcagtcacaccttatatgcaatttacttgcttgactaatcttcttgtaatttacagctaccacacaaagaaagtcatattacagttcttgaccaacatcattggtaacaagatcctctgaaatgatggctaccagtagtcattgcaggaacaaacaccatctctaaaatgatgaaaccgagttctgtctctagcaataatctcccttttgtaaatctttgatataagctttgtagcctcatgacaatttctgcatacccttagattcttcacgattgtaagtttagtcccaggctttgtactgatcagcccaaatgcaatagctagcttctcgctgtgatgccgcaatgctccttccttccattcttcttccatctcctgcaagacttcagaagtatctggaacaaacccggctttctctagtaacacctccatttcttctaacattccgtagatttctctgttccgtggatggaatttatccccgatgatgaactcatggaccacagaatctatttcgatagagctgcaaccaggaactttcttcatacctttatcattgaggagagctcgtgtttttgctactttcgtccatcttgctgctgaggcataaatg

SEQ ID NO: 25011 - DNA, 1379 bp, Arabidopsis thaliana landsberg
aaaccccaagaggtgtttagagatgctatgcacagctatataaaaatctatgggctattcaagagtcatttcggggacgccatttttgttaaagttagaagtctatactggtgacgaccttttgcctctcattcaagaattaaatattctttatctttgaataacaagaaactgtatggtccaagtataatcaactgaaagcagccgaaagagccgacagataatacattttaaaacaatcctcgtgaattatatattaagaacaaaattacctccaaaaacttcttaatttataaatgtcatcttgttatacgttgaatcctcaagcatttacttttgattcaagacgcacgatttgattcggaagaatataatctattatttcaaccgtgaatggctgaagaacattcagctgcccactctttgtcgaaaaaataaatacacattgtactattcgggtataattacaagtcgtttattttcttacaaacatctgaaaaaagaaacaaaaaaacagttgcatgagattcaccaaacaatgaaatacatgaaggagggtcacatcacagctggattagtgagtaatagtaaaaagacaattgaaacacagcatagcaggtcaaggttaacaaaaaaagaaacacagagatgaaaaaggaaagaagagtcattagagagatgctgaacaagaaggtggtattaggagctagcagcacctgaattaatggttcacactaatgaccaagtactgattgattgttgtggtcctcatagtttacatcacaacctacaaggctacaagttccaaacccccttgaaagaaaaggacagctccccacttgtttttttaaaccctagactctccttttaccctttgaatcttatctttatctttttaactgatccatgaccatgtcacactaattatttacctcatgatctattcttcttcttgcgaatctaacaatgtaattatacctttgtgttatgagtgattaaacatccaaactaaaccctcaatatactttgatagtcaaagatctcatgtcatgtcacatttcgacaaaacacaattccatttcgaattttcatatttgatgatcacaaaatcccataccataggcaaataaagtcacacaccaaagatttgacaaacgcagacacacactttgagcttacacacacaacaactctcgccacacgaatgaaactattaacaaaagacattttgagacatttttttcataagctctctttctttaccctaatcaaaatgcctaacggctcttggtgtcgccgccaccaccgtagctccttctccttcttctctaaccgatgtatccctattccggtatacttaataaacgattgtctcgcga

SEQ ID NO: 25012 - DNA, 1309 bp, Arabidopsis thaliana landsberg
  unsure (1)..(1309): unsure at all n locations
ctccaaccaaaattatacctaagaaagaaacaaagcaaaagagtaagaatttgaaaatgaaaaaagaagatcataagtaacaaagaatcgtattttcacctactatgaggatcttcaagctccctcttcacctcttcaggaagaccagctaacctttacataggaatcaaacaatccttgagaaccatattgaaaaaaaatcaaatctatcaactgaatcaatcagctatacctaaagatcatttacctaggtgcaagctgaagtagattctgtcttaaagcagaatatccaggaacctaaaaacacaaaaagtcgaaatctttattccctaaacacataaaggtgacaactttcataaatcttgatgagaaaagaactatataatatcaaatttacaataaagttatgtactttaatacatatttgacagattaagaacaaagcaacaaactttttggttaaaggaagtgattcatacatctttaacagagaggattccatgtccattaggtccaaatccttcttcaatccttgcagacaaatctatgttgctctcctgtaataaggaagagtttagaagacgaaacagaacacagagaagacaaataagaagaaggacttggctcaatctgaccttgagctctgagtaggatatggtgaccgtggaaacagtaggaacggtggagtccgacgagagagacatgtggaggttggttatcagatgagagaaagaatggaaggaagacgtcggtaggcgagaaccggtgaaagagaaacgaaatcggcggcagaccggagttcttagaattggaagcaattgactatttttatttattttagtttgctttcttactttacaggtaggttttatttttaaccaaaaaaacaatattattccaatcaaaaatattacacatcagctttccaatttgccacgtcgtatctccagcttgtcacatcaccattttccaaaagtgaaattaaggagacttcaagagttttacaagagtcttaagtaagtgataagtcttaacaatattctgcttcttcttgtctacaaagacatcatcctcaaaacaagaccttaaacctatgagtgtatgataaaagacaagagtaaatgaatatagagacgaattgagcttaagagtgaagaccataaaacttaaactgaattactcaaggtgatcacccaagtaaataataatttacattagtcatccgcaaactttatttacagggaatatccattagtccctaaacctacatgattcngtgagaatgatattaaaaccaaagaaataattg

SEQ ID NO: 25013 - DNA, 982 bp, Arabidopsis thaliana landsberg
cccatttccatgagccttgccattgcttcttgttttccggactaaaatgttgtacaactattttctgctgtagaattaattttgcaacttttatgattgaaatctaggattgtatatctaactacttcatggaatccgcggaaatcatatgaaatcagcagtggttaataagaatttatcttcgtactcgacttacatgatttaaactattggacatatatataatggtacctaatttttaatttttgttttttctttttcacagaattcttgcctgataaatttcatcaaaccaaagactattcccggttattgacaaatgagtttctttatgacttttgcgcgcggattaaaactcaaagtcactagagtttactcaattttctaaaatccaggttgaactaattaactgcgtgtggataccgattaacttacttgttaatataaaaaaaaaaatcgtaaaagggaccatcgtatgtttatatgtgtgtgtggagagagagatgcacccaacgcacgtccataagatgcatgtagtttataccaattaaaaaccaaaaaataaaaagattcatgtggctgtcaaaactctaatcgtttacaacacctctgtccttatatatatcgacccaacatcacttactatattcattaaccttctgcttcatcaaaaagaaagagacacaaagagagagagagatggaggtaatgcgagttcttcacatgaacaaaggaaacggggaaacaagttatgccaagaactccaccgctcaggttgatcattttgatacaaatatgcattatattctcgtgtacacatacatacgagtgaattattgttataacttaaacataatttggttctagaactgtaataataatgacaagtgtatactgattatgtgatcgcagagcaacataatatctctaggcagaagagtaatggacgaggccttgaagaagtttatgatgagcaattcag

SEQ ID NO: 25014 - DNA, 1422 bp, Arabidopsis thaliana landsberg
tcgtaagttatctaaacgttttatcttcttcttcttttaatattattcacacatgaaaattgtgttggtcgcgtagtgccaaaatttacgagttttttcttgtttaggtgggaatcgaaaaggaggaatcaaccaggctggtattgactattacaacaacttgatcaatgaacttttgtccaaaggtaaaagacataatctaatacaagctaaagtaacgctctcggtttcatatgactttaaattaagcttttagtataaaaaaagggacgaaaacattctaaaaagtaagcttaacacaaattcgatctgatttatactaaatcatttttcttccacccttcaaattaggatacatgcactacagtaattcttatgtaattgtttacaggaattaagccttttgcaaccatgttccattgggacacaccacaagcccttgaagatgcttatggtggattccgtggtgccgagattgtgtaagtcctcaaccttagtagccattacaattaacaggacagatcagactaattttattttgttgtgtaatgaaataggaacgatttccgcgattatgcggatatttgcttcaagaattttggagatagagtgaagcattggatgacattgaacgagccattgacagtggtgcaacaagggtatgttgcaggtgtaatggctccaggaagatgctccaaattcacaaaccctaattgcacagatggaaatggagccaccgagccttatatcgttggtcacaacctcatcctttctcacggagccgccgtccaagtctacagagaaaaatacaaggttagaaaagaaaaagatgatgtttcttaagcatcaagttactgaaatagacaacgttactgaaaaatatatatatgcaatcttaaatgttatttgataggcttctcaacaaggtcaagttggtattgctttgaacgcgggttggaacttgccatatacagaatcacctaaggatagattagctgcggcacgagccatggccttcacatttgactactttatggagccgcttgtgacgggtaaatacccggttgatatggtcaacaacgtaaaaggccgcttacctatattcactgcacaacaatctaagatgttgaaaggctcatatgatttcattggcatcaactattactcttctacttatgcaaaggatgttccctgctccaccaaagatgttactatgttctctgatccttgtgccagtgtcacaggtttgttttcttctcatccaatttttttatattcttttaatactttaaactaaattaacgagtccaaaatctgtgtttgtcaaatcaggtgaaagagatggagttcccattggtccaaaggtacttgttttaaacacaaacaacttgcaatggttatcaataattgccaacttattca

SEQ ID NO: 25015 - DNA, 1160 bp, Arabidopsis thaliana landsberg
aaccacaaaaaaaatcgcgaggacggagacagctaaggctaccttgtacaagcgtctttcaaacatgaaagttagcggggataggttacgatcaccacactgcaaaaagtacgcgtacgatcatttctggtccattcacgtggccgtgtctagtctgtattgtacgttgcatttaaactctagttacgcctatacaaaatttaagcaacgtatttggttaataacttaatactccttcattcttctaagtaagtaattttatagctttagaatgttaattattctcttagttttcctttaattatacaacttcaactttgaatggcaaaatataacaacaataaagacatactagacattttgtaactatgtgtaagatgttaaccatcaatattttagtaatcaatatgtgttttatcatttttttttatatgaagtcgtgtactcgtgtgcttttgtgttctttaaacatattttgtgccagaaagattcgaatttgccaaaggaataattaaatcggatggtcaaacaaaacatgatatttatcactcgtgctctaatcttgatttgctgaaatagtaaaatagtaaaacatgtcatgagatccgtatctctcaacttaacactttaggtctaggttctgtgtaatgtgtatataagcttaacacttgatttttaggttccataacaaactcatttagagatatgtgcattcattcacatttcacacataacaataatgtttggaagatctatgaatataatttcatggttaatttgtgtaatttattcgttatgcatccaaatcgccttcgcaattcgaagtacaaatgagtactccaaactaacttaacatgaaacatttatttgttataagtaattgtgaacttcttttttttatgacaaattgacaagtaattgtagacattaattaatcagataattaatttttaacttgtaaaaagcatatagcaaaatataaagccggcaaatctggaactggactgacactaaggtgtcgtgcgatgtccttggggtgggggaatatgaagacataatggtgtgaggccatacgcacgtgtccctacatcgaatatcacatgtactcgtgaaaaaattttatttttaaaagttcatattattaacaagattcatgaatc

SEQ ID NO: 25016 - DNA, 720 bp, Arabidopsis thaliana landsberg
tagggaagctcttctatacatagccatgctcaaactcgagatagaagctttgcagagagaatatgaagatctcaagattaccaaaaaagaatctttgcaccaatttcaggtttctcctttcatctatttctttatcattggtgaagctcttctatgtatattacatagtcatattgagaaacttttgtctatcctatgaaaaattgaggagtttttttaccaaaatgtaatcgaatatttttatataacaacaccacatataactttgatcatagaaaaagtggatcatatttttttggaactgattagcttaatctataaacttctaagctcaaatataagctcaagataaatgagatgttcatatggcactctaattgagttgttcacatggcactctaagttcaatattattcttcttcttttttgaactttggcaggaggtgaaggtagagaagattggggaaatgtttcaagtaaaaataaaaagtccacggggagaaaacaatcttgtgaatattcttgaagcatttgaagaaatggggttgaatgtggctcaagcaagggcatcatgcctagattcatttgccatggaagccattgttgcacctcaatccaaagacaagctttgtagtgtggatgatttgactcaaactcttgtcaaagctcttgtcaagccaagtgtcccactgtaacatttagaaaataaaaaaataaaag

SEQ ID NO: 25017 - DNA, 1005 bp, Arabidopsis thaliana landsberg
cgtgtattctcaaactaatagaattacctaaattatctaaaagattcaataatatccaaaaaaaatgtaacctttattcaaaatatccacagtaatttctagttatttgaaatagccggatataaatatggctctaccaaatttggatagtgttttagctgataattttctataccttactgattttagctggctgatttaaaaagtctaatttggatgtaacttttgttatttgatatcttaaatatctttttactggattcatgtattcgcaagtactatcctatgttttatcagaaacaaatatatctattcatcaattgttgtggaaataattgtttaatcagttttgttgggctctcaaaacctaatccaactctcttattagtatgatattatcttttttgggcaaccgtatataaatttaatttttaggctcttttctaaattatctcgcattaattggcgttagacttgatttatatattataccgctcttttttaatcttttaatgtgggaactgatttgtctcccaacaagttcaacatatggaacaagaaaaatgagtattgaatagtaaatttgtgtataacgttacccctcaatactatataaagaggcatgtcacattatattttggtttactccaaaaaaaactgagaggtttgaacgtttacttatgaggaaaaataagtgattcttgcattagtgataatttcagcatctccggttcaaaaggaacttatggatgtcagatcgatttttaaatatagtatgtaggcgaagtttggtgcaaaatgtcgtaggtgtgagcatagcatcagctcctcagtcgtattgttaccctaataccatgtcatcgtttgcattttcccccttataaattattatgctttgatgaaatatatagcagtttagcttacccagcagtcagatcagtaatcttatgtttccaaacactatacctgtttttgtgttctcagttttgcaatgggccactggcg

SEQ ID NO: 25018 - DNA, 3202 bp, Arabidopsis thaliana landsberg
attccagggcagctattttatatcctaaagttaacaatcaaacagaaatagtccaagccaattacgtccttggaacgcttaccttacacatacagaaatagtctcttaagaaaatagcgtttcacatcaaaaaaaaaagaaagtaaagagtaagacagacaaacatggaattaaagtttgagtgatgttgaagaagcaacaagtgcgtgatctcatcagatccaatccaaatcccaatataaaggaagagtgagaattgttgagctcaccttttgtagacttcaccaaaagttccaccccacaaacgttttctaaataaaccatcagcgcattgtttgccttcccaaagctcgagcccaccggtgacaatcccaggaatgaagacaacaggatgtttcgccttaagaccttcttttttgagcttaacaccgggcgggtcaggcaaaggacccgtgattcgctccgttacatactgagggaagctcgcaggcattgcgttgtaaaggaagagaagaaaccaccaggttacacacacacacccaatgaaccaacaacaagaatcgatgcacgaccacttccctcctccgttcgatttcttatggtgggatttggaagattcgtgtggtttcttttgcgaatcctcatcgtgcaccacctcttcagatggcggcgtcgatggtttctccgtcggctttttccgatgaataaggggcatatctgtcacttgaaattaaaccaggttaagctatacggactttgtcaaatctcgtccaggaatttagaacacagattagggattgttagatcagtcgagagagacaaagagctgtttctctgcgaatttctggaaccaatcaaatcaaatttgtctcttttgtttattgtcgacttttctgtttttttctgttctggtattattcctctaagggactcggaccggatggcaaaacttgaccactttgctcctggttcaggttgcggttcatggtcaaccttagacccgacctatccgtttcgttgatttcattaattagtctgcgttttcttgggtggagtgcagacagattttcttctgcagtaggcgttaatccgataggctcttgttgggcctcaaatagttcagtaaacttttcgtggggcttttagtatagcccatgtattaataacaatattacacttgggaaatgacaaaaaaaaaaaagagaatgaagcggtactcttatatcaaaaaaacatattgtatatcttcgaatatgatgcaactcatgcaacaacaatactagtaggctacatgtattgctccatttaattacatataacttaatattctaattcataaactttcttttaattatatattttatgtaagttttaaatattgaaaaaaaaaaagttttaaatattgaaacatgataagtttttacatccatttattataaaaaaatagtgatgatgatgatcaaaattttgagtacattttagagtgttttaagttttacatttgttgttacaattgttatgagtctgatatttcaaatttcgttttcaaagaaaaatcctgagtttaccttaaaagattaaagccagtttttaagaaataagtagaaaaatatcaaaccagacctagctgaaccaaaaattatacaaaatctagaccggattaaaccggctacccgaggaatatgcctagtaaaagtgtcgtcatcggaaaagaatcttttacatggctgaaaccgcaaatacgatcttcaagagagcaacataaaaatacttgtcaaataagtaaagaaaataagacactcaatatccacactcccaaaccatgaaaatatgaatagaaatctcaatgagccaatcagaggccagcaaagtccatctcattgtcccaagcggatatacatccgacaaaactcaacctcacaagtagactctcccttcttccgtaactattcgtccacgtgtccttccctctcaccacttaccttcaaaaccaacgcttcttttttagttccttggtccgaagcgtttaccgatgagagaatcataaactcccacttggagctcaaaaagtgtaagagacaaccaacaataaacgattcatctcttctcctatcctctcctcttcgaattcaacgtttggagaatccagcagccgcaaaatggcttcgcttgtgtattctccattcactctatccacttctaaagcagagcatctctcttcgctcactaacagtaccaaacattctttcctccggaagaaacacagatcaaccaaaccagccaaatctttcttcaaggtgaaatctgctgtatctggaaacggcctcttcacacagacgaacccggaggtgcgtcgtatagttccgatcaagagagacaacgttccgacggtgaaaatcgtctacgtcgtcctcgaggctcagtaccagtcttctctcagtgaagccgtgcaatctctcaacaagacttcgagattcgcatcctacgaagtggttggatacttggtcgaggagcttagagacaagaacacttacaacaacttctgcgaagaccttaaagacgccaacatcttcattggttctctgatcttcgtcgaggaattggcgattaaagttaaggatgcggtggagaaggagagagacaggatggacgcagttcttgtcttcccttcaatgcctgaggtaatgagactgaacaagcttggatcttttagtatgtctcaattgggtcagtcaaagtctccgtttttccaactcttcaagaggaagaaacaaggctctgctggttttgccgatagtatgttgaagcttgttaggactttgcctaaggttttgaagtacttacctagtgacaaggctcaagatgctcgtctctacatcttgagtttacagttttggcttggaggctctcctgataatcttcagaattttgttaagatgatttctggatcttatgttccggctttgaaaggtgtcaaaatcgagtattcggatccggttttgttcttggatactggaatttggcatccacttgctccaaccatgtacgatgatgtgaaggagtactggaactggtatgacactagaagggacaccaatgactcactcaagaggaaagatgcaacggtagacggtttagtcttgcagaggagtcacattgtgactggtgatgatagtcactatgtggctgttatcatggagct

SEQ ID NO: 25019 - DNA, 766 bp, Arabidopsis thaliana landsberg
aggccaccactgctaataatagcagatgcagagctttgcagagaagtcgggattaacaagttcaaagatcttccaaacagaagcattcgttccggaatctcagcttctcctattgacaagaaaggcctcttcttcaccaggtacaatggtacatacatgctctataaaactatgtatgtttttgtttctataaccatttatgattctttgacagggacaagagatggcctaaaatgagaaacaccatcctatctctctatcagccttcacatttaacaagtcttatccctacaatgtatagtttcatcacttctgctactcataatcttgattctaaaccgcgagatatcgttttctccaacctcttcctcaaacttaccactgatatcatcggacaagcggcttttggagtcgacttcggtctttccgggaagaaaccaatcaaagatgtggaggtgactgatttcataaaccagcatgtctactctacaacacaactcaagatggatttatcaggatcactctctatcatcttaggcttactgattccgattcttcaagagccgtttaggcaggtgttgaagaggataccgggaacaatggactggagagtcgagaagactaatgcaagactgagtggacaacttattgagattgtgtcaaagcgagccaaggaggctgagactgactcaaaagacttcttgtcattgattttgaaagcttgcgagtccgaccctttcgcctaaaacatctttacatcctacta

SEQ ID NO: 25020 - DNA, 1287 bp, Arabidopsis thaliana landsberg
catatatgttcttggcgttcgacaaaaaaaagacatatatgttcttggctttaatcatctaactcatatttatttataaatctacttgttttagttgaaagatcaacattttttctatttaatttcactagcttaacctattttttttattcaatctttgtaagctgtttgctttagatgcgtttatggcaaaataacagaacatgactggaaatgttgtcatgtgtgatatgttgaattgggtccggatcctcttaaaatactaaggtactcactattatatattttatcggaaacattttgagattcatttttttttttatcttactagttcttgggtttttattgttctgtgaaatatcgcttcatgtatttacatttcccccttatttcatctatatttttttaactaaacaatataaagtctagcctaattgcttcaaaataaatgaaaaatgtacactgtttaaatttagggtctagttttcagaatttgaaactatatttttagattgaaaacacaattcgtgttaattatgttatgttttcttaataactcatatattatttgagaacacaattgttttttgaactaattttataatttgtatgacaggcatgacgacccccttttattgtccatggaaagtaacaacttcattcttgaacaagacgttgaggacacaggatcatatcaggaagagtcggagacggaatctgagagttctgaagatgaggagacagaatccgatgatatggagacaggttctgaatgtgacgagccaaggccttgaatctatcgttcaacattctatttctattctaaagtattcgcaaatgttatgttttaaacaatctctttcggactcaaacttgatttgcttttcagtattttctttctaaacaatctctttcggacttaaacttaatttgattatatgcactttattattgatttggagaggatcgttttgaatttttattaaaataaatgtaagcaactagatatattttttaaagagttaatcaactactattttcttaaaaatttaatcaactataatttcttttaaaaactcaaaattcaaacgtgatttgtgtacgaaggtttatgaatctttttttattccaaggtattgcaaaaaattgaaaaacgttacaacttattttctttcttatcagtttttatataagcgaacatatttataaatatattatgagtaagtgtatatattatgaaatatgacttttatatcgatccaaggtactagatatatgtgggtgagc

SEQ ID NO: 25021 - DNA, 554 bp, Arabidopsis thaliana landsberg
agccaaaagctcagcatggggggctttctccccatgaaagccatgtacaccactctctttttcctcacctccaccaccgccaccaacagccccaacgtgagaaacacggacaccactgtcccgcccttttcccaccatttcttcacctcttcctccacgagcttcttgtccactatggctcaaactctccttagccttgttatacctttcctctgctgcttttatagtatccattgacttctgctgagcattggctctatacccatgaatatcctctagcgacgccttctcatgctcctctttctcatccttcttcttccctgttcctgaatcgctgctagtaacgaattttccaacggagtgaggcatctgagtcctcttcatcttcgtctctccctctccttcatcagaaaccggcatgttactccccttgtctgagagagacacgaactgtgtcccaccaccttctgtttgatgcctgtgtgtgtcggaatctttgcctttttcggccatggactcgaaatgactcgtcatctttgggactcagtctttct

SEQ ID NO: 25022 - DNA, 893 bp, Arabidopsis thaliana landsberg
aacttgtttctgcatttattttgatttggagtatgttacattcggaaattgaaacattattaatgatacataggaagatagaacaacagtttgggatcttaaatagacgtgttttagaggcaaatcatactaggacaatcgcagagacgcttgttgtgacgtttaggagtgcaatcacagtagatagggctaagccttacacttggattccatgtccataataagtcatttagacatttttgtcctccatcgtctgagcatgaacctctgaacacttgttgttttgatgggcaccactgccttctctccccagcagcttcacctaatccatcaacgaaaagaagagtttttggttaatcggagatcgatgagaaaaattgtaatctcagcagactgataagaagaaccttgtgaaaggtggcttggaagaagggagagtaagacagaggaagccaagaagattgcagccaacttcatatgtgtttctgtaagtttttctctctttgtttttttctttgttcttttatatattataattgttatgattatgtgattgtccccaaacaagcactaacatttaaaatattggcatatattggagtgtatcatgagttttgctgttttgggtagtcctatacattagaatgtatataatctctctatcctaaaacaagttattcaataagtggatagttacttttgtatattttcaataatatcagtagctcattttttctacacatgttagttaacttcatctacccctatttattcaatttcttacttttgtctaaagtcttcactttcttatatgcataatatattaatcaagaaacataataattgatgtataagtggaattgtagtctcattgcaccaccttctgaataata

SEQ ID NO: 25023 - DNA, 452 bp, Arabidopsis thaliana landsberg
aattctttttaaaaaaattttgttgggtactatttttctattaacatgtcaattaatataactagaaaaaaaaaatcaatctactaaaactaggttttttagcattttataaatatttgtatgagaactttctctaattcagttcatccagttaaccattgttcacttattctgcaattcatttatttatctgatataccagttaaccttaaatgttgtgtaatcagtcgtaaaattgttttgtgtaatgttacataaattaatagaatctaatagagtatatggtttagtaaaccatatgattcattctgtaatgcaaaccggtattgtatcttactatataacaagtgctattgtatacttgtgaattaatgagaaatacagagaatcatttcttccttcttcttcttcttctctgcaagaaacctttgctctttcactcgactatctat

SEQ ID NO: 25024 - DNA, 810 bp, Arabidopsis thaliana landsberg
  unsure (1)..(810): unsure at all n locations
tcggtcttatgccagcttcgtacatcacagttagagtgagtctattgttcaatctcattccgctgttctttcgtgtttaagaggctaacatttactttcatttacacaggctggtttggctcttggagatctcagatcagtaaaggatttgtatgatttcaagaccttgtcagtgctgttcctcattggatccatctccatattccctgcccttctaaagagaaagagagtatatgaatgaagagtcgaagactgaagagtataatcatttatatagatattgatgagcagcacctttcagtcgcatggcagcatttcaaaggtgtttatgagctcaagataaaagaagaagattgtttctgcaacatcgcggagcttaaaatcgctaactctggctttgatttgtttattgtcttcgatttgagagcttctcttaccnnnnnnnnnnnnnnnnnnnnngtgtagctagtttactgaatcatgattggctttgtatattgaatacttgattcagagatctgactctgcagcctattggcttatgtataacaaacatgattatgtaaatgcttgaagacattgctttgaccaaatatgggtgattctgatcatataatggttctatacgcagaaaatatgaagcaaaattatccatgcttataacaaaattgagaaagttgctcatctacaaaagtggaaacgaaaacaaaaaggaaagattcagtttttcttttgtgagttctcatttctcaattccaagtatttagatgattataattactttggtgaatcatcagatttagcagtgct

SEQ ID NO: 25025 - DNA, 1068 bp, Arabidopsis thaliana landsberg
tgcgttcatacgttaagataatagttatgtagtaacgtcacacgtacaactaacgtgaagacaaaccccttaatttctctctttttctatgttaaaactttttcatcttttaaaatattcctcaatgatggaaagtttttaatctttatctttttctttgaggcaaccgaaataaataaaaaaaattgtttgatttttctttttaatagtctgtattgctacgatcaccatctttgttttgttgcttactctgtttttttctagcgtttcaaatataatcattactctctctgtccatagaggttaaaacatttataattactgcatatatatcatcatgattacttgtttttatctcttttcttcaatttctttctctttattagctttatctttttatcctccatacaaatttataatcatgttcttcttctctctttgatcattgattttttaaaaagaagaaatttaaattcacatgaaaacgaaataaatgcgacaaatgatttttcctatagctaatgtaattcacatccgacgtgtgaagctgcacaacccatgtgtgatgtaatgatttaacatgaacaataataatcataacacaagctttggttttattgatattattacactctttttctcatttatttttcagaaattcgtaataatacttttgttttgttttacttgtagcaagaaagcagaaatggagaggctaaactcgaagctgtttgttgaaaactgttacataatgaaagagaacgagagactaaggaagaaagctgagcttctgaatcaagagaatcaacagcttttgtttcaactcaaacagaaactctccaaaactaagaactctaacaatggatcaaacaatgacaacaaatcgagctctgcttctggacaatcttgatttaaatcaagaagacgttagagccagagatctggaatccgtacgtaggagaacattaaaagaagacccaaccttgtggaagtattttattttgtttggtgtattataggaagataagtagtatcgagcactgtagtagttattatgaaaagaagatt

SEQ ID NO: 25026 - DNA, 1031 bp, Arabidopsis thaliana landsberg
  unsure (1)..(1031): unsure at all n locations
tcagtatcaagagttacagaacgcacataagatctgaatggaattcccttaaagagcatgacgtgttgtttttgctttgtatacgcccttcatttgagccattaggtcctgaggaagctgataaagctacagttccacagaggctcgggcttcagtatgttcgtggttgtgaaatcatcgatatccgcgatgaggagggtaatctgatgaatgattttactggaagagttaaacgggatgaatggaagcccccaaaaggtgaaatgaggactgtgactgtcgctttagatgctgcacagtatcatatagatgttacagacatcgctgaaaaaggtgctgaggatgtgtatggcacatttaatgtgctatgaggaggaaaccaaaagagaacaacttcaaggctattctggaatctatcagagatcttatgaacgaatattgtattgtgccggagtggttgcataatgtttttcttgggtatggcaacccttctgctgcacagtggcctaatatgccaaacctgttggaaatagtggacttcaaagatactttccttaatgcaaatcatctcagtgaaagtttttcagattatgaggttagtacctatattcttttgtatatgatgtgatctagaagactagaactagttcctttccatgtctctaataatttgtgcatattaggtttctttcatcaatgctgaaggtgctgaagctctggatccaagtcctccgtttcgaatcactcttccaaagacactaaaaggaaatggtgctatttctggaaacaagatatctgaagtcaatccagcagataatgttaatatggtggatgcttccccgaaggagaaacttattgttgaggcatataccccacctgacccagggccttatcctcaggaccagccgaagcagaactcagttaaatttacacctacacaggtactacttatttctacatcctaagtgcagtatgctgatttggttnttatataattgtgctgtgctatacttgtcaacttttcgtcattc

SEQ ID NO: 25027 - DNA, 1580 bp, Arabidopsis thaliana landsberg
  unsure (1)..(1580): unsure at all n locations
gagaacctttttcaaagtaacgtctaggactcttgggtctcgagaattcatgcgctactacaaacagaagccagcaccgtcttctcagaagcatattgtcaactctctaacctccaggtttgtctttaaccgatcagagatcatttatcactgtctctgtgtagaatttgaatctgacgtgaatgggtcttaaaacacaggtacaagatgatgggtctagcaacagtgcagtcaaaggaggccatagtgaggatgaaggtgatgagagagatgaacaaaagaggagcgaaaagcagtgtcaggctcggaatgaagagcaacgtcatcaggaatctgcccaacaatgtcacctattagtcttgctcctcgattttcaggtctctcctctttgtttgattttgtgaccagagttttggtgagtaaatctatctaagtttttcactagtactcaagtatcttaggcccatttgggtctctgttttgtctgatttagtcttttgaaaatgttacgttttggctgagtttgtatctcttgcccagtgctttgtacactctacattaatctatatttcatttggtagaagatcaagagctaatcaatctttatctgctaaatcataaatctagtacacttttaacttatctatacatttgttttagataacgaatgctctcgacttcactttctctagctatcttgataaattgtataaaggtaaatgcacaggtcgatttacgagttcctcacaaaccgcgagtatatctcgacacgaatatcttgcatcatccactatatctctttattatttatcactctattgctctctcttacaggcactactgtttcaaaagagagaggaacaagtttaaagcctaactctttccaaagtccaacagcccaacttcacaggagcccatcgaaatcataagtcttctaaaccggaaagcttttgagtcgaataaactgaactgagagtaaccccgacaactgaatttattaaaaagtaattatattatagatttacctcgccctaattggcgggaagctctaatcaaaattggagggttaatccttcaaaaattctttcatcgctattaaaattcccccaaaatcttctcttccctttactttgatcacttttcaacttcctaaatctcttcacagttactttcgattttccgatttcgtagcttcgaaaatgttctccagcagccaattcgagcctaattccggcttctccggcggcggattcatgtcttctcaaccttctcaagcctacgaatcctcctcctccaccgctaaggtaatataatccatcttccatttcgttcaattccaccgattaggctacagatcgaaagtttccgaatcgctaaacgtttctctgtaacaatcgattttggaattgctaaatctgctctgtatatgttttgtgggaatatgcagaatcgtgatttttcaaggtcttgttccagtgacggtgaagcaaatcaccgaatgtttccaatccagtggtgaaaaatctggtctcgtcatcaatggaatctcactaacaaacgtaaataccatntctagatct

SEQ ID NO: 25028 - DNA, 880 bp, Arabidopsis thaliana landsberg
ttttcatttattaaaattaaaaaagtccttattacaattttttttaaatctattcctatagaatgagcgtgttataaaaaaagcaataccaatttaatgtttaaattcacagggagggtttaggtccatataaaaagggatcggtataccgccggtgttttcataaagtgccaatcataataaatgatataatctagcgcaatatacgaaacgcatattttttacacaacctatattaattaaaatttaaactttttagttacaaaaatcgattcacggtgtactatagggtcaaatatagggattgtacaccaaataatatataagaacttaggattgtatatttataaaatacaaaaaaaataggttatgtatatagattatcttttaaacaaattacatattcaaaaaaaaaaataacaatagccccgcggtgtactgcgggtcaaaatctagtatatactgaaagaggagaaaaaactgaaaaactagagaggtaaagaacacattcagtatcggtagtggagaagttctgacgccggtgaggaaaagcttcaccaacatcggagaacgtggctggattaaagttttcaataatagcgtatgggagcgtttctcatgtatgtctaattctaatctcctaatcttctaactaatcttcttaattatgcaattgatatccatatgactttacaatcatcaaggtatcaagcatcctttaaacttcaaaacatttcttttcaacaatttgatgcaacactcgtctcttttgatttaatagaagactcttcaaataaaacttgtttctaaaaaatcacccaatctggttttgtgataccagattatatcgaatatcttagttataaatagatacaacgat

SEQ ID NO: 25029 - DNA, 1122 bp, Arabidopsis thaliana landsberg
acttttgaaatttcgacataaattacaaaaaaatataagtagcggaacaattaaaatctacaaaaaaaattaacattaacaaaacgacgaagaacgacaaagaatcgaaacctgtggtttatacactcaatcctggcgtaaaacgataacagtattcagtattcactaatgagggtttaatatgtgattaagtaagtaattagtggataactcgttgattgggctccgagtaccaattgaatgtgttgtcgcattggatgggaacataatgggacgcaaatcgaaagaagtcttaaagccgttaatccaccgtcacgacctaaaaaactggtcggctaatctataattaaattgattatcaagattagcaagtgtctctatttaagaggtctcattagaccaacatgcgtcgcacaaaacctgtaatgggctccgtgcacctccatttcaatcagttagtataattataactctcgttgtttaattttagccaatggattttttgttattatcgaaaattcgtcacggaatcagaaacatttatcggtagcatcgcctccatccccctaactatttcggattctcgatccaaggggatcgcctcggtgatatcttaccgcgacaaaaatcgatgcatgttcattgaatctcctataaaactgcaaaatttttattttcatttttgcaagggagagcgaactacacgtatatatgaatattgcgtgtagtttatggactatataagccatatgactaatatattaaaaaattatacaaactttatacctaaactaaatataatttaaatgattctgtttccaagagaacggcctttataatgtcagtttcttagatgaaaaatgctataatgcaaacagaaccactatcagtctatcacatatcacaatcaaaatatggtacgtcacatgacatataacaaacatgacgaccggaaaacatattgccattttcgagccagaaacatacatggaccaagatcggtttatagacttatagtccgtgtgagatactgcgatgtgtcgttgaggagcaagttttgaacgaccatatgtacactacaccccctaatggttttcgaataattcgctgtttaatttccta

SEQ ID NO: 25030 - DNA, 770 bp, Arabidopsis thaliana landsberg
gtgaaactataatcgagagtattcttatgagttccatcaaaaagaacaaaactttaaaactgtaacacgaacattcatgtggagctgattcagattctaaagtgaatttaccttgagattgttacgagagacattcagtgaaaccaaaccgacgattttccctaaagcatcaggaagaagcttaagctcacgatcagaaagatcaatcctttcaacgactccaccatcttcagcgtctttaatcaccgctaaaacctcctcattcacttcatcaccaccgctcaatgattcaaccgacgaagcataaaccctaccaatctcctcctccaaatctcttaactgcttctcatatccttcatgaacttcctctaaactcacaaccgcagcgtgaacctgctcttccttagccgcatcttccggcgataaagaatcattctctttgatctctcggatcttagaccgagcagaagagacagctaaaggatcaggtcgtggcccaagagagccaaatacgaaaagggtctgcgtgattgtactgggaattgattcaatcaacgaggagattacataaggattggtgagaaggggataacgattcgctagagattgctgaatcgctagagacggtggcgcgtgagaagcgggatcggaatggtggaggacgtatgagagtaaagggaagatctcgagatcatgatccattctcaattgaaatgaagatgagagcttttgagatcgatgtctgattaaacgaaaatttacgagtgaag

SEQ ID NO: 25031 - DNA, 1076 bp, Arabidopsis thaliana landsberg
taatatctttgacggcaaaaagagatacgcgttccgttcgataactcatttcttacaagaatacttgcagattcactaggtaagtgcttctcctttccagtgcgtgtgcctctacgtttagctctaaatatattttctttgtgttgaggatttctttccattccttgaagttccttcaaatgagaacaatatcctattatcctgttacgtgcaggagggagctccaaaacattgatgatcgtcaacatttgtccaagtgcacggaacttgtctgaaataatgtcgtgtctcaactatgctgctagagctcgaaatactgtaccaagccttgggaatcgagacacaattaagaaatggagagacgtggtaagtggaattagagtattccgttctctttctccttcttttctcatatattgacatgcatacgtataacagatggaattgttaaaatataagtatagaatcatagtttttgactcagtctgttaggattttacttaattactctgttggtttgatctctacctcttttggagtttagtttatttctctgaagaacagatttgggacatgtaatttttttgcttaacttactatgtacacgtagtttgaaaaagtaccaacctgtaaacatatcctttcttcccgtaggcaaatgatgctcggaaggaggtattggagaaagagagggaaaatcagcgtctaaaacaagaggttacgggtttaaaacaagcacttaaagaagcaaatgaccaatgtgtactgctctataatgaagtacagagagcgtggagagtttcattcacactgcaatcagatttaaaggtcttcgatgctgactgggatagtgtctccttatttcaattattccttataagattcctttctgctaacgatttacttatttgtttttgcagtcagagaatgcgatggttgtagacaaacataaaatagaaaaggagcagaattttcagttaagaaatcaaatagctcaacttttacagttagaacaggaacaaaagctgcaggcgcaacaacaagattccaccattcaaaatctccaggttggtact

SEQ ID NO: 25032 - DNA, 548 bp, Arabidopsis thaliana landsberg
ggaatgcaatctggtgttatgccactgcctatcatcaaatcgtatgactgtagtgagtccttggctctaccgttttttgcgtaacccacaataagacaagtccatgttattaaatccctgatttccatagagttgaatataacattcgcgtcttctaagcttccacactttgtgtacattgtcacaagagaattgtttactgacaaagatgaaggaaaaccagatttaatataattcccatgtacctgttgcccaaactccaaaagagttaactccgccgaggcgcttaatacactcgctgtaacaatcttatcaggagtaatgcctccaactctcatgttacagaacaacttcagtgcttcatcataagatccgttatgtgtatttcctgtcacaagagctgtccaagatatcacatctttctcaatcatcccttcaaacactttcaacgctgaatccatgatccctcttttagcatacatatccacaagggcgttattcacaagtttgtaagtcgcatacccggttttcacaatcagacaatgtgc

SEQ ID NO: 25033 - DNA, 967 bp, Arabidopsis thaliana landsberg
tagtcccaataaaactagattctgtagcactcgaagttccttctgtggtagtgtcattcgtttgaggagatttcggttataaacgaatccctaacccgcttgtaaactttgcaaacgcagacttctcggtgttttcgacaccagagtcgttttgtgtggaagcaaaaggctgtggaactttcaagtttttggcccaatttgaaatcccagcagcagatagttttgatgctactcctttaggtgaatcatcgcttccagcttctgcagcagtaacaacaggaggaggaggaggatgattatctggtactgttcccgcagcagcaggcaaattcggtgactcagacgacatcgtttctatcttaatccaaaatgtgaattctcaaatttgcaaatccctttcttctgtaagcatcaatcaaaatacatttgagtaaaagattctttatacatctaaatcaaataaaacatgttctgaatcaggaaattaataaaacatgcaaaatttgaggatttaatcaaaggaataaaaatctcgaattcagatcaggaaaaaaggaatcacataataatgaccaaatccaaaaaaggaacatccaatagaagttgaaggggaaaacctcagagatcgagaagcatatcctgagaaaacgcttcttcgggaaatgaaaatcaaaagagaacgacgagtaaggtaatagctagggatttaaattttcgggagagagatacatttttagattggggaaaaacaaaaacacagtgtatcggtgatctcaagtcacgtggggagttccagtcaacaattaatccttgccgttagatcttgatggtttttagatctgaatccaacgttgcacgtgatctctccaaaatttattttaacgataaataaaattccaagagcttactaaaataaacttgtgaagagggttgcctgaattttttgttataatttcagttttccatt

SEQ ID NO: 25034 - DNA, 3384 bp, Arabidopsis thaliana landsberg
caaaattgaaagggggattatggttggttgaatttggtttatggtccggtacagatgagacagtcacttataatgtaaggagttaacccgtggtttataagtattaaaatcagaattgatttgaatcaataccgaactggtttaagcctgcaaactttttaaccattacaacaaaagacaacagtatcaagtatcaaccaataaattgtctttttgccaaagtcttatactcctcctcgtccatagtgtcgcataaaacacttcctctagtctccggcaatccaaacacaaacaatccacacaatcctatgatcaaaccaaacaacccatacgaccaaaactgattttcccgaccagcagcaaccatcactggactaaacacgccgccaaacaccaatgcttgcctcaccatcgaaatcgccgagttcctcacacatgtcggaaacatttcaattgtgtaaataagcgtcatgttaaatgcggtgcatgcgctgaaaaacgaaaggagctctaacacaatctgtaatgaccctagtttttgtcctaacaccgcgattagagcgctagagattccacttagagctgtaaatccgatcaacgcatctctcctattgattttatcaatgaagaaaaacgttatcagaaaagctgggaactcagacaaggcgttgaacacaacccctaagtaaagattgaagtttagattcgttaaagctaatggcattccataataaaccataccgataccgaatccaaccaccattgccgctaataatcttctaaacgaccaacttttcctcaccaagatctttaacgcatcataaacatcaggatttgacttggattgatcattttctacttcaaaacataagtttgtgaagctcatagtgattgcattagaagcaatgctttggagaattgagacggcttcttctttacgaccctttacgataagccatctaggagattcccggacgaaactccgaactaaacagcaatagattaaagtcggtatcgatgtccaaacatacagattcctccaagaattcccttcattaatgtaacctaacatcggaagcgataaaaaccctagcgtgaagcaaaagaaacccatcgctccaacttgtcctcgccattttttaccgactaactccgttgatagaacaagcgcgcaagtcccgatcgtggctcggccacacccgttcaagaatctcaaaaacgcataaacccaaatgctcgttgagaaagctgttaacatggaagagagagacattatgagacacgacaacaagagcatgttcttacgaccgagcgatgagtcggcgagtgtagagagagctaagccgccgattagacagccgaggaagaatgagcttgcaggaaatcccttgaggaacgagccggcgcattgtagcccccactcggaaatgattgaaacgtgtgggttcaagtcccaagaccaggtttggttgggtaaggtgcagaggttggaggaggatgtgttgcatactgagtcgactcggtccgagttgtcacagtgccacatgggttgtgagtcggtgaagacggtgatgaatgtttgttgagcgtcgaagaaccaagcgaatgagactaaagcggcttggagaaactgtgcccacccgaagtctccaatgcatcgctctatcgtctcctcaagggatcttggtggcggaagatttgactcggacgagttgaaatctgagagaagcggccgagtcgagtcggccatatataggaagagatagggttttgtttacttttatgtttgacttgatttgcatgtccaatcaatttatgttactctatatatagagaataaactacaactttagagtggtgggaattttttgtaaatattgtgatcgaaaattggatgcaatactgctcgtgagaccgtgatgactaggatccagctagcaggacatgtctctagtctataatttatttttggcgtctaactcattacatatataaacacacatttattagatatgttcagtaagttaaatgattaatgggtttgagatctctcgatggctaagtgaatggctgaggatgagccatctcttggttaatttctcagaccttcttccccaccgccgttaatttgctgcatgtgatcccccactcaaccactttggggttaactatttattttagggtctacttctttataattatcattttttcttctatgggttattatcatttcttgatatacatcttcataaaaaaagccagtttcatttattttacatcttcgtcaataaattcatattcttagattgaatcttactgtgacgaaaaaaaaaaaaaaaaatatatatatatatatatatatatatatatcttattgtaagataagtacaaaattacaatcaatagatgctgtaaaacgctataataaatctgtttcaataatgatcaagttgcactggttgttgcagttggacaagataagcgtaattgctttccagggcatgggagatttctttaattcgaatgtctttggtcatttggaagcttgtacgtagccttatgcatgcaagagaacttaaataaaatatacaaatttgtggaggcatagttttgtttgatacaaaacactggaatgtcactgaaagtctaatataacatttagatggatgctctctttttcatgcaggttatatcaatatatttgatatttttatgtcggcataatataaatttacttcaccataagaatatgaatataacattttcaaaaggtataatagaaatatttgaagtaataatattagatacaagttgtaatgataatttgacgtatacctgttaattttaattcatacctttagtacaatacaatttttaattttacataaaagctatactttttccttgacaaaaaattattgcttcttttttctttttctttttccattggatgcaatgttaattaatacttttgaaaatattaagtctacatagttttcttgctgaaatcgacacttttctattatcttacaaaaacaaaaacttactcctttaaacctactccaataattcatgcattctccgattatagtaagtatatccgcttttaatggggaaaattaaatgtgtcgacaagaaaaataaatggcgtaaaacagaggcatggagaaatcgaaggataatcaggtaaatgtaaaccccttaaactccaaccaagataaaattatacttaaaaaaacctgaaaaatatatattcttctttttaggagaaattgaagtttctttcacattttatttttcccgcattgaactttgaagaatgctcaaaatcgaatcaagaaaatggatccaaagatgttgttttgtttgccagaaggagatgca

SEQ ID NO: 25035 - DNA, 1184 bp, Arabidopsis thaliana landsberg
tatatacaaaactcatgtgaagtgtcttgacatgtcccaaatctcaagtaaaaagagcatcaaaaagaacgttgttgtttatcatcatcttctttcagcagacctaagacgaagttctaaaagccaatggttaaactgaccatcactaaccttcaacatctcagacaaaggcatcaaaatcccatgttccttaagcaatctatgccttggctttatcttcctctccaagctaaacgaaaaatactgagggaaacgtttcagctccttaacatctccacgcatctcctcaataaaaaactcaactttaggaactaaattgttatcaacactataagtcaacaacgccggagatctcacaaccatcttcgctacttcttctctggtaaaccctaacccttcttcaagatactcaattttggggattagggttcgttccacattcgatacaagcaacaccgtgttccgtgacgtaatcgtgtcgcgacccacgaatcctagggttttgaggaacgttaatgcaggacgaagctgataatctacagatgaaattagcaatcgaggacaacgagagatcgatttaggtatgtcttgctctgaaattgaaatctcattggataagaagcgaagaactggtaagatttcagattcaggatcagaagttaacaaatctggaaacatgtcgaggatacgaccaccggcgggtcttgagagtccggtggaaaagagtagagtctcgacggagacgacggaggagattggagcagaacggagagatgggtttactcggagagctttgtgaggatctacgttaaggtcttgaaggtaaataagcttctctcggaatagaatcccagtatctgaggtttccccggcgaaacatctaatccttacggcggagaaacacggcggcggaaaaagagagcaccttgcaatcatcatcgtcggtgaggtaggaaaaaaaagtttcaatctttaaagtgtggataaaacaatggaagaagggtaaaatagtaattctgtcgtaacggtcagataaagattaaacgacgtagttttttggttgagagttgtttctgcttcttcttcttcttccaatgaggatccctattctcaagcaacttaatcataagaccggtttttgcgcagagtctgtaaccgcaattcatcttctcagtctctatctg

SEQ ID NO: 25036 - DNA, 960 bp, Arabidopsis thaliana landsberg
gaatatgaaatgattaactctcatccatcgcatcccttgattgcgttgaaaccgagtcttcaagtgcttcaaggaatgagtccactgtgaacttgtctgcaaaagttaaaactgcataagagaaaaagaaacaacatgaatggaaacaacatcgtaagaatcactcacatttacttgggtctataccaaactgagtcaaatctatttgtcctgtgcggagtacctaaagagagagatgttgagttagaatatcgacccaagaatggaaacagcattgtcacagatgggcttacataggtaaatgcatctacttgttgacgaaaaggagggctctgcaacaactccagtatatcttctgtcctagaatgaccctgtgattgattagattagcctttgggttagtctggtacatgaccaatgtgattagcctcagcttagctttcaatctcttgttctttaagctttagcaacgggtcctttaacaagagctaagggtaaggtttcgcatcatatcaatttggtatgagagccaggttaaagggaagtttttgcttaaaacctatggtccataacagacattttcagaagacagaattaaaatggagagaagtgcatgtaatgttcatattcatagaagacagaaacattgaagacctggacatacctcaggtaaatgcgaagatagtagttcttgtacaggcaacgcctcaagcagtggcattatcaactccggtttcaagatatcccctaatgctaaacctttgagcgatataacaagagtggacgataaggtcagtaataaacaatagtagagagaaagaacaataggcagttgagaacatgttattgttcacagaaaggggctgggccttgccatttcaaaccaatgcagactttaggataaatatataatgtcttagccaccatatcatataccgatcattgaaaacatttcactac

SEQ ID NO: 25037 - DNA, 1427 bp, Arabidopsis thaliana landsberg
  unsure (1)..(1427): unsure at all n locations
cggatgctgtttgttaacaccaggagcgcagaccaaaatcagagtgaatgatccaatgatgaggacagattatgtgattggtgcactaggaagcacatgcaaggatgtcgaactacatttttggagagaatgcaaactgaacaatctgaatgaaccgttgcagaatcgacccgaaaaagtgctcgaagatcaatggtctcattaggttcacttgagattcaccgataagcggagggtatagctcaattgatggatattcatgtgtagtctagtattcacatatcaagtgcggtgcatctttgacagcatgtgagctctcataataagcacgaacggaccacaaagaaccaganaaatcatatcatgcctcacttatgtggaaggaagagtttttcaagaaaaagagacgagattgtgagttatttagttatgatatatagaaacctagtttattctgttgaatttgtatattgtttaacgtagaaaatcaagactgggaaaacgccatgtcgagcggagtttttcattgagagtcgcaagaaacatgatggaagtttcgtatcagatgaggcaaaattacgcgcggttggttttattaaagtctctgttggatttactagttaactatgtagaatatttatctttctttgctcgttttaggaagcacttacgacgttattgaatctaaatccgcaagtcacatacaacggtactgctagcttggatgacgaatatagtcaggtgttcggtccagagcgtccaggccgagtacgttgtgttggtcgtgggcccacaccttcaagattagtgagacattccaatgcaactagaagacatgatatagaaaattctgaattagttgcccagctgaagacacaagtaaagacattaggtgatcaagttaatgcaatgtctacgttccttggacaaatacttggtaattcaaccggtgaacaggtaataatataataatactttgtaagttcaattgcattattataattttctatatatagaggcaaatactaatgcttaaacaaaatattcaggcaagcgcgtgggctgcaaattttgcaacagcttttgcaaacatcccaaatccagcatttgtaaacattccaaatctgcctaatcctcaggtaaagagtatttacatattaatttcatatatactaaaaatttagataattaacttatacgttgaatgatttttttcaggaaagggatggtggtgttagctagctagtggataaacgtttaagctagagttgaaggcaatgctagttaattagtataatcaaagtttggttagcaaaactttttagttacttttaaattgcggatggattatgtagtttggtttcagttttttaattattaattaagtttgctttttggttttcaataattaaattttgtggatttaa

SEQ ID NO: 25038 - DNA, 4778 bp, Arabidopsis thaliana landsberg
aatattgtaagttgcttaaaagctcaaaatgttaattttgtggctttttgatcagccaaaccacttatgttttctagattagcgagtgtgtttggagtcttgtttccagtgtctgattcagtgttcttttgaatacgtttttgtaggtcatgttgctggattttgtgctttatgtgcgatccagaaacatgtcaggactgcccgtcaagctaatggcagaatattagcaccaaaagatttggtctcaaacttgcgatgtatgcatctcagacctttctggtttacactattgtgtgccaattttggcttaataatcagactaatgaggattctcatctgattggataggcatatcccgaaacttcagaaattgccggcaggaggatgcacatgagtacatgatcaatttgcttgaatgcatgcacaagtgtagtctaccttctggtgtaccaagtgaatcctctgatgcttacaggagaagtttggtacacaagatttttggcggtagccttcgaagtcaggtaaatttgttttggtgtcgggaagtcttacatcttttgagcttgtattttacctatgtgcggaagatctctgtgacatgattaatggcctcagctctaacattttcttttccaattcaggtgaaatgcgagcaatgttcccattgctccaacaagtttgatccgtttcttgacctaagtctagatatttcaaaggcagattcattgcagagagcactttcgcgtttcactgctgttgagctcttagataatggtgcaaaggtttaccaatgtgaaagatgcaagcagaaagttaaggctaaaaaacagctaactgtttctaaagcaccttacgttctaaccgtacatctgaagcggtttgaagcacacagatccgaaaaaatcgataggaaagtagattttacctctgcaattgacatgaaacctttcgtcagtggtcctcatgtaagtgggcttctttttctgctctatattatttgaagttgacttgatcttatagttgttttgatgattgtgttcgtgtcttttttgatctttaagcttcatggttccctttttaacaaatacaatacttgtgtttaacaggaaggtaatttgaagtatactctatatggcgtgttagttcattatggtcgaagcagccattctggtcactacgcctgctttgttcgcacatcaagtggcatgtggtattcccttgatgacaacagggtaagtagaagtgttctacattttctgtattgcaaaattttggtttgatgctgtagtttttctctacatagttccgtgttgaggtggcacatttttaattgctaaatgatgcgtaagcaaacagacaagaatcaagtatagctagtagtaagttcctctttacattgttcttgtaggttgtccaagttagtgagaagactgtgttcaatcaaaaggcatatatgctattctatgtccgtgatagacaaaatgctgtccctaagaattcagtccctgtggttaagaaagagagctttgccacaaacagagcttctttgatcgtagcttctaacataaaagatcaagtgaatggctcaacagtcatcaaagaatgtgggtttggcgctcttgttgccaatggtttagcacctttgaaatcatgtggcccaagtactcctgctgtcttaactcagaaagatttaaatgccaaagagactcagaacaatgccataagtaatgtggaggcaaaagagatccttgagacggaaaatggttcggcacccgtgaaaacttgtgatttagctgcccctactgtcttggttcagaaagacctaaatacaaaagagatcttccaaaaggaagtgccacttccgcaggctaatggggaaggatctttggtaaaggaggattcaaaggctgcatgcctaatattaccagagaaggtgtctcctcacctggatggaagcgcaaatgctcagactcttgtgaagttgcctacccttggacctaaagctgaaaatagtgttgaagagaagaattctcttaacaatttgaatgagcctgctaattcactgaaggtaagtgtatataaacatatcataacgagtctgtatttttattaaaagggttgagtgtttctaacttgcttctcgctactgctacaggttataaatgtgtcagttggtaatccacctgttgaaaaagctgttcttattgatcaaactatgggacatcacttggaagaatcggccacttcaattgagtcattgaagttaacttccgagagggagactctcaccacaccgaaaaagactcgcaagcctaaaacgaaaactctgaaggtggaattcaagtttttcaagctggccctgggcttacgaaaaaagaaggtacagagaagggagagattaagtacgacggtagctggcgagattatgctctgaggagctcctatcaaagaagagagttaaatatcaagatacaaatctcattgccccaagtaaaatgatatcgagtagtgatggtgccgttacgtcagaccaacagcaacccgtgggtagttctgacttgtctgaggcaagccaaaacgccaaaagaaagagagagtcagttttgttacagaaagaagctgtgaacattctcactcggggtgtgccagagacagtgggtaagtccttgcttttctcaacttgtcacttttagacacttggccatgttaattactaatgaaaatgaactcccaatgataatgaacttccattcattggccattattcaaaactgatgataatatttttggaactggcatcaatcaggcctccataccttaatgcaagggcttattacgtgtgattggttttgatgggattgaatcttataactattgcagttgccaaatgggatgaggaaatttcagcttctcagaagaggggatcaaagagtgaaggcgcaagcagcattggttatgtagcggatgagtggtgagtgtttgggttattttccaagggttcagttacatattgtaattaggcaattagcttacatagaaatggtattggattgtggcagggatgaagaatatgaccgagggaagaaaaagaagataaggattaaagaggagagctatagagggcctaacccgttccagatgcttgcatcgaagagacaaaaagagacaaagaagaaatggacacaaagcataactgacgcaaagacagcctacaggatatgaataaggactataatcttatacatatatgtaatccacatgctgctgtatctggcgtaaagtaatgttaacaaatgaggaaaagataggctatagacagtagtagacattgttcgttatctcttttcctctcagttttgttctctttgggataaacagagaaagaccctatcccctgtttagtgagattatttacactttctttctcgtctctcttgatttttaaggcaattttatggcacaagatctgagatatatatgctcatgaaaaagtatctcagtctatattacctgaagaaattcatctcatataactgaatatccaaaccactaaatataataacatgctatattaccattatttatgagtgccataaaccctagtaaaaacctcactaatctcattcttcctcgccggcaaaagaaaaataaccaagactttggagagaatgtcggacatggatgatgaaatcacgaggattttcaaggtgcgtcgcacggtgcttcagatgctgagggatcgaggttacactatagaagaatcggacttgaacttgaaaagagaagagtttgttcagaggttttgtaaaactatgaacaaagtgaataaggaagctcttttcgtctcagccaataaggggccaaatccagccgacaaggtacatacatatatgaagaacatgtcataaagttgtaagcttttgatccattgctgaatcttatcttgatctttgacttggtgcagatttacgtgttctacccggaagggcctaaggtgggagtcccagtgattaagaaggaagtggcaataaagatgcgagacgataaagttcatcgagggatcgtagttgttccaatggccataactgctcccgctagaatggccgtatcagaactcaacaagatgctaacgattgaagtctttgaggaagctgaattggtgaccaacatcactgagcataaactcgtcaacaagtactatgttctcgacgatcaagcaaagaagaaattactcaacacgtacacggtgcaagacacacagttgcctcgcatccttgtcactgatcctcttgccagatactatggactcaagcgaggacaagttgtcaagatcagacgaagcgatgctacttcattggactattatacctaccgatttgctgtttgattcttatccactgtttcttttgttttgcattttactacaaacattgcttcttcattgttttgaatactaataatagactcaaattggaggctttacaaaacataaaaggactttaacaagttttaggaagtccttcttttcagacatacctttcatgttcgaatatacaatggtggaacctgaaacaactggtaagatgatcattcgtgagtccagctgcttgcatgaaggagtaaataactgttggactaacgctgcgaaagcctctgcgtacaagatctttgcttataaactcagctttcgatgtcttcacagggacttggcgctgatacctgaattggctctgtgtaggcttgttgttcacaaagttccacatgtacttcttcaatga

SEQ ID NO: 25039 - DNA, 921 bp, Arabidopsis thaliana landsberg
gaaatgattgatggggtgatatgctatgatatttttactgtgcgctgttgggttttgttgctttgagctcccactgtgatcaaagctcatgtgcttggatcatgactagactaagcccctcgtcggacttcttcacaggcgtattttttccaatatctttatagtagatctgagaattgactatagcattcaccattagcttctgtttcttcctctttccactgatcttttaggttcttgataacattgataatccatttcaaattctgcaggtacatatatacacatacaagtctctgtgaaatatgacatctcagctaaaacgaactttaaccaagagatacggtgttcttgaactgtgggagatcatagtgattgctctctttgcagccttcatagtaatccttgtcctttcagtttggctcagcttccgtaaaaagtccaaaagatctaatgctacaacgcttcctgtaactcaaagccctcgctttaccgaagaaataaaagaaataagtgttgatcatggttcatctaacaacaatggtacttcttaccaaactcttgatgagaaattcgttgaggacatcgagaatggcgataagttctctggttctttggagaaaaaacccctggttgggtcacatttgcctcctagtactccttcaacaacagctccttcacctctcttgggtcttcctgaggtttctcacattggttggggtcattggttcactctccgtgaccttcaactcgcgactaatcatttctccaaagagagtatcatcggagatggtggttatggagttgtttaccatggaactttgactaacaaaacccctgtggctgtcaaaaagttgctcaacaatccgtaagatttctgataacacctttttttatctactatcattgttcatctctgag

SEQ ID NO: 25040 - DNA, 4329 bp, Arabidopsis thaliana landsberg
  unsure (1)..(4329): unsure at all n locations
ttcgattagttggccatcaagatgaaaaaacacccagcttggagacaatcctaacgcctcttctagatacccacaaatacgattctacctctaccattgcttgattccaacggtctagaagcgattgcccgatcaatctgatctgacggctggggttagatctagggtttgggtgtgtctgtctatagctatttaggatcaaagacgcagatacagatttgtatttattttttttggttgttgggtgggtcaacaaagaacagagaagacgaaaaacaaaatgtaataataaattttcttttattcgggccattgggggaaggagcaaaccgtgagcgtgatgaacggatcggcacagtcagcatgtcacgtgggttatgggacatcttattgggcccattcttttgtttttcggtttaatgggcccacttttaatattggttcgtgagcttatcaatactcaaacatttttttttaggcatttcaagtgatacatctaacaaccaatcttaacgagtttcggatatttgagatgaactttctattctccaaagattttgtatttacgttagctcagctactactcttactctatagtctatgggctaacatgccatccgagccattaactttcaatcaaccgcttacaccttaatttaacaccgttacagtcgaacagtattttagattctagcataaaattcattagatactgtatgaattgaccaattatagtagcacatacatgaatttgtacggtagtataattcatgtctgaattgtaagagcagaacataatattgtatgaatgaaccgttttctctcaaatccaattgtaacataggacaatccctacatgttatggacctatatagtactaaatgaagatatgatgctgtatctaggaaataatagaacaagggggatgagattgcaaaaaacatgtctccgtgatttagattccaccatgggattcaaaacgaagaagctttgacagctcatctgatgtgtgatgtgaaggacacaacgttagccagcagcaacattccccaaatcgaaaaagtcttttactcctcccagcaatagtggcgcagctccggcgagatttgtgattcatgtcttctacttatagccccggtcaaagccccggaagctcccggttgctgcagctaggcgctgccggctctgcctcgcgtcttagatcttcttcctccaagaagccgcctgagccacttcgtcgagccgttgcggactgcctttcatcctctcctcctccggttaattcgcaccatggcgcgatcccttccatggctccctctgaagctctcaggaatctccgggtgtgtaacacttacgctatgcttgctttattttccttattgtgaaatgggattatctctcgtccatgtgtttccatttttgcgtttaattagaggtaaattgatcatcttctatgattgtgtaaagagaggaattgagtatctagggcttttgatttccattggtatatgaagagagcagtgtctacatttgcgctttctttgagtagtgttggcgtcgtgattgatttttagagctgaaaattttctattctatcagtactattagtttccatgttttagttttgtgaagacctttgtgctaatatcccacacattactccttttgttctagtagccattgcatttgaagcctcatgtggatagagagatatgtgatggagaagcccgttttcattatctattgtattaggaccttggtagttgacgggacatatttgatctccgtctttagggcattgcatgaactcacacaatcgcttgatgatcacaggattatctatcagcctctgccacgactgacctggcctacaacatgctgttagagcatactatagcagagagagatcgcaggtaattgatccgtacttcatatgtttttcatcatactgtgaagctttgactcttttttgaatcatagtttggactggctacatgtatttttggttctttggtaacacttgcaagtctgatagtgaaacctgtattaactatgaagaataataatcaaaggtatttgtagaatatatgataatctgaacagatgtcttaggtagaagtgtgtgcctgtgtggggaaggactcctagcagaaagcaaacaaagtcggaaaagtccctttatagatatatcatcagcccaggttgactattaaagtacttgagggcttattgctaggtggacatattgttgaatataacctgatttagctaggatgcagattgctataatctaaatatttctcaagtagcacggattaaatattagttgttgctaatgttcaatcaattttctgcagcccagctgtggttacgaggtgtgtggctctactgaaacggtatatcttaaggtaaaatttctaattgaaggatgtaacttaattgttttcatttacttctttgaactagcatctcttcacttgtcaatgtcctaagtacgtctgtctcacgataagcataattttgtgctctgtttgtggggaacgctaacataatggttgttcaaacctagagataaaatgtgcattttttctatattttgaggtttgtctgtaatatgtatacatgtcttccgatgttttccatggattacatcttacataataatgatcccaaggtgttcttacactacagatataagcctggcgaggagacacttctgcaggtcgataaattttgcgtgaacctgattgctgagtgcgatgctagcttgaagcaaaaatcattgcctgttttatcagcaccagcgggtgcttctcctttaccagtgtccagttttgcttctgcagctctggtgaaatcattgcattatgtgcgttcccttgtggctttacatatcccaaggcgatcctttcaacctgcagcatttgcaggagctactcttgcgtcaagacagttattgccatctctatcttctttgttgagcaaatcattcaattctcaattaagtccagcaaatgccgcagaatctccacagaaaaaggatgctgcaaatctgtctgtttcaaacttgtcaaatatacaagaaattaatgctatggaagacactgaatacatatcgtcagacttgctgaattggcgttgggttggggagctacagttatcatcagcttcttctgaaaggtacattgtacatgatttcggttcctacaaatgttcaaacgcatctttgcttcctttcttgactgtacactcctgtactttcgtaaacaaacactcattcaatacatatcttaagcaattccttcattgcatggctatagtacttgactatcggtgaacattttctctgcatgcttagcgaacgccctgttaatctccaagacatgaacaattgtaatcttctggaagttggtgctgctggcctgcttgtaggagatatggaagccaaaatgaagggtcagcactggaaatattttggtaccgcagagatgccttatttagaacaactgctgcagccagcttcagtcacgatgataacaaactcagcctcagctcgctcccacttgagagcaattacagcttccaaacgcaccagggctggccctcagcagatctggtatgtattctagtgtggttttctgaagtattttgcaaagtgatggcttaggattatacttgccttttatgccttgtaagttttatcatggcttttttttagccaccaagaaactggactcctagattttgaataagtgttaaacttataattatttcnnnnnnnnnnnnnnnnnnnnnnnaattgtgttaaagcagtagacgcaaaaaatatggatttcattttttaactaagggcagtttctaaaatggcactgggtgttggtgcatatagcatcttgttcttttatgttttggaaattagaaaaaagctgatgatcccttctgcattgttagagactgttctaccacttatagaatgtcatttccagatttttcacataaatggtgcaatttagaatcgatacagggactgcactttgaaatgattgtacctaatgagaatgatcttttgtgcaaattcttatattaaagcataaaaatctattttgaaagttaatgtgagttcttaaactgaagatttgcatgatctgcagggatgattccactgtaaatacatttcgtccacgtgccagaccgctttttcagtatcgtcattacaggtattgttttctccatttccttaatgtcactcatttttttttggctgtgtctatcttaatagctttaatgtttataaggttttacttaatagcttgcaatacgaatgccctt

SEQ ID NO: 25041 - DNA, 1216 bp, Arabidopsis thaliana landsberg
tcatcagctacagtgaaatccaggaatttactaataatcacacgtaacaagagttctataactttatctgtttttgtttttgttttatgttctttccaccaagatagataatcatgaaatactaatatttactgaatgttgaaattaaattatgtgcagaataacaagctgagaaaacgccagggatgggagaggtggataaatccaatgaggctccagctaccataatgaagagactgatagagtttgactgtttgatatcaatcgtttgttactaaaatattatgtcgtttgtggttactaaaacaattataatctttgttctattgtagaccttctacatgtctttggatttctaaatattgtttatgccaactcacatactacatagttaaataaaagagaaattataatgaatatgcccaaaagactgaaaaattaggtgacggaattgttgactatttcaacagtaaaagagctaatgaagttaccttattatacatttgtattttttgttttttaattaaaatttcacatcttatttttattactaaatatttttattgttatcaggttatcctcgttaacaattattaaaaaatattacgtataaattatacgttagagtaaatattattcatatatcaaatattttaacgtttttatataaatattattccgttatataatatgctagcatgatattattctatatatcatgttgttataattattatcatcttaattatgtaagaaaaagtctaatttccttttattggtttgaatatacataaataaaaaataaagttttacaattttaaattgataactatttttttaacagataatttataaatttatcatgatatcacagtttttaacacgttaaacaaatagttatatgcttattatccgcaaattacaattaattttattcaatagaatttttgtaattaatgtaaaaaaaaagatatttttagtttatatattatttatctttcatacttaccaaaataactaatatttatgcatagattcttaatttcttcatcttccatgcatatcaattaatatagctctaaataaaaacccaaaagcttatgctatttgcatcgttgacatgagcttgcatatttcacgacgtccatgccaaaaccctgtaataccagacttagtgttgaaataagaatgtataaaggagataatacaacatcaa

SEQ ID NO: 25042 - DNA, 2194 bp, Arabidopsis thaliana landsberg
ttcgcgggaagtctgcgcgcagatgcatgaggagagtacctactaggtgtatatactaaacacaagccagcgcctaaaaaaaacactaataatggagtggaccagagttacagctccattctacgacttttggtatagtgcctcaaatttcttttgtaaaatggtaaagattgatgtataacaaatttgatgtgtttttcctttctagctaaatcttagtagtcattcccgaaatggtttgcctatgtctgcctcttcacaaccatcaaattatttcatagaaattcttaaacttgttataacggcgattaaagtgcaagtattgagtgtaactagatcctcaattccagaaagttgaaggagtgttgtacaactcagaagagcacatacaacagataaaacagaaatagatacctgaatataaagctgaactaatgtacgaaccgccttaggaaaccaacaaggcaacatctggaggagtgaggtatcacgtgccgttgagaagaatacaccgtcacgccaattcaaatactctgacaagactgataaaccatagagtcagagcgagtatgtcctcactatacacagaataaaagaaaaagtgtggtggaccaggcttaaccattcttagtcttggtccgcaaaaggttcccggatatatcttccccaagacaagcactaacaagcttactccataaggtagggaatctctgaagaaatgatctcaaattctccaaagtgcactgcgcagaagagttagtgtgcctgttcacactgccagtactcaaggatttttgaattggcactggagcacacatcatagttgctaaagctgccatttctcctgccccatcggcaatgtcatcaacagtacaaaccatttcatcaatctctggaacactgggttcactatttggtgccccgttacgtgacataattgagcgtgcgtttgaaaatgaagcatcatactcccggcccttgatcctggagagtagcaaccattttgcccagtgagaatcaccctgaatacatggacagattcttggcattctcagtaaaaattaagtcttcaaaagacaaaccataggcgtacaaagaacagacttatggacacaaatatattacggacgtggaaagcacttaccacagcttcctgcaatgaactgagtgaatcattatctaggaccaattcgtgatgatcaaggtacagatccagaaggtttggcagattatactgtgtgcagtaatgtatgaatagcttgtgttcagcatcaagggtatcaacatttgctcctccatcctttatgacaaacaaagatttagcgatggcgtcaagtttcctccttaaagaaacttcacaattaccaaggatgacccctgccggggccagaagatatactacatctagagcgttttcccaatagtcttttaaaaatataagtttacgtgccagttcctgctacatgagtgttgtagccacaaggagcactgcatatctccaggcgatctaaatatcctgatataaggatcatccataagtccggcagatatttctcaaatgtagcatatatacctctccggagaaagagttacatgattgacagccagaagactgtttcggaccatccaaagcaatttgcaaacttccatcatataaaacatcctcaggaatgagatccaacagcttaagaacttcatcccagtcattgtgacacatataatactccagctgagaatcccatggaacatgaacacccatgactaagggctgatccaagactatctgcacaaaatattcaacaagaaacattactcaaaaaccaacaaatgcagacgttatctgaaacgaacaaaacaaccttcgcctgagtaagttcatggaataatacaaaacaaaacaaaaaaaatgttgatatgtatagtctttaaccttcaatcaaatgtatcactgttactctcaccactgaaatctaataatgtcgacttccaaattaagggtgtttataggactaacagatggcagtagcagccctctaatgctctacaatgtgctaattcaagtaaaaagatataaaatgcaacccaagattaaggaccatcattaaatagaatctagttaagagcacaatcattaaatacagatctacatttcatctacactttcattaagaggaaaagataagcagagggtagc

SEQ ID NO: 25043 - DNA, 1448 bp, Arabidopsis thaliana landsberg
  unsure (1)..(1448): unsure at all n locations
aagtcacatcttatctcacattcacatgttcaaaactattcattttaccctggattttcatagtaacatttatattcgtgtcttctaatttgttttcatctctaatgccagcttgcaaattttttctttttttttcctaagtcaaatttctagatagcatcctatataatgattagtgttatcatttcgctcgtgtaggctaattatcgattttcttttattttcaaagacacatactcagtgctagagaggagctatttgtttccgtaatcctgggcctctgagagttttgaacaaacatattgggctataacaaaacccattattagcgggccgtttatatctggattctgaagtccagtccaactatcatagcgaaccaaccgctccgtgattcaatttaaccggttattgaaaaagtatcttatccaatatttagtcttaacatatttcattcttcttcctccctattgattaatgaaagaaattcagtttctaagagatcaaaatccgatttacactatttctcttctctgattctttcacttatattttcatgaaaattaccggttaatttcgtgatgaaacaatttggaaggtttagcaaaaatgataatgtttgttctttatgaaggaaactataattgtgcagcatagtagtagtttgttgtcttgtaatgtgaagaaaattccgatttgcgacaaaatttatgtaagtagatgaagaagtgtgagcgcacggctcttaataaaaagcgcgtggtgcatagagaaaatatctgatagtgggtttgcttagctgtctggtccctacttgngttgttgggcttagacgctacccttcttaacattctcatttctcagcttctccagtacttattacggattgccctttctccaaaagagtctttttttttttttgggtgaataatacgtagaattaatttattaattataattgtaatcaaatttatatttaatgagaattgtcttttttatagaaaatggaaataaatatcaattccaaaaaagaaaaacgtttttaaatccattttaattaatataggttggttaaaagaatttggcccccgcctataatcatatgggctttgagaaaatatttttaaaatccaacggtcggattagacccaatttttgtttgaagaatatatatatatatatatatatatgaaaaatcgcactcattgattcaataattgtgtgtttggatcactcttttgccttgaattgtctttctctttcttttcttctcctctctatcttctcttttgttgttacttttgttagtcttcttctttgtttctgagaaattattcagtttacttagattttgtttaattcattcacttttttttcagtttaactagatttatttattaaaagtttctgattagtttatgatgtaagttctgctccacacaatacca

SEQ ID NO: 25044 - DNA, 1525 bp, Arabidopsis thaliana landsberg
  unsure (1)..(1525): unsure at all n locations
atgtaatatagagatagatagatattaggaagaactgaataatctcacgagaaaatatatgaaactgttttttattggatattgaaaaattgtgagccagattgagtggttacgaagaatttggttcccacatgtgcttaaagtagaggagaaaggaagcaaggaacactcataagtgcgatcaaacttaaatgactctcctttttgttttctttcaattatttttttttttcctcgttggatcgtcattactaataagatatccaaaatgatacaagatagggttttgattcccaaaaagtgtagattcttgccaattagtggatgtatacttaatgaaaggttgtagaatgtggcacgtagagttattcgttttcatggagaacatgttcatctagagaatgtcgtatttgtagaaccgtttgagaaaaacattttcatcaaaatatatcgtatatgcataaccgtccattgtggattttaatgttgcagagaactgtatcgtaaaattgataggtactgtttatcgtaatcataaatgtgatatatagttttaatacgtcacaaatgtgatatgtagtgtcagtctacaccatttggcgagaacaaaatggtagaagacatggggagaattctaatacgacagacagctcgactaattcgttggattgataagcaaacctgaaacactctttcctttatcagacttttaggagataggagatattatagaggactctaaatgtggnttgcctctagaaattaagaatttctatgatttctcaaatttcagtttctactcaaattcaaattttgtcgcacttgttgtaaaaacgatatttttcctttgaatataatttaacattagattgaaaaaaaaaaaaaaaaatcacaagcaagaacattgacatattttttgtatctattagtgagaaaaattaaagaaagaaacattatatatacaaaagatgcaaactattatataattcatcacaaaaactaaaattccatgaaacaaaaatattaacccataatcaaagaaacaaacactacaacgtgtaaagtttctgcttggtagagactagagagagtcatagaagagacaagttcttaagaaaaggcagtggagatagagagcattgttgggcgagcttgtggatcagaatgtaaacacaaaagtgcaactttcaaaatctctaagacctcctctttaatctccggtgtcggttccggtagccggtggtcggaaatgcttttcagtgacagagttgcgtcgggaggtgaggatgaaagagttgaaactagatctcctggatgctctcctttgatcacttcaagtgttagaactccaaagctatacacatcgcatttctcagtcactttcatcgcataagctagttctgacacatccaaatttcacaaacatgttaggcactatcattatttttatttatgagatatactaaataataaatcacatttataagacttataggaattgcattttcaactaactgaaactata

SEQ ID NO: 25045 - DNA, 711 bp, Arabidopsis thaliana landsberg
  unsure (1)..(711): unsure at all n locations
tcgccagagactcatatgaatcttctgtaaggcatcaacctgcaggggaatcatatatcaacatgatatatttctttattttcaacaaacttcaccaagagttgcaaaactacagcaccttggctcgctgctcgtatacttacgaagacagagtgctgatcagggtttccaatgaagataagtggctctgcacggacgattgttcttgcttcattgcttcttcctacatcacaagcttctctttttcattttcatgactctatgcgcatgacgaaccagagacaacgttacagcaaattcaaaagaaggcaatgcttccatgataaaactggataacccaggataaggaaaagaaaaatggattcaagaagttcaatggcatggaagtaactgaccaaaaaatataaaatacctttaaatctttggaagctgcctgcatttgagctttgatggttttaatatttttttccaagtccttaagtcttccttctctgtttttgtcatggtctttgatggaattctctagtttggaaacagcatcaaaacaatttttataagcaagttccttctctttgatttgggatttcgcttcttcaagctcttcttcaagttaatttncaccttcgccaagctgtgtatncngcagagatatggnnaaaatnnatgtatgtaattcaagtaccacaaaaaaaccancgacgctgataataa

SEQ ID NO: 25046 - DNA, 3105 bp, Arabidopsis thaliana landsberg
tatgctacaagcctacaacaatcagacgctagggctttgaataatctaaatcgtccatagtgacctattaataaattaaaatttgaggcaggagtagtaacgtggaagtcatacgtaaatatttcaatagcagagcaacacctgtggagaaaaaagaaaaactgaaacgcaggtgtgagtgagcaaagcactcgatcatcgccttcttttgtactatattgtattgtcttcttcacgagtcttgttccgattcccgagacagaacatttttttttttttttgactcctcaagtttatcagaagccaaaggatcggaaagactctctttgcatcatctctacccttatggcagctgcaccaccgatcgagccggcggtgacgaccgacgttccctggcttcaaattctccccgaccgacatcgaacttatatcttattacttgaagaggaagatggatggtttggagagatctgttgagattatacctgagggtgagatttacaacttcgagccttgggatttacctggttcgttttctttaacttaccctttttgttctttttcttacaaagttaatcttcttgttctgtaattttttttccctcaagtttgttatgttaggactaggttattcttgtcggaagaaaaagacaaagagtagaccgtactattttggaatcatgggaattttgttattttcttaaaaaaaaaaatcgggtcacaaatttggaactaattgtagcattttcgtgtgtgaatttcattgattcttgagtcccctatgtcaacaacttagggtatgtcataatttttttgaaatttagctgatttggtatatgattgtagcaatttactggactgtgaagcttactcattacacatgtgaatcgaatccctagtcatgcggttaattagtttttaccattttcttcacgttgatggtacaatgtttatttttggaggctgatttgttgaaaacctaatcaactaagtagcaaaaccttggattggtttgaagttgtggttacttggcttgtgttggtagcttctaatatgcaactagttaaatgcatcaaagtaatcaaaatacgcgttttttgtttcaacgtttgcttgatatgcctgtcctgatttgctcatacttgtagttattgtgcgttgaaccgctacaaactgctcttgcatttgtaagtattcacgtggaaattaatttatatttgcatgaaaaaaagttgaggactatgacaattgaggtactgttggctttgttcaacaaaatcttcttgtccattgtctgagaaaaatttatgtgtctcccttttattcttaacaagttcttctacatgtttctcgcagataagtctatcgttaaatcggatagcgaatggttcttcttctgtgctcgcggtaagaagtatccccacggttcacagaacagaagagcaaccaagataggatattggaaagccacaggaaaagagcgtaatgtgaagtcaggttctgaggtcattggaacaaagagaacgcttgtattccacattggccgcgcgccaaaaggaggaagaacggaatggcttatgcatgagtactgcatgattggagtatcactggtaaacttttttctgatccttgaagccttattttgccacaaaatagtagtactatatatttgaaacacaaggcttttcaaagtactaactagcaaatagaatattgttatgtttattgaattttcttgagtgttatataggatgctctggttatttgccgacttaggaggaatactgaatttcaagggagtacaattcaaaagccaccgtaaccaagtttaccactggataaacacgtaaacttgcggaatgaagctatttcagaaagtatttatggttgggaaactatggttgatttctacttatcaagtgagtcagggcaagaactacttagtgaaatagcagaatcttcacaatcttcacaaaatccacaggttggtcctcttttaattagttctttgtatcattaagtatgtcacatgatgcatttgcgggttgacatagcacatttacgtgtagcatctatgtatgctaagtatatgaacctgtgtggttttcgagatatatatgaattctgtttcaggtagatttttctatctttataaattcattgtcaatgagatattcaggtaaaaaagaactgtggaaaatgtatattttgttttggttttaattatcaagttaaagaggacttcttttacactttgtagtatttcttggtgttactatgagtcttttattctttttttacaatcaaacactttcaaacgaaggaaaaaaacacacatttaagatacaaagccggaagacacatgtaagtccacagatatttaaccggcggaaacgagtattcctcagatctaaaacacaaaaacaaaagccaattaaaggtaccaaaccagaatcaaacaaacaaaatctaaaagttaattcctaatgctccaattgagatgccatctgtgaacaccacttcttttctgaactgaattttgttaatgatgacggagatcattacaaccaccggaaaactctgaactacgcgtcatctcttgataattactagatttaagaaatcaaaacatctacttacaaccccaacttgatgaggcttcgatgatgaagctttggaatcatcaaatacatgttgacaccggtaaattcgagattcatttgatggaagaccgataagccgaagtagacttttcaggtcttgacccaaatttgactgtgaaatcttgttggaggaaactgaaggaaccgtctaaccgcaacatcactcatctcagagatgagagaggtggataaatcggttgaaggcctagggaagagaagctaaatctgaaggatttgaggaagcatgagaactaaggatcaaaattgatttcgagaatctatggcttgggcacctagttgaccatcacaacatatactttattaggtcatgagcaaccgagagcatagcagcaagacacgccgacaggcaacttgatcatctcgactgtaaaagtcattgatggacgataaaagccaaccaacaccttatagatcttgtgca

SEQ ID NO: 25047 - DNA, 1268 bp, Arabidopsis thaliana landsberg
  unsure (1)..(1268): unsure at all n locations
ctctcttcagtttgaactctgttcctctcccttcgatatcaatgaatctttaatttctaacgttaaaaaataaaacatccgtttagctaagattgattcaacattcttaactaaaaccaaatcaagtggatctgtaataactttggatataaaatgtacatgcttcagctagtttagtcggtcaaattagtttgacatcgttacattttgaaagttggggaaaacaaaaaatgagagctctaataatagttggggataaataataatccctagatagaagaagaaggaagtttaacaacaatatgtctaagagggttaatcataacatcaccaccatcatcatcgctgacggtacctccgccgtgcctaacaaattccgccggagaaagaaaactgccgtggcaaacacaaactatcttgacctcctccttgttccctccgtaccagtaaagaaacccttccactcgtttcccgtcggctccgacatctctcgtcgacacacaaggcatgtcttcaagaatgttcctcgccttctccattcctgaattttccacattattcttctgcttcttcgccgtatttccatttttacccttcccgttgaccggaccagtgacaaccaaccgatcttntctatctttccgtccttgtcggagggaatcttaaattccagaaatcgcctcagcttctctgtttcgacagcttcgcctctgtttttatcttttgctagatatgctcctctgtttgtaaccggagattccataaatgccctcgtcttctctgacaccttccgctctttctctatatccatctccgttacgaccggcagagaacgcgtccgatccagctgaaacatgtctgagcctccacggcccacaatacgacgcatatctccaccgttaccgccgccggatctttgttcatcgaagacgaaaccttccggtatcgaagaagatcgacccagttcaaagtgcctcctttttctcgatctcggatccgtaccaaactgtccattaagcgaaagacctaacgttagctccacgtctttctcatcctcttctgcttcatcttctctcttcttcgcttcttgttgattctcaccatgctcagagtctcgctgacaaaaatggttgcttgcgatgaaaaacttctgcaagagattattagcagaaagattgggtacttgaacgacgccgtttgggattcccctgcctcttatcatctccataaccaaatatcaaagtcagagaaattcgaaagagaagtga

SEQ ID NO: 25048 - DNA, 2423 bp, Arabidopsis thaliana landsberg
  unsure (1)..(2423): unsure at all n locations
cagcgcctatatacattctcaagcatacttctatacactaatgggagagcgtcttacttctcgggttcgcttatccttgttctcaggtaaacacaattgtattgaaacatctctgtcttggattgattcgattcttgaatacttataaatgtatacaacaactgcagcgattctttcaaatgagattggatggtttgatctggatgagaacaacactggctcactcacttcaatcttagctgctgatgcaaccttggtgaggagtgctatagcggatcgtctatcgacaatagtccaaaacttgtctcttacaatcacagccttagcacttgcctttttctacagttggcgtgttgcagctgtcgtaacagcttgttttcctcttctcattgccgcttcacttaccgaggtaactcaaaatcaaatttcctctcaaaccaaattttgaatcttgaaactgaataagcttgaatgttatattttacagcaattatttctaaaaggctttggaggagattacacaagggcttactctagggcaacttcattggcgcgtgaagcgatttcgaatataagaaccgtcgctgcatttagtgctgaaaagcaaatctcagatcagtttacttgtgatctaagcaaacccaccaagagtgccttactcagaggtcatatctcgggatttggatacggtttgtcacagtgtctcgcgttctgttcctacgcacttggtctgtggtatatctcagnnnnnnnnnnnnnnnnnnnnnnnnnctttgaggatagtatcaaatctttcatggtattgctcgtcactgcttactccgtagcggaaacgcttgcgttaaccccagatatcgtgaagggcacacaagcactcgggtccgtatttagggttttacatagagagactgaaatacctccagaccagcctaactcaagattggtcactcatatcaaaggagatatagagtttagaaacgtgagctttgcgtatcccactagacccgaaatcgccattttcaaaaatctaaatctccgagtttcagccgggaagagtcttgcggtcgtgggacctagtggttcgggaaagagcacagtgatcggactaatcatgagattctacgatccgagcaacggaaatctctgtatcgatgggcatgatataaaatctgtaaacctacgtagcttgcgcaagaagctagcgttagttcagcaagaaccggctctgttttcaacatccatacacgagaacatcaagtatgggaacgagaacgcgtcagaggcagagatcattgaagccgcaaaagccgcgaacgcgcacgagttcataagcaggatggaagaagggtacatgactcacgtgggtgataagggagtgcagttatcaggtgggcaaaaacagagagtggctatcgcacgggcagttctaaaagatccttcagtgcttctccttgatgaggcaacaagtgctttggatacgagcgcagagaaacaggtccaagaggcgctagacaagttgatgaagggacgaaccacgattctggtggctcacaggctctcgaccataagaaaagcagacacaatcgttgtattgcataaaggaaaagttgtggagaaaggaagtcacagagaacttgtatctaaatccgatgggttttataagaaattgacgagtcttcaagaagcggtgtgactgatcatcgttgaagtttctttttcctttttaattcaaatttatacacatactatgacttgttatacgattgtgttgggaatatctaaacccaaaaaactttttgtagtcctacatgaaatattggaaacgagcgatgacttaaccctgtatgttatttgttgtttaaacaagaaaatataaaaccttttaaagagactgaaaggaacaagaagagaaagctttcattatgatttggtagattacgaaagcaaaatatatattacccctaaagtcgcattaagaactcttgggtgggacaaaaagactaggagcagtaaacataagacgcatacacatatcaagaaattgactacaaattcctttaacatccataaatgcatctcattcctcttcttactaatcgactttaacatttcctcaaccttcaatgcattcccttctctacaaaacctagaaatcaacaaacccggtatgctaacatccagctttggtcccttgggtttccactctccgtataccttctctactccttgtacatcgtccagcttcaacaaagaactaatcacagttcgatatccatcatcgtccatcttcaacaaagttgtaaccacaggtaaacgttttttaccatcctccacttcttcttccttgttattcttacattcgtcccaaagattgtgcacctctcttttacaccgtgccacatcaccatacacctctaccgctt

SEQ ID NO: 25049 - DNA, 1133 bp, Arabidopsis thaliana landsberg
  unsure (1)..(1133): unsure at all n locations
tgcccccatggacttttttctatagtagatgatctcagttaaagaagaacgtggcttaaaatcagatctttatttagtactaaaccaaagtaagaactatagaataccctttcatttcagcaagataaaatataaggagcttaatgcagacgaaaagaagaacataccactcttcactgtacaatcattaaatctttgtaaccagtaaccttcatacatgaaggactatcagccagattcaccaagaatgagatgcggatatagaaaaagaatttcaattaagattcaaccagaatagcaaacggagcaacaaatttctataagaaaagagaaaatgctaataggaggcgttaatcgaacaacatacagggcatttggtatgattctcgctttgggtgctagtggtcccgtgtttgattctcagaacatgcaccattgacatttttctaatagatggtctgagttccagctaaaaggatcagaaaataggaaattcctagagatttaacactagaccaagaggacctggaccatattaccctttatttacagactagtaaaaatactttcacttttaccattagaccaaatgcaatggaaatacaagcataccgctgtcacattatacaaatatattacctaatggacttcatatggagaggccttcatgctttgtaagctgctggatacccaaggaaagagctgcagaagcagcaaattaattgggattaagcatcgaacacaaatgcaaacagatgcaacaattctcttaaagaaagaaaagaatgtaaatggaaatcattaactaaacaacataagaaataggagcatttggtttattggtatggttctccctttggctgcaagaggcccgagttcaattctcagaaagaccccaggtgtttttattttattttataaccatgttctagggtgcataaaacggctcagcaaagaggtggctctgatcaggattcaagcagttaaatgtgataacccttattttctgtaatgtagtcgctagataaagaagtggacatttttcaccaatgcaatctctcctaagatctcctcttatccttgacaaatacttatcaaacactgatcaaaaattcagcggntcccactttaca

SEQ ID NO: 25050 - DNA, 648 bp, Arabidopsis thaliana landsberg
  unsure (1)..(648): unsure at all n locations
aactctggctggatcaatcgaacctttaggctcatcttggattgcattcactgagttagacataagctcccgagaatagtaacctgcatcaataccaagctctgcccaaccccccacaccatctgccacacctaatgcttgctcttcagcacagataaaatgtgcatcctctcccccagtggcctctttatcaggatgcggtagataacacgaccccgagacaagcttcagaggcttagtacatagcttagccgctacagaatccgaagaatctctaacctgttcgtcagtaacagagttatctaaagagacatcaggcgcattcccagctgataagcgattagagagtgagctatgcaagcctctaaatcccattcctcttctttgctgattcaaataaatccatctcttagcacctctataagcaaaatacgcacagatcgtagacttctcattgtgatctttacctctgagtctcatactgattcttccacggttaggaccatctccagataccataccaccaatgaaacgctttgaaacaagagaagcagaatgacgatccacanacaaagacttagaacctaaactcgccattgatttacacggatccgaaagcaaaagatcaatgtgatatccacagacctg

SEQ ID NO: 25051 - DNA, 982 bp, Arabidopsis thaliana landsberg
gtgttcttgtttttttcatttctccaatttttctttgtggaggaggtttttcactttttgtttttttgtttttttattggctttcttctgcaaaaaccataactttattttttctgggtttttcttcgtaaagaagcttcccaaaacccagttttttgtataagctcaattagtagcaaacaagaaaaaacaatcttaaactcaatttcacaaaatctctgattcttgtgaaaatttgtatattgcaaaactttggaaaaaaaagagaaaaaatatggggaagcaaggtccttgctatcactgtggagttacaagtgagtgtctccaattcctatttgttgatgtgaaaattttgttatgaatatgaatattcaacctttgtttttttttacttctgggtgagatgttcttttttctgggaaaatgatttgatgatatgctttttgtgtagcaaattgtaataatgattgaagtgatacagcaaagacttcctggactcaagaatatcagtgaacattttggaattatgttcctttaactatatatattgtttctgttgaatgatcttaagtaacaactgtttgtgacttgtgttgttgttctcagtatgattagaactaatggattaggcaacaaagacatgatcttgggatctgaatttgtgtttatgattcgcaattgttgtacaaagaagctaaattttgttctggttgctgcttaaagactttaagatgtttggtgttttgagatcattgttcttctgattgatttggagtttgaatttgcagtattaagtcacatttcaagtgttgtctgatgttgaactcttatgttgtcttgatttcaaagctcaaatttgtgaaattttgtttctttcattgaaacagacacacctttgtggagaaatggaccaccagagaagccggtattgtgcaatgcgtgtggatcgcgttggaggacaaagggaacacttgtgaactac

SEQ ID NO: 25052 - DNA, 1068 bp, Arabidopsis thaliana landsberg
ggtcatgaaagattgcataatagctagaagaatggtatctctgtatatgtggtgtaagatagtacaattggtaaagtttccaatccaatggcacgaaaatcaactgcaatttactcgtttcaatatatgtttttaggtagttcatatatgtaattcagacataagggttttatgtagtccatctcatcagtaggtggactttcactcatatttgtatttcgttttgttgataatgttaaatgggtgtaacagctgctgcagctattcacttcgtccatagcacgtagatggcagaaaaggcctgtataaaacgtcttcaaaaggaatatagagcactttgcaaggtacactctctttacttgtttttctacctctctcgagctggaaccaggattccatatttttattgctcaaccagttttctctgtactttcaaatgatgctgtatctatatgtgaatgttttcttggttttggtttagagtaagtttcatattttcttttgtttctttgggggttatttaatatgttctgtttttggcctttaggaaccagtctcccatgttgttgctcgtccttccccaaatgacattctcgagtggcgtaagccttccctatctttttttcttaatctttattcctgctggcttcctgtaatcctgttgcaagcgtttctataaagatgttatgataagtatatatgatggacatatttgctacacttgtgagtatacgttaaactaagaaaaaatgggatactacgatctaagtagacagaagaggtctcacattactttgatggaatagtgaagacttatttatcaaaggtttatatgtacttacaatgcatagatttgatagttttcttctcaattgtgaaaggctgtcagtgttactgttagcctgactagcggtagggagtttcagtctttctattattactgcatttagtatgttaaaaagggtagcttgatctcttactaaaatagagttaaactattggattaatcttacagattatgtgctggcaggcagtgagggaacaccttctgcaggtgaaaatcttctt

SEQ ID NO: 25053 - DNA, 1932 bp, Arabidopsis thaliana landsberg
  unsure (1)..(1932): unsure at all n locations
tggtatttcagagattcacgcgtcctaactaaatcaatgcgtgtttttactctttttacctctttcctattacatcaaaaactaatcttttagcgtttaaaaaataaaataaaggttcttttagcgttttctcgttcccgcttacttcactgcgactacaacgaagagtcgttttcactaaaaattgtgccgccatgaacaaccgccgtggagtaacaaccgccgtatcgaagcgtcgtccagtgattcacgtgttaccagacgagacagcgatacgagtagtctgccacgcgtcagtaatcggtggtataatcggttcaaacggttacgttgtttcaaaactccggcgtgaaaccggtactaaaatccattgcgagtctccagttaacggctccgaccactgggttgtgttcatcgttggttcaaccgctgttaaccaaagtattctattgactgatagagtcggagaattctccggcggtgagcacgaagattgggtgacgtgtgaagtgtccgccgctcagacggcgttgattagggttttggaaagatcatgggttgttttagccgcgaaagatggcggcggagttgttgatggtgaagatgaagaagcttattgtgggattttggctgatcggaatcagattggtgctgttttgggtttgggtgggaaaaatgttgagtggatgcggagaaattccggtgccatgattagggttttgcctcctccgatttgcggcactaagaatgatgaactcattcaggtaaagttgaagtctttatatgatttttggttaaaaagttgttaaatttgttttggttatttggtttttgatatgttgtgaatgtcacttctttgtgtgttgtattagattactggtgatgttttggctgtgaagaaggcactagttatggtatcgagttatattcaaaataatgcacctctcaatgggtatccaccgccgcttagcatcaaaggttatgagtcattatcaactgatgggaactcagaggatccacattctgagtttttcccaaatttgcgttcttcttcgttgtcaaatgctacagaaattgttgcatccaatagacatttaccgtatgatggtggaaatagtacagaacgaaaagttgtgttcaagataatctttactagtgttgtagctggaggtattattgggaaacaaggaactattattagagctctgcagaatgaaacaggtgcttctatttctgttggagctccattgaaagtatctggtgaacgagttgttactgtttctgcacgtgaggtatataggtttctattcttctgctttctgctacacatttatccgagtttctttgttgaatgttgacataatcacattcgctttgttgttttcttctccttagaacctcgagtcacggtactctcatgcacaaaatgctctggctcttgtctttgcaagatctgttgagattgatgttgagaaaggtctgcgtccgggattgcacaatggtgccatagtgaaaactaagttgttggtaccatcacattttgctaatagcttcaatggaaacggaaacagagaagcaatcatagcaactggtgctgatgtacacatttcagtaggcaaccaggttttagagtggatctcagaaaatgaagtggtgattgaggtaagtgcatgttttcttgtaatcagtgtaagtgttttcttacccttagagatgagaaaattgcaccttttgatcctctgattgttttaagattaagggagagtatagtcatgtacagaaggccttgactcatgtttcgtctaaattacgggaaaatctattgccaaagaaggtcctcggagaaatgagagctagagttagtaattcatatgaaagtgcangaggaagaagccagatttataatcttgcaccattacaacaagtaagttt

SEQ ID NO: 25054 - DNA, 212 bp, Arabidopsis thaliana landsberg
ctcggcaagatacaaaagctgctgatgaaactatcgaatctgtaagctactcacccttgatgatcttgcttacaatttgtggctgaatgctcttgtcttagcagttatttcatttagttctagcttctcttcttatgttactttaactttctgaggttgtgaatatatagctagcgctgtatatgaacctttttgacttatgccactctatt

SEQ ID NO: 25055 - DNA, 716 bp, Arabidopsis thaliana landsberg
tgcttgatgaattgtgggagggatttgaatcatttgaaggcaaagtagcaggtggtggtgcaccatcaatatgaagcctatccgataactctgaacaattggttctccagaatccaaccttcgaattctcacgatcatacacaacaagtgtattacgaaccacaattcctgataatagtataagatcatttgttacaaatgaatctgttggcaagtaaaatgatatgcagtataataacaaatgaaggtagccataaaaagagaaaaatcaaacaaagtaatgatatctatttacctcctaaaagagttgtgtgatcttttccgtttgggaagacaccgagacagtaagcaccatgcaccttggaatgcttttattgatcaaaaagtaatcacatcagctactgatttgtggctaaaccaacaccagacacagagagacttataaatactgcatagagtgctagctatacagagaacatggaacttcataataggttaagggctacattacttactcgaaacatgtaattttcaggggacaacagccatgactgtccactcttaaataccatctggaccgatgggaatatctttgaaagttccgagacatccttactttgacttaaacgagtataagagtctgttacttgccttgattataagttatgatatacaccacaggtttgcaagagataatagattcctagcatcgactt

SEQ ID NO: 25056 - DNA, 1059 bp, Arabidopsis thaliana landsberg
cacagttaaccactatcatcactatcactttgatgatcgacatattgttccatgaaccctcatcaccaactattaatattaagggtatgagttaattttaatgcttgaccacacaaatttcttataaaaccaactttgtatatagaaaatatagctaaccatatatagtagtagtaactaagaattatcctttttcttgatctaactcatagcatcatgaacgtgtatatattatacacacacacacataagcatctagacttttgaaaagaagaaagatagagagatgatatatatgtattaaccatggttaggagtggagggtttggatctttgaagaccgagagaggcaaggttgcaatttgctcttctcccgtcgatcaccggtgtagcatccacacaagcactcctcgccgcctccgcttccctgaatgtcacctgatcgatcatcatcaccatttaactttagtttattagttgattcctcttttaactatataatatacacaaataacatccattctctttctacatataggaacaaggttttgtataaacttacgaatccgtagcctttagacttgccggtgtttttatcggtgatgatgacggcttcaagaatctctccgaactgttcgaagtaacgacgcatttcgtcggtaggagtttcccacgctaatcctccgacgaacactttggtgtaagtcgtgtctccgaacggtgatcggtagtagcttgtttgagacattttatttaaattaatatcacgattaacaaatatggcagtctccgatgatgatgatatatgtaacccaaaaacagataaaaattgaataaataaataattatggaaaattgtgtttgtctaaaacattagggaaacaaaaaaaaaaagagagaattgggatggacaaagttggctgatctttatatcatcaaaggttgtttttggttgggcaaagagaagagagaccaatcaaaaggctgccaattgcaacccttgaaacggtgtcgaacaagtcttcgaccctacacatatgaagagaagagagaagaggc

SEQ ID NO: 25057 - DNA, 486 bp, Arabidopsis thaliana landsberg
cttataaaatgtgaaacttcaaaaaacattgacatacgacaattgaataaattgaattagtattggggaagtagtttgcgtagaaaaatagtacatgtaaattattggtataataaaacaattataaaaagatttaagtgaatgcgtaagaaaatcataaacaataattcttactaatatagagaaggaattagtaaatatatttcacaaaactggcaatatttattaaggacagataaatttagtaccctaaatagttattaggactttgtataatgatcatttgtttttattaccgcgaatgtgtcatagtctaataaaaaacaatgtcttttgtttgtgggcgtattaaaaaaagtcgttgttggcttttccaatcagaagtcattgatgttcgtacacacccaacactgtcttcttttctttcctctctcccaacggacatatttttccgacaattcacaaacggggaccaatcttctaccg

SEQ ID NO: 25058 - DNA, 1006 bp, Arabidopsis thaliana landsberg
  unsure (1)..(1006): unsure at all n locations
acgcggctggtgatgttaaattcggtgcgtgcttgagcataaaaacgcacaaagcaggaagagaaacaaccaagataatcttgcccattacattgctcttccttttaggttctaagtattccatccctgaattatcaaaatcaaaagaaaatgattgatcatctaaaacggtgcctagactcattattcttaaaatatataaatatcgtgattcaagactaacctcctccaaaaggtcttgtgtttcttccttgacttctagctgtagagaaacttagcattggagattcagaacagtctgatctcatgtctcctcacagtctttatggtctttggtattgttgagccacagctccagacacaaactcaagattcagtagccagcaatcatcaagttaactgcagattgctgtttagagtcaggtatgaatgaatacanagtcaaanccatatataagcaaaataaaataatatttggttgggaagtgggaccttaatgaaagaatcaaaaacaaggaaaaagacagacaaaagtttgaattacatttatgaaaaaaataagatcaaagtttaattatttattaatctacatgttaattggaaagagaaaaaaggcagagagcatgtttgtcacagaacagaacaaaaacagagcaacaaaaatgtagaaagagtctatgttaaagtcatcgactttgatcgaaatttctctgctttatgaaaaacccatctgagaaatcacggatcataagatacccagaaacgtttcaatccccaatttcgtaattttgattagaatccgaattcgtttcaaaagtgtggcaaaatgcagaaacagatcaaaatcaggttaatgaattgggtaaataggaagaaacaagacatagataagagatagtacctgagaatttgggagaaaacgaattgagagagaggaggaagaagaagagttgagtgaaagttgaaatggagaaaggcgcgacgttattaagggagagagaaggcg

SEQ ID NO: 25059 - DNA, 556 bp, Arabidopsis thaliana landsberg
cccgggtgtattacacaattgtttatgtattaatacaaattgttttaaaatcttttgagttcatatagtattttctcacgcaaaaacaatctttatttcctatatcgtatttaatgaaggttttgtgtggattgagtttgtacgtttgaacaagactttatcaataggactccttaattttaagattatctgttgaatcgcaaaaactatatgaaagcgttaatgtacaaaaatctcattattgtatcaatggaactttgtttaattagcaaggtgttgaccattgactaagttccttattcaaaagttttcagattggaaaaaatcgtcgaaggctttgggtcagaagtcgcacagaaaaaaaaaaaagatgaacagagatattcgaaatgacattatattcaaactcttttagaaattaaaaaatgtaataaaattggggattaggtaatatgataatagtaggaagatgcctaacacgttctaaggccattctaatatatattttgtcaatgatcaaagatgggtacagatgttaggtgaagcaaatctttac

SEQ ID NO: 25060 - DNA, 1349 bp, Arabidopsis thaliana landsberg
  unsure (1)..(1349): unsure at all n locations
gaaggaggaggaacatgccttttcacttttgtttaaaggggggtccccgtggttggcccgataattaattaaagaaggatacaatagtaaaagcatttacttttttcttgttgacaataagaaaaaaagcaatctcgtgaaagagtatctatttctaattttttctataggattcaactgtataacacaagagtaaccatttatcaattagatatttttgtatagtaaaatccataaaaaatgatataaaatagaagaatctatggacctgaagatgccagagctaagaggattcaaaagaagaggccaaagacaccgtcgaaaaagacttttgatgttatagnnnnnnnnnnnnnnnnnnnnnnnnctcgctctctctattgtgcaatgtgtttttttttttttacaaaggagaaaacctgaagatggtgggggtataaatgccacgtggaatatagttatgatgtgttggataatggaatgcttgaagatgaatgattgtgtttgtggcagttatggattaagaaaatgtggagggagttttctgatgaccaatttatcgtggatgttttttctttgtttttgttttggtgctttgttgttaatttcttcgttttcaatccaagtctttgccatgtgggtagagtcatggatgtaatgggaatatgccccattaatacctattttcattcatttatttatgtatacttttctcaatatttctcagatttttgttagtgtatatactgtatactgtagatagaagtattccataattgttgcattcacacagcccacgttttctgatgatttatctaattaaaaggagagaaagctcaaatttcgcccccacgatcgaatgtccgtcgaagttttgatctatcaatttattttttttatcggcttaagagcaaattttatagtaagtaaagttaattatccatattagtcagatcaatcagagaacattttcggaaatgtatgttaggaatgaatagtatattaaaaggttgactagtaacggtttcgccgtaatttgaaagccatcgggttttgattggttgaaagaaagaacaatcatttttattattatgaatttacaaattcaccggcatatctacgcgtcgtacgtaatctaacttcatacttacgtaattctatgctgtatttgatttgacctaaagagtctgcacaagcacattcatgggcactttgcttaaataaattgacattgctgcggcacaatacttaacaactgggcgttatgggataaaaaaaattgcgaaaccttaaagggccatgcatttgttaaatttgtcatcgacttattaatcggacanacaatgcat

SEQ ID NO: 25061 - DNA, 1545 bp, Arabidopsis thaliana landsberg
caaaatgttcataacaccatcacttaaaatccataggatgataagttttaaagaaacaaaagtcaagaagaataaaaacatagattaaaaatcaccaacgttaattaaaacaactaacgtgttagacaaagttagtaaggcttctccccaacgtagttacccgaagggtcgtagttgcaagtgatgaaaactcctgcgccgttctcgcagacaactctagcgcaacctaggcgcctggtttcacgccacacgatctgagtgtagtgaccacacataccatctccttcacacgtgttggtcatgtggttgtaggacttagcctccacagtccatgactccactgcgaaagtcgatgtaaagtctgagccacttccccagaacaagttctcaccgtatgggccggtcgagtgggttaaggagcagtcgtatctcctctggttagcccaccatgttgcatagcttgcgatctttacgtcccacaccagtggaggcaaacctgttgggaatgaaaattttcatatcaatatacaacattactaataatttaatttgatatcacaattatgttaacaaatgttatttaattgttcgtttctttagtgtagtccatttccttagaacatgtatgtaatatataaggtctcaaacaaaacaaaatatatctggtttaatttctttgtatctagaaaacatcaaaatacggatatatatttgttaatattctatatatatcctaatcgtttttatcttgtagtttcttatgtttaggtctatatatgagtatgacaacaaaagttacagagatatatcataagtgaccgtttatgttgtttatggtcatgcatagtcttataactatgaccacatcgggtcttaattctatttatagttaatatatgaaagtacctagaccgcctcggacagtattatgtggatcaagaaattgttgttcgaacgagcccgtgggtggttggtatgtgggaggaggctgataaaggataggtttggggctgggagttgggagcggctggggctttgcaacgtagggaggagggctcggggttataggtcgctgtgggcggtgccggtaatagtctgcatgaacggcttggatggcgaccaagaaaagggcgattgcgaaaactatggcttgggttgatgttgtggtcgccatctgttttcttcgtggagtggctccaaagattttgttttggatggtggtagaaaatgatttgatgagggtgattatttatatgtttaagttagtgcttaattaattatgacaatgcaatttgggagtcaactagaagtggcttacatgttcgattatggttaccacttaccactttgtttcgctttagtaaaagcgagagagttgtagtcttgtagatattttaaccatgcaagtaggtattttatatacattttttccttagactaaagatcaataacagagattaaattttctaacggcaatattataagaattagtaataaaaagaaatattatcattaaaatataaaatgtgaggtatatgatacatt

SEQ ID NO: 25062 - DNA, 1248 bp, Arabidopsis thaliana landsberg
gttcgttatgtacgatcaaaatattaaaatggaaatttgagtttaaatcaacaaaaattgaaaatataattctgtactttttttttgtcggaatataattctttactatatattgcatatggtttatttcttttttaagaagatcaactttctttataagaataaatattaaacactaagtaggttacgactatgaaaagtattttctcttatttattttataatttaagaactatttcgaaaataaatctcatatatagacatcaatttcagaaaaaaattgtattttgaaacaacacaccaatctaaatgtaaaattatttatttttaaaatatgattttggaaaaaattattattaatcctaaaatatcaaaattcaggttgttatcaaaaagtaattaataatttttaaaaatatgattaattttatggtctagagtgtatctaaaattaagtagtttatattttgtttaagtaaaataataagtttggtactttttaaatagttttatcaatatattaattatacaataaaaataaaatcaaagtaaatcttctttttttttttgttttttgagcaaatcaaagtaaatcttaattcaaggaaagtcaaagttaaaatagtgcacaagtggtctggattgaaaaacaaatagtgtttctgaatggaacatatataccaaatcaagattgggttgggttttaatttcatatgtgtatttatatagacatacattggtttagtagaacatatacataatcttttacatatatataataaaaagacttgagaaatgaatatgaaaaattgcatagcattgatgttggtggctgtagtaataacgaccatgggaggagaagtagaaagcgtttcatgcgagattaagtgcatgcttaagtgtggtggtctattggtgcctgaaaacacctgcatcgagccatgtatgcgcgcacaatgccacaaaccacctagtcctctatctaaatcatcgtaatttcttctcttattacattgaatttgattgttcttttatttttgagtttctatttgttattatgttattgaaaactcaacataaatgcaaaatgtaaaaacaatatgataaaatgtaatttttgtttaaacatataaaaataatatttcatcaatacaaataaaaacttgcatgtttgcgtatgaaacaactttttgttggaaatacgtatagaaaagtgaaatagtttaaatattgcaggactgatgatgc

SEQ ID NO: 25063 - DNA, 3000 bp, Arabidopsis thaliana landsberg
  unsure (1)..(3000): unsure at all n locations
atatacaggacacttgttgtgttcccaaatgggaacaagaaggttagtggttcagggtacctttctctttacgtagccatagacaactcaactctcggacaacaagagatttacgcagatctaaggttttacatctttaacaagaatgagaggaagtacttcactatccaaggttcttataattttcaatcaagaaatgtagtgttttagcaagaaagatactttgtgcatgatagattgatagtaatatgtatctatatatcgactggtctttgttatataatctgtagatactgatgtatggaagtttagtgcaatcaaaagaatgtggggattttctaaggttcttcctctgattacgtttaacaacctaaaaaatggatacctttatgacgttgaccattgtgagtttggcgttgacgttatcattccaccattctacgaaaaatcggaagttttctctgtcaccaagagttttccgagcccgagattcacctggtatattcaaggatactcgacactgcctactgattacctatcagaggagttcatcatcggaggaaaaagctggtgagtttctcaatataattagttgtagtgcaagtgtggtgggtacgtagtagtatactactattaagtgtttaacaagtttttcaaatgctgaatcaggaatttacgaatctttaaaaatggttttggcgcttttgaaggcaaaaatttgtcgctttatcttaaccttgggccacaagagctactaaaagcaaaaccttatgacaaggtttacgtacgagccaagcttcgtgttcctaaccaattcggatcccaatccaatctcgttttggaaaggccacgtaagtggatactagatatgtgattatgactgttatttaatgtgaaattcataacatcttcaatcactacgatgactaatatgtgttttttcttttcttttctggcagttgataactggttcagtccccaaacaatcgggtggggatacgctgacttcatgcctctttctgatctgagaaattcatcaaagggttttcttgtgaatgatatgttggttgttcaagtcgctatggaggaaatttcttctacaaattaccttcccaaatagacttgtttagaagcttaaaccgtggcatctataatatatgtgttatatagtcttatcttttgtgctttaacttaatatcatgtttcttatgctttgtgtttcaagtgttttttccaatggaaaaccttattnctttctcccacttggtctaaaataaatggatatatcaattaagttcttctgtttatcatatccttaagttacatatagaagaatgcatcctacagtttcgaagtatatacacaatgtaataaaagaagatattattgacctagcgttggactaaagaggaacaaaattcattaaaggaaaacaccattgtgcctctgttcctagcaaccaagaggttgttggtaattaagtggctgtagctagcccagccaagctacgacagcaatcaatcacaaagatcattttgcttttagctaacgaaaatataccacgttgattggcttgaccagcgctagatcacgcgacaatggcaatagcaggagaacgggatcaaaaatccagttctgctgctcagccacaaagaatagtagtatggcctaggactggtagttttggaatatgttgtggcctagatcttatgctcaaggacatgcttcagctgaaccttttggctctcgatttgtgcttctatgagctttgtcttcaagctgttcttatgtgcacctcttggccactctatgcaccctttcctccctcctcgatttaaattagcattagccgagtctggtgatgagctccattgaccaaccaggtccaatgtgttgaatccgcctttgtttgagcctgtctctggtgaaaccatctccatggttgattttctcgcgtttgatacccttccattcataccttctaatgaactccagagctttgccattgacggtaactttttggattgtcgtcttggaaccgagcacacttcttttatttctctcaatagagtcttttcatactctgttccattcatcgatacattgctgttacggtgatgagtgttgctaatattagggatgctctcatctggagagtaactggatccgtgttcttcagaatggctcacagtttcccagccactgtcatcttcttcaaattcaccattctgatcagtgaaagcattcgaatgtctccctttgttaatcaaattgacatctggacttaccgtgtgagcttttgaagcgtggctgaccggactgtaggcaacatattgctcgatttctctatcctggttttcacccatgttcatttgttcaaacaacatgaggatatcgtccggctttgagggttcatatgtaaattccttgatttcttggatattatcaactgatgcagcagtttctcttaacaattccgcaactttcacctctttcacacctgtagtatttcttgaactgaggaaggcttccatatctcctacgagtttgttcatttgtgaatacttgttctcgagtgttactttggcatcaataagcttcatctggacacgttcctcacgccaaacctcagccatctgcagcattcttctttcatcgtctacttcctctctgagattcatggattcgctcttcaatgcttcaatctcagctttatcttcttctatttcctttgccagttcatcacaaacttcttcgatcaattctcttgccttcctttcctgttggtaatcatgcatgtaacgctttactgctaactttgaatctgcaagctcattgactaattttgaattgacgatttctaatctctgacgagtcttcttttcctggttcatgtcagctttcatgtcatcaataattgctcggaccttctcatgctctctgctccgccaagctgccctcttctcgctaactttctttaggaactgctcaagcttcttt

SEQ ID NO: 25064 - DNA, 1113 bp, Arabidopsis thaliana landsberg
acacgccaacacaacaaacagcgcagtccgaataatccatcttccaacggggatgatggtctcaatccaagatgaaaggtcacaacatatggtactgaacatttgtttcacccattacgctttactccctttatcttacacatcctactgaaaaatttaatatctttgtaacagaacagagccaaagcacttaaagtactatgtgcaaggctatatgaaatcgaaaggttgagaatacagagcagtcgatcaaagctacggtcagatcaggtacatatcaaatcaacaaatctttttctcatgttttcagtcaatcttacattatcaatgtctaaatcccatgaacagattggcagcggagaccgatctggacgaatccgtacatacaattttccacaagggcgagtaacggatcaccgtgtgggaatcactcaccatgccattgaggatatgatgcagggagagaatctggacatgttcattgatgcccttctcttgcgccaagaaatggacgccattgcttctttcagctccacttcatgaatgacagagaggtagaccaaacccaaaaacccttaagcttgtcgtcagctgtcacaaacgttagcagtagcaataaaattccattgaaagctgtgaaatgaaaggagagagagaaatatagagaaaaaaagagggagccagggaagaggcagtgcatgggtagagacaaaacagagtcgtttaatgggttagtgaactcaatccatgctctgcttgttccctgtctctctctcatctaccgctttgtcttcttctttcattgcaataccaatctaacctttgaaattggccagttcctttgagttagttcctttgtgtttgtgttatttcttagggtttaaatagatggtggaatcgtgtttctgtacgccttttgtgatgtactacaccagaattcaccagacatatttgtactcccttgttttgcaaagtcttgtactgcgatctggctaaagcgtatattcattattcccaactgtattcctaaccctctaaattagctggagggttctggtttttacgactatgtgtgttaaatcggaaggtagagagaaataatttagctgccac

SEQ ID NO: 25065 - DNA, 4748 bp, Arabidopsis thaliana landsberg
ccatagagaagctagcccacacttgtgaggaatttaagagtcaactgaatcagatgcaagggaaagctctacctcaacgcgacattgacactatctctagaaaaagttcacttcagaatggtctgaagaaataaactatccactagaagaggaagaggcttacttcgaggaaaaaagaattgagtattctgctgcacatctctcaagggaggatgccgagtataatgatcctctcatgttactcattttcttcctaataagcctgagtcacgctagagactttaaacaagctcacttgggagaaaatcccatgactatccctgaatgatttttttcgtttcttgttattttttatttgttttggttgtgtttctggttctcaggaacagaggaacagtttggaaatggagtaaaaatttaaaaatttactctaccaagcactaggggatcgagtataccagtccataggagtccaaaagtttgaaaaatatttctgttgcacccaagttaccttgcaatcgagtagaatagtcgagtacatgtgatgactttacccaaatttttaaaaagtcatcattattcttgaccaacagaagctaaagaggcttaaagaggatttactaagtttacacaggattacataatgttctgagacttttttcagttaacagggaacaatgcttcaggacaaatagacagcgtggcccaccacctcccctctttgttccccacacctatcaccaaaagataaagaatttatctgctttgcttctccaccacccacttacttgacttcaacttttaatcttttatatacttatgttcttaaaggaaaaagtatcataattttaatacatgtataatttaagttaaaaaataatttatttcttactaagataacttaaatgatagtagaagtataaataaataaataacatttatgtacaaaagaatcaaaaacaaaatattgttagtttgttactatatgtgagtatattaaaaccatccatacagataaacacgctgcgcgggttaaagacctagtttatacaatattaaagtttaggttataagcttctaaagaagtccacatatacttttaaacgactaatcgcaattacacatgtcactaattaacatacgtagagtctaataattttctaattattagttataattgataaattgtaaacttcaatacaaattattgaatatcattggtttagagttattgaaaattgtaaatcacaaaaaacaatacatttaaaagcaacatttaatatatattttaatataaacttttcctaaaaaataaaaaaataaaaaacatagggagtattaagtaacatccatgcatcctcaaccacataataattggcaagtcgtaataaaaacgtgtcacgtggatcttgttgtcacaaaatacattaaaaaacaaaggaaatataaaacagaaggaaaataccaaaatcaagaccagaagctttttatcagaaagaaaaaaaaaagcttcaacaatggcgaatcatgtccccgctagtttcttgacgagggctaatgctttgttcagaaaaaacttaacctaccaggtttgaccaaagaatacatgcatgtgttatctattgtatacaaaatctatttatgttaagttgatatatatagctagaatattctaatttatcaattggtttagaaacggaacatatggagcaacgttcggctcatcgtgatccctttctacctctgtgtgcttctagtggggattcaagtcttgtttgatacacaagttaataactctgctgataatcgatgtggttgtcgatgcatccacaaaaatggagatggaaaatgcgaaagaaagagttgtggtttacaatattcatctctaactcaagcctccttttgtgccttccctaaccctccaccgttgctcccgttgctacaaattccgcgtcctgaaactcgtttagttgatcctgcccgtagctcgtgcaaacgaacaggatcttgtcctgtaactatacttgttactgggaataaccatacccttggagaaagtactatatatgccttttaaactttaagcaaatttataaagtgaattagtcttataggatcctaacagtttcgatactaatcttcacatttttttagctttatctcggaatcttctcagtacttctttcgcggtgaactcctctgaccatttcttgcgtaatctcgcctacaatgtcttggcaagtttttctccgccagaattttggtagttttcattgccatatttaagtctctatctaccagaatttatgatgaatttttatatccagggtacaatatcagaagcagactacaccaattatcttgatccagggattcactcagatcttcccattttcaacatccaaccccagtgcaccccagccactattttgtcattgtcattccgacaaccacctctcgagtttcataaaggtattaagttaacaaaattatgtgtgaaaccctagaaaccataaactgaacactaaacccacaatggtgtatatatatgaaccctaacccaaaaaaaaagaaaaaactcttaattctaaattgaaccaagtgtcgttatttcaactagttaggcgaagcttagaggtctgccgattcgagtgacgcttgagacgaaactaatattacatgttgtgttttcggcccagaacctcctggtattcaaaaaaaaaaaaaaattgtgaagaagcttacaaaagctgcaagtccttctccttcgaagctattgtttctttcaccactaatcatctctagaagcataacaccgaagctataaacgtcagatttagctgagatttgtccatgattcaagtattcaggagccatatatccactgcatatatgcaaaccaataacattaattcatggactctgttttcaaaacagagcatttaaatataccttgatatatttcttaccgggttccagctattctttttgtttcagctcgagtctcatcggagtcgaacaacctcgctgtcccgaaatctgcaactttagggttcatctctgcgtctaaaagtatgttgcttgccttcaagtctcggtgaataatctttagctgcgagtcttcatgaagataaagaagacctcgagcaatgccttctatgattgtatacctcatctcccatgtcagaactcggcgtttttcttcatctgcacatctcaaagaaacagttttttttcttgttttgtaaaagtagtgtaacatgcaaagatgcaaagtctcgtctcgcgaaggctcaccgaatatgaagtggtcgaggcttgaattggggacaaactcgtagacaagaatctcttcatctttttcattacaaaacccaagaagcttaaccagattcctatgttggagtcttgtcaagagtaagacctcgttcttgaactccatacctccttgtcctgaaccttttgttaatctctttaccgctatctcttgcccgtttagtaatgtcccctgaaaccggtccacaagatttgttattcaccaaagatcaagatcaatcaagaactcataattagtaaaacaaatgttagtactaccttatagaccgtaccaaatccaccttggccaagcgtattttccgatgagaattcatcggtagccgctaagaccataccaagatcaaaccgtaacatgaattgaccatcagaatcagagtactctgcacttccaactaaaagaaaaaacaagaagatataagacttactctctacatcatgtggttgattgaagcaagaaataatgtacacttaccattgattttgttgtatgattctttcctacgtccatagactttgatatagccaataaacaccaaaatattaatgaaagtaagaaccacaactattgcaataattccaccatatccaatgcttcttcctaaaaatcatcaaaccccttttagcctaagaacatctttatcatactaacaaacttaaataagactcaaatcaatgttttacctttcttttttgttatagagctctcgtttccctgagcttgaggtcgaggaggcgcaggaactcttgttacattatcaaaagcaccatggaaagcatatagatcccacctgaaaaaacagctcggacgataaacctcgcctccttgtcttccccaaacctgttctttgaaaagcgtcacgcattctcccagacatgttttgcaatcttgggaagttatgtcgggtgtgcattgcatcatcatgtaaacatttggaaactcactgaactctgctttgacggggccgtaatacttgagaaccgttgtggaattgttcatggttacagcctcaagcgtccggtcaaccattgcttcccattcttggcggaaaagggtcatgttcttggcggatgtgtcgataacaacaggactcgggtcattcgtagctggtccaagctcaagtatccgataagtggattgatcggtggtacgtacaagacaagaaacacgttctctatcgtcactattgcaatgatacgattgaacaagattagcccaacgggttttaatctggtgaatggattcttatacccagttaagacatcctcgccgatggaagtctcttttacagaggccaagaacgtggcctccatagagtgaagcagtgtagcatccgccgtttgtggtggctttatcataaagagaaaaggagagagagtcccggtttttgtggtagctactgttggggggaagg

SEQ ID NO: 25066 - DNA, 705 bp, Arabidopsis thaliana landsberg
  unsure (1)..(705): unsure at all n locations
cggttaagggcgacggaagcatgtccgagtcagcatgcttagtcgtgaagacgttttcaatgtctttctcgagagactcgccaacatgaagctcattaaaagcattgacctttagataagcaagcgaatataacgcatataacgccttatatataaaagactttttagtttttagcttaccctaaagttatctatatataagtatgtagaactaaagaggtagaacctctctctctctatgtttatggccttttggccctatgtgaaatatgaaggtgaaactgttctagttcttagataaatgtgtcttcaacttatccaactatttgaatgaatcctattgaaaaacaaatgtgattcaaatttgtaaggaattatattaggtaactacatgaactatagtccactacacatatcccacgttgtaatggaaaagatgtaatgcatgatgtgacatacatacgttggaaataaaattgtgttaatggttcggtggtttctatctaactatgatgtaatccggtatttacagcgataaaacactatttaagaaaatagaatttcgaccaataaacattccctccatgatgtgcagaaactaatctcatacaaagatgggaggatcctcatgtttagtcgtgaatttaggttaaatttaaattagtacgaaatagaaacctncatggaatatatacttcttctaag

SEQ ID NO: 25067 - DNA, 646 bp, Arabidopsis thaliana landsberg
tgaccattgtattgcgacacttatgatattttttattctatggcttgggggcacattcgtggtgtaatgtgttgatgttaacctaatgtgactactcatttttaaagaatcattcgatttgttctttcccggccttatttaggctcttaatagatgtaagctacctggatacttataactatgtattgatgggttgacttgaaataattatttacattcgccgaacgatattcagactcactatacatcgcatttcccataagtatatatcgcgaacgaattagtaaagtgggttaatgacttaatgtctttgtttcgaattttttaattgatttctcattctcttatttttgttaaaccgtaaaaattttcagagagtacaacaatatccacacagccttatctctttattatatattatgaaggggctaaagacgtatttaccaaagataagagttgatcttgtaatcatatagtaattggaggacttgtttgaagtttcataaagaagttttaagattccgaccgaagttaacttgttttcttcttttgtccgaaatctcacaaacgattaccacccaaacgtgcgaggtaagaggcagacacgtgcgaaagatgacgtggacagagaacgtggacctaaccc

SEQ ID NO: 25068 - DNA, 1092 bp, Arabidopsis thaliana landsberg
ctgtttgaatgcgtatgcagagccaagttgagttgtttgagagattgttactgaggtatgtctcatgtatgagtgaataaactgaataatgaagtggaagaaatagtagtaattaacaaagaaaatagttcaaaccttcgatgggtttagcgcctaagagtgtgttgaaagcagcgtacttgcagcttttgcagtaaaccgtaccccgaacggcgactagactacggttgaacttaggcgggtaaaccggcggtgtaacaggtggcttcgtcggaggagaaaccggaggcttaaccggagctttggtaggagggtaaaccgggggcttaactggaggtttggctggtggggaaactggtggcttgaccgggggtttagttgggggcttaaccggggctttggttggagggtaaactggtggcttgactgggggtttagttgggggcttaactggagctttggttggagggtaaactggtggcttaaccggaggtttgactggtggggaaacaggtggcttgaccgggggtttagttgggggtttcaccggggctttggtgggtgggtaaaccgggggcttaaccggaggtttggctggtgaaaacactggtgccttaaacgggggtttaacaggagatttgaccggtgggtgggggtaagggtgagggtaagggtggtggtaataagaagggtgtgggtggtggtgcccgtggtggtaaggagcaggagcaggagctagagaaggggtttgagtcttatggttcacttcttcagtgaagacagaggaagtgaagcaccaaagtgttacgagactcactaatacactcttaccaatgaaacccattttttgttttgtttttgggttagtgatatgttttgagattatgaaatgggtgtatatataggtggaaggttcacgcttcgagtgtcatgaaattactcccttttatttgtaaatagtaaatcaaaatcgatcgacatgaattaccccattattagttactagtaccattttgtgcccaaaaaaaaaaaaaaaaaaaaaaagtcactagtaccattttgttactctcttttttttgttactcttttttt

SEQ ID NO: 25069 - DNA, 696 bp, Arabidopsis thaliana landsberg
  unsure (1)..(696): unsure at all n locations
aaaaatagactgagtttttaaataccgtttttttttttttggcacgaatgggtaattaaactggtggtcattttccaaatgatgaaccgggttgagtgcacagcatgcacgtggacaaataaggacggttggatgaaaaaagctcttataggatccgatgagaatgaacgaacgcgtatcaagggaagagagcacgtgcatgtcggctcgtttatcagtaacttaagtgtgttgcctcttctctcatatttgttgggaatctctctatcctctttaatggtttcttcttaaataaacgaaggagatcacgatttcttctttctcttctgacttcattagtgagttatgattcgtcagatgtgaagcttaaaaccggacttattaaatcatcaatcttactatataaaattacgaacacattactcgcatcatttcaaataggaattttccttttcttttttttcataaaagcaattaaaggcacatgagatgagcaataataattagggatcatcgagtactgtgtcctgctattatgatactactacccatctttccacttgcttttagcgtatttactacttccacattcatttgctatttttttcttcatttatgcaagaaancactaacaaactcttgaagtaaatacaaatatgtatgcaaacacattgaacacattcgagattaacataa

SEQ ID NO: 25070 - DNA, 795 bp, Arabidopsis thaliana landsberg
gcgaatccacaaccaatagaacgacaagctacttggaaaaacaaaagtatatgttgatagctaagcaatagtataaaatgaaaagagataaggccgactaagttattaatggagactagaccattcaatatcctattaagaagaaaaggatgcaactttggtctcctataaagatggagaaaaacaccgctatatttttttaaagacataaaaaagattattcataaataaatataaaagataaggcttaactacatcacaaataagtaaacaagtcttataacaaaaaaaagagtaataagcgaagacttaagcaataaaatcgagtaaaagatcataaaactgtataaaggtacgaatctgtacaactttaataatattatttaagaattgtaacaaaagaaaacataagaattatcgaagcgttaaaaaatcaagcataaacaacaaaacagaattgtgagcgtaactttatatgatgggtgcgtgtgagcgcatcgaagagccgacaatcaaagtatggacccgaacatcttacaagagattgtgcgattatctggtataaccacgcgtcctcgtgtgagagacatcacgcggtccaatatagaaacatcgatgcttatactctctctctctctctctctagcgccaatgagtgctcgaaacgttgctggccgaccaaagtaccgaggctaactgtcacgtctcaaaatttaacaatgtcatgttatcaattttagatgaaagtgaaagtggagcgtcacgctggtgatacacttgaatctgagtggatga

SEQ ID NO: 25071 - DNA, 627 bp, Arabidopsis thaliana landsberg
tataaaaatctcttatcatgagaacattgcatattcatgttccatagacgtggttctgactaaacatacataaattataaatatgccgtttctattaaatactcaaccttttaacgaagacaataatcatacgaaaatggtagagtaatgtatcaaagatagttaaagaattatcaatcatacaaaatcagtataaattgtgtcttgtaactaagacatgccactctgtatgagggaaacgtctgaactaaaacaagcagagaatgattaaagagttatgaagtatggggaaaaaggaatacaacacgttatctattagtgcatatggttatcttaaaaatgaataatgtttgcgttaaggtatatcttaagggcaattgctatatatatcttgcaaattgcaattaagaataaaattgtcatgactattagttgtcatggcaatactaaattagtttcctaggtgaacacattggagtacaaaaatgtttatgtcttttgctctgtttaaaagacagacttgacttggaattacttgctaaaggcatcaaaaagtcatacttaattttaaaaattcagaaaagtcaaaatggttagtttgtgggtacacacattatataaagaccc

SEQ ID NO: 25072 - DNA, 958 bp, Arabidopsis thaliana landsberg
attttgcattaataatctgatattttggttgtaaacgattgtcaaatatgtatttgttttgactaactctaatcctaggaagatatatagaagaatagttctctatctagtaatgacgttaaaatcaaacgatcatatattaatgctagaataagattaaagaaaaaaaaatgttagaatatgattaagaaataagaacttaatataaaagcttgagattagaactttagaggaaagcttgagtataataaggatttaagagacctgttaaaggtgtcagtgatttggcaattggttctatctttgcttcggcttagtcattggcaaatattgtcggactaaggaccagtcagtgagtccgcaaccgtaggcgttgcaaaaggctaagacaggggcgattatgtacatgatcaaaatgtggtaccattttagctgatggaagatatgtggaactgtgatgattgagactatagccaatactacgtaaccggttacagcaaaccatgatgggattctgtctttgaggaaaagctctgttcttcttttgtcgtcgtaggaaatggttacaggggctgttgatgtatggtcgttgataggaagaacatctttgttcttgaattgcttgtatagaccgaagacagtgcggcctaagactttgatgaagttgtagagaccatcaccgaggatcatagctatggctataaacacctgagggcatcaaacacaacttaagattgtaaactcttattgaatgaaatgaaggaaaagagagtgagagacacagtaccctgtagccttgaagaccatggagactggttgatgagagatcagcagcataccatttgcctttttgggcaccaatgagaggccacataacaccccatgagagaattgctccgatgagaagagacacaatgaaagatatggacaaatcattccaacaccaacatatgtagca

SEQ ID NO: 25073 - DNA, 2640 bp, Arabidopsis thaliana landsberg
gcttctcaacagtaccagaaatttctgcagcttcctcacttggtttcttctttttcttatttttagttttcttctcagcagatttatctggggtcttggagctttcactcctgcaataataccataaaaaagcacagacttttgttaggagaaaaagtttgaaagaaccgctgtatactcataagcgttttttactttgtgatctaataatgtgagtaataattcaaatacttacttactgatatttcacaaatgacataaacacaatctgttatcaccaaaaaagttctcaaatcaagaaataagagttctcacatggcattgtttgcagttccatcttgagcttttgtgtttgaagaaatttggctaatatcctgcttcttcagaacatttcccgtctgaacttgtccagcttcatcatttaagacattttcccctttgttcttctctttgtgatttttcttctttttactcttgtttgcactggaacagattttagaaacaacttcatatccccacgatatataaaatatgtgaactctgtcctcagagtcaatagagagcaaagagagtagtacctttcttgtccatcatcttgctcagcagccttggccttccgtttcttgttactaccttgttcgtcattatctacaaccatcttctcacctgacgcattctctacttcagatgattttcctttaggaataggtaaaccatcttcgtcttcatcttcgctttccaaaactggaacatgggcaccctctatggcaacgatttgtttctttgcattctcaccttcgctagcttgactcttcttcttggtttgttttgccttattatctttggcaggtttctcttcatcttctatctcctcaattataactagcaaagatatcattcagattagttttaacagaacaaggaaagatcaatcatataaactattaacacaaatgtagaacaggatcagcaccaaggagacacacttgtacaaaagcttaaatttacagacatacatttgaaaagtcttttatcaatatctttttgaaaccttctagttataagacaagagtgacgaatcaagcaatcacactaagctaaaatggaagtactaagatgcaatctgataaggatctctgtaagaaaaagtacctccactctttggggcagcagcattccgatacctttcaagattgctatcaaggaagtcttcaaattcatccaattgctcatcctcttcactatcatattcacacgaatcgtcttcctcagactcaccaacatcaataccatctctataatatagtcgcaatgaaaacattaagatttctaaacagatggaataatagaaaaacaagaaagcattatttgctaaagtaaactagtaacaatgaaaggatacgaatcatcttcatcatgctcataatcatcttcatcgtcctgataatactccaagaatccagacaagtggatacttctgtcaccagtcacggtgaattccactggctcatcatcatcgtcaaactcaagattcagagggcaacattcgattttgtttggcaacaatgaacacaaagcaataggagccttgtctcctattgaacactgaatcacactcttttctttgctcaaacccgtacctagagttgcctgaatgatggcaaaacatacatacatcaatagatatatcaaacacattcagattccaaaactagactacacaaatatacaattcatatcccaaatcagctcgaaggaacaagagtatagtacctgggtcacgtgaatctttccttgttcattttttggattataagcttgaggcttcccaggtttcacttcaagtcctgcatatgttaacaacacaaaatcagaacctaggaatcatgctccgggaaaatcaaagaaaacactgagcagagaaaactaaacccagaatcccattttctcagctaggttactccttggaatcgaagcggcaactttgtttctacagactaaaaccctaatcgaaggttttttgcagacgagctttatatcgagattaaagcggtttcgagaaatttcgacaatttgtgcaaccgcgctctcagtttgggccttaacagactttgaaattcaatgaagccccaatgaagcccatatattggtctgtcataaatcgtaaagtaaatggtattgtgaagatactcttcatatttgataacatttaatttgtgttcattattttactagagttaatttgaaaaaaaaatctataattttctctcatgtaaacgcaaattcagaaattttgttttaaataaaacaatatgagacctatctttcaacaaaacaatacaatattgagacctaaacacactgtacaatgacgtgagtttctatctttcttgtcaaaatctgaagtgtacaaagtaatgtctttttgttgtatgtaaccaagttagttaagtgtttgtatctcttgttaccaaggaacgaagagatttccacttgatttctccataattctaccatcgcttaggtctgaccctgaaagtgagccagccttgagttggctctctgaagaatacagcggagaggcaaagctcgaacgttacagttgtataccgaacagcggtgaaaagttaattgttgtta

SEQ ID NO: 25074 - DNA, 1301 bp, Arabidopsis thaliana landsberg
  unsure (1)..(1301): unsure at all n locations
taacaaattgaagattcgattacttgaaatagaagctaaaagccaatcccaattttccaaggaacaaatcttctttgatttttttgggtaaatcgttgaaccaacgacacataagtaaagagaatctgcatataaggtagaagaaagtcatcgaatctacaacactaactcttgcaataattatttaatactaaaagaaaatacgtactgacaaaaccgtgacataaaccagatatattggatggcaaatttggatctcatccaaacttgaaaactgccaaaacatactggaaaacgaaataaaatagagagaatatccggtaggagatatttttaaaattttcacattaattaacttttttgcgttttctttttttttttcactggaattttattaatcaagccaaacatgtttacaaagcctgataaaccagaaacttagccaaagactttaacaggaaacagatcccgattttaacggaaagcaacaagatttccccggaaacaaaagctcaaacgaaggagacatagtcctaaggtaatgggaaaaataaataatctaagaataattattgttaaattcaactaataatggtctatccataatttcccacttaaatatcatcaaaaaaacgagttcgttgaatgagttagttgttttgactttttgtctgcagccatcaaatcgagccgataggaactacaccgaagcagggactttttgaagtgtgaaagcgaagggaccaacttctcataaataagtgaagattcatcgccaaaaatcaacaaaccttaagcaaaaaaaaaacctctgcatcaatggcgatctccaagctccatctactcttccttctctcagtctttctctcccttcatcctcttgttctttccgacaccgccggtaattaactctctcatttcccgtcaatgtcttcttggttattcaatttaggttcttgaactctatcgatcgtaatttgtttacctagatctggtctgaaatcgttgaatcttcttaattcaagcttagttcggttcttgtttgtgtgtcattgtgtgttctgttctgtttcgaatctttttgaatcggatcttgatttttgtgtgtgttctgttttctttttgatatacacagatgaagaagatgttcttcttacaggcatcaacagttacagagcatcactaaacctaacaaccttaatacacaaccacaacgcagaatgtctagcagacgaaatcgcagaccaattcaagaaccaacctngcacaaacaccactggctcagcctctgtccctggaac

SEQ ID NO: 25075 - DNA, 3380 bp, Arabidopsis thaliana landsberg
ccgagaacgaagtttttgagatctacgaggaatgtaaagagaaagctaagaaatttttcaagggttttcaaggacaattaaacctctcttatgaatggatgcttcttggtaatggctggggggctagggaccacataagaggccctgttttgcatgaggatttcgtctgtttgactgctcatttcgtcgatgataactggaagatgaagaaaaggatcttggcctacactaacactactgacccggaaatacctatggatgatggttatgtttaccctttcaggaacgctgttcaggatttcgagattgagaacaaggtctctactcttctactgcctaacagtgaggattttgatgaagaaacgttggatcctttcaggaaatggatagaggagatagggaacaatcagttcaatccacgggtttctctagtctattgttgctctgatcttttccggttaatggttgatgatgtgttgagtgaattaagctcgtcgctgctggaagatgtgcgtatgttggttggatggggaagatgttcagcatccacctggaacgtctcgttgtttcatctgcaacaagctgttgtcttgaagtctgaggatgcattctcaaaggatgagatttacgatgattatgacaaaccatctgatgaagattggattaagattcaaactttttgcaaactcactgattgcatctataaagtagcaaaggagcttttcgaaggagagtattccacatctaacgtctacttccaccttcttgctgagctgaaggtaatgttgaatcaagagcttgcgagtgctgatagtgattactttctctgcaaagctaagcagatattggagaggtttgataagtattggaacaatatgtttctggttttggctactgcttctgtattggaccctcggtttaagatgagttatcttgagttttactgctcaaagaaggaagtcaatgttgaaggttcaaaagctgcaactgttttggactatttacgcaatctgtatgctcgctatgcagctagcgatatctgtccactaccaaaacgtccggatgcttcgatgaacccaaattccagtggtttgtttaagtttctgtttgacgaagaagatgaagatgaagaagaagaggagaaggagaagaagcctgatggatacaaggattttgttttgtttcaagaatttctcaagtatgaaggatcttcaagggagtttcaagaatcagaacttgattcttatctcaaggaaccagttatggagtggaaaaaggacttcaatgcattggaatggtggagagaagagaactcaaagtacccgatcctctccggagtagctcgtgacattctctccattccaatcactcgtggaacatcgcaccgtgcttatgttgctgacaagagagagtgtcctgattttatcgtctccatggaggccaaacttgtgaacgccatgatgtgcagcgagagctggccacgattttgatatgggaaaatatggtaagaatattaaatgctatggcttttgtgaaaactcagtaactcaaaagttctcagttccttccaaactatgtttctggtcaccaaagtaatggttcgaacctgagtttcatgttgtgtgtccttgatcttttattgagaagtagtgtatgttttaatcctctactgtatgctttatctaatttctctatcctacgtttcaaagactattttgatagattgaccagcaagaacttgatggattgcaggattggtaacctttaaaatcatgttaacttatgatctgacaggagaaaacaccacataatgaaactatgttgggctaaaagtaacaaaagcccaataagaaacagtaatagtatcttcttaatctccatttgccgtatttcttcctctagagactgagatcagaaatcacgagaaaatgacgacgatttccgatcttccatacgatttgttaccggagatactctctagacttccgaccaagtctataccgaaactgaaaaccacttgcaaaaaatggtacgctttgttcaaagatccgaaattcgtcgagaagaagttgggtaaagcagcaagggagacggtgtttctgatgaatcatgaggttaattcgattagcgtagatatccatggaattccaaaaggctattcggcatccatggattttacaggtacactcaccatacccgaaggttcagatttggaaatatttcgaatccatcactgcaacggtttgttcttatgcgccacaatgaactgtagactcgtagtttggaacccctgtaccggtcaaatcacatggatcatacctagaactcgttacgatagtgatgatatatatgctctaggatgtggtgacgacaaatcatcttctttacatagctacaaaatcttgaggtgttgcgatgacaatcagaaaaaaccagtgtctgaaatctatgattttagttctagttcatggagggttcttgatggcgtcactgcaaattgtttcatagaatgtaatggcgtggctttgaaggaaagtgcttactggtatgcttcagataaaagagaaactcccaagggtaaattcatactcaggtttgattatgcaacggagagatttgcacgtctatgtcttccccttaattttcagagggatcgtgataataagagtgtggttgtgtctgttgttggagaagagaagcttgctatgttgcagcagttcgaccatagggttcatggtttgaaatattctaagataaaaatatgggtgaccgatactaagatcggtgagggcaaagacttgtcgtggatcaacatcttagtagaggatcttgctggcgatataaacaaagtgaacgagtttcctgttgagaagaggagaaaaaagtggcagtgtgttctgacgcattgtgttcttatacagacacggaagatgaagataggagaagaatctacattgttggagaaggtgtagatgaattcgtctatgatgaagtttcaacggaaacatcacacaattggccatttctcgtcagttatgttccaaatctggttcacattgagaaagatgcacccatagtcgaagtgtaaaggaaaaggaaacggcaaaaggttagtcaaatgaattgccttagcttttatcttgctttttctttcggtcatgttcctttcaacgagattcgtcaatcattggtagggattgtttctatttagctgatagaacttacctttgtttctcttgtttgcttttgaaatatatcagcacaacaataccaatcaagctagaatcgacgaaagagaaacagaggaatgaggaagataaagtgaagatgggctcaggaacgatcaaaggcccaaaacgataaaaaaaaagccaacatat

SEQ ID NO: 25076 - DNA, 516 bp, Arabidopsis thaliana landsberg
  unsure (1)..(516): unsure at all n locations
gtgtctccaaataatattcacccattatatttcggtgcttcggatttttcaggatatcctgtaaattttgtagttgatcggcaaatgacacgacttgtctgtttgtttcgtcgagcttagtaaggccttgagtcacttccctgataagtttcgaagattctgaaagctgggcgcgcatggactcctgcactgacttcgaagactcactgatcttgtggtcgacggtgcgcgtcagatctccgaccttgctatcgactgtcttggtcagatcctttgtcagatctccgactttgcgatcgacggtacgcgacaattcgtgnnnnnnnnnnnnnnnnnnnnnnnnnnccattttcatgccggtatctacctgcggagtgtgctgcttattccggcgcatcagaactattaccagagcgatgtttccgaggattgcgagagtgacgaggataatgagggcagtagtcataggagtagtttacaggtttaaaagaacgaggtgcatcaagtgagaactta

SEQ ID NO: 25077 - DNA, 1223 bp, Arabidopsis thaliana landsberg
tcttttctatcaccatttacacagtctaataatcatacaaatatgtctataatgaatatgtgttttaataatttttatatatattatataggaatttatgttgggttaaacaaaaagcaattttatttccaaaaataagaaacggatttaacccccaaattcaataagttagtccacgactcacttgattgaaacaaagccaaattactaataggaaacaagttgattcaaatgcttaaagtagtcatcatttcaatttcttcttaattagtgtgtgaactagaacccaaataaccaagttgctgaattaacacatcaacattttcttgatctccttcaaaatcaaaattttgaccttcatttaacaaatcttcccaaaaaccttcaccataaatctcattgttctccttatggtacccttgttgttgatcttctacttcttcctcatcatttcctttttccacattcaagacttcttccctagcactggaattatctccaagtccttgaatgtgcatagcaagtttgtccaactcggacatctcgaattcagacatgtttccatatgtatattcctgactcataccaatcaatgctgaggatgaggctgcaacatcattcccataaccactttcatcaccataatcttccacatttctttttccttgatcgatcggtctttgtctcttcttgctgatcgcctcttcgatctctttcctcttttccttctgctctactagctgctgaataaaatctggattctgcattgcgcgggcaaggaagctcatcatttgtttttgttttgactcggtcttcttgagcttctcttcaatcaatgtgagatacattttggtgctttgttgttgctgtcttagtctcactagctccatcatcaacacttgcttgtctcgccttaggctgtccatctctccatctagaccgcacctacccttttctatgcttttattggctagagaatgttgttcagaacctcgaggaggatgcatttgattactatcagtacgcgcccctccttatacttatgatcctgaggagatgctcttgccctctaaaaaacccttcgtttgcagactcccaccgatccccattcacctttgtgaaaccctatgtaaataattctatgattagattcaactccaaacttgtcttaatcaacttttgtaaaatcacatagcaaaaaaaaatactgataaactctaaca

SEQ ID NO: 25078 - DNA, 578 bp, Arabidopsis thaliana landsberg
cagtaacgtactattccgccatcttttgacccctcctatgtcccaggacaacatgttcaagcttgagtgcaccgtctgcaagacggcgaactaccgctcgctgaagaacaaaaagaagctcaaggaccgcctcgagatcagcaagcactgcccggtctgcggcaagcacaccaagcataaggaaacgaagtagcctccgctacttcgttttcgttttggcgatcaccacggcaaggccaatgagcgccaggttcttgatgatgtattggccttccatggttgggacgaggaaggattgccaggtgaggtcgcgcagcagtaggagcggcaggctggtgaggagcatgtgtaccgcgaaggcggcgaggctgacgcgggtgagcttcttcgaacagaacgagagaccaatcgctacctcggccgcaccgatgataatcaccgccgggatgccgtcgcccagcatcacctggctcagcatatccaccatgggcgatgcggggctcacgccgaagagtttgagcgcaccgaaccagatgtacagcaccgccaggatgccgcgcgcgagctgatcaaaaggg

SEQ ID NO: 25079 - DNA, 915 bp, Arabidopsis thaliana landsberg
  unsure (1)..(915): unsure at all n locations
caatcaatatcatatgatatgctatttgtttagtgatatctatatactagttgaaatctaatgtttttatcaaataaaagttgaatctaacgttatttaatattcgattatacttgaatttaccaaagaaattgatttacaaactataattgataatacaagaccattttgcaaatttttacaaaccatatcttcttgttgttattattagtttactatcaggaccaattatggtggccagatacgttgaatctagacacgaagaaatatagtacgtgtctatctcacgagtgttaggtgtaaatttatattgcatggggtcatattctatgttgcatgtgtctctctatttctattgatcgttgtccattttctgcgtaataaaagttagatattgttattgccttttttttttttttaaatttttttttttaataattaaaatcatcttaatggataataggctcaaagtctttaggccatctccattggtgagatactttaaaagtttctcaaaaaataataataataatattgtattatgatttagtttctatccaattataaacacacacatatacacatagtctctcaatcattactctaaagtttctctgcagagaaactattctcaatctctctcatactttattattattttatattttttagtcaatgaaaaactatgtgagagactaccgatggaaatgctcttatgtttgcatgtgccaacgtaaaggatatggcatgtttggtaaccgagattacattattttcataataaaatatcgatatgtctagtttattttatacgtgatattaaagttggaaagaatctgcgcttaatatactaagtnntgaagcccaaacccacaatcactaattcaaattaagaagggaaaaaaacgatttctt

SEQ ID NO: 25080 - DNA, 1018 bp, Arabidopsis thaliana landsberg
tatatcccatcacattattcttttcgtttccgtcagatttgctcacaacgtaaagagtccaaatttgatttatattagaatagtccaagtcttggagccaatcgttgtttccacgactactttcccccaaacttcatctttttctctttatattacatctccaaaggtttgctcattggtttcaatcttccatcataagcgaaaatgatacaatttcaagaatccgaagacgaaccagatttttctcaagaagatcatctaacatcttcttctcaaccacttcatcaatgtattgccactcttgtatgtcacacagcatcctacatttcatctctaactcttgcaggaaagagactttacacaggctccaacgacggggttgttagattatggaatgcaaacacgttggaaacattagccgaagcatcaagcaacggcgatgtaataacaggggatagaggaggtggaggagcagtgaaatctttggtaatcttggctgataaactctttacagcacaccaagatcataagatacgtgtgtggaagataaacgacgtcgttgaagaagacgtgggtggtaaaaagtacatgcatttagcgacgatgccaacgattagcgatcgttttgcaaagtgtttgatgccaaagaaccaagttgaaataaggaggcataagaaagcttcatgggttcaccatgtagacgcggtttcgggtttagccttatcaagagatggaacactactctactctgtctcatgggacaggacgcttaaaatctggcgaaccaccgattttaaatgcctagagtcattcacaaacgcccacgatgatgcaatcaatgcggttgcattatccgaaaatggtgatatatatacaggatcttctgaccaaagaatcaaagtgtggaggaagaacatcaatgaagagaatgttaagaagaagaggaaacattctttagttgcaatattgtcagaacataattcaggtattgacgcattggcattgagcggtactaatg

SEQ ID NO: 25081 - DNA, 1415 bp, Arabidopsis thaliana landsberg
gggagtgttgtacactagcctgccaagtttacttttttttgcttaaatcaaacaacattttgagattatatcggcttggttaagtacaaaaattgctaacgaaatcgatatctatagggtgtggtgtttgttgcttttgggaagccttgatggtaatcttgaggataatctctcattttagattcatgattccatataatattctctgtctacacataattgcagcttacatgccgcatttgagcctgctttacgctgagttgacagaggaagagaagaagaatgcgcaggagaaagcttacacgctcgatagcagcctcgatggactcagtttccggttaaaccgacttgctctatgcaaaaccgataccgaggacaagactctagagacatgggagacagtggctgtatgcaatctcaatccttaagaaagtcaaaactttggttctgaatctgtaacaaaagatcataatgaacttgcttttgaataatgtatcgttttctctaaaactgaataataatgttacaatacaactccgatacatattacaccaaacttgctaacaacttcacatgacgatttgcatatttagctacaagaaacaacaattcacaagctttttgtaagacttgcgtccttttaaagagttataccaagaaaaatgaaaaaagtcttttactagtgtttcataatctgcgtcaatgtccataagacattttgttaacttcaatccaaaaggcaatttaggtggagcagttacggctatgaatatgtttcttttgatcaacaaggccatgattctttataaattattattttaactcacactacattatatgaatagtgtgaccctatcgccgtctcttaaacaagatttattatttgataggatgtgtgcaagttaaaaaccacaattagatagtgttttacctgatcttcgacttggtttatgttaggtattatcggtttttgatgttattgcgtctctagaaaatgaaatcatttgtagtttaatttggttccaacaattagataaacaataaaaaaataataattaatactatatttatgaatatggttccatcttttaaaaaaacatctaatatggttgtatctaatatttaatatgtataagtcaactataaaatttcagtagattttggtttgtttaatttggctttttcaataataatctttttattcacccttaatcgtggcaacgattacttatatagtcacatcaacattgagacgagtcttgcgagaagggacaatgacggaagaaaacgcaacgccactgcaaccgccacaaacgcaggaggatgatgaagaggaaaaggcaatgtatgctatctgggcagtaccggaggatgacgtggaggatcggcttcagaggttatggaagggctcaggt

SEQ ID NO: 25082 - DNA, 1814 bp, Arabidopsis thaliana landsberg
gttctgtcttcttcagatccttgtactatactcttcctgcattatttctcttattctttcttctttatctttgtttatctttcaccacgggaatcttctacaacaacttccacatatgtatcttctctcgaaagttcaacgatccttattgtaacacggctggttctaaacccggttatcaaataatttctgaagaaaatgtaactttcgccggagagaccgcaggagatagaattcttgattcagttcctgttcaagaacacaaaacaaagtacaaggttgatctcaattcactcattgaactaaaagccgaggaagaatacagcaaatacatcaaacctacgagtgaagatgagggatatgcgttaagggcagtcatcaagtatctttacctacaaagatcatggctatctccgggagatgaaaacctcaataattcgcgatcgtgtgaaggtaaaggagtttacgtttatgatttaccgtcaaaattcaacagagatttgttggtaggatgcaacgatatacttccaggggttaacttgtgtagctacttcatgaatgaaggctttggagaagctattactaatcttggcaaaggttggtttgcaacacacatgtattcacttgagcctatcttacactctagaattttgaagcatccatgtagggttcataacgagacccaagctaagctcttctatgtgcctttctatggcggtatggatgttttgagatggcatttcaagaacgtttcaagcgatgtgaaagatgttttgccgattgagattgttaaatggctcggatcgaagaaatcatggaggaaaaactccggaaaagatcatgtttttgttctcggaaagatctcttgggattttaggagggttgataagtattcttggggctcaagcttacttgagatgcaagaaatgaaaaaccctacaaagcttctcatcgaacgtaatccatgggaagtcaacgacatcgcgatacctcatcccacatacttccacccgaaaactgacaccgatatcgccatatggcaaaacaaaatacttgggaaacctcgtcggagcctaattagcttcgctggtgcagcaagacccggtaaccctgagagcatccggtcaatattgattgaccaatgcagatcgtctccaaaccaatgccggtttttgaattgtaccgatggaggctgcgataaatcggaatcggttatcgagcttttccgagattcggagttctgccttcaaccgcctggagacagtccaacaaggaaatcgattttcgattccctcatattaggttgtattccggtgatatttgatccgtacagcgcgtattaccagtacacgtggcatttaccggaggatcaccggagatattcggtgtatataaacaaagaagatgtgaagttgaagagagtgaatgtgattgagaagttaatgtcaaagactctaagggaaagagaggacatgaggagttacattgttcatgagcttttgcctggtttggtctatggagattctaatgctaagtttgagagatttcgagatgctttcgatattactatggatagtttattcaagaagattgcaaaaactgtataactttcgtttttcgtttgattttaattgtcaaattttcaaatttagggcgcttatttgaatatttttaaaaatctcaaaagatgattgccaaaatgtttaaaaatgccttatttgtataaggtggtgcagtggtggtgccatgtgacttaggataaattataaaatagcatatctagagaaaaggccctatgattgtatagggttcta

SEQ ID NO: 25083 - DNA, 1016 bp, Arabidopsis thaliana landsberg
aacgaaaaccaagagccatgaattgtgtcactgcctcatgaatactctgacaaagtaaaagaggtgacaaaataagctatatctttctttgtgtgtttctttttgtttgtcttggtcgtcaagttatttcaatattcgtttcagctctgatatcatattcacaagcggtaccattagatgtgctttaacattggtttttcttaaagtgttattaatcaaatcatgtttccttacatatttactctcgtacagagagggtaagctaataacagatgtctaaagaagaagggaattatatttcaaaatttaagctttcctaattcaaattatgtttcttgagtgtccaaatttaagctttaatttcctaagccgttgttggagaggagaagctttctgtgttattaaagcggtgtagaaagggttccaagactgagatttgggtgtcaaataagattgatgacaccaccgaaggagcagtttcttggaccaaggtcttagtattggatttgagcagggatcttcaagccttgtttacttcaaatttcttggtagacgaggagaagaaagtcttcatttgttgtgtgagttggaaggaagacgaagacgagaacaagtccaagaaagtatacattgttggggaagacaatagagtcaaagaaattgattctggagaagatgcaaccagtggatgtgagccaactattcttagtttgtatgttccaagtttggtctacatgtaatctctctctcttttgtgtgagtctgtgtgtttttaaaatttatcttgctttgaactgatatttcattaagatgttatattgtcagatgtttcaaatgctcagtattgttccttgccttaaacacagcttttaaaagtttatgatcaaacctcttcttgtagagaagattttttaaagaagagaacagaattatgtttcaaatcttcaagcttttctaagtcgtgatttattaaacattgaacaagcttttctactggtattttctctgagttatct

SEQ ID NO: 25084 - DNA, 1843 bp, Arabidopsis thaliana landsberg
agcaatcaattatacttgaaaaatttgcatttacatctgaacattaagaatatcaggttgcgaaaaaataatcccataaagaagtagattgtagtgtatgcgaagactgaaattagagtaattaacaaaaaaaaaagactcatcctaacattatcatcacaaaagattcaaaactgttttgatgaccctattttgacgttcagtcactgccattgtctctctattctgtccaccctacgactagacacatcatcacctcattatatgaaatttattaatttaatattctgctcattcaatcttcaaattcttctttctttagattttttttaagtattttgttatttatgtagcagaaaaagtcttacttttgtcaacgtagatataagaaagttacatctatagaacgaggagctacacaacccaaaattaaaaattcctgaaacctaatatctacgataatctgttttgctttaccttgcaaattaataagtgggaacaaaactttagcagaaatataataaaattgtcttttttattagattatgaacttacatacataatttacaacaaaatctttccttgataagggttatcatatatgctttacaatttagatattcgagggctgatatcagatgcccaagtatagtactaaaaacatctaatcccacaaaaagaacaccaaaacaaataattatataatctgtacaataaaaccaaaactccaaaaaataatgaaattccgaaaataaccttttaatatttgtagtctttgacgtgaaggctctcggacgcaccttcacctaactgagcatcacccttgtagccaccaagggttgcttcagagttagccttggctctagccaagaacgccttttgagccttgtccacattctcctctttacctccccaagccttgagtgtactctgttgaagcgcacgtccatacgaaaacgtcaagctccatggtttcttccctttgagctgattaatggcgtttaaattcacagttgcttcttcctcactctgtcctccagacaagaacacaacggctggaactgctgcaggaacagtcctttgtaaagcacggaccgtgtgcttggcgatcacttcgggtttaactttagaaccactgtcagaacctggagtaaccatgtttggtttcaagagtgttccttctaagatcacatggtgatcacttagtgccttgtaacaagctgcaaggactcgttccgtgacataagcacatttctcaatgtcatgagatccatcaacaagaatctctggttcaacaatgggaacaagaccgttctcttggcaaataactgcatatctcgctaaaccgtaagcattctcatggatagctaactcagaaggctcattgtttccgattttgagaacagcacgccacttggcaaaacgtgcaccagcttcgtagtatttcttgcaacggtcaccaagtccatcgaggccgatggttgtggtttcgccgtttgtaccagcgagctcaacggttcctttatcgactttaatacctggaagcactccagcttctttcattacatcaacaaatagtttccctgtatcagaaaccaagcacatcaatactagaatcatgagtataggatctgaacaagcattgttcaatatagtgattgaattaacctaaactaagatatataaacaattacttcacagatccttctatacacatcagaaacgccagaatcaacttcttctacaaatcagaacagatatatgaaccagaaaatggtgaaagttcttgtgaggttttagagttaagacctgaagcagttttctggtagagtgtttcttcgtt

SEQ ID NO: 25085 - DNA, 1790 bp, Arabidopsis thaliana landsberg
  unsure (1)..(1790): unsure at all n locations
aacttcagtggcaccaacaatgggaagtgatctagcatgtctcatagacgcaattttacgccatgctttgatcgaagggctgaataccaagatccctctgtgggacttgaaagagtttctgtccatagaacgacctccaactatataaatctcctcatggatgctcgtcacagagtacataaaccggcctttaagtagatcagtttcaatcctatgccatttgtcttgagaaacatcatacccatgaatatcaccagaggagcatccatctttaagagcagcaaacaaaaacaaccacggggtttgaaaggagccttctcgtctcatctggagaaaccgctgagtgttggccatggattgccatttcttgcaaacaaggtgtgcattcaataagctggtcaaaggaagccgcatcaaacacatttccagaatatcatcgggaagataaacgtgcttgcggtaatcctggcccgagtctgctagatattttctattattcttcttccagaacctctctctaaccccataagaaaaacaatctaacctagtttcttcagttccacaaattgtcatcaatcccttaccctcctcactagcactagaccatctcttattacttgaatcctcctcaaaatcctcacccgtatcagcaactctgcaaccaacactgatgcttaaacaattcaccgctccccttgcaacctcttcatcttccaccacctcagttttatgaatttttttcttcaacttctggctaacacttttcacaagcctcctcgaaacggttaaaacctccagatcctgccgtatagattcttctcccaacggtttctcagaaatcatcatccatcatctaacaaacttcacgccaagagaagcaacctgcaaatgcagatcacaattacgattcacagaaatcaaatttgatagcaccaagaaaagagcaagtggacacaacaaaaacaataaatttgtccaaaatgtaaataactgaagctgatgatcaaaaagcatttgtgtgagatcatccacattatagcgagatccacttattctataaaccagttaatgagagattaaacatgtaaaagcaaactctaactccaatattccgacaaagtaacctgttcattaccagctccagaaactacaaatctgaatcgtagcaccaaactacaagtagtttttgaaatttcgcttctgaaagtaaccaaatcgaagaactcacttacattgagcaaactccggagattcgaaacgagattcatacatagacagagttgtttctccaaatccaaagcagatttctccagaaatcaccgaagaaaattgagaattcgaagacctaaaaggctaaaaaggaaggaacaatttcgctttcccttttcgttttattttaatttttaagtcatgtaggagacaggagagactgaattgttgtctttctcgcaaataaaagaagaagaaaaataaagaggtgctaagatgtaattttgctaagtaatttgtaattagcatatcacaaaaatagtataagataaaaaataatttgggcttgaaatttagtaatacagcaaatatttagaaattaatacttaataaattgatatattaataagcacgataaaataaatattgtaaatcagctattgacagatagttgaaatatgaaagttttacaatatatttagttatgaaaatcttggactgagataaatcctactaattgtgaaattnttgacagagaaatcctactagtaatcttggacggagcaattctactaaatttg

SEQ ID NO: 25086 - DNA, 2312 bp, Arabidopsis thaliana landsberg
gagtgtgaggtgttagatttgagtgcattcgacataacatctaaagaatgtacaaaagaaaagcgaagaaaaattagactcataaatcacacatcagtttctggtaaaaagattggtgaaagctccaaacctgagttagctcctgaaccagaagaacagctggaggaagttctctcaaaaccagattctattgaagtgtcattcctctccgtgtctgacgtgtcttttgcaagaatatggactccttcgtttgagacaacatagactgtgcacaagtttgacacagatgctgatatcgacgctgtaatatcataattcctggaagtagtttcaacagatatattcattcagaaaactctgtgcaatcagataatgaaaccgaaaagataatattccatgccatacctcgaggaggcagcttgagatgagcgtccaatgataagattgctgatcaaatgctgattaacctctttggttatcgccgctgcaacactatttgattcaagcacttgaagttctactgcaacctttgtcaaagaagattcaaaacgagtttcatcgatctttagctatataacatatctgataaaggaagaccaagaatgacaaaaagttatttaaaaacctttttccgctcgcacaaattctaaaaaggtttaagaagagtttcttttgtctcctgcatcactttttgtctataagcagccgctacttcctctagttcctcggatatagagactatgttccccgctaaggaaggaaacagaaaccggtatcaggctcttaagtagtcacaggaagtctcaggtagagaagaaaatctttggaacttacaagctgcacgtagagtagtaatctttggatggatgtgaatcagcttgaaagagacatttttgtcagaccaaacttgttgagcgcccacttaattacattcttgcttttaatgctcccactaatacgtaacgcaacggtcatcggttcagaaggagccgcaagatcagccctcttaggaagctgggcacgcacagcctttgggtccagatatgagtttttgaaaaaagagtccattttattctccagaaagtcaaagcaccggcttgtagagcctctacaatgtcacagccagctctacgcaagatggtcagcaacggttctgctcatcgcctattctttcctccaaccaaatgagacagtagcaatctgtcattcaacaacatcacaattgaaatgaagatctttgagccaaaccaaaactagacaaccaaggaaccatagagaaatcgatatcacattgctgaataaaaatgtaaggttttgacaagatcctgatttcaaacagagaatgcatcgatcaagagatgctttgatacgatcagaattcaatatctagatagaacaaaaggtcaaaagccacattccaaagtctatttagatatagacagctagacaatgcaattgcagaggaattttgtaactctgaacctgaatttttgagatttaagcacataaagtttcgaaatttactagaacaaaagcttggaaacaagaaacccatcaagccaagcatgatcggaatctctaataaacaagaaaaagtcacaactttgacctacctgatatttaaaggatgcaactttaagctgtggcataagaagaaaagaaggtatctttctcactttgccatcttgaagttgaagaagcgatggagtcttctattctcacacggagacattgacacaaagaagagccaaagacccaagttcgtggcttcgttcgtgctcccaatttcagagacagtcaattccttttgaataaccacataatcttatatttatagaaacaagaaaaaaaatgaagataacttggtcatgcatatgactcatgattcattgttgaagattcttctttcactcttttttattttgtttttgataatagattctttcactctcgttatttactagctcacacaaggattttcttcattatcagagagctacaaagaagagggaggggcttatattatttctctttttttttttatgtttgaaagtttctgccaattctcaacaatcttatgaagggatttgctaactagtattttttttttagatttggaaaatgtctgttttggaaactaatattatttttgtgcacggctggatttactttttcaaaaacatgaatattattaaattcatcaagaaaattaaaatttaaggaatgaagtattatattggtcttaaacttcggaaaaaatagggcatcaacaatggatggtttaggtccactttttataatggatctatcct

SEQ ID NO: 25087 - DNA, 585 bp, Arabidopsis thaliana landsberg
  unsure (1)..(585): unsure at all n locations
ttgtaataaaataaataaaaactcaccaaagtacataacagttcacacagcatgttttaagaaaagatcatatactattggtttcaaagtctttgactttgaatgtttgaacttttcaaggttcgcctactcgccggtcgtctcctttaaccttcgtctctgtgtttatataagaacatatacgtattcgatgattacaaaaagacaattctttatccttctttagatttctgtggaaagttcactatttattaggagagacaatttcannnnnnnnnnnnnnnnnnnnggaactgttctgtgagttctaatggcggatcaagttaaagaaaagacattggaggaaacttctacatgggccgtcgcggtggtttgcttcgtcttgcttctgatttcgatcgttattgaaaaacttattcataaaattggatccgtaagccactttcttaaccttgttctcctccttcaagattctctgtttctgtatctggttagttcttcccaaaaatcaaacttgattgttctcacgaacttacatcagtttatgtttgaaactgccaaaacccaaaagggttttagtctttt

SEQ ID NO: 25088 - DNA, 2769 bp, Arabidopsis thaliana landsberg
gatcgtaagtctaaccggcggatgagagaaagaaagcttacataagaagcttgtccttccttaactccattagaagaagctcaagctcaagctcgagtaaacaaatctatgcaaattagaattaacagaagcttttaaaaatcatttctttgattcgtgtctctgacactctctcactcttactctctctaaatctgagaaagatcgtgtttttgtttagttcttccggagaggattggaagaggagaatcactgagtcacgggacgagtcagaaatcggagggatatttgtttttttttcttgggaatacttgagccatcggtataagacaagaaagtcaacacatttgactaaagtgacattatttcgttaatcaaagtcattattagtttacaatacaaaacactaattagacaatgttacttgttacttcacaaaaacacttctttagtcttatagtcagatccaatcacaatcactttctccgtgataagtaacaatctcacattccaatcagaaaacgattctttagcctcctttatttttatgttcaatataagcgtttgaatcacacacttgaaaacatagttgacatacctttggaggtgaagtaggtaaattaaaatcacatgaaccaaagctttacttagaacttatacttcatcatggacaaattgaaacagaaacattgatgattaaccactgaatctcaagtgaaattatgagaaatcattaaggtaacataagcaacatgtttaaagtgacaaatggacaacatttctatcagtaattgactagattgaatttaataattggcatgataatcaaacctcaaactaagttaaattctacagaaacccatcattctcttattggatcaaattcatcaaacggtgaagaaacaagctttcaattgtgaagccgtgtaaaaaaaaaaaaaagacactgtacatgactattgatggaaaccaaaattgctgctaaatatgataacaaactaaacacactttcaaatctaattataaaaccaccgatcaaaaattttcaccttgtggtctccatcttcttccttcttcaaatctataaaccctatccctacaaatcggacaagtcgagactttaatcaaccacaagtccacacactttcggtgaaacacatgtccacatcgaggcagcttccgacaccactgtccttgtctaaatccatcgatacaaacaacacaatcatcgcctccgtactctgaactaggctcacaatacttgaattgaggaagcctcttcacgcatcttggagataacccatctgagtattcgtgacggcgatggcggcggagacggtggcgatagtttcgttgaagaaaccagtagaaagcgaagaagaaggtgaaaccgagagacgtgaggataaagataaaagcggttatagctacagggatcatgattagacctatgaggaagttagagagaatcttcgtcggtagattcttcgtgttcgcttttggcggcggtggagacggtgatggctcgcgggagattgagccatcgtagggaatcgttatcgacatcgacttgcggcggagattaaaaatattctcttttacgaatcaaactctaatactctgttttagggctaaataaaggagagatttttatggattttgaagatcgaaaatttatcggattcaaagtatattgtacaaaagagtttgtctgatagatatttatatgcgggaatattcggacatcttttttatatcagtttttgacgataactttttaactagttttggcccttttgagaggaactcgtgagcaaagtctttttttttatataccaaatttttcattaaaatgattaaatttaactagaaagaagaagattaagcgtatataaacacaaatacacagacacgttttaaaacaatggggttctgataaattatgttactaaattttgatcatacagaatgtagtttggcgttacaagaaaactagaggagaaaacaaagggcgaaaccagacttcatttaaggataaagtattggtgatgagattatataaaatagggttcagttttgggttccaattattatctctgtcctctgagcttcctatctggtaatgccgagtgggaagtgataaggacaatccgacaagggcagcttcctcggtaactccattccttatgtcaccatacctacctttacattcagaaattctttgcatcatttttaatattatctcgttgtttctcacgttttattccggttcattttgcggttatgatccggttatcttcgtggttgagcttggtttagaataatgtctcttatcgtctcgttcggcccattaacgctcgcctcataactgttccatatgtactagtccataaatattgatttcactacatttaggacctataaaaggagagtttttttccttttgatgaattgtttttataagattgttcatataaatttacgtggcaaatttgatcagcgtagttagtaaacgttatctggagtctttggctgtaaatctgctatcaaatgaggataacaatctttctaatcctttagtcaacgcagataaggataagttaaatataacctgtttgcacgtatacacatgttaaaaaatgggaacagtcatagatatttctatggaaagcaatgtcaagacatgtatatttagagttagtcatatgatatatagcagatatataaatagatatgtcacatttcaccccatccccagtgttacaaata

SEQ ID NO: 25089 - DNA, 558 bp, Arabidopsis thaliana landsberg
  unsure (1)..(558): unsure at all n locations
gcaatgcactctgcaatgaggtcaggatggttgagtttagttgttcaaggtagccgtgatatgtacagtgtagtgtccgctgcccgtacctccatgatggttggtcaaggcatagagctcatatagttaaggttgagataggtttttgttgtctacatattttgtttgttttaagtcatggatgggtaagttaaccaatgttttcaacttatgcttcatggacctgctgtatgagaatctctttagatgtatgactaagacctcaggaagcctccacagatcaagctttttgcttgcctgccttctttcattgcattgtggacagaaccttcaaaaaaagagaaatgataccattgattgatttagtcagctaagtagaagatactggctaaaatctactgcaaaaatacagtgtgttcaacttccatccgtagtagacactagcaatttctgaacatcattcatcatcttgtagtaatgcgtagttcaactttttaccacanaccataaaaaatgagtctcacaggaaggataaggagaaaagactgcttaccacat

SEQ ID NO: 25090 - DNA, 2048 bp, Arabidopsis thaliana landsberg
tcccatcaatatcatacattaacaattgtgtaaatatatcaattatatatatacattatatgtcagattttttttgaaatataattataatatttgttcgcttacatttgtatttatttttatttaaaattcagttctagtattttactttatcaaaaactttaggtgttgttttctaaacatgatattattttttacttgtaattgatttttgaaagatgctttctataataaaaaaaaccctatagaaattactaaaaagttactaaattagaaaaatctctctataaattaataatttatcgataaattaaaacctctctaaattaataaaattgtgcagtcccaacattattaatttataaaggttttactgtatttgactagctaaccatattattgggctaaaggttttcaacttgagttgctatattggaatcatctataacaaataaaggtattcattcaataataaaaaataactaaaacatactaaaaagagagaaaaataaaaaagaaatgttcaatgatcattatcccacacaaaatatcatttttttaataataaaattggttacctaataggctgaggtgattttgagttttatggggtaaaaaacattaacgattttgagggtcgatgatctatataattctttatttatttatttattattattattaatttctatgtttttaagtctgatgaactatgcatattaccctttaagatttagggccccaagaaaatgttttgtcttgatctccacagggctggcctcactaacatggagacgcaaactgcaagtgcaactttattttttatttttattagttttacatttattgtaatatataccatttagtgctaaagaggaaatcaatacaggaggagtttcaacttttagttttcgtatatacgcatttcatattcattttagcacaaaactcgtttagaattatttgcatcgtgcttgttttgttgtacgagctagaaacatcaaacaaaatgattttacaactaagcaatccattataatgaactagtaccatgtctgatcccctaatgttttctttttaaaagagtgttcaatagttgcctaccatatgcaaaatgaacatgactctctacaattgtctaccttatataataatacaaatgtttttactctgtaagctttaaagaagcataaataaaaatcctaatcagacctaaaaatccaagcatgcacaagatatctatttttgctagatgttttcactatgttatatcttaaatttagtaagtgacaaatattttaaaacaaatcaagaatattggttgacattgataacatctaaataaaatgaaaactgtaaagagaaaactgatttacctagttaggaaatcagaatcctaaaaaacttaattgaacgataagattgaggttttggattataaaaaccaataataatactaaaagtatatccaactaacactgaaatcttgtttacaaaagatttatgtaaaactttgatgctattataactactttccttcttattaataccatggctcttagtcacaaacaaaaagcacaaaaatacaaacctagcatagatttacagtgctagtttctgcctcatttagtagactttttatgcaagctaggtaacatatctccctcataaaatttccgcttcgaagacgtatacatggaagtaatgattctcactagatctaaagctagtctgatttttttaaaaaatctagtttcatacacataaccattttttattcttatgcattaaattctctaaagagagtacaaaacattgttaaatggggttattgtcaaaacatggcttttttgctaaaactttgattttgggatctttccattagggatttgaaaaagagtactttaagaacttggaattgacgtttttctcctgctttctttcttcttctttcttcttcttcttctttgctcatcttcatcgttctttttttttcatgatttcttccttttttcatttctctataaaattcaaatcattgggtgggg

SEQ ID NO: 25091 - DNA, 548 bp, Arabidopsis thaliana landsberg
tagatttccatcagattgtttaatctttttccttttgtaggaagttgaagagaagcaacttgtcttcaagaattgcagatgctacaccaagattttgctcagttcatgttatctctaaaggaaagcttctcaatgttcgtaaatccgatatggacaccgaaacgagcattgcagacgatagaagcgaaagccggttctcttcagatagccattcaggtaaaaacttactctgcagtacacaaagtaaaaccggttccaccagtttgatttgttacacattttaggaacagtaagttcgacatcgagtcatcaattctcatcaacacctttactcttccaacgaatccaagccctaacaaccgtgaaccagaaggttggaacaaacattggaaaacagaacaatgaaccgcatcatcatcatcataacagagctgggtctctagacgtggatgaatcaaagttactgaaccagaagggcttttatcgaacaagcagctccggaatcgggtatggaggaagtgatatcagtagctggagaagctctcaga

SEQ ID NO: 25092 - DNA, 763 bp, Arabidopsis thaliana landsberg
tactacactgtaaacgatgaatctgtctccatgtatgtttgtgcttttcacttttgttatttttttcgtgacggctgttttatggatagacaaaagttatgcttatctttggcacaaccatttggtctagaatacattaatgtaaaattaattgtctgacttgtagggtattgaaggtagtggcttctttgctttcgcctactgcatttgctcttgggtcaatcaactttgctgattatgagcgtgcacatgttggacttcgttggagcaatatatggcgggtatggtagttatgtaagtggctacaggccaaggttgattctccttgtattcttaacttttgttctggtcaatcttcatgcaggcatcttctggagtaagcttttttgtctgcctcttaatgatgttgctcgactctattctttactgcgcacttggactttatctggacaaggtacctccttttgatacatgtctatatttagtgcctgtcttgtaaatttatgtctgctatgtgacgatcaattttgtgaactgattcttttgttcttgacattattccttgttaaaatataattgtagttaggaggtttatcttttctttttcgttattgtatcctgcatctttgggcctaatccaagagttcatttcctcaggtcctccccagggaaaatggtgtgcggtacccatggaacttcatcttcagcaagtattttgggaggaagaaaaactacttaaaaaatcgcattccaggttttgaaa

SEQ ID NO: 25093 - DNA, 647 bp, Arabidopsis thaliana landsberg
agatgaagatcaggaccccagacacatgcctcagattttagtttatgcagtggctggtatctcagatgacaagacgatgctagtcagaggtacttatgacaagaaggttatctttattctgatagactcaggctctactcacaattttttggacgcaagaatggctaagaaactgggttatcaggtagaaactgcagggttatcgagagtttcagtggcagatggtcgaaaactgaaagttgagggcaagattcgtgactttgagtggaagctgcaatctactaaatttcagtctgatattttgttgattccattacaaggtgtggatatggttttaggggtacagtggcttgaaacgttgggtcctatttcttgggaatttaagaagctcgaaatgagattcaagtttgcaaatcaaaaggtattgttacatggcattcacagtggttctgtccgtgagatgaaggttcagaaattacagaaacttaaggaggaggaggttcagttagccatggtatgtgtgcaagagattcagtcaaatgaggaagttgatagtgaactttgtatgcttaacaccttagcagtggagacagaagtagactcaggagtggagagagttgtgaatacgtatctagagaagtcgtgtt

SEQ ID NO: 25094 - DNA, 1844 bp, Arabidopsis thaliana landsberg
atgcatcctttctgttgtgtctccgatcactccccttccacgccgtcgttctccatgtacgccgccacacccgaaactcctttcggttccgcgagatcacaaccggttattacccgatctgtctcacaacgatataaccatccaggtcaaagtaatcaccatcatctcctccacagtctctcatttaaccaccagaacgtactagccttaccggcagcagcaagggagccgcctgtggatgtcaagattaacgatatcgctgggaattcgattgccgggatattgtacaaatgggtgaactatgggaaaggatggagaccaagatggtttgttttgcaagatggagtgctttcatattataaaatcaagggacctgataagatcgttgttatccatgagactgagaaaggatcaagagtgatcggagaggagtccacacgtatgatctctaggaataagcgtcacgccgccactaacaacaccaaccaccagctccgccgcaagccattcggcgaagttcatctcaaggtttgatcaactttctctattggttttgtcagtgaaaaaaaattatttacttttttggaacagattttgtgcttagtttcctccaaagtgccatttttttttatgtttccgcttaccactctttcttacggttttgcactattaatattttgtaactacttatcgcgccgatattttttactggtaaaaactcttaccgcttttaagacactatatattatatgattggacattaaatttagttttgatgattgaatgatataaatagtacagtactcaatattccatttgatcatcatctactcgatcggtggtatatataatagggttcatcgattcgggagagtagatcagatgataagaggttttccatttttactggtaccaagaggcttcacctacgtgcggagacgcgagaggacagagaagcttggatagaggctttacaagctgtcaaagatatgtttccaagaatgtcaaactgcgagttgatggcaccgaccaacaacttagacatctcgatagagaagcttaggctgcgattggttgaggaaggagtgagtgagtcagccattcaagactgcgaacaaatcacgaggtctgagttctcggcaattcagagccagcttttgcttcttaaacaaaagcaatggcttctcattgatacactcagacaattagaggtacttaaaaccttccgaacatcccctatgtatgtctaaactcttctaataaattgatgtatctatgtcattgtctagacagagaaagtagatttggaaaacacggttgtagatgagactcaacgacaagctggcaacggagactcaggtaacttgatacacaagaaaccttttctgtactacaacatttttatatcttgagctgatgatttcttttatctcagaagaaacaattagtgaatctgatgatgataatgaacaatttgatgaggctgaggaggaaatggatacatgtgactctctttcttcaagttcattcaaaagtattggatccgtttttcgcacatcatcattctcttcagatgatgatggacttactaatggttttgagtcagagaatgatgatgttgatccttctatcaagactattggatttaactatccacatgtcaaaagacgaaagaagttacctgatccggttgaaaaagagaaaagtgttagcctttggtcaatgatcaaagacaacattggcaaggatctcacaaaagtttgtcttcctgtctacttcaatgagcctttatcttctctacaaaaatgctttcacaaatttggagcattcatatcttcttgatc

SEQ ID NO: 25095 - DNA, 1127 bp, Arabidopsis thaliana landsberg
aacttgcgtgttacctaacactattactctgatttaatccatctaagtcgtgaattttctacattgttgattcatgatctggatgaagacttattacgcctacaaagtccggcatacacttgaaacaatgaagaattaccatagcaaaagaattacttgtaactcgggagctaccaaacaaatcttgtgcccgggccattgagaaatctatcagaataccatcctttatcttgcacttgagataaaaatggattgaagacatagttcattatgtgatacgcgttttgcaatataacgtcctcagggtcattatatatctttgtcattgacttgacatatgctgcaactaaccaccctcgcaatgcatcttcaccggttgcatcgtgctctaagaccatatcggtccatgactttccatgactcaatagaaacttctcttctacaaacacttgttttagtctttgtacctcagaaggcttcacagctttatggagagcccttcccacttttacatttcctgcgtcttggattggtctctcggggaacattaggtcttcttggaatcttaaatcaggagggcttgggactttaccagtctgagaagatacaacaacacctcttatgtaattaaaagaaatcaacaagatggtttacagaaaaattgaacaaaagatgatgctaattaccttgagaaaattagccacaatcaaagcggttcgctgtggattcagtgtgttgattggtacccctcgcatttgttctacaacgctatacacatgtacatccgaaagaattgacccaaccaccaactgcagatatcagccttttcataatcgagttgcaatccaaacaaatagaaactgcattttgaaatagagagtaacgatgtagcagaatgacattacctttccctccattgatgaacatattgtggacgcaagttgaataccagcacctatcccggcaacattgaaaagagtagagatagcttctccttttgcaaaaatgtcactaagatttccttctttggcaaaagatgaatatattggtaatcatgttgcccttgctgcaactgtagccattccctatttaaaacaaacaatgccagaaaagtataaaaacaggaa

SEQ ID NO: 25096 - DNA, 1313 bp, Arabidopsis thaliana landsberg
tagctaagagacgcagtggaacctcgcagcagatttagcaggaagtctcaagagtatatcaggaattagatcaagaggaatcatctcgagaaacttacaaaaactctcatcttctttagattgtatacttacttccctatcttccgcctcttcctctactctatccattggcgtcgatccactagttttttttttaaaccctaatttttcaaccctaagtttttcaaaccattatagtagttgtcatctctggacaaaaggaacaagtcaatgcatcgatcaccgaaaaggaagcatcgtacaaagagaagaaaactgaagattaagaacatctctttctcttttaactggcatacttcacaagaactacatcttagcagatccaacaaccgaagaagaatcgatcatggacactcttgtgactgttgttttggattcctcggatcaaatggtttctttctacaaatcaggaggagctgctctcgcctattcatcagccatcaaggtgagagttttagctttctcttaggttaatccaccacttgatttacaccgttttttgtttcttataaagttgctatgcgcagagctgtgtcgagttagcaaggaagagagcaaaggagcttaagcagatattgggagagatggatatcgactaatttatcagatggaacgattccataacattgttgaaattttgtgttacatattttaatcagatcaccaagttacccatttagagccaaaggaagaagctcttcaccatttttgtttgattgtgttacggttttgtttatcatataacgactttaatttagtgctagtgtaagtttgagattatatgatctccatttcaaacgaaccgaaatatgcgtaagctgattaattttacaaatgttcaaatcaaaagcaattaacaagtttgtttgttgaccaccatcgcaagtttgtttttgattaggcttttctgaatttttttatgttataatgtaagggtatgttaaaatattattccatttaaaagaggcattgtaacaagaaccattctgaatctgtgaaagaaatattccatactagacgaggaaagtcctcgagagactaattaaatactaaataacataaaatcattctgaatctgtggaagaatcatatgctaagcgaggaacttcctccaaagacatgagactctcactgtgattatgataatagcggacctctcttacatttttatgattaagaaaccaaaattcttcgtcaccaattccttcatataatcatatttgaccctccttactaggtttctttttgggtca

SEQ ID NO: 25097 - DNA, 964 bp, Arabidopsis thaliana landsberg
gatgatgagagggaggttttgagtgttttagcagaagctgatgataacaattctgtatcagtctctgtcgcagctacaatatctttggaagatttagcgataagtgagagaaggggaagtagtaatctagggtgggaagttctgttgaattctcgtagtctcgagtttaatctagatgatgcagaaagcaacttggagttatacattggtgatattgatcatgaagaagaagattatgaagattatcttcatacaacagagtatgagatgttgtttgaagctgagatttcatctggtattggtaagcctccagcatctaaatcattcataaagaatctgaaagtgtctcctttgagcaatgaggatgttatggagaacgatgatgatgcggtgtgttgtgcggtttgcaaggaagagatgattgtaggaaaggaggttgcagagttgccttgtagacataagtaccatagtgaatgtattgttccatggcttgggattagaaatacgtgtcctgtttgtcgttttgagttgccttcagatccaatccaacggagtaatgaagaagaacatgccgttgggatgacgatttggagattacctggtggtggtttcgctgttgggaggtttaacgcgggtgtgagagaaggtgagaggatattgccggtggtattgacggagatggatggtggtggacttggtagtaatgaaggaccgagaaggatatcttgggttagagctcatgagacaccggagatgagtaggaatggtggtcgttctggtaatggtggtagattgagaagagctgttcgtggaatggtttcgtttatgagaagagttagaccaaatcgtggctcttcgaattcgaatgttattgctttggatagtgatggtgaaacaagagtcatgaatcgatcaacttcgttgatcagaagatttttctgatgaaactaggtgagattttttt

SEQ ID NO: 25098 - DNA, 1099 bp, Arabidopsis thaliana landsberg
attttatattttgattttgcttcgttggttgaattaactatttggaatgatattaacgacaaatatttttattttataatttataatagtttcgatttgctggttgaaattaggagccgattttcataattataaggatttgaatggtaactgcgttttgcggtgtgggagaaatgcggtgtggttcaaatagtaacgaaaatatataaatacatatgtatatgtagagattttgataatgttacagcattattgcggtgaggttttggatgcggtctatgtcaccattcatgatctaagtatacatttgataaccgtataacttatgtgacgattgcagatttgatataaactaaacaagttgataatatattagttatatactaagacagatacctcagtaaataaaacatactaaataacagggtgagaaacttaaaataggccaagttttttactattagtgggtgttttgacaccaaatggatttttaaaacgtatacaacacatccaatccggtgagtagcagcaaaagttatgttcttataaacacaagcaagaaagtatcagagaatcatataactcagattctataacttgcacgacttaattacttatgacatctcctaaggttaaatcaagtgacataagattccaaaagattcttccaactatatataatatttaagaatccacttgagaaaacactcaagtgtggatggatgttatatcagaattatctaatgacaagagaaatttaattggattggaatgatacagatgaaattaaatatcagccaggaataacttttcaaatatctaacataatttatattataagagagatcctaattgtagacgtattatgaatattcaaataagacatcttgaaaatactaatctaaaatataaaagtagtctccacctaacatgaataaaatgatggtcaaaaagatataagagctatgcttgtccaatgggaagcatgattaagatgtgattaagataactaattagatgtttaattggtaagttgctttcatgggtttttgcttatacgcaattaggtggctcacaatgagatgagaaaatttccaca

SEQ ID NO: 25099 - DNA, 2860 bp, Arabidopsis thaliana landsberg
tcatcaaattgtttcccattgtttctccctggaacacttttcttatcttctccattgaaaaaattgtaagagagacttgaagctgtccaaattaggcaacttgcaaaatttgtcaacaacaaatccggtgagcttattatgcgataaatctaactgctcaacgctagctaaaccggacaaggttgacggtaaactaccgacaaaaccgttcttgcttgcatcaaacaccgtcacattgttaagcaaaccaatctcgtttgggaaacaaccggttaaattgtttccagtgaagacaatctcattgaggttcttcatattaccaatcgatttcgggatacaaccactgaatttattgtttgcgaatgtcacaaccgatgctttcgatttcccaattgtaccggggataaccgattcaaaccgattgttgttcaagaaaattgcatcaagatctttatcaaagatttctgatggcaagcttccttcacattcgttgtatcttagatcaagaaacttcaaagaaggccatgagagtgaaacttcagggaactgaccaacgaatcgattgttgctaacatcgaattcgtacatcaaagcgagtttcgataaacttttggggatgatcccacaaaaccgattcgaattgatgtgaaataaagctaggtccgtcataaggccaagctctggtggtaaatgtccggctatatatgcatggttaaggtcaactccagctgcgcccgtgagactatcatcatctagagcaggtgctcaatcaactccagtgcatactccatcatcagaatcagatcaatcacaaattttgtcaccagttcaagctccaacaccggttcaatcctcaaccccatcctctgaaccaacccaagtgccaactccatcatcatcagaatcatatcaagcaccaaatttgtcaccagttcaagctccaacaccggttcaagccccaaccacatcctctgaaacatctcaagtaccaactccatcatcagaatcaaaccagtcaccaagtcaagctccaacaccaattcttgaaccggttcatgccccaacaccaaactctaaaccggtccaatcaccaacaccatcaagcgaaccggtctcatcaccagaacaatcagaagaagttgaagcaccagaaccaacacccgtcaatccatcatcagtaccatcatcttctccttccactgacacatctattccaccaccggaaaacaacgacgatgatgatgatggggatttcgtcctaccaccacacattggattccaatatgcatcgccaccaccaccaatgttccaaggatattaaaaccaatgtagtagtgacagtgttacccatttttaacatttctgtccattttttccatgttaattatttgtatcaaacgaaaaagatattacaaagatgaaaaattaaaatgccaataattatatagtagattatctttcagcagatttttttttgttgaaattgaagtattgaactataacacgatgcgatttgttttttcggggtaaagaagttatcatttgttttggccattttatgacttctattctattatttgagaagcaaaacataaatatctatatttgtaaaatttaatatcttactagctacatatagtttaatattatacacatttaatctttcataactatgtcatgaattatttgacatttttcataagtaatgataaataaaattatgtatgaaataattgaattagggtttcatgttccaccagatgattgaacttgttctttattcggatagaattatgaaatttttatcttctattaaaaaatatattaacaaaattagatttaacatatattgatatctcattaatgtacttaacatgtgttaacaattttaatttttttactttatataataaaattagaattttattaaaattatataatatctaaaatttgtactaaataataattcttgctgaattataatctagtttttttttttgatagcataaagattataatccgttaacttttaaaaaaaagcaagaaagggaaaaaaataaattattatatcctttaaagaggacaaaaatattaattatattgcgaaaaaaggagataaaaattaggtggaaaaggggaagatggtggggacgataagtttttaattagctaaccaaaaaacaaaaacacgaaacgagtcaactcaccggttccattacgagtcaaggagaaacacacattgacacgctcaagctttttttttttaaggataagcatcgggttttttttttctttcttaaaaatattgatgttgggtcaggcttaaaccacaaagagagagtgtgtgtggtcgagccatttgaccaaaagcaaaaacttaaaactggtttcagatcttaagtaaaagggttttgcttcggattctccggcgtcgtttaaatgatctctgacccatcttccttggcttaataattctggtccctccttttatctctttttactgttgatttatctgaatatgccacgctctttcttccacatgtttattctctcttcctttcttcaacacaagcgtctggtaattgatctcttctctctcaaattgtgtttcgttctttttggttctgtatttggtttctgacaaaattgaggaaactggtgttgggtttgagtctagaactgccaaagatgtgattttgttttttgggtactgaaaattgagtgagatgaagtgataaagtgtcttttttttttggtaaattattcgaatggaacttgggatcggaactctgtttctttgttagggttggttgaaatctgaatctagtcttgatttttgtggtgaaaagagaggtgagtc

SEQ ID NO: 25100 - DNA, 881 bp, Arabidopsis thaliana landsberg
taacttgattttatgtgttgatttcagtgtcgttttgcatttgttcattagtaacgttgtttgaactttgaaggtaaaattatctttaaataataaaaaaaaaaactatgatttgattaaatctggtttcgatacaaatttagttaatttaattcataagacgagaattactattatgtcgtcacttagtcactcatatggactcgtgtttctcattcatacttttcccttagagcatttcttccataagtataaacaaaacttggattagtattagcgataatttctcttagtgttttctgatttccattgagtatttactttacgaataaattcttcaactcgtctacgaagcacacactccatttcgctctcattctcttccaagctccctttctcatcattctttgcaatgtctgaaccgggttccaaaccgggtttggaggtcaacgctttctccgaaccggcgggtttggaggagagactagacttagatatcagccccggttcttgtaaacctcgattagatgtgagattcttcgacttagagatcaaaacagatttctcaaaaccgggtttggacaagagaaccggtttcgatttcaaacccaatttctaaaaccgggtttggacaagagaaccggcatagaagtcaacagggatttctcaaatcgggtttggaagagatagtcgactcttgaatcctcacgggattctcacaccgggtttagattggagaacacagacagatatcatcatggaattctcgcacccgggtaaataagagagacccgagtcagagcacatccagtaccaccgcaacccaggatttggcgtgtcttgggcacaaagtttaaagttgcccatgaggatcgagatga

SEQ ID NO: 25101 - DNA, 702 bp, Arabidopsis thaliana landsberg
caataaattagcgagaatctgattttaaaatagaaattatcaaaaatgtcttgtttgtatttcaaagttcaaattcacattttttttaagtatattgttatatgaaaatgaaaaccaacaaaataataatgaagttatttactgaaatatctttgcaaaaagccatgatacttttataaaacgtttgatgatgacaaagtttttcagctaaaaacaggatagtaatccaagaaaatgtttttttctttgtggtatttttctttgaaatcataaacgtacctattatagtttttttggtaattgtggaagttcgttgagtggtaacatccctttgggccacaccaattcagatcctccaaatcttgcttttggtccgactgaatatcattctagttataataataacacgattgtaattaatatatattaagacccattataatttcaaaatatttatgaaaacatgtattgaaatttctgtgttctatataaaactaaggactctctgtttcttcttcttttattaaactgcaggactcggtgtttcaaatgcaattttttttgttcttttcctttttatataaaatacataaacaaattagtaatgtaaacgacttttcttttaatataattgaatgataagaaaatagtctccaaaagtttttaatacgttacacatgcacattagtaataaattgctct

SEQ ID NO: 25102 - DNA, 805 bp, Arabidopsis thaliana landsberg
  unsure (1)..(805): unsure at all n locations
ttttcagattatagaagaggcgatatttttcttcatagtaatggtgattcaaaggcaataacggcttcaatttatatatctctattagaattttaattatttttaattaaagaaaactaaacccttagattggttattagaaaccccaaccaccaattttattaattttatgatgaaattttgggtctaatttggggaattaatggaattatgagaattccaaaatatggttggaaattatggaataacataggagcaatgaaatggaaaattaataaaatggatgagtagtggatcacaaattaatctcacgagaaaaagagatagtaaacctaacaattgtactaaatctaaatcatctctcacaattagccgctgtccatgtcgtctctactattcgatatcttcttcctatgatctgtgatataaaacaaacgtacattgccggtgagatctgtgacacctaaagactgatttcttctaaattgatgtagataagactcttcaatatatgaacaagccaatagtttcctcttggaaaagagagtaattgaacgaatagtttttgggcttccgccggcgatcatctgtgacggagaaacagaacggatgacggaaggtcggatggagcgggaagctgcaagagctgcaccgagaatacctatttcttcttcactgatgatctcagattgggatctcggtgaagacgacatagtgaatttgatggcttgaaatagnaacagtcccggattgagcgagcttagtgagcggcttagtgagcgggcttagtggatgtgatgatgct

SEQ ID NO: 25103 - DNA, 853 bp, Arabidopsis thaliana landsberg
aaaaaagacagacttaaagcaagaatctgagagatgagtttcaaacgacatatgttcaacaagaaaaatagacaagatgaaagaggaaaaaaaacccctgtctcgtgtgcttctagtgatatatgtgaaaaaaatccaacccttacttagcgatacgattacacaaaaaggaatatacgacataattaattataaacaattaaccactaacaatgttagctaaaagcatcacaaagacatgaaaaaatgggaggagatatagcaagaatctatgagatgagttccgaaagacatgtccttgcaaaggtgtcttcaaagccatgattagtcttactgggtcaattaataaaagttttacacattctaatacaacaaagaaatcaataaaactcttaaattcattttcttatatccaaatcatacaataatgactaaccggacggttaaaatatttcttactactattagtattagtctattaggtatcagagtattcaagtctaaatgatcaaagaaatgtttgaaagtggatgccacacttaattttcgtgccgttcacatttatagatacgagtgttaaatatgtaacgttgacgttaggtcctgtttaattttataaccaatgtatatgtccaatcagtagcaaattacatatcaataattcaacccataaagaaatgtgaaaacgattattgtgtacgcactagaagaagttaatttcacttaacgaagtgatataattactttgccaagatatgtggtctctgatacaccatttgcatggaccggttagtcgtgtcactaaccattattaaacgaaatggtattaatcacttgttaccgttaccaaatc

SEQ ID NO: 25104 - DNA, 979 bp, Arabidopsis thaliana landsberg
aattctgttattattttagtaaatgatatctcagaattttatttttcaattaagattaacacttttttacttaattttataggatcaatttctcttttcaggtacatgcactaacttaaccttactttttctattaattatctaaataatcttcttctccttttcatttttgagggaaataacatttttttttattataaaattatttgtgtcaccagtcttaacgaagagaagtacatagattttaattttgcgcactactatgttactcgagttcatcgaagtatctcgaaaaattaaaccaactaattcgctaaaaagagtttacaaaattgaagcccaactttccaacaatgaagcccattccattcgatttcgaaccttaagttattatgtagaaatgaagcaagttgtgtaatatagtttggctaagatgctggtggacacaaagatagctggaaacacaatatcaaagatggttcacattatgagttggagataggtgttgccgtgtttcttactaatattatcttttccttttcttaaagaaggatatatgtagtgggagaaatatggacagactcataaaatctcaagcgaattatcaaaacaggtaagaacgttacgtaatgtccatatgcgcatggtagcgttttcatgcaccgactcttgaccactgacttagtcaatccctagccgatttcacatcattcttcatttcaatatatctttttttatagcaaagacaaaaatactctccaattgtaaactaagatactctctaatttgtatggattctcactatgtttcacatattgaccaaatcgaattaagccaaaccaaattgtaatccggtttagtttccatgtataagaaaaattcctatcaaaataaatattatttttttattggtatatggttcgggcataaatctgaacttactgttctacaatatatatattgaatggattctcatttg

SEQ ID NO: 25105 - DNA, 3103 bp, Arabidopsis thaliana landsberg
aaaactccaaccgcgatccaaaaccgaggctaaaactcaaccaagcaatgagcttggtgtaaacttaaaaccctaaaccctagtactacttcgagagtgttcgacgatctagttcatttctcctcttctgcgagtgagaatttgtcaatttagcttctttagttcagtctgatctaaagcaattgcaatattctcggttgtgtgagagaatcaatcaccatgtatcggcttgtctccaacgttgcttccaaagctaggtagatctattcgattttttggttttctttgtgtatatgatttcaatgctgctttattttctgtgaatttgtttctgattggatcctcgggatcggaaagttgcgagaacctgttaagaattgtttaaaatatgtatgagttaaagttctgattttccgaatttcgattaaattgaatttaatctttctctgccctcgtaggctgtggcatcttctatttcctttgtatatctgaaagttagttcatttattgatgagatttatctttctttgtttcaacaggattgccagaaatacaagccaggttcatattctttattttgtatctagtttgtggtttggtcgttcttgggtatgtattgatgtggatttttgtattgttagattggaagtaggctcaattctactaggaattatgcagcaaaagacataaggttcggtgttgcagctcgggctttgatgcttaggggtgtcgaggatacttgctgatgcagttaaagtcactatgggacctaaggtaatcaaattatgtttcagatagtttctgttcaagagattaggatccttaacagggaggagaatgtgatgctctattgacaaggatcaacagttgtctgtttagttatcccacagtgtaaaacccgctttctaaatttcttttatcttttaagggtcgtaatgtcatcatcgaacaaagttggggtgcaccaaaggtgacaaaagatggtgtcactgttgccaagagcattgagtttaaggacagaattaagaacgttggtgccagtcttgtcaaacaggttgctaacgccacaaatgatgtagctggtgatggtaagggttccctttcaatgcattaaagtattttttctgttttttcctttttggtaattgggtagtcagcctcccatctactgcatattatttgttttattttttttgtatctgacaaaacattggtatgcaatacaggaacaacatgtgtacagtccttactcgagctatcttcactgaaggttgtaaatcagttgccgctggaatgaatgcaatggacctaagacgtggtatcaaattagctgttgatactgttgtgacgaacttgcagagccgagcacgcatgatcagcacttctgaagaaatcgcccaagttggaacaatatcagctaatggagatagagaaattggtgaactgattgcaaaggctatggaaactgtaggcaaagagggagtgatcaccattcaagtgagtcgaatttgatccctaaatgtcaaattattttgcttattccttaagatgatcaatgttatcaacttatcatctcttgattcaggatggcaagaccttgtttaatgagctggaagttgttgagggtatgaagattgacaggggatacatctccccgtacttcataactaacccgaaaacacaaaaatgtgtaaggattcccaccttgttactttatctatttaaggaatttcgcatttgatttgctctgaatgaatatgtgttgcaggaactagaagatcctctcattcttatccacgagaagaaaatttccaatataaacgcaatggtgaaagtattagaactggccctcaaggtataaacaatttggcgatttcttcagtgtcaatagtgtctgatattcattaagttactttgatctgaagatctaattttattttcactgccatttttcagaagcaaaggccgctgctgatcgttgctgaggatgtggagagcgatgctcttgccaccctaattctgaacaaacttcgtgctaatatcaaggtttttcttttcagccttttgttatatgcctttttcttacaacgtcttagtaaaaatttaatttgattggattgatgtacatggtattgctttataggtctgtgctgtgaaggcccctggttttggagagaaccgaaaggccaatttacatgatctagctgccctcactggagcccaggcatgcccatgtttctttttataataactgccaagaccatcacacccacactaatcgcatgagccataatgtgtctttggtgatttcactttgtaggtaataacagaagagttgggtatgaatctagacaacattgacctcagtatgtttggaaactgcaagaaggttcgtttggtccaattccttctgctttctctctttctcccttgtaccttctgatacatttatataacttggttttcatttgttaacaggtaacggtatccaaagatgatactgttgttctcgatggggctggtgacacccaagcaaccggggaacgatgtgaacaggttagaatgttttaaacttttttatcatatagtggttcagtgtcatatacctttacccttttttccaactggtagttttaatatgttttgaatttttattaaaccacgcagatacgatccatggttgaagcaagcacttctgattatgacaaggagaagttgcaagaaaggttggctaagctttcgggtggtgttgctgtactaaaggtaatgtacacctcttgtgaacatcagactaataggctattaatgcattattagtttattactaatgtcgagattactcatatgggtttttagattggaggagcaagtgagacagaagttagcgaaaagaaagatagagtaacggatgctctaaatgccactaaagcagccgtagaggagggtattgttccaggtataatctatcccaaatctaaaacaaaatttggttccttaagaaaattgcgtgagaagacccttctattactttgtgtgtattacaggtgaaggtaatgctcttttgtatgcttcgaaagaacttagaagctttcccggctggctt

SEQ ID NO: 25106 - DNA, 507 bp, Arabidopsis thaliana landsberg
gtaatcgtcatgctttgacataatttcatcaataataagtagtgcgccttatttgagttagaaaaactgaaaaaaggagtctcctatttttatgtaaaatgaaattatatctgtgtactttaagcattgaatatattgttaacgtaaaataaagatgacaaaatcaaaataggaaatatccaattcatttagtacatctactaagaaaacctagaagaacacgcgactgatgaaagttaacataatttcaagcatgcataagaatatataaagagaccaccaattcgatagaatctgtagtggcaaaatactgtaagaaacatatcattcatctaccatttccgggtgagtgtcaacaatacttcagttacattcaatagggatgtcttctaatcaattaagcaaagatatctgataaacttataagcgatagtagaacaaagtaactcatagatgcatcagcacagaaacataatgaaatgaggtcaatgtcgagacatcgattac

SEQ ID NO: 25107 - DNA, 8116 bp, Arabidopsis thaliana landsberg
gacacttgatgagtttcttgatagtcccggtcatgcatctctacgaggactagaccctaatcgtcctccgggaactctctggtaagttgatgtctttcattctaacactaattaggtttctattatggttttagggttagttgtgtagatgttttgtttggtttagcataacaatcaggtaaaatgttttggttttagatgattatactaattagtccgattgaattatttttttaggtttaacgaagacccttctgttgctggcactgtccgcagcatatttaagagagatttcaaagaaccacatgttaattggacaatgacaccgcaactagtgatcactcgttggtttgaaacttttgctgtaagtgcaattggtgtcttgttatcttgtgctaatttagaaatttgagtgctttgtatttggctgttgtgtaaagatgatgtgactatgttttcttgtgttaattttttgacttgattgcactttttgatatatcttctgtctgttttgtagcaagtatacaactgggaccgtgcaataaactagagagttaggatatagtttgaagcaaagctgaaggataggatgtgcgatcaaatctctcactgtaagggaaactggaagcttgataacattgtattttactcattctagacatgtatttatcatcatttagcttagtgatcactcattttattatatcattttgcatcacatttagcttattttgcacacttaggcatttacgatcattttgtatacacattgcatgttttggtgttttcaggtgtagaaggagcttacaaggattctagtcgacccactactctatccaaccaggagagaagcagtagagaattctactcgacctattcactcgatccaggcagccacagaggaggcatcaattcactcgaccctcttactcgatcaagttaacctcagaagaagaagcagagcattttactcgccccttctactcgatcctctactcgacccatttactcgaccaagggtgaccaactctaccagacttggttatctatcaaagcgtctttgaatcctccttattccccactcaaccaaacatctaagcatacagataggagaggaagaagcatctactcgaccaattgattactcggagcatagacattaaggcgcagactttgcagcaccctctttactcgatcccgaagatcgagcactcgcccaaaccgcctcaagtctcttgtcttctagtgaatctagggttttcaacattttactataaataaatcactttgggatttgtccaaaggatctatgcttttatcctttagtttttctttgtgttcttgaatcttcaaaacttaattacttttaatctatttcttttttgcatttagttcttttagtaaagttgtttagatctacattttggtttgatttcagtaatttctgggtttgtgttcttagttatgttgcttgagtaaggattaggattcttgaagatggattagattagggtaatctctaggttactcaggtggttaagattaggttagatcccttctggattcgcttggcccctatgcggttttcgttgggtaatgtagagattcgatcatagacgttcagcgtccaaaagacgatcaagagattggctagtcttcttattggctttggtagattgttgcttaaatcctgctctactatgtttcatcgacgagagttgagattaggaagtggtagagttatgggggtctctgtcacgagagtagattgacccggtttttgaatctatcgtctagggtatctacctttcacctgttagccacctgatgaaccctagagttgcccttatgaatgaatccatccttaggacttctattcttcttagatttatttgtattcaccccctgattgcacttttatttacctgttatttgtatcccctgttgattgcattttagctcttaatactgtcacttgttggttctactcgacccaatgatcgagtagggctcttaaagagattatttttgttgtctgaatcctgaccacaattgttactagaaacagaccatctctataatctggcttgacttagttgcttatgtgcacatcttgattgctagcaatacagtggactggattgacaccctctataactgcatcgacatgtttttgttttaggggaattgaactgaatcacacacccttcagcacataagtaggcctaaaaacgtacttatcaatttggcgcagttgccaattcattgttgcattgttacattcaagatatcagaaaaagttaagattaagttcttttacatttatcaagttacaaactcattatttcgtctgcttgtttttgtggtataggtactaatctttgtgcatgcaaactcggtccaaaggttctgcacacctactaccattcagagacagaattgacagaatagctcgcgagttacaagaaaccaaagcaaaggcagcatgtgatcagcaaagaccagctgctatggatcaacagaacataccatttgatgttcaagacccacctaatgttgatcaaccaagaaacattggtgctggtgatgccccaaagaatcatcaccaaagacaagggatagtgcctccaccagttcagaacaacaactttgagatcaagagaggtctcatctcaatgatccaaggaaacaagtttcatggcttacctatggaagaccccctggaccatcttgacagttttgataggctctatagccttaccaagatcaatggtgtcactgaagatatgtttaagctcagactatttgccttctctttgggagacaaggcacaccactggaaaaagactctacccccagacttcatcacttcatgggacgattgtaggaaagattttcttgccaagttcttctctaacgctcgcaccactagattgaggaacgagatctcaggcttcacacagaaaaacaatgaaactttttgtgaagcttgggagagatttaaaagctacaccactcagggcccccatcacggtttcaagaaggcttcattattaagcacactctaacgaggagctttaccaaagatcagaatgctactcgacaccacctccaatggaaactttcctgaacaaggatgaagcagaaggatgggagtttcattatggtttttagagtctttctagtctttttcgtacgttttgagtcatttcacatacactcacacatttgggaactatggagcacaataaggaattttggaagcttttcagcaataaagatcttgaaggacgtttttcagaagctggtgtcgatcgacaccagacctatgtcgatctagactcttattgctgtcaagggaattctcgttttctaccaagtctttgagaagccctgaagtcttccttatttgtaaagtagtccatgcacgtttttagtcacgaatatacctaattgtttggtcattgttagacctaagttttgttttagttcttgtgacacatttttgagagaataatccaatccttttagagaggattctgaactcctttactattattcttaattcatcaaagcaaactattcagaatatgatttatgtttctattatcatgtctgagtaatcaccttgtttggtttagggagtctcattagggatttagatggattagtagatcgaaaaccccttaagattattcttagagttcttcatcttcattattcttattgctagttttagattgatcacctagaacttgatattagataatatgtatgcctgccataggtacttgttatttgaactatcataaatgagcctagacatttaagaaagaacaggtaggctcatagaagggctctggtttagatactaggtgaactaatcaagcttattaacaatgcatgctttagcatatgatttctcgacttctctggttatctagctttaagtatagagagtttcgcggaacgcccctggctactctagaatcatagtttgagttaaagaacggtgcgttaacaatcctaatattagctagatctacgatttatctatctcccgagaccattacttagacccgacgcttaaataacttgaatctacaactcatttacttgcttatttgtcttttacattcaattacttcatctagcttattaaacaacatcataagtctattgtgtgaacatcgagagctcagtggaattcgacccttaagtgctaacgacgatctcttatttgagggagtaagcttaaggcaatttgagctatatcaaatttggcgctgttgccaaatttctattttagttcaccattagactaggtgtcattttaagtctagatacaacttttctaccacctattcacatgtttctttgtcttttggtctcttgtgtttcaggtaccttcagattgagaatcacgttcccatggcagactttcacggttatgtcgaccaacaccatcagggtgtcgatctacaccctctgcagaaccagactgctacaataggcgattttaacagaattgacctcttctacacaaaccgatcagcattcaagctacctccattagaaagagatgactttgctatacaccctgcctattatgatattgtatcaagaggaaagtttagaggagctcccgacgaatcaccattagatcatttggaagtcttcgtagacatcgtttcctctattaaagcagacgggttaccatgctgatgaccttctttgcaaactcttcccccactctctcgcgagcagaggaacatcatggttgcgtcaactggaaccaggttcattaaccaattggactgatgcaaagaatgcattcatgaatcacttcttcgatgaatccatgatagaggcaattcgtttgcaaatctcttcattcactcaggcaccaacagagtcccttagagcatcttggctccgtttcaggtcttatcagcttgaatgtccctaacatggcttccaagagacccaactcatcaacctattctacaaaggaatagacaagccataccagaatcaaattgatgtagcgagctactgtaacttcatgacaagaactactagtgaagcattactcctcatcaccaatgctttaacttgtctttcgatgcagggatttgacaaagaacgaagaatttcagctgagaaagctatcaagagcaaagagactcctgttttcgcaatttctactcctatccaagccccgcctccaccctcatcagagaccagaatggagtctatgcttgtgcatcttcttgcaggcctaacaaagcttgatagcaaatatgattctctctccacaaagcttgatatcaactatgattctctctccacagatctcaatagcaagattgacaatctatgctctcaattctacaatctttcacctacatcaacttctatcaatgcagtcacactacgtagtggaaagcagctcaacctaatacttcagcgcgaatgatcagctcagccttcatcttttccaattgcatacaatgaatcagtgccgatcgatacaccagggtgtcgatcgacaccaattactctagaagactctgtttttcctttgtcgagtggaatcgacaatttcgcggaggaggaggaaactattcccgatggtgttgatcgacacccagctcctgtcgatcgacacccagctcgttcagacaatgtgcaaattccagctgcaaccaagtcagcgaatcggcgaattctcttccccaagagtcctaaaaaatcaagacaagccttagatgatgtcaaatgcaaggctatgattgataagctaattgttgagatgcctctagttgaagctattcatctatcgcccacaatcaaaaggtatgttaagacaatggtcactgagaatttgacgaatgaatgcagtgttatgatgatttcagagcagggcggcgacatcattcaggaacgaatcccaaggaagctacctgatcctggaacttttgtacttagtgtcaccatcaatcacgattctttcccaagagctttatgtgatctcggttctagtgtgaatctgatgcctcgttcagttgctatgcgtcttgggtattccaatcttgagcctacctttatcactcttgtgttggcatatcgttccacccgaattccagatggaattcttattgatgttcccatgatgattggaaagagcatgattcttacagactttgtagtcttgccttatgagaaggaacctaaggatccattaatcctagggagatcctttttacacacagcttgagcaatcatagatgttcgacaagggaggatagggctgaatgttggtgatcttactatgcaattcgatatgaacactttggtcaagaaaccgatcatagaagggaaaaccttcttgatagattctttcacttcctcagcttcagatagtatttcagagatggagatagagtatccactatatcgagctttgttctcttccatagaggatatggcggatttggacagtgaagcttctacatacactaagatgctagatgagaccgagcatgtgatgcaactaatatttcaagaagatccttcatctatgatttcaaaactaaatactaatgccaatcgggatccaaaaaaagctcctaaagttgatctaaaatctcttcctccagggctaaggtacgcatttcttggtgacaattctatttaccctgttcattgttaatgattctttaaacaagacaaagctcactttattgctaagcaagctgcgcaagtatcacaaagctcttccctattctcttgatgatattacatgtatctctccagacttgtgtatgccctcagttgagcatcataggattcacctcaaggatgagtctaagccctcagttgagcatcagaggagactaaacccgaatctcaaggatgctgttaagaaggagatcatgaaattgtttgaagcagggatcatctatcctatttcagataatgattggggtagtccagtgcatgtggttccaaagaaaggaggtgttacagtggttaagaatgacaagaatgagttgattcctacacggactgttaccggccataggatgtgtattgactacaggaagctgaacgctgcaacaaggaaagatcattttcctctaccattcattgatcaaatgctggaaaggttagctaatcataagtactactgctttcttgatggatactcaggattctttcagataccaatccatccagatgatcaggagaagaccacattcacgtgtccctatggtactttcgcttatcgcagtatgccgtttggtctttgtaatgctcctgcgatattttagagatgtatgatgtcgatattcacagacaagattgaggatttcatggaagtctttatggatgacttttctatttatgggtcttcatttgaagcatgcttggagaagctttgcaaagttctagctagatgtgaagagaagaatttggttcttaattgggagaagtgtcatttcatggttcaggaaggtaaagttcttggtcacaaagtttcaggtgatggtattgaggttgataaagccaagatagaggttatgacaagtttcaaggcactagatagcgtgaaatctgtgaggagttttcttggacatgctggattttacaggaggttcgtcaaggatttcagtaagattgtcagaccactaacaactttgctttgtaaggatatgaagtttgacttcaattctgagtgtaatgctgcttttaatcagattaagaatgccttagtgagtgctccaatagttcaacctccgaactggaatttaccttttgagatcatgtgtgatgcaagtgattatgcggttggagctgttttgggacaaaggaaaggcaataaactacatgatatccactatgcaagtagaacacttgatgatgcacaaaggaattatgcgacaacagagaaagaattgttagtagtggtttttgcttttgagaagtttcgctcttatctggttagttcaaaggtaattgtgcatacagatcattcagcactcaagtaccttatgcaggaaaaggatgctaagccaagattactacgatggattcttcttcttcaagagtt

SEQ ID NO: 25108 - DNA, 1330 bp, Arabidopsis thaliana landsberg
atacaatcaagttgacttatcccaagtctacgtgacatgagagagatggagcactaaaagaggtatggagtaactagttccacgtccttacgaataagaaacgaagaaagttagagaccaatcgtattttttacttttttgaacgcatgatcacttgtcattttagaccataccatatctctatcgaaatccaataatgttctctatgtggacccaattttcaatctttttatctaactttcttcttttgtacgatccaccttttcatgctataaagtttgtaattgcaatgctctaactttttcaaatgattattcttcgttttttgttctttttaaaaattcttaattatatcatatgaagatacaaataacttcatcaagtgaataatagtttacgagaataagactgaaggaagactattttgcttatatataaaaattgataagcatgaagatatttttgaattttggtagtgatctaaagaatacactcattgtcttatgtttggtcgagttggaacgattttattgatttctatctcattcgcaagttagctttgttgggagtatatttgatccatttttttgtcagtgccaaagtgatatctagtaacaaaataagtcattacaaattagctaatagtgagaagatggaccgagccacatcatttgctgggtatcctactattaatatgctactaaaaccatcatcaaactctctaatcacagcaatattaagctttcctcatgaatctgtgattatactctcttgattctatcaccttcagctaccagaaatccttcactcgctagcgtcgcgactgcttttctaacctgtttaatgcgtcacaacaacaaatactttgttatgtctctgtccttagaccaaaaaccttttgatatgtagcaaagtgttataaatgactcacatcatgaagatgaatttcggtgtttatgttgcctccatgcttcttcagttcttcaagtaactgcaacaacaacatttccattgtacttaagaaacggtttctcttattgtaaactgatttgcttgcttttggcatataacaaaattgggaaaaagaaaggagtagtgcatgaatacctcggataagcgcattgatgatcctccaatttgcatcttctccagagctatgtctctaattgacgacgcaaaggtattccgcctcattcgttcacttgctgacactccagtatttatcaggtccatgtcaatggtcccttcaccaacataaatacaggtgtttattgttagattggtattgaatgctactgttatctttatcctgatgataataatgggtctg

SEQ ID NO: 25109 - DNA, 2340 bp, Arabidopsis thaliana landsberg
cctctgctttgaattctttatatccttgagaagatgagtttgaatttattttaacggctacttgttcagtatgatttagagttccatgataaaccattccaaatcctcctttaccaagaactctttcaaagttatttgtcattgttacaacctccgaatatgtaaatcttctgttcttagtcattattgccgactctgaagatctgattgttctaacttctgatacttgagtatatgaagatggacctaaatcaaatgttacaatgcaacagtataatgagactttttatacatagtgaacatatgtattgcagtgttcaaggcaatttaaaggttctttttgtgtataccttgactgtttgatgtctttttctttttgaaaataaaaaagaacgccaatgcagatccaagaacaaccacaaacgcaactgatgcaacaatcggtattacaacattcattttcttggcaccaccattgccagctttgtttacacataatccatccgacaaatcagattggcgtttccttcaagactatgagttaccaatgttgaggaaaaaaagaaatttaccagtcatttaggagacttgaacacaaattttatatagtcatgaaaatattatatgagaaaaggcttacataagctttagtcctttcttctgtaaaaggatttgaggaatagagccattaaaattgttcccacttaaatctctgttaagatagacacaatgctagaaacataggcaatcttgtagtagaagaggctaatagatataaaaaattgtcttgtttaaaacgactcacattactaagagtgattttatgtcagcaagaaattcgggtattcctcccgtcaaattgttatttgacaagtctctacataagcatttgtaagtacaaaaatatgttataaacaagatacaattaaggtgaacaaatagttttcattatgctcagttttgaaatacgaaatacttacagttcttgtaggtgtgtcagattctgaatgccttgcgcgatgatccccgttaaatgaccccacgataagtttctaaagacatatttatgcatgcacacatttcatttacagatgataaaatcatgtgacataactaatacaataatttaagattgatcttacaagaaagtgacaataggcggcgtggagttatctagattattgcagtttaaaccctcccacaaaaaatgtttaggaacgcatggatctccttgccagctgattttacttaatccataagtgctttggatactcttgatagcagcaactagaataaagttattgttgcatcaaaaaacaacccatgaaattatatttatagaggaaattgattgaaacatatagacttaccatcatctggatttgtttccatctgtggaaaatcgatcacggtgaaaacctcaagagcgttcatgagaggaggaagagtagactttggtgttttcgtcaactccaagaggcatgtcccatcttcacattgttgtggtgtcgaatagaaaatggtttcggtggctaacgttttagggctgtagcgttcataagcaagttttccattcaacgtcactttgaactctcgggtatcgagggaccgtagagtttgaatctcggcaaaatgcatgtacacataaaattgggttgtggaagatggcaataaccatgagaagttccatgttccaaaagtacttataggcgttgaggctgacgccatcacaacttctggtggtgcataaccattagaactgtttatattcaaattggttgttaactctgtccactcttttgcatcaaagaatggataccatttacgatcattgacatcatcagggtacctatcaaaaatatttttgtcatgtattaaagactaacattttacttaaaaacaaacttactgaaacaaatcaaaatccatattaataaaccaagatgctagaaaaatgtctataccaaatgaacccaatccgagttttgtgcaaccaaaaacctaataagtaattataatctttaaacttcaatatatacactaaatttattaaaggtttaaaacaaataatcttcgttaaaaagtttatcctaaacggatcaaaccgaaccagaaaccaaattttgttcatgattaagtgaaagggcgtgattcataccgtatgttttggcctgaaccgctgaaataatatcggaagaaatacttcagagagccactctgagtattgtaagtattgtttttaagtggtcgtagctctaacgtattaatcataggtgagcttgttcctgtcttaacaagacagacctggagagacttagatatggtcttgtggataatctc

SEQ ID NO: 25110 - DNA, 717 bp, Arabidopsis thaliana landsberg
  unsure (1)..(717): unsure at all n locations
gtctatttgcatacatgtgtttcatttagtttttaggaactatgatcctcactttattgctgggagcttggatgaagcctaccttgacataagtgaggtttgtcgagaaagaggtcttccggtggagaagtaagtgtgacctcatgagatgcattcttttgtgattgttgtatcttctttgagagattatttggctgacactgcaactgtttccctgtccatttcttcactttgtgcagattgcagaggagcttagatcttctgtttattccgagactggactgacatgcagtgctggagtagcggcaaaccgcttgctagccaaggttttcatatgtgcatgatatcctatacgtcttccaatttttatctctttattgtctcagtttggtctatattactatattacaaaaaacattgtgttcttactctagccctactatgtttcaggtttgctcagacattaacaagcctaatggacagtttgttctacaaaatgaccgatcaactgtcatgacattcgtatcttccctccctgtaagaaaggtatgtgttcctgaannnnnnnnnnnnnnnnnnnnnnttttgaagattttttctctttcttttcgaggcttaaaagagaaactaccactcaattattccccagatcctttaatttgctgtgtagaagtgcagatgatgattcaatcacgtgagcgagattgtctatccaat

SEQ ID NO: 25111 - DNA, 1768 bp, Arabidopsis thaliana landsberg
catacggttaaaacagagattggcacttgcttagcttcgaattatttggttcaggtttgtgatcgttttgtggttttcaatgtggggaaaagaaatagcagccccgggaatgttgtgaagcctgatacggtcttgtttaatcttgtacttggttcttgtgtgagatttggtttctctctcaaaggccaagaacttatcgagctaatggcaaaagttgatgtcgttgcggatgcgtactcgattgtgatcatgtcttgtatttatgaaatgaatggtatgcgggatgagttgaggaagttcaaggagcatattggtcaggtaccccctcaacttcttggtcactatcagcatttttttgataatttgttaagcctggagttcaaatttgatgatatcggttctgcgggtcggcttgccttagatatgtgcaagagtaaggtcttggtttcagttgagaatcttggatttgattctgaaaagcctcgggttttgcctgttgggtcacaccatatcagatctgggttaaagatccatatttcacccaagcttttgcagagagattcatctctcggagtggatactgaagcaacatttgttaattattccaattccaagcttggtatcacaaacaagactcttgccaagttagtatatgggtacaagagacatgataatctccctgagctatcaaagcttttgttttcgctgggtggatccaggttatgtgctgatgtcattgatgcttgtgttgctattggttggttagaagctgctcatgatattcttgacgacatgaattctgctggctatcccatggaattggccacatacaggatggtcttgtcaggttattacaagagcaagatgttgaggaatgcagaagttcttctgaaacaaatgacgaaagccggcctaattacagatccatcaaatgaaattgtggtttcaccagaaactgaagagaaagacagtgaaaacacagagctcagggatctcttggttcaggaaatcaatgcaggaaaacaaatgaaagctccaagtatgctctatgagctaaactcgtccctctactacttctgcaaagctaaaatgcaaggagatgccttaattacctaccggaaaatccccaagataaaaatccctccaactgtccacagcttttggatcttgatcgacatgtactcatctcttggcatgtaccgggagatcccaatcgtgtggggagatatcaagaggaacattgcaagctataacttaaagacaacgcgagatctgttagagaagcttgtggtgaacgttctcagaggcgggtattttgagagagtaatggagcttatcagttatatgaaggagaatgatatgtataatgatctaaccatgtataagaatgagtatcttaagcttcataagaatctatacagaaccttgaaagcatcagatgctgtaacagaggctcaagctcagaggcttgagcatgtcaaaaccttcaggaaactagttggtatagtatgagtgtatgactttatttacgtatcccctgtattacatttataccttatacatacgggtatagtctctcttaataattctctctttcttctctcttcaactcctcacggtaacaacttgtgcggaagttaaaaacaaaagtttgggagtttttggaatattattgaaaattcagggattacttaaaaagttgctcctaaaatgggcctttaattatataaagctaactggctgactttaaaccgctgaactcaactcg

SEQ ID NO: 25112 - DNA, 963 bp, Arabidopsis thaliana landsberg
aacatataatcatgcatttgaattgctaatacagagatgcttactttaatgtttgtaggtacacagatgagaagatgaggataaggggaggattcgataacattatctttgtgcacatccgagaaatttagctgcattgttctatcagaacctcttatttgaacatatgaaaaaaaatagtatgtaagaaactgtcaaatgttttacaacaatggaaggtgatagtttaaattttctctgttcattagtttttttggatgtaacaggaaccagaaaaaacaagaaaccacatgatataattttcgctactaatgtctaaattaagacaaaattaacattaagaaaactttactttttgtcttaatcttaaacaaattcactgaatatttctttctacaaagaaaatacgaatatctcactaacaaaggaaacttaccactaacagcttctggtggcattaattactctgtaaattgccattttttcaccgagagaaaactagaaaaacaaaacaaaacatggaaactgtaacattctaaaagattcattgttaacaaaaccaacagagaaacataatactgattttccaggatttactccctcaaatctctccttcaaatactcttcctaatttcttctgttttcatttgccttgttccctgcgaacatctcactctcgtcctctgtttcatgtttttatgtccttatcctgatttttgtatttttttgttatggatatggacgagatgagcaatgtagccaagacaacgacagagacttcaggcttaactgactctgtcttgagcctcacgaaacgcatgaaacctactaaggttacgaccaccacaaaacctgccttgtccaacacgacgaaattcaaaggagttgttcagcaacagaacggtcattggggtgctcagatttacgcagaccatcgaaggatttggcttggaactttcaaat

SEQ ID NO: 25113 - DNA, 739 bp, Arabidopsis thaliana landsberg
tgtcaagccagatgaaagaacatccatgaagaattctcttccatatgttttcaaacaaacctttaaatgccatcacatcatctctttgacccaataaatatgaccttaaagatcttcggttaggaaaaaaaaatatcagttcgagttggagatcttgatcagctgaatcctgatgtgggacaagacaagtaaaggagaagctgcacaattaattccataaatttggagcataagtgggccgtcattgggtaagatctgggcccataatctctgaaaattgtctaaagtatttaactaggatctcaaatgatttgacgattctcaatcattttataatgttgtttatattttggtgttaatgttttcctttacaaatgaaatgaaatgttaaaacaatgagaaaacatgattgggatttattcagaaaatgtttcagattctgcaaacgacgattcaatgcctaatttcatattacaataaagttggagaatgaatgaatgaatatacagtctgaacgaactaacaagaccgcagggtttcattgggccctactgagtctattatcggtcttttactaattgttaatgtgagcgcttcttactattgacctggctatgggattgaaatatatctatttattgcccaaaccaactacccgaccgattcatttatttgagacacggtaagaacacaggtcaacgagttggactcatcaagccttcgtagagacgaatcgtag

SEQ ID NO: 25114 - DNA, 1097 bp, Arabidopsis thaliana landsberg
aaacagccttcttagttaattccgaaagtaacagctgactattcccaccagggtcgtttggtacttggagatggaagcatatatgatggaatgtggcacaacggtaaaagatctggtctcggaacattctacttcaagaatggagacgtgttccaaggcacatggagagaagatttaatacacggaaaggtgaaatagtcttttgacctttttgaattttgattagcttattgagactacacttttgcaccaactgcttagtttcaccaccaagtccctaagactttgtccagctagtgccatgtaaaatgcgtttcctacttttccaatctatcgagtagatttgagaaaggactgtacaaaaagatctctaatcagaaagacaaaacttgttcattggtcttgcagggttggttttatttgcacaaaggtgatcgatggtttgcaaatttctggaaaggaaaagccagtggcgaaagccggttctattcaaagtccggtgagatattctttggacatttcaaagatggttggcgccacggacaattcctctgtatagatttggatggaacaaggtcagtgactcttaaaaaaaacttttccctctatcttaatcagaaaaggagcaaccccaagtttattcaaaattgttgacggctatttcctacagatactctgaaacttgggacgacggtgttctcattgaccggaaacaagtggacgccggagattgatatcatccggcaatgctgtaactatatagtgcatatcgattttgtcttttctcaggttattattatgacaaaacgtgattcataaaaagtattcctgtgacttaaaaactccttttctttgattagatgtttaaaagaaacgaattcaataccgaaagctacctgactttttctttccttgcaacctgagaaaagtgacgaatcttcaaaagatcaaaataagctattataatgcaaaattatataatatatttctgtgtcggagagcaagactacaatgattcctattcctaattatcatacaacaacaacatcaacagaataaatctgatctccagttttcatattttagctgaagtctga

SEQ ID NO: 25115 - DNA, 659 bp, Arabidopsis thaliana landsberg
gtgttggatcacatcaacataatcgcagaggtcaccaaacagttgtttacgcggttcttggcaaacccaacagagataaagaagagaattgaatcactcattgagcgtgatttcttggagagggataatacagaccggaaactttaccgctatctagcctaaattaagttgaataccacaacccaaaaaaaaaaggctttactctgtttctttctttgctttatttccttatgtttgatgtaaaatcttttgaactgtacggtagtcggtaagaacgaaccaacacagcgtcactaccggtttaatcgaatatacatttgtttccttttcttttgtctttcatcagataccgtatgtgatttcagcttctggacacgttgggccggctcgaggccttttaaggcccattttaaacggttaagagccaaaaaaaacattcgcggctaaaatttcaaccaggcgtaaaaaaatcccgccaaacgttggcaacgctttgtttatagcgttttcatagcctaatcggttccattgacatttctaggggaaaaaatctctcacagtgtctgactttggttctttgtcttgtaacaatcgccggaaattaagatatggatatctccgcataggtaggaacttagtctcgataacacaagctttaa

SEQ ID NO: 25116 - DNA, 3101 bp, Arabidopsis thaliana landsberg
agattgcgccatctcttggagagaatcgaagtccacgcagcttcctttgtggtgaggagaagaacaatatatgacaaagaacaccgtctggtagactgctaacatgatccatcttctctgcacgaaagaagatttgagcctttgattaaacctgtaaaagagaaagacgatgaagaaagaagacgaaatcgagccaaaggagaagaagctaagtcaacataaagatatgttgggcttgtgtggctgcagctttcgttaaggcccaaacaagagtaaagtgtgttttttgggttagcttgaggttgaagtttaattaaagcaaagcagtgtgcaagtgttgtggttagagtttcaaggtagtagagtctagagttaattatgtgattaaggcatgtttgtatgtgtaagtgtgccaagtacaagtagtataagtatgtgtgagtgtgtcttgtaagagtgtatccaagttttaccaacatgtagacattcaatgtttctcttctctttgaaaacgtttatgtatttgttaaaatgttagacaaaagaggcagagactagagagagtaactatatgcttctgttaaaacagagaaagagaaacagagcatatgagagtgagagatgtgagagatgtgagagctaacctttgcgtgatagtggtgcactggtgctttgtgtgagttcaacaagaatgcaagaggtttggtttaaggtaaaaaatgttttcaaagaagaaaaaacaacggttttgcgattggtttggtttagggtgaaaaatattttcaagccagttaaatgaaatcaaaccaaaacaactttcgttcttctaagacttcattgtgcactccactccttatacaagcaaccacttaccaggagctgcacgttgcaattcgataccttgttgtagcgatttatcctcttcgcgataactttagacacttcaagtgcattctcttcaatataaatttttatctccttcaaacacggagaataaaccaagaaatgctttagcatgtgcatctctttcttttttccttgaaaccctttaatctctataacttttactggacaagatgtgagtgaacgacccttatcctctcgagaaacgcagcaacaagcatccccgcatttatctgtgacatagtgcaagagaccctgaaagagtgatagcataaaggacacaataagagattcaattcaaagtataaactctatcttagttcatgttttggcaaattattttttttaatacctcaaggactagagtttctaaatatggacagttgcttagaagaactggcagtgcttgccatcctcgattctcggcactcttgatagacaaagatttgaggtttttgaacactggcatcgattcacagcatagagaaagtccctgaaaataagaaaaaaaaaaactcaactaaataatttgcaattacatgtttcaaaactagaccagttatgctccaggagttgagacgaaatcatgttttatttcctcgagaccagttgaataaaaatattccaagagagattgaaaactgaccttgagagtatcaggagacaagtaaagatttggaacattttataagccaagaaagagtttccacacattgctatatctgagagcaacgttttggtcgaaccaatgatcatcatctggttctctagctcccgggagttgtagcatgaagatgattcgagcatcaaataagtttttcatattaactagtgggtaatcctgcggaacacaaccatagtacttaaagtaaacgagactcggtgtatcaaatgataaattgctaaaacaataaatgtcatatatggttagggtcttgaggcttggacttgatacgatcacatcctcatctttccagattacatcaaccagggctaattcctcaagtgcaggcaaagcaagaagaagaatgtcaaagttatcaacccgagctgagtcaagagagagagttttaagcatcggtaagaaaacggtcccagccacccaaccaatatcaattccaccgtctattttcaggctaactagtgtgctgctctggagacattttggagacagccgatagttatcatcactctcacaatccaagatgattaatagatcaaggtccgtaacaccacgcgccaacacattacttatccaagcatccacacgaactgaatcaacctcggttaaacacttgagggagcatttcttaatgggataattaccctgcaaagccagtattctatccacaaaatccatgaagctctgtataatttcgggcctatcccgcttaccctcttctggatggagaaacacagtgtcatcaatgtaaagattaggaacaaatgcaatgagattgcgccacctcttggagagaatagaagtcaaagcagcctcctttgtggtaaggaaggacaatatgtgacaaagaagctcgtttggtagactgctaacaccatccatcttctctgcacgaaacaagaggtaatcatatattgttaagtagacaaaatctcaaggctttttattaaaacatcatggatacataaataacaaacagttccaatgtgcaggatcaacaaacaaaggaatgttaatgtttgacagtaaggtaaaaatggagtaactggagaggttaattcaaacatggatttgtaactatgcaaattagaccacaacaaaaaggacccacaaaggagaatataattagtagaagcagtagaaaagagtaaacttcaccacctaccttaagacccaaaattaagcgatttcaatgaatgcgtccagtgagaagagatagagagagagatagagagtgggagtgattagtagctgacttctatggccttacaagcgaagatatgaagaaatgcaaaatacccagcgagaggcagagagaaagtcccagacttatagttcgacaaaggcatcggagaagccgtaaaattgaaagcagcagactcggagaatctagtgtaagttttggttctgttttatccggttttctaaatatcatcggtttaattcggtcaaacaaaacaggattgcttgactttgggctgacaacgtaatttcagccccaatagaagcccagtgg

SEQ ID NO: 25117 - DNA, 543 bp, Arabidopsis thaliana landsberg
cccccagatcctcttccccaattgaacctaacttttttctatttctttgtttagcttcagagtctcaacttgtcgtcggggtactggaaaggctggttcgacgaaagaaaaggtttgtacattcgttttcggttttgttcttgtattcaagtcccctaacaatgtaaaatactttactgcttatataggtggtaagggcctgggaagtttaagaaatcttgagactctggatctcggtgtcaacttttacgataccagtgtcttgccatacttgaatgaggctgtgtcgctcaagactttgattctccatgacaacttatttaagggtggctttcctgttcaaggtaggtcctccagaacaaatcaaactatatatatgtcactgacattgaaagtcttttgcacttatgaactgatatctcttactttggcacagacctaataaatctttcacgtttggaagtactagatctgaaattcaacaagttcaatggccagttaccaacacacggtatatttaactatgatccctgcgtaacactg

SEQ ID NO: 25118 - DNA, 4884 bp, Arabidopsis thaliana landsberg
gattgatgttatttacctggaaattgaagatgatttctggctggtaatgaaaatgcgattgaagtctgtgatagagacaggagctaaacaaaggtggtgtttttatagaggtgaagagagttttggtttagggttttactttgagtttatggaagaagaagtagcttgtacgcttagagaagcttggaagagacagagaaaatgcgggaaaatttaagggaaaaggtagagatctgaggaggaagaagatttctcactcggttttagaaacagtgtgagaaaaaagtcttgcactactctcgatttggtcttgacggactcatcaatggcacaaggaagacatgaaagaacgaggaaggaaaacaaaaagaagaagaaactgaagaagagaaaagaaaaaagtttttatctttttcactttctttatttttgttgtctgaacaaagacaaaataatcactaatcagtcctcgaggcttgaaaattgaaggcccaagttttcttctagaataaagtagagttcatagtagtaagaaaaaaaagattgacaagacttctaaatttaaacatttcatattacattatcttaaagaacacataaatcaaagtagagttcacttatatgaattatattggctctaatgacattaagtactgattagagggtagttttaaaagtacttttccgaaaaacagagaaatattccaacccacattttacataatttataggagatcttgtattgattttttttaaagggtcgatgattcgttaaaattaggtagagatttataaattattgaattctctcaatgattttgtatgatgtcaaatattcagtcctgacgttttcctctctttttaaataagaaaataacatatagcatcatcactatctaaaaatgaagaatctattagtctattttttgaatactaaataccaacaactaccaatacgacaccaatgattcagatactattatgtgactttggagtttggaccaccacaaaaaagagatattcttaattaatcaaacaagatccaaaaatttcaatgttgaagaaattttagagcaatcccaatggtttagaactaattagtttttaattttggattttaactttattttaaattaaaatattgtttttattaagttaagaagaaacttaactaatttctactctaatggttaagaactattgagttcttaagaaacaaagattcaaattatttcaaaacaatgtgtatccattcaaatcacaacacatatactcttcttagttttaagaaaacatcttaactaagatgtttattaactaaggtttgttgatttcattaactttaatcacttttatagctaagaattagctaagatacatggttggagttgctcttaacaagtcacaacaacacaaatttgaaaatatcatccaagaacacaaaacataacaagtgacttcaatctttataaccagcaaaagccattgtcggagaataccatctaacagttgaactaattctgtcttttggcaatgtaattagccaaagctagtaaaggtttaactctactcgaatcaaacccatgaagctgttcgtgagcatcgctcaacaacttatctgcaaagtctttagatttctcaagacccattagtttcggatatgtcagcttcccgtccattgcatcttttccggctgtcttgcccaattcctcagtagattccgttacgtcaagaatatcatcaaccacctgaaacaacagcccaatacatctcgcatactttcttagcttttcgatctcttcctctgttccacctcccattatggctcctaaaaccggcgctgcctccaacaaggcggccgttttgtggaggtggatgaactctagacgctccaatccaacgtcgtctggattcaatctttcgctgcttaggtcaaccacttgccgtgccactaacccttttgtccgtatggcccttgccagctcaaccactgcccggatcatcctctcggaagcgaccaacccactcgacacaaccgtcatgtgctcaaacgccaaagcaagaagcgcatcaccggccaaaaccgccatgtcttctccaaataccttgttagatcaaacactgatttaacactagttcaacattatctctgagcctttatatgatttaataacataccttatgattggtgggcttgcctctacggaggtcggcattgtccatgcacggaagatcgtcatgaatgagagagcttgtgtggatcatctcgaccgcgcaagcagctgacatggcagtagcctcgtcgcctcccacaagctcgcagacagcaatgcagagcagaggcctcacacgttttccgcccgctagcaatgagtaccgcacggcttcctggaccgtgaggggttctcggagcggtacagaaacgtcgagagccgcatttacagattcggctttgcggatcatatacaacttgaaatcaaaagcagagttgtgatcattgcattttccctctggtggaatcatgtctctgccaccttgtgaggtgagggcagaagagggagacaaacctgtgcgttttttgagactcttgacggaagatatggagttgtctcttcttcctctggattggatgaagagggagaatgagctgagatgaacagtagtagccatggcctatccaccgtctctaatagaactttataaatgtggagctcttaataggtttttctttcttcttaataggtttcttgtagttggaagcaatgagggtcaacatcttcagcttcactgttattttgaattgtaatttctgcaaacaatatagtatgaatatttttcaattatgggatgaaaaagtaaacaatctatgtacatactttaacaaagtaagaagtttaaaataatgattagaataattgaatgcaaatcagatttcgtttaagtagtgataggaggaaattctaataaaaagattgacatcacaagtagagaaaatcaagtaccccaatttgtgaagtccgatcctagaacataatgattgtcttaacgtttatgccacttgatcagagtaagtgaaatacagagaattaattaagtacttacagttcataatcgatttgttctaggagaatatgtaagtgaattttgaactaacaagttacacgccatgctcatcttcacaattctgcagttcatagaagttagatcaatgcagccaaagcagatgttgtgacaaacacacactactgagagcacagagctttggatgaaacttttttcctaaagcatacatcttattaaaccaacgaagcgcctcctcatgctctccactgctgacaaacacagatactataacggtacagttgatattgtccttatttagctaacactaagaacaactccacaaatttagagacgactccttttcctagaaaatccatttggtaaaatttaacaaggaaaccacatctttcttctaaaaaaggttcataagcttcaaatatttggtcatgctcagactctagaggcatggaagaaacgaacccaaaaatcttcccaccggctttaaacatgacagcaaaagtgctttaattaactaaaacctcaacttgtctcaattatcagaaaacaaaccaaacccatctctgaaacaagcttcaatcatatatatagcagttcatgcaaccatatttttctcagggctcctctctggcttcaacaaaaaagttcccatcaaacagcaagctaataccatctcagaattctcttctaccacaccctgaaaaaaagatgctaatagcctcgtttaatctgattattttcaaataaccacttatctaggcgttggaagaaaccataaatactcccccttttacctagccctaagtcacgtttttctcaggcatagaagcgaacacctcgtagtagtcttcctccgacatcgaactataagaagtttagttgtggttctctcaggcatttcatcgaacactttgtctgctttgatcatcttaccatttttcatacatcgcagcacaagtaattatatttcaaaacgacatacacctgaaagcttcttccagatttgatattccagaggaaacgccacaagtataaacccatgtggtggaaatcgcccgcatgagttgattccacggaaaggcggcaaaatatcgagggtttctatcagcgcaaacgcaagcccgtcgtatatatagtaattaaagggtattttatctccatcatacgttaccgttacttcttaatttgtattagatccttaattaattaacttggtcaacaccatgcatattgacctgacatgtatatttatttattttgcttatgttctcaaaaaaagatttcaaatcgattattcatcttctcaaatgtttgtattaattaattagaagggaaaaaacacgaaatttctgtaataatagtttgatgcgtggtttgatattataagcttgtaaatgtttacaagacgactttaccataaactccgtatacttttagttttaagaatcaaaaaccatgttctattagatcactatatatgatataacccataaaataatttccgatataatttttgacaccatatcaacattaaaaactaaaaagtttttttgtcaaatatattataggactctaggaggtaatccgacaaatatattggagaataattggagaagattaaagaagagcaaaagagaggtgtagacatgtgaacccagcgattattgatgcgacgaaaaaagagtgggtcggtccactataagaaccaccactcgtgctaaacgctatgatgctttcgaatggatctcatttattcggtcaaatcatttctttttcaacgtccaacacccacatgtgacacgt

SEQ ID NO: 25119 - DNA, 914 bp, Arabidopsis thaliana landsberg
  unsure (1)..(914): unsure at all n locations
aactaacatatgctcacctggtggctaatgtttttcctggggtacggcagagcatacttctctttaacctcagcacatacatgcacaggggatggaaatgcaatggttgcacgggccggtcttccactgcaggttttccacctgtttcgtttttattcaaaattgtgtatgatgtatttgtctgtaatttgtatgctaataatcttatatttaataaatttatgcaggacttggagtttgttcaattccatccaactggtatatatggggccggatgtctcatcaccgaaggttagtatcatgttctcacatactcgaatttgtttgcaatataaaatttaatgtgtttttcacaaaaaaaatttggtgtttaaacaattgcaggatctcgaggtgaaggtggtatccttagaaacagtgaaggtgaacgttttatggaacgatatgctcctacagccaaagatcttgcatcaagagatgttgtctccagatccatgactatggaaatcacggaaggtcgcggtgtangtatgttccacttgaaactactttttattttcagagtgaactctcattacatgaaatgctttggtattgtgatccgtctagtttgattctcaccctggacaactttttgctgatatcttccacgaccgcatagggatcatatgtatctccatctgaatcatcttcctccagaagctctaaaagaaaggcttcctggaatctctgagaccgctgccatctttgctggtgttgatgttaccaacgagccaattcctgtcttacccacggatcattatcacatgggtggcctcccaacaaactaccatggcgaggtaagaataagaaaagtcatttaagaaactatgctgaaatttgtgtggattttagcatgcgatggattagaagcc

SEQ ID NO: 25120 - DNA, 1218 bp, Arabidopsis thaliana landsberg
tctaaatttctaagagagataataatacggcggttcctagtgaactatcgcaatatcaatatggcatcttaagttgacattgccaaggtttgagaaatccttggataattcggcaccttaagaaaatgaagaaagagcatttccttgatattttattcctcatggaaaccatgaattctgatcagtttctgttaaaagtttttagatggcttggttatcattactttcatactatagaactggttgggaagagtggtggtttagtgatcttttgaaaaaattagatagagattgaatttctttttgaggataagaatcttttggattaaagagcttctcaaggaaggaaaggctagttttctcttgtgtttatgggaaccctgtgacgaatctaagatacattttgctggaaaagctaagtagtattggattagagagaactacagcttggtgtatgataggggacctcaatgatattttttctaatgaggaaaagttagggggcccggttaggttgatatcttcttttcagcctttcaagaatatgctgcttaactgtgacatgcatgaactgggaagtacatgtattggttttacctggggaggaacaaggaatggtcaatggattcagagtaaattggatcgatgctttgggaactcggagtggtttaatttatttccttactctcatcaatggttcttagagagatgaggatcagatcatcgtcttgttctagtgaagtttgtgaaagatcaggaggtttttagaggtcaattctgttttgacaaacgcttcgctgatgatcctaactgtgcagatgctattcatggttcatggaatggtaaatttaattcttcttctatgctgcagatggttcattgtaggaaagcaataagtagatggaaaaagactagtgaatataatgctcagtaggattttgggattaagaaaagaactggatgatgcatagagtgagcagtttccttgttggccccaaatttcagacattcaaaggcagttgggagttgcttttagagaggaggagtctttttggaggctgaaaagtagagataagtggctttttggaggtgatagaaactcaaagttcttcctagctatggtgagagctaatagagctcagaattccacaagttttttagtggatgagcaggccatgtccaatcttgaatagacagaaaggtcaccttggggtctac

SEQ ID NO: 25121 - DNA, 2218 bp, Arabidopsis thaliana landsberg
gatgttggtaatgcacaacaatcatatggcaattcaacggtttcggcacttttcgcttttggagactcaatacttgacacaggcaacaataatcttcttttaagtgtttctaaagtcaatttttatccatacggtagagactttataggtggaagagctactgggagatttggaaatgggagagttttttctgatataattggtatgtatatatatattgatctctacttgttgatatacttgtaacggatgaattcaatgtttgtaatactatgacacaaatattatctaatagcaagtctttgttttcagctgagggtttgggattgaagaatctcttaccagcatatcgtgatccatacctctcgaacaatgatctaacgactggtgtttgtttcgcatctggtggatctggacttgatccaatcactgcaagaacaacagtaaatttttcttagtttgtccaatagattataacaacttttattttatctatagcaaattttaatagattatattttggtgtgattagggaagtatatgggtgtcagaccaggtcacagacttccaaaactacatcaccagactaaatggtgtagtaggaaatcaagaacaagcaaatgcagttatatcaaatgctgtttacctaatctccgcaggaaataatgatattgctatcacttattttactacgggggctagaagattacaatacactcttccagcctacaatgatcaattggtctcttggactcgtgatctcataaaggtacaaagttagattgttttacatatatatagaacatagtaagagattaaaattttggtcaaattgtatgtgacatattctattgttcccccttctttttttgttatttgaagagtttatatgatatgggagcaagaaaattcgcgattatgggaacattaccattgggttgcttgccgggagcaagcaatgctcttggaggtttatgtctagaacccgcaaacgcagtggctagactctttaataggaagttagcggatgaagtcaacaacctcaactcgatgctcccaggttctcgttcgatatacgtcgacatgtataatcctctcctcgaacttgtcaaaaaccctctaagatcaggtaaagtctaaatcaccaaaatctttattgctataaaattttcaattcttgtgaatcaatttttcatgatcatatttttggtttttttaaggatttatctcgccaactagaccttgttgttgtgctccggcggctcccataccgtgcttggatgcgtctcgttatgtgttttgggacattgcacatccatcggagaaagcttatcagacaattattcctccgattatccaacaaattcaacaaagcttcgcttgatttgggtgtctttgtctattcgacgattattctatttatgtgtatataaaagatatattattcttgtaagtgtaacatgttgcttatgattatcttatcaatgaatacatcttaactatttatatattaaaacacctcaatatatagtgcctccatgtacatacacaatcgttgtttccaggtcgtactgcccttaaatcttttcttctatttttgggcccttttgaaaggttttagacccaattgtttctgagcttacttagaaactgcacacagcttctataaaatcaacatgaagcccacaaatttgtttatagtttgaccaagttcaaagattattttaaaaggctagactagcaccaaacaaaactacccgccacgccacattgagaatttgtgagccgcacaaagatctgttttattttgttctactttaatttatttactttgttgtgttccaaatagaaaatacaaacttatttccaattaggcaattagcataaatgtttagaaggaaaaagaatgaagaagataagtttctaaatattccgagtcagcgcctcgtcaacgtgtggttagggttggctccgaagaccatgggaagctggtcaggtcaacggtcatcccgatttttgagttagtcaaccatttattgtaaaaattaaaattttaatcttggtaacatatttgatgaacaataataataaaaaaaaaactagatatttaaactgaatgtgttgagcatgttatttttttcgtgttagacttttattgtaaaccataaaaattatttattggagaacatatatggaaatatacactaatatacatctt

SEQ ID NO: 25122 - DNA, 373 bp, Arabidopsis thaliana landsberg
aatatgtatgttagaggtggttatggattaggatgatttattttttttgtcgcatagagtccagccttctggtggcaggttttagttacgaagataatatcattttgttgccctctgagaaattttggttaaacaggttcatgcagctccagcaacacctgggaactcgtactcaagttcgatcactgaccacttatctcctaaaattgtagctgaagataccagttctggtgtccataatacttgtaatacaggtgaggaggtgtctcttgatgatcttgagctgttacgatttaaagttttggtgtatattggcaattcttcctgactgttcacatatattcagtttttaattaattaattacactttttt

SEQ ID NO: 25123 - DNA, 1817 bp, Arabidopsis thaliana landsberg
atatacacagtacagaggagatacaaaacaaaacaaaagtagaggaaagcgaagacatttgattctgaaaaaaaaaaagagtcattaattttacgcataagcagaaagttagtcccccaagcattcaaagaagagtcaaaatggaccctcttcttctacatttataagatcttatccccacacaattcaattgtatttagtaattcgatggtggtttaagaagtaataaatacctttcacaaaaaaactcaacttcgtatccagaaatatcaaaatattgatgataactaattgcacaaactatctttgaaaattgttaaaaccatgcaaaggagatcttgagtgtaaatagtcataaatgtggccgtgtgtgtgtatgcgactctcgagggtcctctctctctctctttctctttcataagttgccaaacaagtaggagcagagtctatctaatatctatgttcacattattattactattgattaaaccccaaaggccaaatccaaatacaccattttcacattatcttgacgaatgtgaaattttactatttggttattttctctttggcttctttcttgttttgttcacattatgttctgcactttttttctacaagttgccaagaggattattggattacatcatggcagagagaccaaaggcattaacaaaagatttgaagataagaaaaggtaaaaaagccaaacatatctccatacattgaaaaagaaagatggaacaattcaagattcgtagttagagggttgattaaaacacaaacacttaaaatgctagaaactatataagtaaaagcagggcaattctccttctcttgccttcaccttactcaaaaatattgaaggtgagaattaaaaaaataaacccaaactgaaagattaagtaaaaaccaaatccaaactccatctcattctcctgagattttgagtaaaaaggatgattcatttgagttctgtttgaacccgcaaatcatcggttaagctaacgaacctgattcctaatcgataaagctgctaaaaggggttagcttgagttaccggcatataaacacattgcatctgatctttgagaatcatccttggctaatgctaccttcaaaggttgtttttagtcataagctctctctttaagcgttagacatcagtatgccaaaccgggcggtgatcttcgaagctcccgttctccaaggctgcaactttggccctgtgagctgcagacaatgcgagtgtgttgttcttgcctctttcctcttgtgggtactcgcaggattcggttaaagaaccggtcttaagatcagctggtggtataaagcaatcgagagacagaccaggaacgttaaacgcaacttcctcaatcgtccagctttcttccatctttgtcctcgtatggctcgtcgccacttccccaaatctgaatagtgtcacaactgaatgtcccgagtgagcaatcatgattccttcgacctgacggtaatcgtctagggacgagttgtatgtggtctcccagaaaacagtctctccaccgttagattgaatccgggtcaaatgtgaatcctcaatgtgaaccaagagccctgttttctgactgaagtagccaaagaggacatgcctaatgatctcagccggtcctttgctcctcgcttttagtgtttcagggtcagtgcataacttcaagaatgggaagcaatcctttcaccatttcaccttctttcttctttcctaaataacccaccttttttcgggcctttttcccccgggcccaaaaaaaacccaaaattttttttgggcccccaaa

SEQ ID NO: 25124 - DNA, 1921 bp, Arabidopsis thaliana landsberg
  unsure (1)..(1921): unsure at all n locations
acagcacttgaagtgagtccatctgaatcttcgctggccaagctccgaccaccgatgctcatatctattccactgctcctcgagtccgtcacattcccttcatacacatcagaactcttgtgttctttcctttacagtttccatcatcgtacttaatctcatccatgtccatgtcaccgcatactccttttccgttctcttctgcgctttcctggagctgcaacgcaaattctaagttccacagaacatctcccattgatggtctctcaatgccctggtctagaacacacttcatcgcggtttcagcaaactttttgaagcattctggtgtgatcttgcccttgaggtagggatcaacgatttgatctagcatgcctttcttgtagcagtatggtgcccactcagctaagctcacttgttcctttgcaagtgttgggttcaaggctggacgagcgcatagagcttcgaatagaacaacgccaaaggagtagacatcggatttctcagtcagttgctgccgtctgaaatactctgggtcaagataaccgaaacttcctttcacaactgtgcttacgtgtgtgtggtctagtgtaggaccagtcttcgatagaccaaaatcagagaccttggccacccacttctcatccaatagaatgtttgttgtcttcacatctctatggatgattgtgtgttttgcaccagtgtgtagatagtgtaaacctcgggctgctccaatgcatatctcaagacgttgcttccatggaagagaaggattctgggttttgtagagatgctccctcattgtaccatgagccatgtaatcatagactaagatcatttcgcagttctcttcacagtatccaatcaaggacacaagatgacgatgtctaagctttgaaagcatttcaatctcagtctggaactcatgtacaccttgctcggacattgggttgcctctcttgatggctacctttgtagttccgccatcaatctctcctctgtaaaccttgccgaaaccaccaacaccaagcacccgggactcatcaaagtttttagtggcagctttgatctcagcaaacgagaagtgacggcaaagatttgacggaagggacgaggcataacttcctgttgtgtttgtcttcgccgagccagcagaatgtgagtttccatacagagatagtggaagccaccctgatgttgcatcactagcaggctggtaatcaccacgcttacgtctgcggtaagcaccaaacacacaaaacccaatgataagggccagaacaactgcaccactggctgcgcctgcaataatagccgtattgcttttcgatttcctagtagtcgggcgtaggactttagatggatcagcagtcacctgtggaccaggtataggatctgttccagccagattaccatcagaagtattcaggttgggtatctccactccattaagaagagcatcataatactccggcttgttaactgggttaggatgaagagcaagccacaaatcttgctgtccatttccctctggaggattcaccacgtaatccttgtgaaacggaaccccgtttgaactagtccaannnnnnnnnnnnnnnnnnnnnnnnnnnnnnnnnttgttgaggtagattgtaaacacccgttggttgatcttagtgatattcgaagaaacctcacagaaatgaagtctaacaaggtaagtgaaaccagagtcaatgctgaaaatccaagtaagattgtagttgagattgatctgagctgttggacccatagacctcgcggttgaataaacatccacaggagcaacataagtacgagtccccgtaggatacttaatcgtcatgttgggatcagcagtctctggaataccaagtcctgcaccaaatatataaggctgatcatcataccacgacctata

SEQ ID NO: 25125 - DNA, 998 bp, Arabidopsis thaliana landsberg
aatccgcattcaaatagaaaagcccagtgaatatgaaaccacccaatatatttgcctcacaatttatttatttattttaggctctgaatttttttattttcttattatggtaaatcgtctttttttgttaactttgtctcacattcccttagatggcaaattagcatcttactttacctgaatcatttaacttgaactgaaatgttaacgttaatgtgttccaaactttcaatctcaaaaaccaatttagtaatcgttcaagcagaatttgtatcaaacttttcttgtgtatcaaacaaagaataaaaagaaaaaaaaagaaaactgacgttatttcttttttcgttttgaaaaagtaaacttacgatgacgtcatttcaggaggtttaagcttcaacttttccactaatttcgaatcattcgaaggtttaaccgtttaaatacatctttttctcacactaatttctaagttactactacaatattattttttttacgaccccaccactaaccactattatccgaacttctcgaagaaaaagttcgtcacgccgtctgtctttagaaaagcacagagagtaagatctcaactagtctctcatgcgtgcatagcaacaacgtaacaagaagtcagtaaaggcggactctatatgcgaacttagtacctgaatctgatccaaagacttatgcacggtttgatgtaaaatcagtagtctagtcgattatttttagtgagttttaattagtaatagctacataaatcctaagttcaagttacgactattggtttacgctttcgcatatattatattaaacctgatagaggaatatcaagatcgagaaaagtttgttagagaacaaaagcaacaaactcattctcattcattctcttaatcgaaatgattacatttccctctcttatatagtatgatagttaacgagacattaagccaatgttgaatacacggtttacataaaccgatcttaatcggttctat

SEQ ID NO: 25126 - DNA, 4692 bp, Arabidopsis thaliana landsberg
gcccgggacgtgtggtctacatctagcctaagctttataagcttgtctacgaattcagattgcttttaagcttcgaggtgtcactgacaaatcttggaggttccgctactcttactggaacagtagtcaaagctatgtcatgactaaaggttggagccgttttgtcaaagacaagaagcttgatgctggagacatcgtttcttttcagagagattcttgtaataaagacaagctttacatcgattggaggagacgacctaagattcccgatcatcatcatcagcaattcgccggagctatgttccctaggttttacacttttcctcatcctcagatgccgacaaattacgaaactcacaacctttatcatcgatttcatcaacgagatctaggaattggatactatgtgaggtcaatggagaggagtcatccaacggctgtgattgaatctgtgccggtgatgatgcaaaggagagctaatcaggaacttgttggaacggccgggaagagactgaggctttttggagttgatatggaatgcggcgagagcggaatgaccaacagtacggaggaggaatcatcatcttccggtggaagtttgccacgtggaggcggtggtggtgcttcatcttcctctttctttcagctgagacttggaagcagcagtgaagatgatcacttcactaagaaaggaaagtcttcattgtcttttgatttggatcaataaaaatgatgatgatgaaattagctggtattttaagaaaaaaaacatacatatataattctatatatatgacaacataatgcattgatttcattataaatttatcggataattgatatatgttctaataatatgcattgtcaatagagagattttatggttttcggatatatatagtctctttttatgtgttcttgataatgttgattgtgtatatagatgaagtagtacttctagcctttgtaagtcttgtttcattactctcaattatatatatcaatggatcaaattattatatttacatttggcaaaacagatctataggttaagtaataagattgccaggctgtatagagtaggaaaaaatgagtacaaataagtgagatattataagaagagacatgaactaggattgggatcagtgtaaacccatgtctctcatgtatgtctctgtggtcagaaagtttcagagtttgatgggctgtcttagaaaagtgaattgtctctatatatatgtgtatgtgtgttgcattttgtatttatatgtagatatgtatcattaattattgtccctgcaattaatttggtgatgggtttctatgtttggttactaaatatggctgctgctgctgctttttctctgaagctattgctggatattagttaggcagagtttgcaggagatgggcagtgacaaaacaataattataaaatcgtgttttctttatatcattgtgatgtctatattagcaaaaagagaagagcttcttttttttttcatcttggggcgattgaaaaaggtatcatctgttgtcacatatattttctgatgcactagttaattaataaggccctatattagcaaaagctaaaggctataaaattaggaaaatttaaataacatttttattttgtggtcagttatgctttgtgttttgggtttctctttgcgtctcttggtctgagctctgaagtattattacacaacacatacattgcagagacacatttaatgtaaaatatatattatctgtacacacatatataggttacaacttacaacatatatgtgaagatgatatgtagatcatatacaagtaactagtatgatttgattttcacatgtgtgtactataaagctagcatgcatctagttatatgatctggttaattcttactcatatgatggttatgacatggttttcttataattttataaacgcgtaagttattctcaaatttagatttagggtttacatatagagtatagctaactcacactaaaggtttgcaaatgaattttggtgatatttaaagatgcatatatacgtctatagctaacatgcatataagtgtctaaagccgtgatattaatccattatcatcttttcttttctgtcaaaatgtaattcattagcatcaaattttcataagtcatatttgaatgatattacatattgttactttaagataaatcattgaagattacagttacatctactgaagttgcaatttagcgagtgcatcacatatacaattatatagtgtttaagttttgagtttttgcatgaacaattgtgatttcaataaacactgattaagtagctatatttttggtagatttgcagatacttcctttttctttatgatggggatttgcacttctattactcttacaaaagaatcactttattgttttttgctcagttttcatcgatccttattaaacagaaaccctgaataatatttgtgattaagtttcacgaaaaaaaatctgatagtcttagtagtagtacattcgaatagattctgtgttcataaattttttgaaaatattcataaaaatggcaattaatgaaatctctctaagattttagatcagtctagcaagatacattttttttttttttttgtcaaaagcaagatacagtttaatgcttaagaattaagattggcttttatactctcttaaaaatctaggatataaacattatccaatttcgtaatttttagccttttttgttttttgttttctgtttttaccgtaattcctcgatttcttcaatctgatgtggtggattattttaaccgtaagataacatcaaatctcaagagatagatcgatgtcaatgagaattgtagaaattaactagagaaaatgttagattgaaatgatgtgaaaactgaaaaccctagttagaggggaattgggattttggcgacttttttgaaactcacagaaaaacaacctacagtctttgattgaaacattcaaacgtctcgtcgtttcaatgagccaaagtaaagtgacattcaagtttgactttgacctctgcgattccagtcttccaatatttcccactcagaaaatcctacattataaactcttctataaacatttcccgagattattaactttaccaaagcgtacccattgagtattgactcatgtttatagataaaatgatactctattgagaaaaataaaacgaacgtaacaaagcagacaattataagctgacattgtcttccttcttattctaaacaaagcaggcaattataagctgacattgtcttccttaattcttattctaaacaaaataatagatagtaaagcataaataaagaaaatgaaaatatcatatcattgtacaacaactctgcttaatgatcagtgttgtggtatagtagagcaactaaacccaaaatttggctcaagagctgcaataaaacaaaagtttagatcagaacacacagctccactccaaatattcaagttaattcaaatctgatattacttacttgtgttcttggtccagagaagttgagtatcaatcaaagaatgattcttatcatcgagccgtttccaagttttgattgtatcaacagctccccaacgtccatacatagtcttctcaagctgagcctcaactactcttactctccttgcccaaccaacctgtccgtacccatgatacctaaaacaattaaaagaagcgtgtgttacaagtaaggcttttatgagaaaagtagcgtgtggtacaatttacccggctccgcctgcgtaacaaaggttgatcccatggagttcggcacagaagtcgttgacgtggtcgtgaccactgaaaacaccaatgacttcacctctttcgacaagtttggtaaagaaaccagagttgataggtggagaacaagtagattcttgtcttactccagtcatctccgtcgatttgttgaacaatgcaaattccggcatcggaatgtggaggtaaaccaatcctggtgccgtactattctgtggaaatggccacctcttgtgttccatctcaagccatttagaagtgtgttcataccaattctgttgagaggttttgacccaatcatatttgtaaccaaaaccatcaagcttcgtgtaagatccaccgtctagtagatagagattgagaatggatttgaagaagagaggggagccaaaaggaccctcgatttgtagattgtaattaccaaaaccgtcgatttggtatagccaagcatcgggagggtttacttgagacaacgagtttgggagtttcatgatgtatttcatcattgtttctctagtcatgtcggattcttggtcgtgattccccaaaatagccacccatggaatccccgattcgatcgcaggagcaaatgccatgtccatcgattttgccacgtcacttgtctcgcacaatccatatacattgtctccttcaatattgtatgtggtgttttaggttttttttttcacgcataaacattttttatacatacactaagttaactaaaatatttgtatagataacaaaacacaattattgtatacaattttgtattatttgaagaatttggtaccatagaagtcgatgagatcgggcttctcgtaagcgatagaacaaagtaaaaagtaggtggtattgagatcgaagcagtaaggaaattcggca

SEQ ID NO: 25127 - DNA, 1580 bp, Arabidopsis thaliana landsberg
aacattgcccgtgcagcctcgtttcagccagaacgttccagtgaagctaagcacgttcaccccaagttaccaaactatgacgatttggctgccagatttgcagagctaaaaggaaggtaaatatatgaacagttgatgcctagaaagatagaattaatgagattaaatagcctgttacacattttcttacttcttgatatagtacttgtccgatattgccccatgtatgtggtgcttgttataatagttgaaattggaagagtgacgcattgttacggagtacggaccccaagagttgttgatcatctccttgtttttggatcatcttatgtaaccatttgaaaacaaggatctgtttagaaaaagggaaagtggttaccacacagtttattactagcgagttatttgatgttaccatgatttttgcattaggtcctgaccagcactaacttacaagctagtagctaccatatacaagatataaatttacttctaaattaccatgaagtgtttaagttgatcttactgagaatattttgagttttttttttaaaatctgaacatgataataaaccaaaactattaaagggaaaagtcaacgagaaccctttttaaacgaaaaaaaaaaggtcaacgtgaactgcagagtgagcttagatgttcccaaattcgttcataaaccctaaattcaattttcccgatttatccccagcaattgtgtgatatcttctcaattctcatctttatcttcctccttacacagtaaaaaaaatacgttgtctgattactacttacactttttctcaaatctatcgctacgattccttctctcataaagcctcccaaaatcaatcatagacaatctcattaacagttttgtgttgatctctaactccatcgtcttaggagtaattaagtgaaagaacccaaattcgtttgtcatagaaaccacaatttcgagggatccacgcactttcacagtttgctacactttcaaaacaagcccttgtctttgaaaccggtgaaaatgagtagatatctagcaagatatatggtgtctagatacttctcttctgcttcttcccgtcctttacacgtttgcatcgtcggaagtggacctgctggtttctatactgctgacaaggtacacacgtctttctctcatattctgcaaaatatagtgtatgtaaaccagattttgtgatttatatcatcaattaagactcttagctcgtgatttgatggctggtaatcaggtattgaaggcgcatgaaggagcgcatgtagatataatcgatcgattacctacaccttttggacttgttcggtctggtgttgcccctgatcatcctgaaactaaggtaccactccttagcttaatcttgtttagagaaagactaggattttctccattgatttaatgtcaaccacaatgctttctacaacagattgccattaatcagttctcacgtgtcgcacaacacgagcgttgttcgtttattgggaatgtaaagctgggatcggatttatcactttctgagctgcgggatttgtatcatgtggtatgactttcttcccta

SEQ ID NO: 25128 - DNA, 1592 bp, Arabidopsis thaliana landsberg
ttgatgggaagggccaacatgagattgagcagttcacgtgccgtcacacccggatacttgtacttggagaaagctttggaatttatcattctaataatggtgttaagccctttaacacacttgttcaaatcctctggttcttgatagtagttgaatgtcactgaaggattatcccttgggttcgtgttccgtagcttcatatgtccttttgaggccggtccatcgactttttgaaagatcaaacccccattcatcctcacttccaatttaacatcaaaagattttaaaaggactgcaatggattgggtcaggattttcctagatgtagtatgacttgtctgcataatgcgtcatagttagacaacatacaatctcataagtcataactaaataacctttaaatgtatttatgttatatacctcgtttaaaagattcaaaacaccatcgaaaaacctacgagttatatcaaaagagagactcaagccacttagaccttcaatgtaactatcaaactttgtgatcccaacagcttgtatgagggatagttctactggttgaggagaaggaatggctacaaagttcatgggattatcagccatcccctgcccaaccatgggctgatctaggacgagtgggttcacgccgtgagcctcaagatggacggcaggacctactccactcaacattaatagttgtgggatacccagggctccagctgacaagatcacttcgttcgttgccttatttgctagatttgccttgtggaacactccatttgcatcctcaaatagcacttcatacgcttttggcttctggttacctgtttttttttttaatgttcatttttgcagcaagtagttttagcaaacaatcattcataaagtaaaaatcatatactaattgaaactaaaatatatatttttaatttctatattcttcaaaattatattaattgaatttgtcaatatactttcttatgtagaattgaaaaactaataagttaaaaaaaaaaaaattagaaaagtaagaaacttttaaagtacacacaattaaaataaaacatataaaagtcatttaggaaagtgggctcactccataattcctaatgaccagctcatgaggttataaataagtattcctttttaaaaagtcaatgcattagattttacactaataatgctagctcgattttataaaaaaaaagatagcacaaaataccattttttatgttgtattccaacttttaggaatactatcatctctataatggtcataacattttctacaactgatttcgggagcttttctaactacttttgtaaatctgtcgaagaaaaattatattaggaaatcaacatataataattacatgttttccaaaaccttcctaaaacaaatatgaatagtagtcaaaaataccttcggtggtgaagaggactttgtgaacagaagcatgcaagtaaacaacaatccggttgggattagcatactctaacagattcgccgcggtatgtctatgaccagcacggtacaaagattgtaccaccgatcttagtgccgtagatatgatcgtacgtgaaaccgttgtccg

SEQ ID NO: 25129 - DNA, 780 bp, Arabidopsis thaliana landsberg
accatataaacctgtgtttaagaactacaaaaacaaaactcaagtggttagttaagtaaaatatagattgaagcaaactagatagatacttggttttcttttacagtagaacaacctcttggccaagagcacctgcaagaaacaaagcaaaagacagtgatgatcatggtgatgatgatggattgatgtaccatgtgagttttgttgagattacattgttggtggatctctaagcataattgaagcatcgtgtggctttcttctactaacttgtgcattcgttcttcttcttcgactgcctctgctgctatcaaccttttgttatctgactctgctagtttcattgctacaacttctggtgctacttccaacactttgttttctaattctgatatcttgtagcgatccaatacctgcaatttgggagattttctgattttaatcaatcataagaattacaaatgatcttgttatagatagatgatgatgcatcaataaatagctgagcaattaagaaaaatataccttttccagtttgccttgagaaacgagaattatcaggcactcactcaaaaacatcctaaagtcttgttgctcctcgtaccagtcttgaaattgatcaaccacaagggatcatatcttttgttgctatgatactgtaaattggatgagcaacatgtaattaaaaggagtaagattacgttgatttcttttgccaactcattcattccttctgctttctctatttgctgctgggtctatctcatgctgtttcttttc

SEQ ID NO: 25130 - DNA, 619 bp, Arabidopsis thaliana landsberg
tagggggaacctttagataatttatcatcactttaagttctatttatgattgtattctttctgggtaattgtggggttgtgtccgaaggaatttccaggataccatatcattgtctctcaagtgatcttatctcgaccactattttcatggtaaaagattatatccccttccaataaccgatccacaaagattccaaacacaaacacaaacaatttcttatcatggttttaatttttctacatcgtataattgttatctggttcaagtccaattgtttttacttacttttttttctatctttcatgatccaactgttctcaatatatatttaccaataaaagaacaatagattataaatttttctaaaccccaaagcaaaaatgaggtatttgtacaagccagcaggataaagcatgtcttgtctccaagacacaaccatacgttatctcttaatctatcatttatatttaacaattttaaccagcttttactattgaactgcattgcatgaatgatgaaattacatcatatataggttctagcgaaatcatgtatggcacattgcaattatgatctatttaaaatttaatatgtcctttgagagaatgttaaaacaaa

SEQ ID NO: 25131 - DNA, 734 bp, Arabidopsis thaliana landsberg
tgttaatataaataaacatatactgcatgataaaaatgttaatttaactgtaaatgtgaatgcatttctgaatgtaagccatatgttttaaatattgtctacctaaacagagaaatgaattagtagcccaacctagccataacaaataaataatgaagaaggtcttcttccgccgaagataccaaaaatatattatcttctatttcaaaaagtatcccatttgtttctaatttctatggtacaatgtagttgttgaattgtaattttctcaatgttaatttcgttatctacgtaagcattgtcaactatttacatagtacatacaagtgatagttatatattagctcttccataatttttaattcttatcaatatgaaaatattgacaaatttatacaaatctgcatagaaaacacatacaaaacaaatatgaaacaatgttaaaaaaaaaaaaaatatgaaacattttttctaatacacctgaaaactaaaataaggggtaaatatattagaggtaagcgaaaaatctactacaatctaaaccgagatcatcccaatggtataattaaagtctaaaatctaaatcgaaggagcaaagtattttgtaaggcacacgtgaaagaaagtaactacgggagtgattaataaaaacgggccaatgatttaacacttttatggcataattaaaccaagaagggaccaaataaatatgacatattgatacaaaaaggaat

SEQ ID NO: 25132 - DNA, 998 bp, Arabidopsis thaliana landsberg
  unsure (1)..(998): unsure at all n locations
aagaaaacatagcaggagtgtaaagatgaatactaagactcaagggttagaaggagaagcagaagatctaacaacggtcgtcttgaaattcacggagagaggcagtgttgaggaggcaagagcatggtcttcaccattgtnnnnnnnnnnnnnnnnnnnnnnnnnnnnnnngagcatatcaccttcttgagcagtaaaaccaagaacaccaatcatagtaggccaacacttgcgtccaatggttcttatagcactgcaacacccagggccaatgtaagtctcaccgttgaggaagaacaagatcagctctccagaacagtgttggagctgcatcagtgagtcccagcagtaccctgtatcttcatcaagcttgagcctgtacacaaggcttgtggtaggagaagacgtccccatgaatggtttcatgagagggcgagctgtcactgtggaggaagccaccatgagcatgagagtcacaatgttgaaggtagccatgaaactagatttggaagccatttctcaacagattgataaggtcgaaagaagaaagagtagaagttgctttggttgatttgtttgtgatgagaattgtgtgttaactttagagagtttatatagagacagtagagacttgactgttacaaataaatggtagagtgaaagcccaagtaattacgagggaagctcattagattgtgagataattagtgcttagtggtttagtgggtaaactaggtgtaattactctattaaaagctgcgtaattagtgggtctgtttaggggctaatgggccggattagaatcactcagtctgaaactcgtttgatttagttcaatagaaccaaatcagctttaccatcaaaatctttgcgagaaaatagatttgggtaagtaaagtatgtacacatctaatgagcatgtaaaagcatgaaatctataactatttgatcatcttgaaaccgaagagatcatgaggaaagtttttcaaagacacaga

SEQ ID NO: 25133 - DNA, 3402 bp, Arabidopsis thaliana landsberg
gttgatatcaaatgtttcggagatggttttggtggagaagcgattagaagaggcaaaatgtgggagatagcttaaaacttgagaatgcacatgacctgctcgatgaaatgctgaagagaaggaatgattttgggaaactgagctcgaaaacgacgtcgacactgcacgacgtagcagagattgatgttgaacaatccgccattgtggcgttcgcgcgagtttcctaccaatggcaacgatcgcggccatagcgagtgagtgagaaggcttaaatgaatacatttcaaacatggtcttaatgggatgaggatatgaagttaatggggtcaaaaacgaatatatagataatatggggtctaatatggtaataaacaaagtaacactaatatgaatgggcctaaatagggcccattttagatttctttaaaagatcccagagagagagggatctaattcctgataaaccctagaagaagaagaagaagaagaagaagaagaagcaaaacctgtggagatcgagatgggaaatgagagcaagagcaatttgggaggaggaggaattagggcaaagatggagcactatgtctacagtggggagaaaagcacgtttggctgggatcgggattatctccatcatcttcggaatccctggtatctaatgaatcaaggttcgttttctctgggcgatttagattaaaataaataaatagatgtttctctgtagattccgaaatggaagaggatgatgatatcaatagctgaaagatttagaatctaaagtttctaactttatatttcttggcaaatgcaatcaagtggtcgatcaaatagagtttgattatatgataatgatgagtcacaatgtttattctgtttggatcataatagacttgcatgatcacattttttaccaagtttgtttgctttttcccctgatgatcacacatcgattcaattgcataatctcaatggttaaatatcttatttgctatatgtgacattggtaatattctccttgttttgttcattatataggctaattgtttctcttattggcttctgttgtttggtaaacctggtttgtttcaggatcaaagcatcgttctcaccaagattacttggaaaaagctgataaagctcgaaaagctcgtctctcatcatcttcatcctcggataagtagtcatctccccccacttggatggagactctagtcaactacattttgtgaatggatccatacatcatcgttttccatgtctataaactcagccatgtctgttctagagtgtggttaagttcagatatgtatctttacactctacacttaggtttctttatcgaagatatgtaaatttgcgataagttaaaggattcatcctttacgatactgttgtgtgagctgtgagtttcgactaggacaatccataaagtgaaagatcaagatgagtctggtatggtttgcttaataatctttcagtaacccaaaaaaaaatacacggggttttatcttgtaaaggtcacaggcgattaatgtatagatttaagcaacataaacagtaaaacaatcgtctacgtgtcagggcagttatgtcttcacagaggcatgagtcttctacgtttgtagaaccagaggaatgccaaaaatacaacaaggccacacactccagtaatggctaaaacccatttgaaagcaccaggcttttcaaagaagtctatctcaaaattcatcccaaagatcccggctacaaccccgaagatggctacaacgaatgtggcagtagttagcagcagctcgaattggatcagctgattccgtacgttatcctgcaaattccagaaattttctgcagattcttaaggttttctaagcaaataagatatctaaaaaagatcaagatttcaaggtataccaattgaatgttgatgaaatcttcggtatcatcgatgtactcctttaactgaagagtaaagagagttgcaggtgattaaaccgcttttaaaagctgttaaaacaagatgatgaaaaggcgaggtttttagttaccgaggttagcttgttgagagtgctatcaatgacaacaaagtatgcttccagcaacatctctagctcctctatattctcggttgcgtcttctgagctcctagcactgtcatgccggctccttgcaatgctcaagcttttctcaagtctacgggactcaggaggagaagaaacaggagaaactggcgcagacagagaaaaacaatcatttgttccataaacccgtaaagattgatcaccatataaagatccttccattctcttcttcttctctgttagatacatttctgccatatccccatcatcgtccattagctgttcaatctcatcccgaaccttctgaactcgtctcgtcaatgctacaagtctgctctttagtctacgagcacgctccaagtttagagtactgatctttgaggtaagctcatccaataatgggtatgcctcaatctctaactctgaagcctacaaagggaaaatctattctcaatgctgagcatactaaataacaataagttgtgaatcaatcactgacctgggaatcaaggaaggtacaagcagcttcaagggcaacttcaagagccctgaactcgaaaggtaaataatcaggggatgagttctgaaacacattgtctaaactcctactcctcctcctgctcaattcgagactgtcctgattccaaacctcagtaacagaacttgcctttagtctctgctgcagctcaacaacatagcgaaggacatagttgtcaagggaattcaagagcaaaacctcatccgcagtaataatacaacggatctgctctaagttaacaacaatagccttctctctaccaagaatagttgacggatacacaaacaaaggatcgagcagccttaaatcccgtgctggtaaatcacatctacgcatcatagtgaacttatcaacctcaatgacctgagaattggcagaagtatcaacacgaatccacgacttaaggccttgtccacgcttcttgagacccaaaacatcaactccaaggagtggttgtctccctgaaggagaaggacgagagcctgcatcacctctaaggttaatagccgaagcaggtcttggaggaagcaaacgctctttgagttcagacattgttgccaatctccagatactacaaaaccaggtaagtataaggaatgaaatataaaaagaatctcttcaaggtctatttgataaaataaaaaaaagtcaagaatagaaatttctccaagcaggatcgtctttcaaataccagaagcgaagtaataaatacagactaatctctctgataaaaaatggaagcttaagaaagcatacatcacaaggaaaagatcagaatactataga

SEQ ID NO: 25134 - DNA, 1893 bp, Arabidopsis thaliana landsberg
taacatgtgtaattatctagatttaaaagaatctctctcattttctaaaaatcaaaatttatttttctttaacagacttttattttctaaacatcagatttaaattgtatttttaattatcttgatgctatatattgggaaccacgatactaacagactttcgttgtcgcatgtaaaatgttttttttttgtaatcagacttccaaccaccaacttagaaaagtatctataaaacagagaccaatcaagaatacacttatctcttttcttaaaagaatcttttttttttttacttcattgactctttttctctatctctctagatcgaaagggaaaaggagatagagattgaagatgcgtgacgcaatcatcgccgatcctcttctggccatcgaccatgaaacagtcgcagagaagaagaaacagagcaaaaatctaaagatttctcttttactgcttctgattctcttagcaacttcaggtctgttttttgttttactccaataatcgaggaaacatttacttctagttaatgaaacaatacaacatcttttttcactagtgaaaaagacttgttttggaaataaatatttctgattaatgtgttctgaaatttcttaggttattatagctttagtgacaacattacaacagttttcttatcaagacaagctattgatgatgatcatagtcttagccttggaaccatcagtgacgtggttgaatctgagaatggtgttgtggctgctgacgacgctcgatgttccgagatcggtgcctctgttcttagaagtggcggtcatgcggtggacgccgccgtggctattactttatgtgttggcgttgctaatccaatgtctagtggaatcggtggtgcctctttcttgattgctagctcgcagaaagattccaaagctgaggcttttgacatgagagaaactgctccattagctgcttctaaggtaaaagaagagcttctctaactaatctctcttgatccagttgttcagtgtgtaatgtgtttagcttgtgaattgatgattcaggatatgtataagaacgatgctagtgcgaaatcgttgggcgcattgtctatgggagttccgggagagatagctggactttacgaggcttgtaaacggtatggccgtcttccgtggaaaccgcttttcgagccggctattaagctggctcgggacggtttcgtggtgtatccgtatctcggaaaggccatatcgaccaaagttgcgatgatacttaaagatccgggtatgcggagtgtcttctcaagaaacggacaggttttgaaaaccggtgagacttgctataacccggagctagctcagagtcttgagactatttctgagcaaggcccgggagcgttctacaacgggacagtaggcgagaagcttgttaaagatgtgaagaaggcgggagggatcataacgatggatgatctaagaagttataaggtccgagttaccgatgcaatgtctgtggatgttatgggttatacggttcatggaatgccgcctccttcgggcggtacagtcggtttttcgatggttatgaatatcttggatagttactcgaatctttacactgcttcgggaagagagctcgggctgcaccgtttgatagaagcaatgaaacatatgtttgcagctcgtatggatcttggagaccctgagttcgttaatgtaacaaactctatgaaccaaatgctctcgaaggctcacgcggaagaaatccaaaagaggattttcgacaacacgacattcccacctgagtactatatgaaccggtggagccaactcagggaccaaggaacgaaacatttctgcgttgtggatgcggatcgcaacagtgtgtcgatgacctcagccgtgaatt

SEQ ID NO: 25135 - DNA, 538 bp, Arabidopsis thaliana landsberg
cattcacaaactctatgcaaatcaagcagagagtacagatagttagttactttggatgtgaactccttggttcctgtttgaacaagactagcagctgactgagctgcagatgcagcaaccagagacagtcttccaaaaccctaagcaattttaaagaacgaatcaacacacaaaaacgtaattcacccaatttaaaaaggaactgaaaaaagcattaaaattcacctgagacacaacggagaaaacatcatcctgttgattatttctcggtggtggagccgagcttgatccgaatcctacatacttgccaccttgcgaaggaggaagaccttcaggcttagactcattctccgccattctcctcgcgaagaaactctctttccccgcagcagaagcctcaagctgcgatcgcgtatagatatcctccgacgactttgacttcacatgtgcaccttctctatttcccgatgccctgaaatcattcgctgactgattccgtctcatatcagatttgtaagaatcatcgttgtcccaacta

SEQ ID NO: 25136 - DNA, 834 bp, Arabidopsis thaliana landsberg
aaacagagcaacagagaaacagagattgacgaatttcaaattaatagcgttttggttcttacgggtggagaagtaatggattgggaatgggtaattatagaagcgtccatttccaaatgcaggaggcaaatcctggtttagcaatggaaaggaagtgagggaaacctcgtgattatcgaaacagatctaattgttgagagagagagagaatgaaatgttgagagtgaaactctgagatattgaatcctccgcccgactggtttgatttggtggattttgtgccaactctaaacgcaaactaggaacgcaaactcggaacgcaaacgtggaacgcagactcttttaaagataaattatatgggtcatgggccagactggtttcaatgtttcttatgggtctttcttttttttttttttcgtcggccaacattatattgataaagcccattaagcttacaaggatgaaaaaggtcttatgggtccagtgcacacttaattacatatgcaccaaatttaatcatatacatcaagaaaaccaagttccaaagataatcatcttcgaacctatctcaaattttaaatatttttgttttgcttttttgttgttatatgggttgaaacatcattggaagagtctaattttaaatttatttttagaggctatgatctatatatcctatattgttgtattttatttttgggttttgtgcaaaaacaactttcaaattcgtctatttttgcaattttatctttcacataaaaaaatgcaaaatacttatgaatttcaaaataatacgcaaattaacttttttgctattgtcaaattttcaattt

SEQ ID NO: 25137 - DNA, 1369 bp, Arabidopsis thaliana landsberg
attcaaagtaaagaaacaccaacaacttgtgcaagtcgtaatcaaagaccaaatccaagaccaaaggagatcaatggaagaagaacaaaagcatgatgagcaccaaacgaacaagtcagaaagtgtcattcacttggtggaagaagtgtcttccactaatataagcagaatataaaaataaatataaaacgaaaagtaaaaggggaaatatcggatatgctattatttacaaagatgtatataattggttaatgcacttatttaattcatccatcaaccacttaaggtcacctaggataccaattaaaagaatgtcgcgatagtttcaacttgtgtataataattatgcattatgctattttcttctttatctcaattgactggcaattaggaagattcgttcccagttacaagcctcaactagtggtctacataactctgatcaatctaagattataacttattacaacatgaataagagaatagtactttcacacgtgtgggagatgcagacacccaagacttaccaagtcaactatacttgacccatttaagtcaaaactcaaagggaatagagaagaattaaacatggaactagaaaaacagtaaagactgttacatatgctggaagatttaacttatcagtggtttaacaaatagaacagaaaagcagaaagaaacaacattctttcaaaaatcctaaataaaaaaggtaagttcatgataccaaaagacacatgattcttaattaatgatatgtgccacaaaagatatcgactcaaaacaaatgtttaaaccccaaaagcagagattcacaggtcagtaaggcatatagtatccactacagaaatatgttggtggtagttgtaattgaagtctcatttgtatgtaatttccaaatacctgaaatatgaagatattaaaattatcaataaaattggatatacgtaatctttcaatgaataactagaggtaaaagctgtgaaacaaaccttggtatctctcacaggtctcgcgatagggccaagcggattgcaaggtctcccaataggctcaaacggagtgcgcgagatcttgtaagaagatccatcaatgttataagtaggctgcaaaaaaacaaaaaaacaaaacacatatgttggaacttgaacatctgaattcaaagcatcggatctctattaaactaagctagagatataaggtcacctttgaactctctttttccttggtttgggaaggaccccatatgtcgtactgcttagcgttcttagtcattgcctcaaaatcatatcttacagaattctacaaccaaaagacaagtaattagttattggatggtgcttaaggaatacaaaacaaagatcagaaa

SEQ ID NO: 25138 - DNA, 1301 bp, Arabidopsis thaliana landsberg
gtgatgatacattgataagaacatgaactcgttctctagtttattagatgagctcaaagaatagtttaaagatccatcaactaatacacgtctcagatactcgaccccattcaatgatttctttaatccctgtatttatactcttgctttcctagaaagctcgaaatatctagctatctagatagtagcgaaggtgacataacagctaattcttatctctactaaatatctagtatctagctagaaaaagtttggatagtaagcttattgtcgatggaaggttggatagtaagtggcaagcagtgaaaaaacttaccgcaaacacccggagtgtcttctgtccatctttgtcctgtattgtaataacaatcttggccctgtcattcgtaggctctgatggtaactgagcagcagtctctgaagatggattgcgagattcttcaacttcccttttagcagactcctcaacttcctgcatcacatctcctacagtttttgtaaatgacatgagctccatcttcttcgacctacgttacatatttcatttataatcaaattgtaacactgggactctttccggatagcaaataacactaccatagcctctaacagtaacatgggaagcttagagatgagaaatactcaaagacatacaaaagttacctcaatgctttaatagttgaatcttcaacagagtctttacttttgtcgaagataacctttggtggaggaagcaaccaatcgtcatcacccgtaacttcaatcactttcacatcatatctaacttctcaccctataaaaaaaattcaagtcccaaaaggaatgatgatagattcaacctatgaaattgtgaagtacataatcgaattgttccttcactgacattgattcagaactctttacaagcccacaataccaagagtatctatcaagttaacacaaagagctcaatgagacaacaaccaatcaataaaaatcaattcttactgtttgtgaagttttcgctttcttcggaattggcgtcaccgaggcatcatcatcatcatctacaaaaattcaagcgataataaaggattcatctttatcactgtcgagtgtcgagctcagtgaccaaatcaaataatcgaaactcaccatcgatacaaacgaaattcgctggctgaacacgacgataatcaaaaagtggctctagatcttctccttcacctccctgatcatcaatcagtaatacaaattcagtagaactcaagcatcaacacaatcccacaacagacaaaattagggttttaaaaattggggta

SEQ ID NO: 25139 - DNA, 3182 bp, Arabidopsis thaliana landsberg
gggtaagatcgcgtggttgcaaagtttaattgttaagacccttatcattgaaaggaaaacagaagctagttacagagaaggtgagctaacttgttttttttactaattcttgattattacaggatttacgtcctattcctcctcctgaaaaatcaaaagaagatattcttcttttcttcaagctttatgaccccgagaaggcagtattaaggtagtattgtgttccctcttatttattccctctggcttttatataaagtggtctaccactacttaagtaacaaatattccacaagaacgaggtctttctttgcttttttgtgagaaaaacacttctatttgtttgtcttcttttgtcccttgtgttttatccactataccttgttttcttttgtaattttttttttcttgtgctaccagctatgctggcaggctgatggtgaaaagttccagtaagcctatggatataactggaaaactgaatgaaatggttggctttgctcctgatgaagaaatagaactttttgaggtttgcagctgctggtgcctcttaacctttttattatgcttatatggttattgattatgttatttaacagtttttgggcttatttacaggaaatcaagtttgaaccttgtgttatgtgcgaacacttggataagaaaacttcattcagattgtgtcaagtaatatttcacttttatctattgaatcttcctgtcgcgtttctctttggtgacattttgtttcttgcttgcagattgaagatggagatatcatttgctttcagaaacctcttgttaacaaggagattgaatgccgctacccagctgtgccttcgtttcttgaatatgtccagaatagacaggtaattctactaagcactgtttcctagagttaagcttggtagagttagactaagaatggctctaatgataagcttttttgaagtggcaatgagtgtttaatcatttaggctgcattggtagagtggtcttaacttcacctggcataatattttatcagcgcgaaatgtatactgatattgtgcaagtattccttactcttgagcgttcatgttttcatagcaaagttgaggagtctctgtaaaattgtctctagttggcatgattcggtaagcgattaactattttcgacttgtaattttgtagctggtccggtttcgtgctctggaaaaacctaaagaagatgagtttgttctggagttgtaagtacctctggacgaatttgtttcaagctgatttcagtgatttcataaatcttttatctcttaggtcgaagcagcacacttatgacgatgttgtggagaaagtggctgagaagcttggtcttgacgatccatccaaacttaggcttacatctcacaattgctattcccagcaacccaagcctcagcctatcaagtaccgtggagtagaccatttgtcagatatgttagttcactacaatcaggtaattgacgtgaagttcagcatactttacttatttgtcttgctatataaatataatacatgtctgcttattgggttttttttttttcagacgtctgacattttgtattatgaagttctggacatccctcttccagaattacaaggtcttaaaaccttaaaagtcgctttccatcatgccacgaaggaagaagaatgtgtagattttcgtttatgattcatagctttcttcttttgactatttgattaactttgaagccttttgaccatctccacaggtggtaatccacaatatcagactacctaaacaaagcacggccggggatgtgattaatgaactcaaggcaaaggtgggttttggattcctatggatgctcaataaagttatgcattcgatgttatgcaagtaaatgtaaggtctatacctgaatcaggtggagctttcgcatcaagatgcagaactgaggttacttgaggtctttttccacaagatctacaaggtaacaagcaacttcttatcttttacattatagtcaatcttttcatggtcctaagatgatggcttcttgataccgtatctcctgatgaaattcttgcaaccctttgaagtataatgaccaattaatccaatgtgctggtatgccttgcagattttcccatcaactgaaagaattgagaatataaatgaccagtactggactttacgagctgaggaggtatattactaggctgcaccttgtatttttcttagatctcacatcacagcatttttggtatcttctaattcttagtggtcttgctgttcattagttatttctgtttttcaaagtatatttgtacctctgtttccatgtgctctgagaatgcaatttagtttttaaagtcagatattaaactaaagagacgtgaagttattccatggatgagttacaatcttagcagattagattagaatgcttgagacgggcagtatttgtgtctggaatcaatacaatgtacataaagtagccaattgtttgaatatcttaagttgtccctgggctccatcattcagagatgttgacttatgttttccttaatcgcagattccggaagaagagaagaatattggtccaaatgatcgcttaattcttgtgtaccattttgccaaggagactggacaaaaccaggtgaaaattagctatctagcttttgttatttttaccgttatatgagtgttgtagagtcttgaagtggcaaagtgtcttatcagtatcatgtttgcttgttcctcagcaagtgcaaaactttggcgagcccttcttcttggtaatccatgaaggtgaaactcttgaagaaatcaagaaccgtatccaaaagaagcttcatgtatctgatgaagattttgccaaggtatgcacgactgagtaatgatctaagctaaatctctgtttggcagaactggtacaattcttaatacttgattcattatatagtggaagtttgcgttcatgtcaatggggcgtccagagtacttgcaggacacagatgttgtttataatcgcttccaggttctacttcttctcctctaattttctagaaaaactcatactaattatctgagatctaacttttctgtcttcggactgaaaatggtaaaacagagaagagatgtctatggtgcttttgagcagtacctcgggttggagcatgctgacactactcctaag

SEQ ID NO: 25140 - DNA, 5524 bp, Arabidopsis thaliana landsberg
  unsure (1)..(5524): unsure at all n locations
atcagaagcgtcaagcatttttcttgatgtgaagccagatgaaaatgtaaacatgtcaactttggatgctagtcaggatatgacaggatcattttcgccttcatcaccacctcattatcaaaaggatgtcttacaccggcgtcagatcctggtggaagacatcttacagatatcagcagattcttattcagtggcttcnnnnnnnnnnnnnnnnnnnnnnnnnnnaaattatgattctgagcaatcaaatcctgaacaggatacgttgaaggatcatcttagtggcaatagaggagaagacacaagcttgcttgactctcaaccagagaagagtagcatcataaagtcttggaagatagaggattcgttcaaagcgaagaccactaattttctttctgggctacataaaagtgagcttgcttctggtgttaaccagatttaccgttggtttgacaaaaagcaaagcaagaggaagcctaaaaaaagaaatgtttctccactggaggagaatagtttcataaagaaaggagaaacatctcatagaagtgatgcagatatcattgattcttgtgaagatgaatatatttctgatcattttcaagaaggttccttgactacaggttgtaatagtaagagaagtactagatttttggaaactgaaaaatcccttgaaggaatgggtggtctagtggaggaattttttacaacgacactgtcagattccagcaatgatgagacttgtaggatttacgttagttgtgattgcatactacagcaagaatccacctataagcaacggtaagttttgttccatctattattgtggtttaggtgaaagaaaaagtaacctgagtcccttctgtctttagttaaaaacttgatggaacatgctgagtaaaaaaaagaggttattgaggtcgcgtagtgcttctctagtttggtaggctttatgcaatttgaaaaggaataactggtcaatggaattagattgagatgttctcggttctcttgtaattcacatgtatgaataatatactctttactttataactacaaatttgtcttgagaagccatttacaaggatggcgctcttcttttccccctgacagtactctataaatgcagggaagtagtgttgctgctgagtagccaagaaaaactgtatgtgctgctcgtgggtgtttccactgatttacaaggttagactgctcttccctgtctttctcttattctttatgtccgaatgtgttatgttctgttgatactgatttacttttccttgatccctggtgtctgcagagagcagcttaagtttattgtgttcgcatacaatcggggatatacgagatgtctcagttggtctaggacttcaggttgtgaggttagtttttcatggctccgctttgaaaattgattatgtgcccatgtctcactttccttctggtttaggctacgttttagggaggatgcagagtacattttcatgacggcgagcattgaaaaaacaacagttttactcaatatcataaaattcttggattatcaggttacagaatcaaaattttctttgaagaggtgagctatcatcatctatttctccagctcttttactattcttcttctgtttgctgatttgagatgtattgaaacttaaatggcagtttggagaatgttcaagtggaattgtttgagaaagaaatatgtagtggtttgaagctgagtatattccagtatattgttctccattttcagagcagcacttttggaggtatattattctctcttgtatgaggaagctttatttctcttaatagggtttgacaagcttataagtaatttgattcgagcagtatcagcactgatcattaactataatgttaatcaatttttttgtgttaaactgaacagaagtgtcatggcttccacggtcactctttgtggcgggtggacatcttttcatatgcaatgaagacttcaggcaactgagttttctgccaacagatgatgcttcttcatccccatatttctcacttgactcaagctgctccatctccgacatatttgagatggtaacaagtttgtttattctttccctttctctcgcttatgtcagttttttatgtgcaaattggggtgttatccaggttgttgaatcaagaggaagctcgtgcttgtcactgaaggtcaagcagaaggattccacatttcaaagcagccaaaagaggacagtgaattcagtaacatggaagctcaagttactcagccctgagtgtgtacccaaatttgtggctctagtaaatggacttcacccagattcgacagaattcccattgttcgtaaggcatttgggtgagagatgagccgtaaatatttagaacttgacatttgttcataacttcaaattcatttgattcaatttgttcgtgagttttgattcatcttgtataaagcccttgagggtcctgtggtgtgtccaaaatattcttcgatttgtatatttttagtgtgtatcgttcatacaacaaacagcaaggaagaagaaagaaaatcagaataatatctacatttttactttgaaagcctgtgctattcttcgttttacaaacttttgcaggtgatgtaacagtaacacaatggaggaacctactcaaccttggtcttctcttcatcaacctgtgccatcaatgcctctaactctgcctccgataagctctccaatcgtttctgctcattaccaaccaaccaaaccaaacttatgttaggtaaagtagataaaccctgataaagagattaacgaaaaagcagaaacctgcatgacttgagactcgtagtcacgaagttgctgggcataagtcatctccttgttaccgactctaaagatataagtcgaaatccaacccaaagtcaaaccaagcaccagtatcagctgtactgcattccccgcttgcaacggatcaactcccacatactgcaccatatcattatcacaaaatgagtactcagaagaacaaagaaaaagataacagattcatttgatatcatcagtatgtagataatgagaattacctcaagtccactctctagcccgataccaagtgcagtcactcccactcctatcaatataacatccttcctcgtgtaaccaaacggcgtcgtctataaccaaattatttcacaacagagtttgcttcaggactactacgacgatagattatgatgtaaattcaaagagatggagtgcagaccttggtttttgtggcagaatcgtcttcagtttcagtagagtttgagctaactctacatctcattctctgtttctctcccttttctactgatgatgacaatctatgtccctcgaatctatataagactttcttcgcagctccgaatcctgcatcatcacaacaaacacaggagagttttacaatcgcttcagcttgaaatccttaagttttatcgaaaacgattattgggggagaacagaacctgtggtttgtcgcccaaccggaagaagccttacagacgcagacagaacctcctgatttctgcatagattcgaaactccgaacggtaaagaagccatttctgtgtttaagccacaacacaagccgtggttactagtgaaaaaaataatgaaacaaaaatttaagggaggacgaagagattacagagatggatggttgatattttttggggcccataggcttttgcttctttagtggcgcgtgtttctcaccgcccaaaagacatgcgtgtagacataattgccatcagaattactcaaatacactaattgctctttttttccaagttcatgtgaacaatgggagattcattcgctgcacaattcacaatttcacaaatgggccaaatgtttagaagatatgaaaaaataaagtaactttaatataatgtaaacagtttggttttattattctcccccaaagagataaaattaaaatcactctttttccagcccagtgaatcaaatgaaccggccctttattcccatcatctaacacctaaaacgtccatctataaactcaagctgaaaactcaaacagcatcgtgtgattgtacttctcaccagccttaaccacaacagacgggaaattcgactggttaatcgcgttcgggaatccctgcgtctcaaggcacacacccgcatgtttcccgtaaaccgcattccctttcccaaccactccattcacatagttcccggtataaaactgcattcccggcacattggtccacaagttcagtacccttgagctagcagcatcactgagcttcgctgcgtgtttcagcccctccttctcttgatcaggacagtccaacacgtagttatgatcgtatccgataccaacctctccaatagactcgcctatccgcttctcctcagtgaaatcgaaaggagttccctttacaggcaagatctctcctgtaggaactgtgtattcgtcaaccggcgtgatatgagacccccatatctgaatcttatggtccagaatgtttcctgagtcatgacctgctaagttccagtatgtatgttgagctaagttgatgggagtatctttgttctctggaacagcttccatgtcaagtctcatcgtcgtggctgacgtgagagtgtatgtcgccgtgacagaaaccgcaccagggtaacctgtggaggggaaccgcaaaacattatatagctaatctaatcccacagaaatcaaatgctagagaaaggatatgtcattaccttcttctccatcggcactgtgatatttgaaagtgatgaaaggtttttcgccgtctctcttgtgccctgcaacttcccatatcttcttatcgaaacccttgttaccacctgtacagatagagtaacattttacggtccaaatcctatttagttcacagaaagttatagagaaagtatacagagaagagaattgtttatacagaccgtggagactattaggaggcttgttgataggcaaagtgtagttaactccattgagactgaattttccctccttgatccgatttgccacacgaccaacaatgcacccaaagtatggtgcaagccctttctgtaacaatcatattcatagataaaacacacatattcattaacattgttacaaagtccatcttattttgatagttcatcacaaagtcattcaacaaggtacatgaatgaccatatacatttcttaaattatgattcagactctattcatgagatccagaggcagtgattagagtttcgatcagattgattgaatctatgtcgagatcagttcaaggattaggtgaattcgagagaaattaccacatatggatccaccgagtcgaatccgagaactacatcccccagtttcccttcaaataagaaaaacaaagatgataatcagaggattaggaattggagacaaaacagagatcatcattgaaaggaggaagaagagaacaaaccgttcttgtcgggaacagacaaagaggtgatggtggtgccgtagtttgagatcttgaccg

SEQ ID NO: 25141 - DNA, 1377 bp, Arabidopsis thaliana landsberg
agatgattctgatggagacctagcaacatgaagatgaatatgatatgatttgagtattggatatttttcatgtgggtgctttttttcggctgtgaaagcgtttctgcttcacttctgtggtcgagataaattgggtttggaaaaggagaaaaaaaaaaaaaatcttttttcttttgttcctttgtggtttgatgatgtgtaatagtagtaatgtacatgtacatatgttgttttcttgaaatcacatgtcatgtgcttactttcgacaacacaaaaacttccccaacaacgttactcacgattatgtgattaaacaaagtgaacccaaaaacaaactacattttgataagcattcagtttttgtcgccggaatcttttggaagctgcaaacccatgaggccgagcaaattggaagcaggaccaggaagtccttgttgtgaagagtaggattcaagtaggttcttaacaaggttaaaatctgcatcaactggtgtaaactcatcatccttctcatctctagtttttgatgattcctgcagagacattacattcatctcataaataccattacagcaaaatctaagctcctaaattcactgagtctagttatgagagttacctcgttttgcttagaagaatgttgttgattcacattttcaaagcttttctcaagagttgagtttttcagttcctcattcattgctccatagtaggattcctcaaagctttccttagcatcttcgatagattcttctacttcgctatcatcttcaacgtcatctgcataccataacatgttagtaagtcccacatgagggttagaccttatacatcagtatatgttgccattaggaaaaaaaaaaaaagtttaggaaataccaaaatccatgtccatggaagatccttcagagccatcactgtcatcatcagcttgttcgtcacgaccttggcttcctagcattgactcaatatctttcatgaaacgatcaacatctatactcacttctttgaaatccctacataagtccagaaaaaaaaaattaatgtgttgagcttgaaattaacaaagagatgttcatgaaaaatgattaatgttcaaataatggataacctgttttctggaacttctgctcctttgtagcttgataccttgtgcatgaattgctgcatcgactttgagatatcaccgagatcaaaattgttcatgtttgcatcagatgagcttccagcttcttgcttctccttacctttatttttgcgttccttctttgagttataaaactccatctctttctgcctctcttgaagaacagagtttagttcatcttcaccatcgtagagccaagaatcattgtcagaagcaggaacttcctgacc

SEQ ID NO: 25142 - DNA, 732 bp, Arabidopsis thaliana landsberg
gagacagcagacccagacctctctgcttcttcacttcttctactcctccatccttcttttcaatctttgcgtctctctctacttcttctgctggctcctcctcatcttcgtgcttcactgatgagcctttcgctgcaccttacctctcagttcgtatccactgtccaaaacatgccctcgtatgtgtatctctcccatcgatctcttttaaggatatgagactgcgatttgactctttgcttgttgggtttttgttaggatccattctcggaggcacttttgtgttttggagcaagctctgtagctgtagatgaagccatcgaagaagccgaccaagatgagacttctcttgcttcaaaagaggtgaaaaatctatgctttgatcgttttttgttcagctccatttccagaaagcaccaatcttttgtatgattgaacaatgttagagcaaattgatgcaataaaaggaacgattttgctcttaggaagcatcgtaagggttgatctgtctatattcttgtagtctcatcaatcatgcttgtgctctttggtattactctctgcagatatgtatagaatcaatatttccagtgcatgaagaggtgaaaatgtgcatttcacaagctgcaaattccataggcttgaaagagatacccaaattcaaagaaaaaatgggagatgaacttgactggattaccaaaaaccaggtgagttctgagttaacaaagaaag

SEQ ID NO: 25143 - DNA, 1318 bp, Arabidopsis thaliana landsberg
ctattattatctacttgttatttgttatatggttgattttctctcttttatagggtagcgtaatattacagataggattacttgtgttttggggtcgtccactaccattcctacactcattttgtctcatgtgtttgttttcagatggactcacgtgaacctcttaatttattacttttggtttgtgttttcctccacagtttgacaagggcgataaatattttttattcacaaaataactatagataagttctagatctcagccgttgtagttcgaattaagcaaatttaaccagcagtgcactagtagttcaatcggttatctaaactttagtatagatctcagctgtctataatctatccgttaccattatctcttacaatctctaacgatatcattttttactagcaccaatattcagacagttgattgctcttcatcagtctctaaacatggccatataatccttgcgtaagtatataacactggtctctgccctaaattttcgagggatccattttcctaaaaaagatttaattgtatagatttttgttagtgagcaagacacttgttaataatgctatgtactacatatatatgtatctttcaccaaatcagtttttcaaatttataaacataaaaagtaagaattgaacccccaaaaaaatacaagaagtaaatataactaaacttctattcttctttttttttctttttttttgaagaaatggtatttgtatttcttaatttgtttttctttttgcttaataacttcttttttatacattagatttttgatattgtatatatacatcaaacaagttaaataatggttttatccatattttctaaattctcctaattaactctcctagagttaatatgtgtgtatatagtcacaaatatacacaaacatttgtttctggctcgtggtctatatattgccttttaaaagggtcaaacatagtatagcttggatccttctttacttgtgcctgatctctcctaatctctcgtcttccctctcttttgtgcttcatcgatctctatcggtcatgggttccaattttcattacacaatagatctcaatgaagatcaaaaccatcagccttttttcgcttctcttggatcctctcttcatcatcatctacaacaacaacaacaacaacaacattttcatcaccaagcttcttctaatccctcttctttgatgtcaccatctctttcctactttcctttcttgataaactctggccaagatcaagtatatgttgggtacaacattaacacttgtcatgatgttcttgatacccata

SEQ ID NO: 25144 - DNA, 1123 bp, Arabidopsis thaliana landsberg
  unsure (1)..(1123): unsure at all n locations
tatgacaatcacgtactgaaaggtagtactgaaagataagttaggacattttattcatatatgattcctctaaaacttgtgtcatctataagaaaattgtaaattcatcatttacatctctttaaagaatgcataccagtgtttcttttgtgtgatagaatactctaggtaaacccagtacagtggtcgcgaaccaatcggtaattgcatctgctgacagctctccttcaaacctaacaaataaaaagatttgaattattattctggaataagaaaaatgaagcaagaaactcatctaaatgactattccaagaaaattttcacgacccaataaagnnnnnnnnnnnnnnnnnnntttccgttaaactgaagggttcagtcagtgagctacctgatgaggcagtctgcggttttacaatttggggggaaagagaagattgaaggaaggcctgcataatatgatgttataacatgagaaaaaatccacacattttaccccaaggtataatcattacacctttctgaaatataaaccatagctataatagaacaagtgtgaaatgtatacacggaactgtcttttaatgctcaagtgttcaaacctactggatgtaatatacttcctaagtacaaacacttaattttagaaccattctgtttaagcatatcctgactacttttttcttccaatggatcctctcaacttacttcagtctacttttgattgacttttgcttttattcttctcagttttcgtgtaggctcttagcaggatgaggaaagtgataacttaccttttctgaaaaatacttgtcctgttggttttttctcagcaaggtaggtcacaagttgaacatcgccaagctctaacatcgcatggttagcaaccccatccaacaaagcaactgcaattataaaagaaagttaagcatagcaagataattggtaaaatgatttcatacacagcaaaatatgtctatactattattaactattaagttagcgttccctcctaatttttggtaaaacatatctattgacatcaagttgcgaacttacgatcatattgttacccttgctttttacatcatagacaacatatttacttcctggaaactaactc

SEQ ID NO: 25145 - DNA, 894 bp, Arabidopsis thaliana landsberg
tatcaacttcaaatcataatcttaaattattatatgtaaatgatatatgcatttaaatgtttaagaatttattgttaccaatacttagagaaaatttgtgagttgtgataggtacccgaaagatgtttatgatcgttcgtgggttccatatattcaacccgaatggactcaaatttcaacaacttcaaatgtgtccaataagaatcactatgatccaccacaagttgctcttaagatggccgcaacacctacaagtcttgacgtgccactgacaatggtttggcgtttggagaatcctgatgatcaaatctacttgtacatgcacttctcggagatccaagtcctaaaagccaatgtcactagagaattcgccattatattgaatggagaaacaattaacactagaggtgttactcctaaatatcttgaaataatgacctggcttacaacaaatcctaggcaatgcaacgaaggtatatgccgaatgcagttagcaaaaacccaaaaatcgacacgtccacctctggtgaatggttatgaagtttactcagttctccagctttcacaatctcagacaaatgaaattgaaggtatcaaactaaaagagatcgttatctttatcattttgcttcgatataagttcttccatatccatgaaaactaattcattaaattctttttttcgaatcagatcaaattttatgctagtggttgctatcaaaaacattagaactacttatggactgagtagaatcagttggcaagaagatccatgcgtaccgaaacaattcttgtgggatggattgaattgtaacatctcagatatatttgcaccaccaagaataatatctttgtaaatttgacctgtgtcacacacactttagaattactaaa

SEQ ID NO: 25146 - DNA, 524 bp, Arabidopsis thaliana landsberg
gattgttattttcgactattattatcaactgtatgataattaatcgtcgagtctttaagaatatcgcgaaagttcatattgtctcatacaagaagagtaacaaaagcatattcagtttagctcaagttccttaaactggaatcacagatgactaggggattgaattttgtagcatcgataaaaacttaactactcagatttttgttgtagccacaaaatcaatcacccaatgagatcaagttcctttacctccacaaacaaagctctacaactaagcttttgtattgttataacgtagtttctagtctatgtatgttagatcaagtaaataaattcagcacttttgtggttttatctccctaagatcagttactagttcatggcgctaactagctacatgcaataagaacaaacctagaacgaaaaacttctaaaaacaagctattttaaaatcgtcacttaccttattcaattatgaaatctgctttgatgaaacttttaaacccaaccatcgaactagtaat

SEQ ID NO: 25147 - DNA, 2242 bp, Arabidopsis thaliana landsberg
caatattaatcatcttaaaaaaaacactttcaaactgtcaatttcatctataaactctttaagatggttgatataaccatcctcataatagatgcctgcttagacaaaaccgataccaccaaaaaaccgagaaaaactgaccgagcctcaaccggaatccggacttgcttgctcctataatccaaataacagaataaagaaagaccaatgtatagatgactcaatagtcaatacctttggtggtggagaggatcttgtgaacagaggcatgcaagtagacaacaatgttgcccggattagcatattccaccaaatcagcgtccgtgtgtctatgaccagcacggtcaaagatcgtaccaccgatcttagtcccatagatatgatcatacgtgaaaccattgtaaggaaactcaccagcctccaaaagcccatctttaaacgccgtttgccatcccagaaccggcggttgaaacgccactttcttctcgacccactcgtaagcagcttccacttcatcagtcttccactcagtctccttcacgtactcatctcccgcacgtgtgtagaacccggcgtttaacacggagccaccaccgaggacgcgtgcacgagtgttgtaaacgccgtcctcggagataaaaagttgcgaccaagatttcggtgatgtgtttgagagtgtggtggcaaagttttcgatatctgttgccgtaggattgtcgtagggagcaccaccgcgttcaagaaccaaaacgctagcgttttgagatagcgtcgcggctaacgcgcaacccgaagtccctcctccgatgattatgtaatcaaaccgagcgaacattggtgctaatgttgcatctttcataaaactgtaatagccagcttcacgtttaagaaaaaagaaagaaaatatccctatattaacatcaagaattcaattttttatgaatatttttatcgttacacattgaatgatacgtaaaagaaactatacctttatctggagaacacgaggcatgggagatgtatgtgatgatgaatattttgcgaaataaccataatatttgtaaacccattatgggtgaaagattaagtttgattctttaatatttagattagagcaaaaaataagaataggtttgatgaggtttatataataagatgaagcataagcctcttttcgtttgtcattatgagaggaagcttttatggttcaccggcacatatttattgggcatagaatcatacaaagattttagggtcttggttatttattttaatgaacaaagaatgttgttgtttcttgtatgtttaattatttgaatctttgcaattgtaaaattcttcagtcgtaatatagctaaattaatagtcacgtacaatgaaattgatcaaaaaatttgtggtaaactattttgactattagttgttatctaaatgtcaaaaagaaatgggtagttaggtaaaagtagtaagttatacatgagttataaatttctttgatcgtaataatatagctaaattaagaggcacgaaaatgaaattggatcaaactttcaaactatttgacgagtacatgtcaaatagagaaataattaatgagtgttagcatgttaggtgtgaaggtagtagtaagtagaacacatcagttataaattttctttgttaatctcttgcatgtaaagatcttattgcaacaacctcttattatcgatatgcttagaaaccataatgcaatacttcttttaacaaattatatacataccgcacaaaaagataatatcaaaacttttgtggttgtcttatagttatagctagcaatttatatttatgaacttaatatcatattcaatcattacaaacataatagtaaatggtccttaaagtatgtgctattttccattattccgtactttccatttccttaaattcccagatagaaaacgacaatagacaattaactagtttccgtaggtaatagaggaataaaagttaatgagttatgcataagtcacttgctaatattgtaattgatttgatctgatttttaaaaattataagaccgacacaaatagaaagaaggtagctccaactgcggcctgcccataactttgtttacataaaagggattagtttttagttcacactatctttggtgacaaaatgtatatatttcttattatttgattatctatatttagaggaaggtttttgagttttggtggatttaagaactacacatatcgga

SEQ ID NO: 25148 - DNA, 1330 bp, Arabidopsis thaliana landsberg
tgataatctttcgacgagtaacatccaacaccgattatatcaacctgaaacaaatccaagaagctgttttcacattctaattctaaagtccaagagtgagacattaatggaaagcaagaaacggttaaaacttactctagcagcacctttcttgtgagaaagataagttggtccatctttatattcaccataccaatagtaaacctttgatatgtcatcaaacaaaatgccaccaccgtgtgcttgaatcggattcccttccgtgtctgtccaaattctccccgggaagtagtaatgcgatgtgtcattagtatcttccttggtaggaccaaaagctgatttcatatcagggaaaaaaagatgtcgaatctgtgaattctcgtcgagaaactcttcgactaaagtggttggtgtttttggtttccgtttgatagcgcgaggagaacgcttcctaggaggcggcatatggatattctcttcttcaacgcgttcgagctcacggacaatcggatgatggataagtaactgaggtgaaagatcaagatctacactataacttctgctatataacatggttaaatgaatcatgaaaacacatcccacaactgtagatactaaaccaaacggtgaacaacgcaaaaacgttgctttcttgttgtgtttgttcttcatcaccttcatctttgtttccaaaaatttatctccacaaaaccccaacttatgtaattccatccacacaaaaaaaaaaaaaaaaagaagtatacaagtgtaagtgtctaaagttaaatacaagtgttctataactaattactcttttgggagatgaaattttgaccttataacagatttggcttacacataagagggtcaaattgtcaattttagcaagttgattagcacaaatttcgataccagatccaaataagcacaagctaaaccctaaagacagctaatttccagcggaagatgaacacaaaagttcaataaacacagaaaactaggagacagaaaaacctcgggatcttacctgaaaaagaagccggagctgaaacttccgacatgtaatgagagtctaaagacctaagctttctcagaagtaaacaatgtctgagaaaaagacactaaattgttcgatttcagattctccggagaagaaagctcgaacctgggaacgtaattacgaaacccaggagtagaattggggaaataaagacaagggtcggtgaggtttggttaagaaggatctgtcacgggaacaaagagaggtctttgatgatgatgatggattcagacgtgcgaccaaaagacgagaccgatgaatgatacttag

SEQ ID NO: 25149 - DNA, 1086 bp, Arabidopsis thaliana landsberg
ctgcacgttcaccgtaacttcacccgatgcagtgccatgtaagccatgagccgataacccaccaacatcactcccataacaaacacgtctatccagagattgttcaatcccattgacttgattgctgggaagtctccaactttgcaccagactccttttgaacactcatagtagtcgtcatcagtgtattgaatacccaaaagcagcttgtagcagtagtagctgtagcttaggtacttgagccatacgatgaagggaggaatttgttgcacgtagtatcctccggctatgagaaaaacgagtgtagtaacagatgctaacgttgtggcttgcttgatgttcataagcagagcaccgaaggctaagccaagaccttgagcaacaaggacagaatagagaacaaccagtagcgagaggataaacgttgttgggtcaggtttaagtccacccatccagtaaattatgaacacaaaagcagttggaagggcaagttccaagggcaggtccccaacgtttctagccatgaaataggaggaaagacggtacattccggaagaccgttccttgattagcattcttttctctagtggaaatgtgaaaaccgcgttgtatagcgggtagaagccccaaaagaccgataagaagaagagcaaagcttttttctttcagaataaatgtagaatgatggctagagtgtagaatactgatgactgaataaaatgcccgttaccatctagaaaaagagagccttactctatcttggatgtgagattttggagtatgccaccataaaaggccaccaagaaaagcaacactgatgacttggaaaatcctgagcttgttgaaagataccaatctcctctttctgactcctctttggagcaatacagtgaactggtaccaccaagttgtgcaccattgttctgacttgaggtttttggctgctccatttaaagaacagataacatcagattattagcggtgtaaaacgactgaagtcgaatataacaaaactacttcaaaaagtcgaaattacccgcacgctttggtggtattcatagcctgccggaattcccccaattgcca

SEQ ID NO: 25150 - DNA, 516 bp, Arabidopsis thaliana landsberg
cccctccaggctggtgtcatccagctggccaagtcgttggcggcggtttgggttaagaacgatatccgggtgaactgcattgcccccgggtacatggacacggcgctgaaccgggtgccggcgctagaggcacagaagaagatctggaagtcgttgacgccgcagaaccggcttggtggggttgatgagctgaatgggctgtgtgtgttcctggcgtcggatgcgtctaagtttatgaccggcgcgaactgcattattgatggtggttatacctgctactaagcggggataatggacgcttctggtgggttgtgggaggataatggggtggtgagggaataaactatgatgcaaaaaaatccgtgaaatattctacagaataataatccatattctttggtctacatattctatccatcctcttctttttttagcgtcaacttgttgtgtataattacgtgaaagatggtttggaccaactccgtctcacacgatacactgggttatattatatca

SEQ ID NO: 25151 - DNA, 992 bp, Arabidopsis thaliana landsberg
taacaaaacccaatgtgattagtaaacaagcaagatactgagatttcattatttaattttttaaaaagttacttactccgtaaaataccagaaataatctgttttatctctggtcatgcttatttgttccactagaccatctttaacaaatgtaccagcttcatttgaagaagggcttccttcgttgtacgattcccaggaaaactttgtgcttgtaggaatcatcttcataagtatggttggtgcacggatctatatcacaaaaaaaaggaacacatatataagtcaagatcaacaaggtcaagaccgtaataaactgtttgaaagatgtatgcaaatctctatttcaatgggttaaaatatgttttcatatataaattagtaaggaatcccatgaatatacatatgaagaacaatttttgaaccaaagccatatatgaatgcacaagttgcacatgataaaaaatgatcatgtacaaagtaacgttttggatataagctattagtttatttacctttgcagtgttataatattcggttttgcagtctggtaaaatactaacagaccaaggaggcaaatcatacggaaatcccctaaacataactcttgctgcagaactcgtgtcgtagttcgagagaaatgcagcgcaagaagtcttggacttgaacacatgaatctgaaaacataacaaaaacaaaaaaaatgtatgaatcttttatggttattatcttcagtgtaacatttcattagtttgcatacttacttcttttttatccccgagcgatgtgactgtaggatcagcagagaccaatgccggttcgcagagcttgatgaccttatgcagccttttcaagtgactatacttaggttctctcggtaacccttttgaaaaataaaccaaaacaagtattatatgatggttcaatatcgttttgttaccattgtgttttgtaggtaatgagacttcaaattaccgtattcatcaagagga

SEQ ID NO: 25152 - DNA, 2479 bp, Arabidopsis thaliana landsberg
  unsure (1)..(2479): unsure at all n locations
tgcttgcatcggggtgtttcgctctgtcttagtacgttcaacaagcttctacgtgttctttgcaagaaagcacatgttaaggagtgtcacaactacttgataaggttatcaaaacaggtgttttacggaatctgtttacttataatttattcattcaagggctttgtcagagaggtcagcttcatggtgcggttcgtatggtaggttgtctcatagaacagggacccaaacctgatgtcatcacgtataacaatcttatatatggcttatgtaagaattccaagtttcaggaggcagaggtttacttggggaaaatggtgaatgaagggcttgagcctgatagttatacctataacacactaatagctggatattgcaaaggtgggatggtacaacttgcagaaaggattgtaggtgatgctgttttcaatggatttgtgcctgatcagttcacatatcgctccttaattgacgggttgtgtcatgaaggtgaaacaaaccgtgctttagctttatttaatgaggccttagggaaagggataaagcctaacgttattctttacaacacactgatcaagggattgtctaaccagggtatgattctagaggctgctcagttggcgaatgaaatgtctgaaaagggtttgattcctgaggtacagacttttaacatactcgtaaatggactatgcaagatgggatgtgtttctgatgctgatggtcttgttaaagtcatgatctccaaagggtactttcctgacatatttactttcaacattttgatgcatggttattctacacagttgaaaatggaaaacgcacttgagatattagatgctatgttggacaacatagttgatcctgacgtgctcacttacaactttttgtataaaaggtctctgaaaaacttcaaagtttgaagatgtgatggaaacatataaaactatggtggagaaaggttgtgcccctaacttattaacgtttaatatacttctggagagtctatggggataccgtcaactatataaaacctttgggttattggaggaaatgaaaaacaagagtgtgaactcctaatgctgttccatttggaacgtagattgacaggttctgcataaacggagacttggatggagcatacacgctgctccggaaaatggaagaagcttaataggtttcaagatcaacgccaacattataatatcatcattcatgctttcactgagaagctaaatgttactatgngcggaaaagcttttccaagagatggttgatcgttgtcttggtcctgatggatacacataccggcttatggttgatggtttttgcaaaacgggaaatgtcaatttggggtacaagtttctactggagatgatggaaaatgggtttattccatctctcacaacgcttggacgtgtaataaactgtctttgtgtggaggatagagtttatgaggctgccggtattatccatcggatggtccagaaaggactggtccctgaagctgtgaacaccatttatgatgttgacaaaaaggaggtggctgctcctaagcttgtcttggaggatttgttgaagaagagctgtatcacgtattatgcttacgaacttctttttgatggccttagagataagaggctacgcaagaaaaagggtttcacagtggtagccatatgaatctgatgcagtggcgttgcttaaagaactgattgagtttgtttgatttgagaagatagaactcagccaatgctctgagccccatggattgaacttagatttaaattgtgggtgacaagtctatgttcagtgaaatttcatccaagacacaaaaaggttggagttgctctgatctttaaccatgatctattgaaccttatatccggaactatagtcaataacgtctcctggatagttagagaaagaagttttgctgatttgatcccatttcctcttttatttatggtactgctacatgatagagttaaatgttaaccacaggtccacaggcaagggtcatgctgcatatgcatgatctaagtccttctcaacttcgccttcgatgagaatttttcggcagcagtgcggaaagaagccatagttgaggaacacctgacaactgtggctgcataaggtacgtggagctttctgaacattgtggcctttttgttatatgtggttggttagttgcagtcactgagaagtatatagatcttacaatgatcgagtcactttttttattagaactgtttatcattgcaagttcccataatttttctgacaaaatataacaacaaagcgtatcaactatagagcatggagataccgcaaacggttttctttagttcattatcatacagtaatagctacgataagttcatacacaactctcagggaattatttcttactttaaatagttatctaactcttattctattatcctctgagacaatatttaaatccagatgattcatcactaga

SEQ ID NO: 25153 - DNA, 702 bp, Arabidopsis thaliana landsberg
aaaaaccatataattacaaactacttgctacagtttttttgaataagtggttcttgtaaattctttcgtacttttgggtgagccgttcacttgatgaacaaaaaaaatattttcccaagttatttcgtcctgtctcgaaaacaagccttttacattacgggccttgtagcccaattatagcataccatattaatcacacttctggttttttttgctttctttcttcttaatttcttcttgacctgaaatttcattgcatacatactcttatattcatgagttatcagggactaacttatacttgtttcttttctttaaactgaaagcactaagtgaaaacttttgtggccttttctcatcgattaaatatacaataatttcgaaagaaccaacaaaatttgctatgcgatccgcaacttgctaatgataacatagcaagattaggtcgaactcctctccgtacgcttgtaaggtttgcgcaattgtgctcaatgagatccgattagtccgcccatatcttgattaatatttttgttaactataaaattttaataagaccaaggataactccatgcgaatatgtgttcgcatgccatcatttaggacagaccaaagtaaaaagaaaaaaatcaatgtaatgccaatggcttgttatcgacctgtagtaaccgtcaaagaaaataaagcttagcaatattacat

SEQ ID NO: 25154 - DNA, 1431 bp, Arabidopsis thaliana landsberg
tagctgaatggattcgccaactcacaacgatgttcggttttgaattattcttaagaagttgtacttcttcctgaagctgggggatgtgaccctaaaacaaggattcaagaccaaaggaaaccaaagttgttaccaaattggtaacagatttatcgaaaattgcaaaatttaaaagatagagcaataactcacctgagtcttctcctttgaagcactgcttggagcgattaaaacctattatccaaaaaaaaaaatcacaaatcagcagaagaaatcataaattaaaggcaactgaaagtaaccagaactaagaaattcaaaattaacctgtttaattgcaagaagctcgccggaatcgaggttcattcccatgtaaactcttccaaaagcaccgcaaccgattaattcccctttcctccaccgaatcgacggcgcttcttcttttctaggagcaggaaggcctggaggcggcttagaaaagagcccaattcgagagctacggatactagagttaatcttcccgacgaatccgctaagacctccgccgctagtaccatcgtctccggccaaagacgaccggaaaaccaaggatcggcgaaccgatccgagaatatcctgcatttgagaagccgacggtgaatgtgtagagagatcagtgaagattactcatggctgcttcggcttcgtgatgtgtggatttaggaaatttcgaggagggaaagagaaactcgatctgtttttcagaattaaaagcttagtttttgtgatttttccgttgaaaccctttcaataatcctaaatattttacccgttacttaatgggccttcttattgggctttttcagtattggagagcataaagtacttcccacgtgtaaaatatccagatttgtgtcggtcgttgcataatcttgtctttctccaccaaactcaccgacaaaatacagtattttaagtacgtcctatcatgacatcacatgccataagcgtcaagtttcagaaattataacaactaatctttaacaaaatttattcttgatagtctaaaggaaagagtgtttgataactcatcaaaacatttgatatctcaaaagagaaagaaacaaaaggaagagtacatgaaaatgactaaataactaacgagaccaataccaaaggtgaagccattagactcttgttttgtaggagtagctgtagaatagcttccttctggtgtgttggtagtgaggactacaacgatccaatcatcttctttaccaataccaatccctgtaaacttggaatcgttcaaactcattgagtattgtgacttggtgaagtttgtgaggacgaggtttgattctaaacgaggaacacatgcaggcataatcgagccgtctctcgtgtctgagacgttcaagtggcattttgctagaatctgagggtagtttg

SEQ ID NO: 25155 - DNA, 430 bp, Arabidopsis thaliana landsberg
tttctgtttaaagttatctgcgttattgtgatacgagtttgtttttgcgtgtggtggcatcttactcgtggaatgcttgaatttgtcattgactctaagttttctcgatttctgtcaataagttttctggggttgttgtgaatcaagtttgcttttgcgggtgaatttgatagtaaagtgaatgtgaagtgtttgagtgtggtgtgaatgttaagtctcgttggctttactgttgtttcatttaaatctttgttcttgttccttgtgatttgccgcgtaagtattaagatttgcgtcataaatctctcttcttttttcgtcatcttaagattgccattgccactttggatcagttcttatgggtttatgaactccacacagttctatagctgatcttcgcatatgtataatgactcaaagaatggtagcc

SEQ ID NO: 25156 - DNA, 1176 bp, Arabidopsis thaliana landsberg
  unsure (1)..(1176): unsure at all n locations
tgcaataatcatagatcatgaagttgctttggacccacctaagccgtttcaagttattttcttcgttcccttccttgagccacgaactagaaccatcaccaccgcaagttacattagagccaacacaatcttggaccttataattcctataataagccgtgaaaggcgctttggaccagtcagtcttcacgagccctcctcttgtagcccaatcatctccattccataagcttgaatggactctcattgcttgtttcaccgggtaagatacattcattgtcttcatgttcttgaattgtcttatcggtgtaccatccacatagaatctgccaaagatccaactcctaaatattgctatatatatgtttgtttttcatgcagctaatgctaatagatgcatggagataaaaaaaaatgagatttcttacattattgttttagggttccagaggatggagtaagtgtggaaatcaattgtgggatcgaaccagagacgaaactgttgttctctatcacctttaccttgtgtgatcacatatgtgtggactgtgtatggatcaccactcacattccccaagaactcaaagtctatctcatcccacatcgctcctttagacgctacctacccaaaacacacacacatgcacacacattatcttataacatcaatatcatcagaccaaccctgaaattaaggagataggttttaaagattcttacgtagtaagatgtgacagtaccagcagagtttccagcgactagcttgagctccatagagatcttaccgaacaaaaactgnnnnnnnnnnnnnnnnnnagagccagaaactttgtcaagagataatgtaatggcttggccgttttcgagtatctttgctttatcgcctccccatataatgtcaacatcttttctgaaatcacctgccaacactaagcaccacatgaaagaaaaacatgacaaaatagacacaaggatcaggatttgtgagcaacccatgtcctcgttttgggaaatttaatggtcggtcagcattatttataatcgaggaaatatttagagaggatatatagacagtgacatttgggtgagacagaggaatagaaggagaagaaaattntgtgtttaagtgatcatggcaagggttggcttgtgagcaacacatggaaaagtaaagaa

SEQ ID NO: 25157 - DNA, 1089 bp, Arabidopsis thaliana landsberg
caaacgagcacgctgtgtattgaaggtggcagcaatggtggactccttgtcggtgcttgcttaaatcaggcaagtttatatagccaataattcaggacaaaaacgaataatataaagctaataatttgtaattttcgtctcatttagttgccacacttaaacataaattttcaattctgctgcacagagaccggacctttatggttgtgctttggctcatgtgggcgtcatggacatgctacggtttcacaaattcactataggtgagtgagttcagttatctgcaatttgttttgtttgattttttgcttaatgtaattctaacttgaggtgttatgtatgtataggtcatgcctggacatctgattatggttgctctgagaatgaagaggagtttcattggctgataaagtaagtatatgaacttatgatatgatgttgtattgatttgattcccaatgctgatacaaagttacaatctgggtgtgaatgtataaaggtattcgcctctgcataatgtgaagaggccatgggagcaacaaaccgatctgtttgttcagtacccatcaactatgctactgactgctgatcatgacgatagagtcgtcccacttcattcttacaagttgcttgcggttggtctctcaacctcttgtttgcattttgtatcttcctcttcttcttcatcttccattgaaacccgattttgctttcgcagacaatgcaatatgaattaggtttgagtttagagaatagtccacagacgaaccctataattgctcgaatagaagtaaaagccgggcatggagcaggacgtccaacgcaaaagatggtaactatctatacataagacttctctgttaaatgtttttgtacaatataaatgcttggagtgtaatgtttgtgagttgcaacagattgatgaagcggctgatagatattcgttcatggcgaagatggtggatgcttcatggatcgactagaatttactcaaagagattagcttttctttcttgttatgttttagagagagctactatattataattctacagtccctcctcttttataaagaaaatgtacttgagt

SEQ ID NO: 25158 - DNA, 579 bp, Arabidopsis thaliana landsberg
  unsure (1)..(579): unsure at all n locations
gcgatgtatacgaatcttctttttttttctatcaaatattatataatttttgataaaataataaaaaccatgaaaattgaagtatgtgaatatttaaaaataagagattgagacagagaaaagacaagagagtgatttgaagtaaagaatctggagaaacgaggaagttagagaacacccgccaaagaaaacgcactctcaagagtttttaacggatcagcgtttgatcaccacaccgtaccgtacgatgatctaatatttatgcggaaaatactgaattaccctcagctttctgtttattttacggttctatgccatttgttgttcttccgtgatcgttcgtcgaacgtcgtctttggttctaggtttctctccgcgtcggaaaagtaaagagtttgaccgtttctttttttatccaaaacgcgtcgttttaaaggaaatggagatgaaagttttattatttcgtccccgtaatttagtatttattatatttggtagctatactttgagatagatcagaaaagtacgaagaagtcanattgtagaattaaaataaggttcttgaatcttattagaagt

SEQ ID NO: 25159 - DNA, 1569 bp, Arabidopsis thaliana landsberg
cagggattgttcgatgcggagatgggagatttggtttatgaacagatattggatatgggttttgaatttgatttatttgtaggtaatgcacttgtggatatgtattcgagaatgggattgttaactagagcacgacaagtgttcgacgaaatgcctgtaagagatctcgtgtcctggaacagtttgatttctgggtatagttcccatggttactatgaggaagcttgggaaatttatcatgagttgaagaattcgtggattgtaccagattccttcacggtttcaagtgttttgcctgcatttgggaatttgctggttgtcaaacaaggacagggacttcatggttttgctctgaagtcaggtgttaattccgttgtggtggttaacaatggactagttgcaatgtacttgaaatttcgcagaccaacggatgcaagacgagtttttgatgagatggatgttcgagattctgttagttacaatactatgatctgcggatatctcaagttagagatggttgaagaatccgtgaggatgtttttggaaaacttggatcagttcaagcctgatctcttaacagttagttctgttctccgtgcctgcggacacttacgggacttgagcttggcaaagtacatttacaactatatgttgaaagctggatttgttcttgaatctactgttagaaacattctaattgacgtgtatgcaaagtgtggtgacatgatcaccgcatgagatgttttcacagcatggaatgcaaggatactgtttcgtggaactcgataatcagtggatatatacaaagcggagatcttatggaagccatgaaactcttcaagatgatgatgatcatggaagagcagggcgatcacatcacttatttgatgcttatatctgtctccacacgtctagcagacttgaaatttgggaaagggctacactcaaatgggataaaatctggaatttgtatcgatctttctgttagtaatgctttgattgatatgtatgcgaagtgcggggaagtaggagattccttgaagatattcagtagtatgggaactggggatacggtaacatggaacacggttatttcagcatgtgttcgttttggggatttcgcaaccggtttgcaggtaactactcaaatgaggaagagcgaagtggtgcctgatatggctactttcttagttacattgcctatgtgtgcttcacttgctgcaaaacgactaggcaaggagatccattgttgtctgttgaggtttggatatgaatcagagttgcaaatagggaatgcactaattgaaatgtactcaaaatgtggttgtttggagaattcgtctagagtctttgaacgtatgagtagaagagatgttgtgacatggacaggaatgatctatgcatatggaatgtatggcgaaggtgagaaagctcttgaaacttttgtggatatggaaaaatccggtattgttcccgatagtgttgtcttcattgccatcatatatgcttgcagccactctggtttggtagacgaaggcttggcttgctttgagaagatgaaaactcact

SEQ ID NO: 25160 - DNA, 1174 bp, Arabidopsis thaliana landsberg
cttacagtgtactacagctggaaagtggaaaccaataatatatttcatattatttgttttagttttgtttaatcaattgataaaaccaactatacatatttggaaaatgttaatatgtatgaatctctgaactagtagagattttcgttttttacacgttgactattaatgatggatcttaataaccaatatacttcattttctaaattactatttcgtagggcatgcacctacacacgtatatatgaatttttactaaatcgttttattttagttggtatacacattttggcaaaactgtaatagttatgtaacccgcaaatattatagatataaattgaggaaacaaaaaagaattaaaaaactatgagtcgtttcaaatgactaagtgagtcataggaaaacttagtcgcatcaaatttctaattggggcatgagtgtaatcaaagaatacatacacataaaagcaacttactaacaactatgaatcccataactagtatagagttaaattaaggaaacgacgaagaaaaagaatcttgactatgagtacaacgtaacaacttcaaatatttataggaaagaataaagtaatttcagatgactaagtgagtcacgagtgctttacgaacaaaaagaaagttacatccacattgtggaacacgtaaacttaatatttcattttttttcaagtcgtcccacaactataccttcaaatctctagacgtgagatatcaaagctaccttaaaacctgattatgaatttggttatagtacttggtattcttccttttcacattttggtggtttctaagaaaaataaaattcggtttgttatagaacaaaaatagaaggtcatgtagagttattttcatatattcatatctactattgacagaaaagcttgaggaataatttgcgaatataatgttgagtttggtgtttctcgaagctgaacaaacccaagcaacaatatgcacaaggctagaaggtggagagtattatttcaaaaggtcaaaatgttcgttggtctcattatcaaattggtgtagtaattaacgttccatctttggcttcctagattactcttatgtttgaaaaaactgactaaacaaaaccgaaatacttatttttttctttttgctatcttgaaaaggggttaccatgtacaact

SEQ ID NO: 25161 - DNA, 618 bp, Arabidopsis thaliana landsberg
tactaatgtacaagaacacttgaagaagctgcgattagtttgtttgagactttcaatagggctactcgagatccttagttgtgtattattacgagcattggttgttgtttcttcctctgattccgttttttttgtccgtggaaatttgcattaaaatgggggcgggtttattggggctcctccacctcgtatctaataagtgtttttttaaaatcatagttattttatctagaaattaatatttatgaatttatattgtttcagaaaatcacaaaaatatatatttgtcaagaacaaatcaaaagcatatgccaaaatggttagatactgataaaattgtagaatataccattagaataaaagtttgttgatgctatcataatctttggggaaaaaatctaattaaaattgctataaatacctaataaaatattattctcgttatcatttctcatctccagtttcatagtcactaacctaaaagaattaatggaggaaactcggaggaggtttgtcatatcctctgttctaagtgtttctttgatctacttatgtctttcgacatgtcacgtttccgccttcgacttcggtagaaggcagctccgggttaatactgat

SEQ ID NO: 25162 - DNA, 1732 bp, Arabidopsis thaliana landsberg
  unsure (1)..(1732): unsure at all n locations
gtaaattacttcatgttctaatgatgtttatctcctaatttactattcatttatgcgtattcttatggatttttctttcagggtcaacactagattaaaagaaactagccgggtgttgataaatattatgccatagataaaatcatggaattaacaatcaaaatatagttatacaatctgaaacaataaaaaaacaaatataacttaatttattttttatttttaactaaaatcaacaaatttatcagtttataaaaaattaaaattaaaattaccccgtggtaccctacgggtaaatcactacgatttcatgaggttgcaatattaatttatacaaaatttgacttttaaaatatactttatacaattattgaaaggtatacactaaaaatcggttttatatactacaatatcataaatttataactcacaagttattttaaaatatattaatccaagatctaccacaggtcaatccctcgattnttttaatatattacaataagaatattttaaaataataaaaataatatttattttacggaatgaaattatctggtggaacgagttttgattgatattcatacgggacgataatctacgagtaaaatcttaaaattaacaattttaacacaattatacaatcttaaatactaaaaaaacaatatttacaaaacaactataacttaaaaattcgaatttttagttacaaaaaaatcgaccaacggtgtaccgcgaagtaaatttcacattatatcatctaattgatcaaatttcaaacaaaaacaattaatttatatatacatcaaactaacggaagtacacagattttccaaatatctttatattattcagaaaatcaaaacaaatctaacaatctatttactatgcaaaatataaataatataaattaataaaaaatttagctattatataataaataacattatacacatttctatacacattataatttatacactacactatctttcactaaaaatgtattccaaaatatttcttaaaatatgaaaccttgcacgtatgtgcgggtcagaatctagtctctccttacaacatacatgcaatataatattcatactaaataattttcctaagtttcttcaatttatttatcagtttaaaaaaaaaaattaggttctacaaacaataatttttttatttcacaacaatttttatatttttagggattgctggctaaaaaaatatttcgtaaagacatgtaaacttttctttagtggtgaattaatgtctataagatgcataattattttcggccatttgttttacttgattgtgtatttccattttttttttttttgggttttggatatgcattcttagataaagaagaaggatgagattcttatactatgattactaaagagtactaaaaaactttggaagacgatatagtttcttacatagaaacgagtaattatttgtcatttttattaatcttttttcctagaaaaatattttttattataaacctttgcatagtaaaagtaacataagataaaaagaaatatatgttatgtgatgccagctacccaattaaaacctaatactaaattgatccaaacatatgtcaaccttaagtcctttagtcgtttcctatttctctaaaggaaattaactacgtcaaccttagttcctttagtcgtttcctatttctcaatataagaggatgaagttaagagcatagacc

SEQ ID NO: 25163 - DNA, 949 bp, Arabidopsis thaliana landsberg
gagtcagaacatcatagttcaatgattcaaagcataaatgaaagtagcatcgattataagagatgcaacctgaaacataacgagtgtttggggatgaagatgttacaagtgcaagtgttagtatgagaaacaaaagaagacgagttccaaaactcatctcagttttgtttaagaggtatgtatatgtatgtatgagtcgtatatatttatagaaatgatgattcaaaatcgattctggttgtggttatccaattgcagtttgttttttcacgtgtacaagagactaaaacattaaagcctctttgttgttgttgttgttgttgttgttgttgtgtgtgtgtgtgtgtgtgtgttaaagaagagtgttagtttggcagctggggtattaatggttgcaagacaaccaaggaaatagtgacatgtggcttagaattgtccccacatttgttcacatcaaggggtgccccatgcctgaaattctaccctcaatcccagatctataccatatgctatgaaaaatacgatacctgaagttcatgggattatcagattattgttccggatttctatatggatccacatttgtctattaccctctccgtgttttttttttgatgatgttggaggtttttgcacatcaattaaaaagtttatttaacttttgtttagttctaaacgaaaataatatttattgtctatctaaacatgatttaacaaatgataaaacaatatgcaaaatataaatagccaaagtcaatatgaaatctaattaattttgcattgaaatttgaaatatcatctaaattaaaaaaacaatttattctaaaacatcaactaaaataaatctcgagtacatagaaaagtatggtatatttttgaatatgtctttcataaatcttttatttctattttattaaaaattaaaaagcagaaaatacacaaatgtttc

SEQ ID NO: 25164 - DNA, 1198 bp, Arabidopsis thaliana landsberg
  unsure (1)..(1198): unsure at all n locations
ttacaaagcaaagagttttcagcattacaaaactaacatccaagtttccaaaattccccaaacgcagaaattgtatgttctcgtgataatcacaattctagtaaatcaagtggattctcgagtcagaaatccagaatttcaacacgaaaatcatccacacccgaaatttataccgaataacatcgaaatttccataaaatgcaagacctataaagagaagaaaaacgtacttctccggagcagcgaaacacgacggtgatggcggagcgcaacaacagcattcctcatcggctaacaacacgaacgagacgaagatctattcagtcgaacagcaagcgaaaatcccatagtccgttagattcaccactcgttagcttttatgcacacaaactgttcgataaaatgcgtaaacgagattgtccgtccgaagaagacgaagaaagttttgagagtctctttctccacgtaagagccgaagagagcaaccgagcaaaagacaccgagaattagtcgccacgtccatgacacgtggcaaattccgatggagtcggcgttactgttactaagcgggatcaggcccattaaagcttaggcccatattttcaacgtaactggattaagtaataactttacttctgttcccaaacagtactgcaaaaaatttcaaatcggagaagggataaatcgccgacgactcatttcttctctcacatagtcatactaataccttagtcgtcgtctctggcagagaaaattcggattcgattgagagatggagaactctgtggatctagtaccggctttggttgttttgctcgccgcagctcatgtcatcgccttggtacttctcgtgatcttataattttttttctctttctctttttatatgttctgatctttcgaatggtttatatcttggggctcgcagggttactggatttacagattggccactgatcgtcgagctcagagtcagagaggcaaattccactgaagaaacattcgaatcggttcgtgatctgaactacggtggtccagaaatttcaacagttggtggattttgcttccgatctgatatttgcgattaggtgggggttttgtgatcattgatttagtcgcttatgaggatttcggaaatgtttgcttggaattccgcctaactagacgtgattntgaagatactggttagaatggatca

SEQ ID NO: 25165 - DNA, 1445 bp, Arabidopsis thaliana landsberg
  unsure (1)..(1445): unsure at all n locations
ttaaaaagcaaatccattttaccatcaaaatcgattcctttagtaatcgcaatgaataattaaaccatgagaattaaactgtagaatattggaaaataaaaactaatcaatcaattttgacgaatgaatttttttttccaaagacaaggttggatgtcgcaagcctctttcgtatagggttcttttcttggttgcccttttcaatagaatataactaatttctagattctatatattacagattatgattattcaatatgcaaacatataaataggtgagaaagatataatggaagatgtcttggtttgttattatgcaatatatgtggtcaaattgatattggaaagtaatgaacataagctcaaaatgaatataaagatagagaaagtataaacatgattatgtgaaatcgatcaatgtttttgagcatcaattccccatttcagtcaagacaaaacaaaagatagtcggattaataaatccatgattttacaagttctcatactataattaaatcctttagagataaaaaaatatatctacatgcatgtattatttggcagtagaaagagagattatgttctgatcaaaaactcttgcacaatatatgcgatgaaaggaaaaactttatagaagatgtgataatggtgactacaacatttcatctatttatttaatttatgccttcgtgcacaaatatttaaatgtatattgtaaaaacaaaatctaaggcaagacaatctattttaataaactcgacattattaaaatgatgtaatagttacgctcgataaagcaattttatgtttatatttatttgtatggatgagagggaaaataaaggaaatgaaatgtgtctcttaaattatagttttaaaataataatgatatagataattaagtatattaaaactaaataatggtattaagataaaacgagagaaatcacatgtcacaaagagatgtcatctgtccacaaagacacaaactttctaatcaaaaaaaaaaaaactcaaagtcttattaagaaaagagagctgctaatttatgtaaaaatctttctcctttccatactaaaatccaagctttactctaggcaatgaagtgtatggttgatacagacaactaataagtagtttttttaacagactgttcagatttggtgaagatagtatcttttccaactaaatgatcagcattttcaacgtatttaaatgagtttcagagcgacaaggaagagttcacttctttttttatctttaattctcgtgatgaaatgtcaaggcggataataagtttgtactgaaccgtttcatatcacttatataaacaatatttttcagattctgttcgtttgagttctatataaaatcgacacaaaanaaaaaagtccaaaatgcttatttgccatgtttttaaatcaggtctagggtggttggatcaa

SEQ ID NO: 25166 - DNA, 987 bp, Arabidopsis thaliana landsberg
aatagttgttcgcgagcaaatctgacaagatggtctaaaggttatgtcattggaaatataggttgaagacagtgaacttgctgatgtggcagctgtaagtgcgggtaataaccacgaagttggaagtatgattgctgaagcaatgagcaaagtgggcaggaagggtgtggtgaccctggaggagggaaaaagcgctgagaacaacctttatgttgtggaaggaatgcaatttgaccgtggttatatctccccatactttgtgacagacagtgagaaaatgtctgttgagtatgacaattgcaaggtaatttttctttattctgagctaccaaaatgatattgtgatgcaaatagcctaacaagtttctactgtgcaggtgcttcttgttgacaagaaagtaaccaatgcaagggatcttgttggggttctagaggatgcgattagaggcggatacccgcttttgatcattgctgaagatattgagcaagatctcattttttactcttgttgttaacaagcttggtggggcgataaaagttgctgctttgaaagctcctggatttggagagaggaaaagccagtaccttgatgacattgctgctcttacaggaggttagaccaatatactaagtgttctttacattattgcttctatattaaaaaaaagcatgtttagtttctcaagttgctgtgtttgtttttctctttgtagctactgtgattagggaagaagttggacttcagttggagaaagttggaccataagttttgggtaatgctggtaaagtggttcttacaaaagatactacaacgatagttggtgatggaagtactgaagaagttgtgaagaatagagttgaacacatcaagaatcttatcgaggtacatttcaaaaaacattgaaatgtcccaattaattggttttatgttacggtgattaagtctttgggtttgtgtaggctgctgaacaagactattgaaaggaa

SEQ ID NO: 25167 - DNA, 896 bp, Arabidopsis thaliana landsberg
ggcgaatctctaacttatctgtattgatttaacatgcatgaaatttctattggttttctgatgtcctgggttagctagcattgtttaatcgtacggacactggcctattcgaagaagcatatgttagtacttagtacataatgaaaacagacagagatgggtctttacgttcccagcaacgtgtgctgggtacgaatcactgtctacgtatatacactcatacacatgcatatatatggaaattaaataagtacatatattacacgtataatataaatgaactttgtttaccaatggtcattatattatattgtaacgtaacgtcatcatgtggataaaaatcatataatttcggatgatctaagaattatgtttatgatccatgagaccaaactgattcttcggtccatcgttctatagtaaaacatatttagataaataatgtaataaaaaattagatgtagtttgatatggaagtaatcacattaatcagcccacaaattttgaatctttgtctagctatatatagttaacccaaaccggtctatcagtagcccgacctgattggacatttttcttttgtagcttcggccgatcctacttctgattttattttattattatatcgtttggtttatgattttattctctcgggtgatgtcaactcaaaagtatacatgttgaccaaataatataatttgatatttaattttggacgaaagaactgtgaatagttccacggcagtgccgtataacaaggcacctattacacttttaggttgtcatattgagatgcttgagactttgagtgaagattggaatataagattttgatcaagaaacatatataaaacgtactattctgtatcttatttgaaaataatatgcattttctt

SEQ ID NO: 25168 - DNA, 3783 bp, Arabidopsis thaliana landsberg
gcttctgttgcgagacttgtgaagaacttgaagtagcgctgaatttgttgagctccaagctgctttgtctggatgggcgtcttatacaactcaataatcccttcatagtcttgaacattctgcaaaccatgagaatatcatagaaaacactgtcaaacacaagaaacaaaccaagcaagcctaggaagagccaaaacttaatcgccagtatccattttcagaccgattatacacaaattcgaagcataagagaccaaagagacgattcgggaacacaatcaacagctaaatcaaacagagaatgcctaatttcaaatccaggacaaaaacgaaaccctaggtgaaatagagacgaacctgagacttgtccgtggactcgctcaagcgctcgtcgaactcataaagcttctcgatatgtttagcatcttcggcatactgttctgacatttcggggagctttagataaagctgagagggagaaaatctaagaaaatgagtatttatactaatatacacagttttagttgcaggaaacagaatctatcacatgattcacgtttctgtacaataatgaaaaaaacttcgggagaaagacgaagaagtgaaagaaggagaaaaagaagatgagaccgtacatggcgattttggaagagtgtagaaggttgatatgttctctcgcagagcagtccaagactccaagggtttctgggtttatcgaaggagaaagagcaacctttatgccctgactttaaacattgtcgttttgtgtcaaatttgagttttgaaaacaacacccttatttatcatttctctcaactttgtcccaaaaatttattatagagcgaaccaatcaaacactagttcaatgtctctttcgttgatttctggttcgattcatatctgcgctgagcttcgtctccgtcaatctccgtcgtgtttaacaatctcttcttcgcggccaaaatttctctcttcccgtagtaagcagttctctctcgaccattttcctcagatctcacgtccgatcaaagtcatcgcgagaagcgccatggagacgacggcggagacaattaccggcggtgttcccaacaacacgatgaagttattgttcgttgagatgggtgtcggttacgatcagcacggttacgtcagatctttagttttcttactctcaaaatttgcgtcttcatcgatcataccgatgtgagaattgagatcgaatcttgaaaatgttgaaaaaattgaaacaggcaagatgtgacatctgcggcgatgaaggcttgtaagaatgcaatttcttcgaattcgattcctgcttttaggaggggtaccaaattgaatatcatcatcttggctcaacaatgcaagtaattatctagcaatttcgaacttttaacttgatacttagtggcgttgaatgtgttggtgaaggttcgattcctggagtttcatttggagaaatgaagttgcagattaagcttggagtgcctcattctcttcaccagcagctggatttggacaaggttaagtctatcttcccatagtaagttcctcaagtaacctctatcatagagtttaaatttggcttggtactagatataagttgttttgaagttggattaagattggtgttgtgaaaaagtagaaagaaacaaccattaccgtttacttatttgatcatgtatagtgtttgtgggaaacatctctcattttgttacttagtcttggacaacatctcttgagtcagctttatctaccatgttttcacaatcattcgttccttttttgtttgaagtgggaagattgtgaatgtagaggtggtggatggaggactgatttgctcaagcggtgttctagtcgaagaaatgggtgatacaaatgaagattgctacatagtgaatgtcgcagtctatgtcggttactagtctatcgttcttgtatggtcgactcgacgccgggtttaacaatgtcaccctcgtcgatagaagagaaaaacaaaaacaaatgcagtcacttttagttgtatattttgatttcagaaccattttggtttgtaggcgtgcagcgtttggtgcggtctagaaataatcacgtttgcctcaaatctctaaagtccgcgggaaagttttccctccttaaacctagaaatagctcttaagcataagcaaaacatacatgtgaaacaaaaaaaaaaatgcagaggaaaatgaaagggaaaaagaaaaacattggttcgattttcgaagattgcaatgtatctgcgtctcaggagatttatctacagcgatgcggttttgccgtaccaggtcaaccacctccagattccgatccctccgtcggagtctcaccgccaccgttaaacgacggaattccaaatcagcgttcatccggtgattcggatacggataaggatagtgtaatcggctcgggtaacgatgcggtggagagtcaggcgattcgatgcgtcactccggaggaaagcgtggacaccgttgatttagaggaagatgttgcagatccgacggttgaggtttcggcggagaagcagagtgatgttcctctggaatctgcagcgaagaaggaaggtggaggaaagaaacttaagattcctttaagggaagttgtgaaagccatagttatgaattcgagaaacacagaggaagaagaagacaaagagattgagaagatgagctgtgtgcaaatcctcttgcaaaagggattcaaattttaaggtgatttcacttgaaattttcatgatttttggttcttcatgttggctttttgtgttttatctagggttcttcaaggtcaaattttctgtgatagtagacgaatatgggattgtaaatggtgttgttattagtacaatttgaatatcaaatcagagaaattgttgtttatgagtgtgtcaaaatgcttgtttcataggtgatacagaacagcttttgctcttaaatcaagttaagcaaagagttaccaaaccaatgtgttattttatactgagaatgtctcttttgttataaatctgttttctatagcatcacgcaacactagaagatttacgaatgtcatttacagaataaaggtgttatgcactttctttttagtatcttaacacttcacatcgtaagagctgcgtagagaagttggttccatgtatcaggcaaccctgggaggcaccaatggctgcaatctgttcctccatcgccaccataagaagaaggatgagcatcttttctcaactgagacaaagtcgtgatatcgagcaaggtcactggctttttcatcgaactcaacactttcgacactactcctgaggatggaggctgaccacttgggtaacttgatccacccaacggctgcatttgcccactacaagtcttcctcggctcgttccattcccttcccctgttacccgaaaggaagacattagtcgatataggtttgtgtttgaatgacgtaattagttctcaattgtttgtctgtgtttgaaacaatcgaaacggaaatggacttactcgtaatgagtgggagaaatgccttggaagaaaactcgagttttggccgtatcgacgttttgatcaacccatcgagcccaagtactgagtcctttgtagaaagcgtcaagacggttcatgtctctcaccaaagacgacccatctctaatataatcccatttaaaccccaccaatttaatttaagagcccccccttttgggtatatattgtttatataaaaggtacggacccttgagattggaatttgtgagtcgaccaatgcccc

SEQ ID NO: 25169 - DNA, 728 bp, Arabidopsis thaliana landsberg
  unsure (1)..(728): unsure at all n locations
gtggcatagacatgtaaaagccaaaggaagagatctgattctaaatctgttgactgatttttttcgatttggacagtgttgtgaggaagatggggaagaaggggcacgtgaaggtttaggaacttgaaacggaagagtttcgattttattctataataactctttgttactgattttttttttaaaaattggttttcgactctccctaggcagtgagtgatactcgacctaaaaacaattattttttctgatttaaaaaagagtatatgaatgagagtaagaacaatatttttgcactccttgaaattaaggaaattgagaaagtatatgaatgtgagtaaagagcaaatgggaatatagaagcaaaaagaaaagtcaaaaagtgacgacagacattgtagacaaatggaaaaaaatagttcagattaaagtgaaagctttattttgtcaataatggaaatggatgcttatatcagtctttgaattattactagaaaatctaaggaacttctacttttaacaattttatgcagaaatggttggtgaagaagcagaagagccaaagatcaacaactttataatcaaattaaactcaactcgtttcaagggtgttttgagtgggcctaatcctgtttagtggagtaaaatgatcaagagctnttgagtgatagaatatttaaacccagttttctttatttgtttggtcgatgggtgcctgaatttttttt

SEQ ID NO: 25170 - DNA, 915 bp, Arabidopsis thaliana landsberg
acctcttgtttgtcttgaccaatcatacatcttattgttcatacgagtgaacgagtgcttccacttatgtaaatagacatgtgagacttcttcgtaggttgacatcacctatagttggatattttcttgttggtaagtttttagatagccaaaatactattaaacattcataagcaagtgaaaatatttatttgaacgatttaactaaaatgttgttatgtatttatacaaacatatatatttttttatacatatacatgttattttactaaataacgtttttgtccaaagttttttttactgaataacgtgtaatcaaataaaataataaaagaacaagggatctcttcttgataaaatattttgatttcatataaaagtaggtgatatctataaaataaatttacaaaatgttttattttgtgaatgaacttcagagtaaaattgtaaagttaaaagtaattttacaaatttaaataattagtttagttatttagcagatacatatagtcagtctgctatcatagcatttaggttgaagcctttaagtttatcttgttcaattttttatataatatatatatatatatttttaatctaggtggtaaacaagctttatcacttaaaaggttaaaatgagtggggcaataatagatgtagctcataagttctatgttgaaaaagattaataccaaaaatcaatcattttcttataatcaaccatggagtagaaaagcaattacacaaatagagtaacttctaaaatatttacagctttttaggtagtcaattactattagtactatttcttaattctctcaataaaataaaataataaaaaatcatatagatgatcccaatatccccaatcttccactataattgaacaaaaaagactcctttttaaattcaacc

SEQ ID NO: 25171 - DNA, 675 bp, Arabidopsis thaliana landsberg
  unsure (1)..(675): unsure at all n locations
ttcgatttaaatttaaatatttaacttctatgtattcataccggtactggtgaaagatgccgaaggagttttcggggtgcccggcggtgttgaagacgaattagtaccttcgttaacacaaaatattgtcgcattaattaggctagatatataagaaataaaagcggcgtgacattaggctaaattaagaaactaattaaaacgacgtcgtagtatggtttattcaccggcgctggttttgcatagtgacacgtcagctttggcgccacaagccttggggagatcgagagcgttttctttagtgnnnnnnnnnnnnnnnnnnnnnnnnnnnnngttaaagacagcgcagagacacgtggcgtctttggctacgatctcattcaacggcatgcaacacgtcgccggcggcggagtcgccaagtgaagatacggctgacacggcatcagtttctgaatacacggcagtgagtgtgcgtctcctcctgcaccgccgctcggtggtgaagtcatctgagcattagacgacgtaacgtatcagaatacaagaacgacggcgacggctaatctaacagcctacatttcaaaacgttaaatatctcttagtattatgtactttctatctttagttgattgtgaagatgtgaatgttgtaaaacatgcgtgtggtttatatat

SEQ ID NO: 25172 - DNA, 2188 bp, Arabidopsis thaliana landsberg
tatcaaagaaatgggtgaaaatgtaggtttgtttttgttaatggtacctttgactatgtatattaactatgtgtctttaagaataagtgagttgcctaatactaaacatgtgtgtatcgaaacagaagagaatccaaccatactgaaatattttaaactgaattcgaacaaaagttatatttgtctaatagttgagattggtaaacaaaatttttgcggtttgcatgagtgagcaaagtcaaatttccaattagtatgatattgtctgttttgatctggattttttccaacaaatttatactagtttgagttacactgaacatgttaaaactgttataaaaacacttcgatgtgtaatttggatcaatgattgattattgattattttattttctatttaaaacacgacatgaaaaaagacaaaaagaaaaaaaaaaatcggttgaacatttcctaaaaccaaaaaaaaaaaaaaaactgaacagatctagaaaaactagatggccatcatgttgtatttcagatttttatctctatgatgcaattattaaacaacacaactggttaattcctttcaggctaagagatcagaagctcagggcatatagcactaggcagaacaggacacgaacccacggcgggttttgccccaaaggttttgcctctgcagattccgttaactaccgctttggcgcattccgctgctgattcgatggtcacaacttgcgaccagtcttgtttctgcaaaagagacttcagtcataaaacttggacagactaaaatgaaaaatgatgatagtaaaatacctcagctaaaaggtccggattagtatttccgttttcgattagaccaggaaacacgattgtcacaccaacttctggatgaagctcgatcctaagagtctcgtagaagtttatcatagctgctttgcttgcctgaaacaaatgttacattcattatgttaatatgttacgcttggttaatttagagaacaagagaaagaaaaagaagaagaagcatttacagcatatatgctcatccttggtactccagaccatccagcaggtgatgcaaccgctatgatctttccttttgttttcttgagatgcggtatagcgaaatgtgtcgcgtaaaccggtccccaaaagttagtgttctgcaaattttgccaaggttcatatattgtaaaaaagacttcactatgaattaaatctaaaaatgtataccacaatgggaagaacatccgaaatttcagaatagtcctcgaaaaatttggcctccgcaattccagcattgttcaccaagtgatccactgatataaattttgttatattttttatgttctttaagcaagtagcaatattagttattcgaataatagtgactaactcacatcttccaaaccgagagatggtttcttgaacaaaacgtttacagtctttgatgactgagacatcaccgcgtaccacagcaacgtctggtgaaccaagcttcctgcaccggtcagccaccacctggagacgatcctctctccgagctactagagtcaagtatgctcctctacgagcatactcatacgctaggtgctacaccattaaatcaacttcaaattgcttttgttttttaccaaataactaaccaatttataaaaaatagaccaagcttttctaggattacaaacaaactaacctcgccaattcctgaggaagatccggtgatgatgacgacttttccgttgactttctcggactctttgcatccccttatgaactggaggagcttgaagaatattgaaaatggcatgaacactaaaagaaacgaaaccgtgacaataggaagaaggatgttaaagatcttgttgattaaagccatatccttgactttgtgattctgcttcaccagaggctaagctacaatttatatactcttgagctttcttctgttcagatgtcactgtcatagactttagtatttaagattaaggataagagaatctccaaatcattatttggtatcttttgtgtatgtcctcatccagcagatgtgttaatcaaatatttttctcaactggtggagaagtgtccactttcgtctatagtggtgtgaagcctccctcatcaacaaataatgtcagtaagcaatgaaccataccaaaactcactatagaccgtcaccctttgctgtttg

SEQ ID NO: 25173 - DNA, 889 bp, Arabidopsis thaliana landsberg
attaaatctctttctttatcctttggtggcttgaggtttttgctgttcttgaacaacattctcttcttgatacagcaactttcttctcttgagaccatacccattgtactgatatatgatgctgtatagacattgcttcaatctgagcacatcgaaatcctcaatgaaccttaaatctctttgtctccatttcaaacccgcacacttctggtattcctcgagaaccgatgacaagcaccagttctgcactttcctcaagcatcccacaagacaacctgtcctatgctgcaatgagccagaagaaacgcaccattggactcaaatcactcttaacttaacctaaagcttgttaaaccggaagagaagggtttggtttggttacctttccgcgcttacagtggataagaattggatgatttcgaacatctgttagcaaaaacagaagaattaatgagacagctaaaagagaaaagccgacaacacatcaaagagtctcttctggttccttaccaactaaaactttgagagcatccaaaactgtatctttcggcataggagttggaggatcctgcatatcgtaaaagatccgatataagacatcaaggacaattgcatttctttgacaacaagcaacaagaaagaagcaaaacgcaccgttttgccttcgattccaaattggtaaagcttaatgttgttagcctcaagaaacttgagattctcctctgggtatggttcaggacacagataactgttttgatgaatcaaaaaacgattaattactccaatcataatcaattatcaaacagtataattgaataacccagaagattaataaaggatcttacatgatggaacgaagatttagggttttaaggaaactgaaattttc

SEQ ID NO: 25174 - DNA, 638 bp, Arabidopsis thaliana landsberg
agaaataaataatgaaattttctaacctattgatgaagaatttcaataaagttgatgattagttctttagaatctaataaagtttcccaaccaatctctttactttgatgaaacttttcatgactttatttggtaaagaaaaatgttggtaagtgatatttttaacatattatatatatattaattgttttattgagttttttattcagatcaaatcatttttagtgtaaataagttttttttaggattttagacttatgaaactaaagtgagcattataaaaacgagataggccaatatacaccttaactttgattagaaacttcactatatacaatcacgcgtatatatctgtatgataaacattttagttaataaattcaaaaatggaacaaaaaatcaatgcataattttagtatctacaaaaacattaggtataaaaccgttcagcgaagcaaataaaatatatatccttagttcttcttgtcacggccacacttgacttgtaccgcaagcttcttctcgactttgggacatgaatccttttttgtcttgctcgaacgtactcttgttcaccggaatcacacactctgctttacccaaacagtactgaaaaaaggaaaaagaacccggaatca

SEQ ID NO: 25175 - DNA, 263 bp, Arabidopsis thaliana landsberg
aaaatttcgattctttttgaaatgggtcgaaggaaaattagctaaagttttagcctttacctgattcaggagaaattggtaatagataatggtgaaacttcatctgcatcgaaggaagtggaatcatcatcatctgttgctgactcttcttcttcttcttcgggattccctgaatctcccaataaggatatcaatagaagagttgcggctgttactgtaatcgcggctttgtcgttatttgtatcgacaaggctcgattttgg

SEQ ID NO: 25176 - DNA, 537 bp, Arabidopsis thaliana landsberg
caagcagaccgaggcttatcctggcagattaatatttgtttttgttgaccgtcggtgtcgttggagggtttatgctgtttcagcaggtcatgaatcgaagaactttgaagtcaggaccttaactctgacacacacttgcaatattgcatcacgctcgcagtatgggaaacttgcaacatctaaggtcatcgcgaaagtgttataggggaagtatgcaaacgggatgcctggaccacgaggtgtagacataccggacattgtgctagctgagctgaaagtttcagtaacctatatgaaggcttggtatgcgaaggaagttgcgataatgaggtgtagaggttgcgacgaggatagctacaaactattagctgtctatatgcattcgcttcagcaagcaaatccagggacaaggtataagttagagtacacagaagcggttgctggcagcaatcagtttaagtatctgttctttgcaataggagcttgggtgggagcaattcagtatattaatataaacccgcccctttatggtacatg

SEQ ID NO: 25177 - DNA, 947 bp, Arabidopsis thaliana landsberg
atggagaatggtgtgttgactgttactgtgcctaaggctgagacatagaaggctgatgttaagtctattcagatctctggttgagtaatgggttcgagttttatcatcggagttgcttgtgtttttgtcatggttatggttcatgttttacttgagtgtgtgagtactctatctaaattataataatatccgattgagctatgaattatgatgtatcggatacatttgatcctaatgaagtatggaataaataataattattaacctttgtctaaattcaaaagaagtttaaccgacgagatgatttcgcttagagttcgatttcggtttaactaaaccaaatcaaccgataccgtgaatcaagacggaatcaaacccaaaaactgaaaaggttcacattatataaatgttatattttgatttagattattacatcatttctttcaaaatgattaacattttgtttgataactgaatatttcttctgttttacaatgtcattcatttcaaatgtttggcagacaatgaattggccaaaaaatagactcttcaaaacaaaaaaagttgtgtgttttacaaatacagtcgatacatctaatctctcagttataagctgttcaacatatgaatcttaaaatatagattgtagaacgtaattatttgaagatatgttatttcttggacggctaattgtctggacattagaagctctaagtgttggtcaaatatcttgaaacgataagacgaatgacgttggcgatgacgtgcatacctaagaatataaatcagtccttttctggtgtgatcttcaatatatccgtggatgcagagacaaagacaaagctaaatggtcctttcatttatattgtttatttcaccacccataacttcatttgtgcataggcatatagtaaatctcaagtaatccagcaagtaaaccaaactac

SEQ ID NO: 25178 - DNA, 1667 bp, Arabidopsis thaliana landsberg
ttttaggattctgctccatcatctttttatttgcctgatcatattattgttttgcctacattaacttatgtgtatatacctgtctctatatttttatccttattcgattctacttggagggaatgaatctatgtgaaaaaaaaggaaacacaagtttgaaagagataatgaactagacatgagtggagtagaacgaagagagttacaaatttgacaatgagtttgggttttctcttttctttttcttctctcctttttgtttcaaatctaatcttgtaattttctttttcataactttttcttagctttatttatttattccaaaacactttaagacattccaattcttgcttataccaaaagtggctaaaaaccgttaaatctccatcttgttactgtccccaattttctgataattaatatgaatccaacaaaaaatataagaccaatgacatactagcaacatgctcctgtcatgtttcaacccaagcttgtagcatctttatcataagtgatatggttatatattcacttatagtacattggattcacttttaattgttcgagctttatatatgaaccaaacacatgtcttccaactatagttttggtgtgaattgaatcagtgggaatattagtgttaacctaatcacgttatctatcaagcatgtgcttataactttgataacacctacatatcttttacagcgatggatgtctatctatcgaatttgtacgctttgaatatgtaaatatatacacactttttatataatgtgtgaatatatatggaaactaaaattaagataatagaggaagagccgtacagaaatggaagaaagataagtgaaaaagagagaataattaaaaggagaagattcaatatcatgcggcaaagtttctaaacgattttggagtgtctatgagtcatccctctttgtgctctaatgtaaacttcccaatcattacccacactcactttatctctacatagaatagaaatactccctatttatacatatataaacatcctaaacactgtatataaggatgtgtatcgtaagaaaaagaaaagggggcattattgatcattaaaggtatggtgtataagaagcaatgtaaagttttgtttttctccatgcgtgatctcaacaaatatctacgtcgtcttctttaattgttaaatgggttgggttaaatatctacatttgtcccacacgaacatatgacacaagaaataacgaaagtaaaacagaaaaagaaggtatattttatgtatagtgaaattcagagcagtgaatgtttcgtacttcagaaatgggtaagatttattattaaaaaaccttaacagagaaaaataaaataaaaggtatagaaaaagggtttactcgtgtcactgccttgcatgtcaagtactacgatttctaagaattttaatcattaaggatagtcgttgatttaataattacaaaattctaaaagaacttggagaaagagaaagagagcactaattcatacatgtggagccaagtcagccaagtaagaaaaaaacataattctatggcttgctatgatcattaagttaaaattgttttagtttaacgacggttttttggtctccaatcataattagctggtattattttggtcttttttctttgaataat

SEQ ID NO: 25179 - DNA, 1349 bp, Arabidopsis thaliana landsberg
tattgaggaatcctgtagttaccaattgcactatcatgagttccctttatactcactgtcgatgtcacggacaatctgttcttctccacctcgaatcgagagtcgtttgtagtgtaagccagaagagtgaggagaatcagccatggaaggtaactcagaagttgcttcatctagaagatctccgccacaacgaagagcagattcgaaggacaagttggatgatcaaagatgatatgatagaatttgaaatatattctcggaaggtaagagacttgaagagtgttttccagagaaaataaatctggtttttcttgttgagcggtttgggtgtgactgggaaggctatagatgacccattaaagtcaaacattattttttatataatgctatcaagccacgtgttgcacgggttaaatttaaaaccagtaaaattttttttaacaattagttgatatcagaaataaattcatgaggaattttaatattttggttacagattgaaaaagagcaaagagaagatatatttatcaatctatcgatttactttgttatttttaagtttttgttctaaaaatatattcttagttttttaaatacggaaatatatttaattctagagtatgtaatactttagaattatccacgaaatttgttttaatactgttctgaaataatgtttttttaaaaaggtgtaaattgatgtaatacacattcatggaatgcatgtgaggatcgaaatgaagatcttattgtgatgatatatacttttctttttgcctcttttccatgtgacaaaacaattaatttaattattaataataaaatatgttattgaaaattttagcattagttaatttttctgtgaatttataattagaatgttgtcaaaggagattaaagattagaatatagatatctaatttacaaaaaaagtaaaaaaaaaatatagtttcaaaacatgttgttttgaaacctacccaatgaaaattataaccaattgagaaaataagttttggtgaaagttttggattttagtaacaattgagcttgaatggagtatttttgttaaaagactttgaatagagttgttatcctaaaaattttaaaattgttaatgcataaaaaaagaagacaattatcccaaaagcaagttcataatcaactttgcatatcctaaacatagatacataaacatgcaatctaagagcaacaccaatggtaagagaccattaggggctcttcatatttttttaatcataattttgaaattgaaaagtttaaaagatatttttggttctttaattttttgtttaagatcttgtcgcgtaggtcttcttagatactctttg

SEQ ID NO: 25180 - DNA, 1236 bp, Arabidopsis thaliana landsberg
tcgcccgatctgtcgcatattcgcaaaattttcgtttcgtaacaaataaaaactagtttttaaaattttatttttgtttcacaaaattatcgatttataaacataaattttatttgaaaatgttagtagatggagcttacgaacagaagtccagtgtcgtccaagattccagcagcaccagaagcatagttgattccattgagaattgtgttagcctcagtgtttggttcaagatatggtggtggtggtgattttgctcctaaggcttcacctaatgttttaatttattccaataaaactatatattagtctatcttatatttatgagtaatgattatgtagtatgtgtaaaacaaataaacacagagtggcatcatcttaaactaagaaaaacattgagtgattgaagagagctaggaccaattcagaaacggtttactaaattatgaaaattaaatagaactccttaccaaactccatgaatgttgcatttatggaatttgcctttgacttctctcacattacaaaattttaattactcttaactaatttattggtccaatccaattcagttatgactttacatgctttaagaagagtcaacttatcaattagttgacttcaagtgtgtacaagggttttgttctgttagatactttagagaattaaattcatattattataagtttataactaaccgttaaatcaagcacatttatttctaattacgtagtactcgctttcactttttctgcatgaataaactaaggcagggcaatatatatataacaaatactaattattgttattattttttgaaaaaacatatgcgatgttttacatctattacttgtgattgttttttttgaatattgtatcagatatatatatggtcgaatatctaacaagctctaaagtgaatataaacgaatataaaaaaaaaataagatctatgttctatgtcgcctctaaaataaacatattacatacccacaatatcggaaatggttcgaccattagtgaatcttcccgtgggttggccgttggaaggtgcaaaatcgatgccataaggcgaagaatcagcttttgacaatgtgaagatatagttgttgtttccaacatctaccaatgagtctccaaatatgaagtttgtgaacgattgagcagcctgaaaatgtgatagccaaaggagaagaaaagtgcaattgaaaggcttgagaggacatctataagtaa

SEQ ID NO: 25181 - DNA, 1765 bp, Arabidopsis thaliana landsberg
  unsure (1)..(1765): unsure at all n locations
aacaagacaatccaggggtcaagcatgtacatactgaaattaccaatcctctcagcatccacagtcatgaaatataaaatatccacacgtgtgagtccttgctttgactgacaaaaaagggtcagacccttttcatatttcatcacaaacaaagagtgatatcatcctaaagcaaactttatgaagcataaagaaccaatgtctatgtgaaaggcactcagcaatgttagcagcaaagaaagtaatgagtagcacatatccttaatggttatactgcaaacgtccattaaggtattgcacgaaagtatcaatgagtgttggcacaacatataatgcagcggtgtagatgaaagcaaaaaaagactgtcactaaaatatcccaatgagccgtaaaatacaaggcttttataagcttgaacgtggtaaaaaacacctctctcgcccccatctggtgattcaagcataaaaaaacttaggagctatttcgactacgctgtcagtatcatgaagctgcggaacatcttctagatcaagggttttcttgtttccaatgtctattaatggactcatccatgagaaagtcaaaagactgagaatgccagctctcgagtaaggagtagcctcaccactcccattggttttatttaactcaacgctgtcatcaccaccaacacgagaatcaccaccgttcaacagaggctcttccaaaactccattgctgttgcttctatctttcttgaggacagccacgtaaccgagaaacacagcagcaataaaagcgactatatcgaacactagaaggtgaacaggtacggtttcacgtctctcgtacatcacaaaatctaccacaagagagtagcaagagaccactagatagaaaaccaaccatagcctaagtaaaaagggagcctttttatgctcacaatctctgcagcgatgcaaacaaatcgacaaaaccccccaagaagccattcccaaaagaaacccaagggaggaaactagctgttcattatctaaccagccactctcgtaccaatagaaaccactcaacgacatcaacacgagattaagcagagacagagctgaactacaaaacagagctgacttaaacccaaaatccctcctatctttcaaactctccgtaacgccgctatcccccctaattttcttacgaacccatgagaaaaacaggaccagcaacaaaaccgagtgtaagaaaccagaaagccatctcaggaaaagaggtttcagaaggaaagacctagaatccagaggcaaaatagattccgaaaacgagaacaacattgctaacgtaccgctacccgtcgtggaaccgagaaagtccatggctttgagctctctgttctctctctctattctctctgttttccaatgatttgagaaaaaggtttgtaattaaataaatatggaggcgagttttggaggaggagaatacttatagaaggagagtggagtgatgatggagacagtatatcttggagagcacgctcacgaagccaagaggaagaagaaggagaaagagacaacgctccgttcctctcctctcaaaccccaccagagcactttggtaacactttgtattttacctctttcacgggtctttgacaatctattttttcaattcattaaaatgttgaaaaaaaaacaaactttgattactgttttttagccaaaaaaggatattcttttaatatctctctggtttgggtactatgtnttttttcctattcttaagacgagctga

SEQ ID NO: 25182 - DNA, 547 bp, Arabidopsis thaliana landsberg
tgttgttgtaacaagttaacatgctttggtttgttagattgagaatgaatatggaaatattgactcagcttatggtgcggctgctaaaagttatatcaagtggtctgcttctatggctctttcgttagatactggagtaccatggaatatgtgtcaacaagcagatgctcctgatcccatggtgagtttttaagacttcaagttcttggataggtagtgtgtcagatttgtggtggttagtctttgtgattgagacattctttctatttgtttgtgtttcttggtagatcaacacatgcaatggtttctactgtgaccagtttacacctaactcaaataataaaccaaagatgtggacagagaactggagtggatggtgagtctcttacttttttaccttacgaatttgtttgttatcaaggatggcatttgactcactttcttgtatattggtaggttcctcggttttggagatccttctccttacaggccagtcgaagatcttgcatttgcggtcgcgcggttttaccaacgaggtggaactttc

SEQ ID NO: 25183 - DNA, 2643 bp, Arabidopsis thaliana landsberg
ttcaaggttcacaaactcattttttctactataaacttgttgtcctcctgatgaactttcccatagttaaacaaattgtcaccatttccattatcaaatccacactggttttgatcttcaaatacgttgcgcacacactagactcttcatccccgtcactcgctccatcagcgtcatcgaaacaatcaaatctggacatctcgtcttcatccttttttcatttgtatcctcctctgcatttacatcctcaacttcatccatattttgattagcatccccctcctctatcgaagctcccttcatatcggcgtactagataataggtttttaagatcaattatcctaatgcattatcatgtcgttgtagtactgaaggttgtcaatccaaatgggtgtgatactaacaatcaagatgtgatcagaagtcactaagtcaagccaagcaataacagttttttgtgtgttgtagcagtcctaagtgaacatgcagaaaacaaaaattcaagtagaatagtaaaagcacttgaccaacacagcttgttgcagagcactgggtgtggtcgagtgacaagtcaagtaacagacaaaaaatataacagggatactcgactacacaatttgttgccagacaactgggtggtcgagtatcaggtggtgatggtgatactcgacctctaggcagagtgatgtggtcgagtagtggtctggcagtgaaggtgaagacactcgacttcatggtcgagtgaagtgatcgagtatcaatcgtggtggtactcgacctcgtgttcgagtggtgaagtgaagtggtgatgtcctatgctcgacctgggggtcgagtggtctcttgaggtcttgaagctcctgctcgacctcttggtcgagtggtttgtcgtgatcaggtccgcttcttcctgatagctcgtcaacagctccaaatcacctgaaatcaacgcaaatatgcaacatgcatgcaaaactatcctaaacatgcaaagtggtgacaaatgatgtgaaatggtataaaacagtgatgatatgatgctaaaatgatgacaaatggatgctcaaaacatgcaaaatacacacttatcaactgctaaacatgtgaaccctccattaattgtatctggtgatcaggtaatgtacacatatatatatgcacatttctatttcaaaatataaatttgtgttataatggtttctaactttttatatattgcaggtgccactcatgttggagaatggtaatggttcgacagactctactactccatcttcaaaacgtgtttacgctcgagaagtgagtggctctgatggctcttcaagttcgaagaagttgtgtgttgtaccattagacttggaaaagtctatatcagagaatgctgaataaagtgtttccgtggatgcggaggtggctgattccaaagaagccactatcccaattgataacaagacaccaacagtggtcgttgataaagagtatggaaaacctaagttcgaagattttggcgtggtgaagcaagaagttaagaaggagaattcaaggaacatggacgaggttagggtaaaagttgagaagaagatgttcttcttatctctgtctattaaaaacagcggcttcttgaacacttaacggtgacaaaagctctgtttttttggttggttttaatgttttgaagtttgggtatctttttattttttctaagttcttggatttcatgttttggattatgtttcagcttcttaataattaagtttatcttttaaagattatattaaactttcatattcgactcttactaatttataaccataatatataaatcctaactctgttctcatgaaatagctaaagagactaaatgaaacttaccaattactctacaactagatgtcttccaactttttcagacctttaatgcatcacctgaatgtaacatagtaaataaagttttgttattgtatattactatcttatatagagatatagaattcatgactatatagaatgtatatatatatatacctccaactaagaaaatcttctttccatataaatatttatatttctataaattgaactatatatagactcacaatgattaacatctagaacttgctagatattagataactgccggagttgtaatcattatagagatatagttcaatcggtacaccatcatcatttttttcctaaaagatacaatttaaacgatctgtttaaaccctcaaacgattcgtattttcttttattaataaatcggacattcgttgcatcttttgagatataattcaccttatatatataagcaaattaggtttcatttttctgttaaccctaaaaacttagcaaaacgaagaaacataaaaaaaacctgcctagaacttatggagcctattaaaaaaaatcataaatttgaatgtgaactcgacgcagtggactataaacgtgaaagtcctgtggagatgagatcatccttcaaacatttatggtgatgtttcaaccatgattttggtttgatgaaaaagtttttatcatatgtattagagttccttaacatctgttttttttttaaatgtgcttattgattctgtcaaatagttttaaagggctttaatttttgttttttttgggctaat

SEQ ID NO: 25184 - DNA, 420 bp, Arabidopsis thaliana landsberg
  unsure (1)..(420): unsure at all n locations
ctagacttgatgattcggtatacaattttccggtgtgtatcgagctgattctctgatgtagaagccctaatttgtgtgtatatttgattgattctcttttgtgattgagtatggcaatggtagagaagaatagttctgcgattggctatgtagctagaaatctattactaagcttattcatcgtcacgacgatcctctttgctctgtcatgttactttgtgttacgttccactgctcataatcgcttccttagctctacatttccatctaannnnnnnnnnnnnnnnnnnccggagaaagcgaattgtagatgtgttaaggacgagaaatcgtcggtaatcacggctcctttgaaggtttatatgtataacatggatccagagtttcattttgggttgttagattggaagacgaaggaag

SEQ ID NO: 25185 - DNA, 562 bp, Arabidopsis thaliana landsberg
acgaatttcggcaactagtgacgactttacctcccgagaaccccggcggttcgttcacggctttgcttgagcttccacctacacaagcagtggagcttctccatttcactgattcttcgtcttctcaacaagcggcagtgacagggatcggtggagagattcctccgccgcttcactctttcggtgggacattggcttttccttctaactcagttctcatggagcgagcagctcgtttctcggtgattgccactgagcaacaaaacggaaatatctccggggagactccgacgagctctgtaccttccaattcaagtgcttatctggacagagtcaagacggaccctgctgtgaccgattcatcttatgaggtgagctttgatccagcgattgagaatcaaagccatcgccctaaccagaacaatataaatgggaagaggaaagatttttaagagaccgctagagtgagagcacacagtttttacttgtgtacatgtgagccttcgtgtcatcagattgatcctttatagggtcaaagcttgaccaaaaagaactaaagctc

SEQ ID NO: 25186 - DNA, 917 bp, Arabidopsis thaliana landsberg
  unsure (1)..(917): unsure at all n locations
agtactataataaaattatgaagcctcgggaaaatgtaaatgaaattaagtagatatgggccagacctacgattttaactgaataataattgtggactaaatattggactccgtaaaagcccaaaacaaaatataaaacgaacccacacgacacgagttattatcagaaacattactgttacaatgcaagcgcgcaccagtagagcgtatagcgcgtgtgtcgaaaatgcctagtctataataacccannnnnnnnnnnnnnnnnnnnctaaatactttattttaaaagaaatcagcgcgtgggagaacccatgaacatttgggtttgtttatccattgtttcgatatttatttatttcggttaattccaaaacaaaggattgcttcttcttggtatttttgactaacaaatacttttttttggcgacacacttatgtatagcaaaactaaaaagtatgaattcaaacaaacaaacaccggtataatatgtttacactaaactaaactaggagaagatgtttaatttatgaatgaaaccaaaattggaattattcactaaatgacgatttcgtaaactcagcttaacatttattgacgataacatcataaagagctcaaaatgataagtattggactacataaaagaaaattttcttccatactagctataaaagatatttcaaatgaaacaatagtattattggttacaagtaaatcatagtgtacctcttaacaagtcaaataacttaaaaagatcaaaatatgcacaatcattttattaacaatccatatatataactgggaaaattaagtgtgcgcaatttgatcatttatgtagctagccggtgattacaattgaaacctccacgatgttccgagacacgttagntgatcaaaatattaattcatacatatt

SEQ ID NO: 25187 - DNA, 2899 bp, Arabidopsis thaliana landsberg
atctcatcactctttattttactaataaatcatatttctttcatttaagtatgcaagtcggtagagctctatctgtcatgttctgttcaataacaactgattaatcacctaaaatccattaagaaaataacagaatttatccgcatgacaatcttgtccccaagcttagttcagctgttcggacaaatattattggctcgatctttagtaccaaagctcgtctcaaagcaattgtcaatcatatcaacttattacttagctccttcactgcatattttttttataaattacgcctaagattttgatttccgattaatttcattctaagaaaaaagatttcatatccttgtgagttgagattagacttattaggccatggttatttcaaaacgtttaacgtatacaaaaggaaacaactctgtctccaagtaatttacacattctcattccaaccaaagaatagtagaatacaaaaaacgaaaagttgacactgcatatacaatagcaacgaacctagttatgttaggtaagccaaaaaacagactagtctgatggaaattgaccttacacaattagttttcatcatcttttaggtgtttttttaccggcgtggttcattcatagactttccttcagacaactcacccaacaatctttcaagatcttcagctgtatactttatgtatttctgaggattcttgccactctcaaccaaaggcctgcgtcgatcataggttacaatctcagttaggtttttttacatttcaatcaaatattagaatagccttcgcagtaaagagagataggagagttttacccaaagcgtttgaggaatgatctataagcaggcaatgatcgttcagctgcagcaagtcttagtgactctcttaactctgtgtctggaactgtccattgcgattgtctctgatgcaactcatcaaactgcatattgaacatcttgaacctgttccattttttttttacagatttatcatcattaccaaatatataaacatttgccaattactgtgtttattttacatgtttaggacttacctctcttttaataatcctcttgaaactccactgctgtttcctccctctaaacttcctcccccagatgaggtcaaaccttgcgccgatgagctttgtagtatctacaaaatatgtaacagtttcttagtaacaatttaatgaaattttatataatagtgtttctttacagagttagacaaatagacagaacctttgtccaggcaactcttttgtattggtttgcatgttgctgcacgatacgcctatgtctttgaacccaatcatcgcctaacaaatccttggcttctgacctgaaaaattatcatatgaataaagctaaatgagtgcgttcttttatttttttaataaaaccagatcagcctttaaagtttaaacgagaaaaataatatacctgcgcacagatctgaccatgtaatgaatgttgttcatcaggaacaagtgtgtcaatgcaggatctttgtactgtttcgattttccgtccaagttgttttgaagcgcctgcattatccgcatcgttacggatgctagctgcgaatttgagtcatctccatttccaaattccaagaaaagttgcttcaatgttgtttggtagctgacaccaatgatcatcaattaaagcgtggaaagggacaatacgcaaatagcagtatggagaagaacaatacgcaaatagttcgaggaaataagttgagtatatatgatgtacttactcgaataaaaacttgacataattgatgacatagcttgttagtgggtggacagttccatctagaacagcagtctttgtagcatctttctcaacagcttcttcaaaatcaccaaatgtttcctgagcagtttgcgccaaccgctttgtcaagcccgtcgcagaatctctaatttcgaggcatgctttccctttgaaaattgtctcaatctgtccatggacacaaatttcatgagattgtaccatctaatcttataccataaactggtcataagaaaattcacactttatgtcgtcctagatagcaaacttccactacatatgtatcacaaagttttttctgtgtgtgccatgctgtttattatggtggggatttcagttggtcaaaaacatatctgattgatagaaactccacatgggaagaaaaacattaaagacaatcactttccatatattactcctcaagtaaacaaagcagctaggtttgacatctctaagaagtaagtggtgaactctatgcgtatgcaaactgaagttttacgtcttaatatggtaaatcgttatgtgtgtcagtgtcaataaaactagacgtttgcagcatcctatattctataacatttcacctcactagcttatacaaatgaatacaggtttgaaggtgaatcaagtatgtaccaaagttcatgatactgaaaactgacagtcttaaagatcagaaaaaatccaccaaaagctgaaactaaagaataatttttccatttaacagaagactcttcagtaaatgtatggcgacttaatgatattaatgagaagattattacctctgtatgaagctcccgcattatctcatacatgtctaagagtacaaacaacttttctggagatctcttgctcctggctatagcatccccaaagctaagtagcattgagacactgctcactgtaacttctgcaaaacactgatcacttagagaatcgaagcctcggaatatctggtcacatacttgtctttctccagcaaagagtaatttaacctgttgaacaaaatatcttgagttaaaagtgaacaaaacatgttaaagttatttccatccttaactagagttcttacagcaatgcgcatgaaatggatccatt

SEQ ID NO: 25188 - DNA, 1101 bp, Arabidopsis thaliana landsberg
taacctataattctctagatattattgcgagatatataagaattaatacatgtatgatgatcaacattccaaaaacaatgatttatataataataacaaatcttctatttaaaccattttgcaatgattggattgagattcggtggctggctgtcactttatcgcagttatcgatctttttgtctaccaaatgatatttcaaagagtcaattagtagtatggacaaatatagtaataaaaatcaattatgattctgtggctactatatatggagtttatcaggccacagactgagacggaagaatgaggattatgatgttccaagagtagtggaaattttgtagtaccaccaaccaacatttcgtcttaggacgagaattaaacacttgtagactttataataacatttcgtccaaaatagtgggcactaaaacaaatttattattttctttaagaaaaacacgcttttcattataatcgagttcaaattttcaaattttctagaagtactctatttacgacctaaacccatttgaagtcaaggctaagttcacattcataaaatcatgactcatgagcgacgagatcaataataaacaaattttcagcctacatttctgatttcttgcacgttatatattagcttgaattgttgtgccagttaggtgattttaattaggttaacttctctacttaatttggatatttgcatgtggtgtctaccacgttacgtggttttagggttattatttatattttactaaagtttatatataaagttcgggctttaggaatcaagcgatcaagtcaaaaaaattgttggataaattttttaacgtatgttttgttttaaccaacttagaaactttgtatttctcgtggcagtttttttcccttttcagttctcgtgccaagcttaagaatatgaaaatatactaattgtgatggtgattcaaacccttaacaaaaaaagaagaaggtgatggtgattcatcacaaccatttcatcgggatgtcacattcaatactaaaggacgagaccttcaccgaaacaaacatctattaatccaattttagtaatggttttttttgtttgttctg

SEQ ID NO: 25189 - DNA, 893 bp, Arabidopsis thaliana landsberg
gaaaaatctttgtcggtattatatcgttagattctataatatctcaatcatatatttttccatctcaacaaatagttggggacatggtgaacaattcgaatttacttgattttaatttttgttttctaaattttgaattttgaattaattcatgaataaaacaatttttattttaaatctagatgaattggtcatcttatatatcaagaattacaatttttattaaaaataaagaaagatgtatttttcaaatgaaaactcaaaaagagggtagttttcaaaatctcccaaaaaaaatttcccctttagttttttttgatcatcttcgtatttaagcttaaatagaatcatctaagattatattatttacacccttataatttgaaaaattagaaaatgttgaatgtatcttgaatattctgtgggaatacgttagcattcatgaatgtatcttggatatattttaccaaatagtttagtagtctcatttaagaaaaaaaaataacacttaaggtattcaagctttctttttatgaatatatatatctgaaaatatctatatatatatataaggaaaaaattgttattctttacagttcatagactatttttgtcattttattacttttttgggtatttttctcccaatcaaaacaaagaaggtaaaaaatttgattactacggaaaaactaattaaagaaatctcacatttttatttctagtttttagtaatgagaaaaaaacaactgtagtcaatcagaaagctgtcttaagttaaaatgttttattaaaaacacccttcccaaaagtaaataattttcccattatttgtttgaaaattttagaaaatgcccatttccccttttgtatttttggccattggacctaaattt

SEQ ID NO: 25190 - DNA, 1789 bp, Arabidopsis thaliana landsberg
ttatttttaagttacatcttgtgcaactaaatgattacaaatttgacataagcaatacatctatgacttctttttccccgttaattatcatagtttctaaaaagacaagatgaaactaaagaggaaataggtgataaaatgattgcggtatattatatacttgaagtcatcatacttgtacatatgtataattcataatacgaatgtaaacatgtatattagacgggtaattaaaaataagggataactaataattatttatatgactcatatcatttatataattatttatataagcatatcatttgatccacttttaaaatttgtaaacttggagaaaaaaatcagcccgcgaaaaacttttcaattggcttaatttaagtttcgtaaacaaaatcagttgccaaaaaagttgtctgtagattatcaactagttttgttttagcgattaaaaacaatagatatcgatttatcttcatagcatggatttgaacactaaattaccacgcataatgtaaaagatggcaaacaatatgattggatattggccgtgtggacttttgtaaagggaaaataataaatgaaaacgaagaacagaataccgaagttggctttgggtcagtttattacctcgtacatgccatttcaaaagctaataaaataacccatgttgaatgtctatttgtgattcattttcaaaattggatacttaattggtatcgggatataaggttttattgttagtgaaaaactaaaatattatctaattattcataggttagaagttgctttatcgtcttgttgatcaactcgatttttaattgatggtggaagatgttgccaattgatttgaaatatcaaaatataacaatcaaagaaaatgctttatttatttattaataggcacatgatccaaaggcacattgggactaccattaccatatatacttggcttagaagggaaaaagaataaaagaagaagacttactatttttggatatttcttcacttaggggatttagctccaatccaaactctttactaaacaagggccgttgcttattcatgaatttcaatcgttggaacttggaatatgagacttgttcaaacaacagtaagtggaagaataggcccatgtacggtccttattaaaaaatcaattatacgatttagggtccacataagcccatgcttaatccccaagctaagcatgaagagagattagaacttataatgacactgtaaacaaagtgttttttttttcttccaaaaaagtgaaaaacctagttccatatctatataaaccaacgaaaacatgtagatccgtatcaatattaagtcttcacgtgaataccttttgtatttctattaccagatcattagcagttaacatttagtcgtatttattatacacttgaaacttaaaaagttgtgatcaaaagtcagaacattaccgtgtttaaaaggaagattggtaagattggtttgtagagaaacttatgaaaatatgggcctaagcccataggttgtggaaaacagtaatacgacccagttcggaatcaacgaacctactttgacaattctcacgcgccaccgtcagcgaccacgtactgtgattggcttacactccccaccgtcaactttgatgattcacatcccaaattatttttcagttacgaattagactcaaagaaagaaaaaatcagatttttgttttgtttttaatcgggaaagatgaaggcggagacgatgacgctgcttctggtgaatctagccggaataatggaaa

SEQ ID NO: 25191 - DNA, 795 bp, Arabidopsis thaliana landsberg
aaattctacttctttatatgagataagacttctattacgttgtgtcattctgaacatggtttcaactcgtgagccatgagtaaattaataaatcttaatattataatattacttaagaaagattccctacatttatggcgtcgtcctctttcaatcttggtttgaattttctgatgtttaaagttttcttttaacagggctttcaattcttcagttggtgtttgggacttttcttttgtttgccagcttttacttcattttcgtggacatttgtatttatctttggttccacaaccagtttaattaataaatttcaaatgaaacaaccaaaaaaattcctacatttctattacagattaacaggtgtcctataaactttttattttccttttcatgtgttgtttctagaaaacaaaatccagattattataattcttgatatcacaaaaatgtagaggaaagggaccatttctaaggaaaagtaattttaaaatccctttatctatgggttgtgtcgtgtgtcggtgaagagtaagaagtcgagagacaaagttaaaagtagagaagaaaatgagtgaggagaagaggaagcaacacttcgtgctagtacatggtgcgtgccacggcgcatggtgctggtacaaggttaagcctcttctcgaggctttgggccatcgtgtaaccgccttagacctagctgcttccggtatagacccaaccaggtcaatcactgacatttctacatgtgaacaatattctgagccattgatgcagctaatgacttcattgccgaat

SEQ ID NO: 25192 - DNA, 1567 bp, Arabidopsis thaliana landsberg
  unsure (1)..(1567): unsure at all n locations
actacaaccattacaaaacacacatgaattacaacatagttcaacaatcatcatttaaccaaccaataaactaaaaacatttcaacataaatgatttttattggtttagaaacgtgattttgtggactttttagcaaggaatcaataaataaactaaaaaaataagagaaaataaaataaaaataaagtgattatagaaaagacatgacatccttattggcatagcatccaatcttattaattgctcattgattttgattatcccacacctaaactcttattgaaaaacacattgcaccaccctggtttgatatttaatttttaagataagcatctctcattatgttaaattatccctgatatgcccttgttgtacgtaagggtcgaaatcgaatcagtgataggttcaagggtgaaatagggaattcagaaaagaagacgtgggatgattgagctgtgtgtgatagaggttatgcgctgagtggagtaaaagaaagactatccaacanataagtgggtcggtcccatttgtttatagagtatagccaaacgataaataataataattcttcaaagatgattacagaaaaacaataattaatttcacaaatatatcataatattttatattttgggagatgtatatagacgctgtagttagcttaagtgaattaacaaatagggtttgacggtttctaatatttgtttttgtttaattgatatttctttcatccgtgtattaaaaatgatcacaacaacgaatctttttacaaaattttcgagcacagatgaaacctgattttgtatcaaattatttttggaaacatgattttctttcaaaatattttacaaaccaaaaagacaactagaagtctgaagtctttagcgacaaatacatttgttaattaagattctgtgacatcattaatagttgaacatgtacgctataatagaaaccaggtattttcttatgctcacacaatcgaaataaatttgtcaatttgcaaaataaaaatcaacattacagctagataaatttaaatatgaagatcaacttaaaacatgttaatgtctatattgcatattttactaaagttataatctttttatagtatatttacagtgatgatgaggacgatgtaataattatacgatatccagataatgtagactaagtgaagaaatgaagtgagcacaattgtaattttaaatttaacctgtgaataaattgtacaaaaaacatctattgattaatactcgataaattagtaatcactataaattaataaaaaaaatctggtctctaatcgagtgaatataatatttaacattatttgataaaataaataaagtaataatttattcaaaaatcctatagaaatatatggtttcattagtatcataaactaagaattgtataaacttattaatatcaatatatgtaagaaatttagtaaaatgtgattttagtattggttggttttctacgcagagttcaattatattattttactacatcaatttttttttgtattgctttgcgaggtttagtatatgaattgtattc

SEQ ID NO: 25193 - DNA, 963 bp, Arabidopsis thaliana landsberg
agtttaaaggagaaagaagcttaaggctaatttgcagcgtcgaagagatatagatagagaggtatcggagaagatagatttcgaaggtggagaagaagaagaggacagaccaaacggagcggaagaaataaaagtggactctccgtctctgctggtggtttccaaactataacgtatttattaaattaaagtcgcggttgtcacattctcgtcctttggtatattggttacaaagaattgtgaaatatcgaagtccaaggatcgatccctagtcgaagccagttatttttttttttttgacattggaggtttagttagcttttatacttatgtggatatgacaaattggcacgtcggtcatttcatttaattgaactaaaaatatgtcaacttctatttcataaagaggctttgaatcccttagagtggcgaatgttgcttctcctcttttggcagaagccatggcgcttcatctagcccaacaaaatgccttagaacccggttttaggaagtcaccttcgcttcagatttgcaaacgctgatcaaagttatttactcagaatccttcccaaagaatctctacgtgattttccaagatgttcttgctctttcgtttaatttcgatcaaatttcttttcacttcatttttagagaaaaaaacggttgtgcatatgcatatgcaaaatctgcattaaattatgcacttattgtaccaacttatgtatcggtttaagtttcggtttaatgaaatttcagcttcttgacgaaaaaaaaaaatcccttttaattcattcacaaaaaaagttatatcgtctgttacctttctcttcaccagattaccaacctttgttgcttgcattcactgtttcgatgccatattcaatcgtctctatgcatctgtttaaaaaatgcatttcctccacaacttcagcgacactatgttctaacttctaactagttttt

SEQ ID NO: 25194 - DNA, 718 bp, Arabidopsis thaliana landsberg
gaggtgacactttgtacttcaaacattatgttttgagatatgaatgttgtgcttgggtttcactaattttcttgtttttttcactggtttgtagttgcggcagataggtggtgatagacttactacttcattttgataaatttttgtgcctaagttcactgtcttgctgctattcagagatcgatattagaactttggtgattgattgaggacatataagaggggactttagtatcgtctctaattttgctaccggtttagaatactagtctggtcttgcattgttttgtttgctgcataaaatatcaggttagatttacgaagtaccctgtcgtgttaaccataaggtatcatgttagacaaccaaagccaaacttgactctcttttttttttttgtgatggaatgcttccatgcgcgaaattatgatttgtcaaattgtctctttgctcttagtgctaacctagtatttgatgaatgggataggatgaagaatctggtgaagggtaccttgttcagccagtctctcaagtggaagatcatgatgctgtgggtaatgacatcgagccgatcaatgaggacaatgatccagatgaagaagaagaagtcgaagatgacctgccaattcctgaccagtccttggcttcatcatctcgcccaaagagaaaacgagatgacgatgatgacggtgaggatgatgacgatggtgatgaggaacg

SEQ ID NO: 25195 - DNA, 1392 bp, Arabidopsis thaliana landsberg
ggccaaatacgaggaatacttagatagttagatttaaactaagttgttcaaagagtatgaatatcagactagtttaattttgttcaaagtatatatatgaactagattttaacccgcggtacatcgcggaaacaatttattttttaaagttagtatacataaaagtttgcaaattgtatctatctataaaatattttatttcatagtttacaattgttattaagtaacgtgctgccaaacccgtcccgccaacccgtaccgtaaaaaaactatttattttattaatgttgatcttatttatgatatgtttatgaattattgtctaaatattttgtaattttgtaataattaaatgctatcaaatatctctgcggtttgatacaaatatctccgcgggttgatgattataatcgaattgttatagtcatggagaaaagaaatatcaaaaatgataattttgtagtaattaaatgatattaaatattttggaagttttattttagtaactaatcgtgtagttaatgtggagagatttagggaagattgttaaatatcaaatatttaattcgaaattttttttctaattatcaaaaacaaacattaaaatccagtagaagccattgtaaataagtctcaactacatgatttatttcacaaaatggctgcaaaaatgtatatatagatatcagacaccgtaatactcgataacttttaaatcatttcaaatataccacaaaagtgtttagaaggtacttctcaaaaagtttaagaaccttcctgataaaaatatttttggtattttacaaacaaaacaaaaaaaatagtagtttacgaattacgatatcccttttaaaaaaaaacagatctttttatttaagacatcaaataaaacagatatagtttaaaatggtgcaacattccatagtccaactaactctagttaagtctcgcccatgcttcattttgggaggcagtagtcacattctctttctcatgcatggagctaataattattgattgatatgtaggaagtatagacggtgaactcgctggtcggaccattatagttttaaaataatgagtttgagaattcaagatattattactctcggttgcaatttataattcgtttgtccataaaccaaatatttgcggtaattcgaaacaaaaagataaatattcgttttcaattattattgtagattctggtaatcattttccttactaaaggtttcagcttctcttaatattgaaagcttatgatcaaaatattcgatatgttaatcttcacgaaagttttatacgatggagaaatttgacaatatgatcaaaatatttgcaagattcaactattacatgttattgcttcatcctccacgtccacgaaccctc

SEQ ID NO: 25196 - DNA, 580 bp, Arabidopsis thaliana landsberg
cataattttctaacaaaaaaaatggcttcgggtggtggtgacgatgggcttcgtcggcgaggctgttcatgcacaaaagacgatttcttaccggaagaatcgttccaaagcatggggaattacctaaaagcccttaaagaaacaccgagtcggttcatggatcgtattatgactcggtcactagactccgacgagattaacgagatgaaggctcgtagtggtcacgagatgaagaagacgttgacgtggtgggatctcatgtggtttggtatcggtgcagtcttcggctctgggatattcgttctcactggactcgaagcacgtaatcattccggtccagccgtcgtgttgtcgtacgttgtctctggtgtctccgccatgctctccgtcttttgttacaccgagttcgccgttgagattcccgtcgcaggtaacaaaattatcatttcctctgtttctcatttatatttatattttcgcttttttttttggatggtatatttatattctcttggtagagaatttctaatttgcaaaagttgaaaaatattaaatttacacgtttaaatttcattttaca

SEQ ID NO: 25197 - DNA, 1556 bp, Arabidopsis thaliana landsberg
acatactaagtattataagaatttgtggtgcactgattactcagcgatttaatatttttcaggatatggatgcttcaatgtatttatttcgagagaaatcatctatagggcgactgaatttagctcgtgttggtttattggactgcatttttggcgtgcgactcaatgttgaatacaaaaagtttgtgaacaataaacgaagccaccaatggagtagatttatctaagattatgccaacggcgagtctccttctcatgggaggacaagaaaacagtggggatcaaattttgaccgtattacttcccgctccatgacaatggtaatcattggatttctctgtgcattaacttcattcaaagaacggttgaaatctttgattgtgctggtcacaaccatagaagtggaggcattcgcaatcaccgtcccacgaattctcaaggaaattcacacaaaattaaatggaaaaaatctactattggctccgtacactctcgtccatgttttggtgccgcctgacctcaacaaaacatgttgtgattgtggagtgtatgcgctcaaatatatcgagtgtcattttatggggctgtccttggatatgttggatgatgtcaacattaaagatgcacgtctgaggattgcagttgatttatggattttagcatttgatcctgtattcagggaccgagggacaaattataaaccaccaaagataatttctgaaataatagatattgcatgagaaacaaatacacactaatttatgagacttttgttactttcaaacaaacaagccaaaacatttccacaaatatagtacttttcttagtttatatttgattttcgtgtgttcagtatattgttttgtgtgttggacaagaatttgagcgtcaaactgttaaaactgaatctctttgataacatactcgaaggtccattatcggagagcataactcgctccaaaaccttgttagaactcgataacatgctcaaaccaaattgcatctaaaacacgtcatatatcatccaaaaactgaattatcgtatttaaaacccgtcatagataaaatataatagttagacaaattgagttcataaaagaaaaagagtaaagaataaaatatagtcttcttgacccaacgatcatacattcaaaacaatcctgaaaaaaaaaaaaaaacagtcaatttaatgataatgaaataccaattaacactacttcatgtgagaattaggattattgaacaaaccattattatattgctatattacatgttgttctattgtgtccttcttgaccacaacaaccacacctatgcctcttagacccttgtgatctgtttgatgatcgtatcttgtcttccactgtttcgtgtcttcgttaattttcttcgtcgaccaaggcctcttcgtgtttcaaatggtaggactttagcattttcgacatgttctaggacacgtcactcattttcaggaatagctattggattaattgtttctttgaataatgatctccaagctgcagttgcatacacttcatcatcaaattcatgaagct

SEQ ID NO: 25198 - DNA, 1221 bp, Arabidopsis thaliana landsberg
gagatttgatgtttggttataaacccatatatatgtaacgtgttttttgtctatgaagctagaagatatgaggaatgaaaaaaaagatatgtaacgtgttcataaaatttaactgatgagaaaagaaagaaacctatgcgtttgaagggttattgctttttatgtattgctctgttttcagtttttttctctgttttaaaacgacgcttcatctcatgtatgtgagatgcattagtatataaataagacaaatctacggttatttcttcaattagtaagctttctttttgtcaatctcaatttcgatcgaccattgaaaatttgaacttcgaaggtcataaagttaacttgagtcgtggaccactggtgttgaagattacttctttaatttatttttaattttctattatgattgaattgcttgtcgagagcatgcgattaactcaagtcgctcacacatttttttttttgttttctcagaaatcattattaaatcccgaataaaactataaaagtaattataaaaataatttaagtaaacttggtattgggtattgttgtttactaaactttttatgttcaaaccattttgtatatatgtaaagatgaatctttataattaaaaagaagtaaataattacgcatatttcatgagcacacacgtcttgacatagagcttgagcacacatgttttcacatactctctctaatagtaaatttacatgcaatatatgcttggtttgactttaattaattgccattacacttttaatatatgtccctagattttttttttctgtttatatgtgattttctcatttaatcatatctacttgattctacaaaaattcacatacagacaagagttaaccattggtttttgactacgcttagcctaaagtttatggtgagtagacagattttcagattttattacaccacaatttttaacacgttttgcttataatctcactctcctaaatactgaaagtacagtttcttaaatgttcacgccccaagaacctatataagaatacactttccacaacagaaaagatcataaaaacaacaagaacttataaattaagtcttctctctctaagaaaaaatcaagaacttcctgaaaaaaatggatagctcgaatgttttcgctattgaagacagtaagtgaatggtttgaagcgtccacccccgtcacgagtgtgtccatggtgtgattct

SEQ ID NO: 25199 - DNA, 519 bp, Arabidopsis thaliana landsberg
  unsure (1)..(519): unsure at all n locations
taagaggaagcgaccaaaaggcccaacatgcgtattgacaatagcctactcccgttactagacccattgatttgacaccataggtaatggggctataccttgagatggcaacttcaagaagcccaatggcccatctcttttgttggctcactacatcaattagactttttggggaatctccgcaaaatgctgctcttttgggtctgcaaaaaactgatctccatccttcacaatggagcctataccctgtgtagtagtcttctactaaagacccatatctgaatccaatctgcatagttttgaatgataaaatgaagttatacggtataacaaactaggaaacaaattatattatgatttacaaccaatgatcttactttagactatcaattatgaaagaagatattntctatgtttcgtatcaatcaagaaatcaagtttgtttctaacaatcagctttaattatctaagattagagaaactaattgttcttagttcacttacatggaacgaacaaaa

SEQ ID NO: 25200 - DNA, 1303 bp, Arabidopsis thaliana landsberg
aattaaaatatcatatgttttgttactgtaaacaaagatatttttgtgaagcatttatttctacaaaaatggaatattaagaacggaagaaatattaaattaaatcatcaagaagatgatggtatcattggtatatatgttttattctaaatggtaaaaaattaaattgagtagacacaaaacataatcaagtttattattacttaaaacgaaacaggatacaacatgatattactatagacgtatagggaggaaacaatcgtcagcttcttcctattgttttatttgaaaacaaacaacttacacttacatcatatatatagagagagatacgatcttatcttttttttatattgcataagagtttattagtaaatcgtcagtgataatcaccgtagcagtggcaatgcacttcgcggccatgatactcgcactctcctttacatgcgtggtggtagtgctccttacatacggatttacaagctttttccttacatgggtacactggggcttcccccaaaaagtgatcacagtgagcctcgctcttcgggatttctatatataacacatattcaaattaagaaacatgtttgtgtaaagttatgcatgcatatgaaagttcaggaattaccggtagagatgaacaagagaacgagcagaagagtggtgaagcagatggagctgagggtctttgccattttggaagtttttgctttcttttctttgtatgcttaaataagtgtttctctactgttttcagaaacttgggtgatactactccatgggggttgtaatctatttatagtacaatttcgttgacttatactatcgttacattatctatatatcatccactagattcgcgacgtcgccattgtctctcgtgtataagcctttaaaggcccatcttacaagttccatactttcttttcagagcccatttcataagataattatccctatcaaacagtgctttttattgaacgtgtttgtcatttttttcttttttaactacggttttcttaccaagagtcaagagggatagataacataatgctacaagaagttaagtaaaataaattctcaaaagtcaaaaatatattgttgtgaagattgacaaagcccaaaggcttgagagtccttcttaagttagcaccattcacgaaagataaaggatttactacataaatcactcatggttttgaagttggaactttactcaaaggctctcgaagtttataaattattaaagacctcaaacacaagaaagaaagggaaatttcaagataagtggctgaaagat

SEQ ID NO: 25201 - DNA, 502 bp, Arabidopsis thaliana landsberg
  unsure (1)..(502): unsure at all n locations
acatcatctgttatgtcatttccaaataattccttcaagatcttcatccctaatataaccattagcatcttgcgggttacaaatatcttagcgaccaacctctagctaaactccatgagctactcaagtttttcttttacctctaagtctgtccttaacagtgtgaagaagttccatcgccttgtctagtacataagctttaagtttcacctttcgacctaacagtgtgaagaagttcttttaccttcaagttgcactggggacttgattcatacaacatacgttgacatcaggctaccattgctagttcttgtttcgagagagaagcggcctatttacgattcaatacacatccatggaggtaatatattacagctaaatttgaagctttatgacagaatcatgcatttgctctgtatgtgtttacctgtgacactctttgtgttaaggcttggcatatngctgntttatgtttagtagaatggaaaatcttacagaatct

SEQ ID NO: 25202 - DNA, 2098 bp, Arabidopsis thaliana landsberg
catgttctgccgccagcaacaacggtagagcccatttttactatatctacggctcctgtgaaaccaatgtcttgcatattaagatccctaccagaagttgaaagactcagaatgtgatgagaaagattcagaatgtgatgagaaagactcagaatgtgatgatagcgaatatcagtatacgagcaagggaaaagaggagataccagaatcagggactggatatagatgtgaagtgaaaattctctcaaagtcccaggatttggttttagattgctcgtccagaaagttctatgagaaggaaaaccatgctattcaaaatgcttcgttgaatgccctctcatggttaagtaggcttttcgacgagggggatggggacccactgcaaatatgttatacggatgatcacctggatgcggtatttcaacagaggatcttgatgaaagaggctgttccaaagggacatttccgaaataaagacgaaatgaatcaatatgaggatcaagttcgtattcaaaccataacaaagggttccttggttagcatatgctattctgtgtatttgcatgtagatgctgatttttcaaaggatggtaaatctaaaaaagaactcattgaaagcaatgaagagatagagtttgaggtagggaatggatccatgaatccacatcttgaagcagttgttactcaactggttgtgggccaatatgctcgttttttaactgatgcgcctgctgaagacttgtttgtgactgctgccactggtacccagagagatcgttcacttttatcaggtaatgcttctaatttgtatatgaaattcttaacatttgtggttagaaaaggaaaaaactcgatgacatttgtttattacaaatgcaagcctttaccagcggacttaggactaaaattcactatctagttgaatctagaatttagttactttgttgcaaactcttctgttgcaattggtcctatgagtttaatgagttctgtactattttggtgaaggcagcatcactcttaaaatttatttgttgttttggttcttatgaagtgtttctgtgctttttcaaaggttttctgctttgaacagcgcatgaacaagtaacaaacatatacctctgactaatataagagatttgcagccaagctacggtagttctgatgatgagttgctttggttttaatgcacagatgtcgcaggttttgaatactgtgtacgtttgttgggagtgaaagggccaacagaaaaacgaattgaggcggattttttcaaaccttcactttcaaaacagcgtcttgaatatgtagtgaaacatattaaagaatcgtcagcttctactctggtaggctctttgtgtttcttaattaatcattttgtctttctgcttattgtgattccaagttctttctgggaattttttgttaatacttcagcctctatacttgttgcaggttgattttggatgtggatctggaagtttactagcatctatacttgactgtccaacttcacttcaaaccattgctggcgttgacatctcacataagagtcttacccgtgctgctaaggtatgtgaaatctgacaccactttgttatattccacttgtagacttaacctgatgagagtcatgcatcttaaaaccttcacatatgtttgatcaaaactgcatttaaacaagtcataggtcgtgtaacatgtttctccaacgtggttgtattttattatcattggaaagagatggttgattgaagattgttggtttacattgatatttttgcatgttataatttcagattgctacattcaaaaataaacaagggagcttgcaacctcaaatctactttactccatgatggttccatccttgagtttgattccaggctgcatgacattgacatcggcacttgcttagaggttcgattctattttcttgcttcatttcttcatcagcagcttctctaatattcaatataatccgttttgaatctttaggtcattgaacacatggaggaggatcaagccagtcaattcgggaaaacagttctaagcttgtttcgcccgaaacttctgattgtctccacaccaaacatcg

SEQ ID NO: 25203 - DNA, 1665 bp, Arabidopsis thaliana landsberg
tgacctgctatgtggtcttttgtccaccctgtattgagattttagagcatagttaggttcttctgattataagatgttgttaaatgactgttttaatggaagtctttggtacattatgtcttttgtgctctatcatttcacgattcagagccacttacttcattaaactggtcctttctttctagctctcttaccttgccatgcttacgttctcctgtaggttggaaatatcggtggaagggattttgctgaatcattggcacctgatgttcaaaagctacttgtaagtgactcctaaagatgagaggttatatttttttccaatattactaaacatattatgttatggggtctctttgctgcagatttctagtagttgcagacctcttgtaaggaaaaaagcagcactgtgcctactgcgcttattccgaaaaaatcctgatgctgtcaacgtggatggctggtgtgtataacactgtggggttactggttctttgattttactagtgcatctttcatattctctttgtcgtatacttccagggcggatcgtatggcacaacttttggatgaacgagatcttggtgtcttgacgtcttctacgagtcttcttgtagctctggtatctaataatcatgaggcgtactcaagttgtctacctaaatgtgtcaaaatattagaacgccttgctaggaaccaggatgttcctcaggagtacacatactatggcatcccatctccttggctccaggtttgacttagctcggcttattcactcttgtttaatagcttaaatattctttaatcgcatccttttcacaaatcctgtgcattttaaacattttatgtgaaattagcttatgaaaatagaggcttggcccagctttggtgtatttttgttactcagttaaagatatcgtggatacttatatatctttggttagtacaggttaaggcaatgagggctcttcaatatttcccgaccattgaagatcccagtaccagaaaagctctgtttgaggttcaattttttcatgtgtaaatctgtaatatatgtcttgaatttcctctcatggcatggcatttcatggaaatttcaggtccttcagcgaatattgatggggacagatgttgtgaaaaatgtgaataaaaacaatgcgtctcatgctgtgctgtttgaagctctctccctggtaagctctatctaagaaatagctttaactttttgaggttcaattgttgattatactcaagtcaactatctgtccatgaaatgccatgagagagaattcgaagacatatatcagagatttacacaagaaatattgaacctcaaagagagcttttcttcgcgatgattagattgatgagcacactctagtaaactttctggcttagtgtgcaacccctaacttgttaatgtgttttgatataggtcatgcatcttgatgctgagaaggaaatgatgtcacagtgtgttgctcttcttggcaagattatttttgtccgtgagcccaacatcagatatctaggcttggtgagatcttgcatacccacttcctgcatctaagcttagctagaacagcaatttgttaagtatctggcagtgcattatgcggcttctcatgacgcttgttgaccacatcgcaggaaaatatgacgcga

SEQ ID NO: 25204 - DNA, 461 bp, Arabidopsis thaliana landsberg
ataaacagaagaaaaaaaaacctaaatcagagaaccaaaacagtagatttataaaccctaaatcagagaccccgaatacttgaattcagtgagagagagagagagaaagattattgacctggacttgattttgttgagaggagaaaccaagatctgtcgattaagagcttacaggggaatattatgaagatgattttgaaattaggggtacgtgttacgatgaggaagttggagagattttgtgaggcacagtgacatagaaaatggcgcttctttggattcaaatttacttgtagaaaaaaagtaaaaccctaaaaaacaaaaaagagataatgccctttgactttagtgttcgtgtgtattatcgactttattcattttttatccaaatgcgtttctcacaaccacatatttccaaagctgacgatttttaatttttcctgtgcctccctttccttttg

SEQ ID NO: 25205 - DNA, 2267 bp, Arabidopsis thaliana landsberg
cagtttaatagaagcacggtgagaaataggtttgtgtcctaacctgaaagcaggaatcttaagaggctgctttgcgtggaaggcgttggcaaaagctgtgagaacctgcaacaaaagattaattaaagtgataacaattaatagcagctacttcaaggacaacaaaatgcacctgaaagtttgcaccatccgtcccaggatccagggaacacaagtccagtagccagttgatgaacaatcggaaatatggtttagaattgagtgatgtctttttatcttctgcgtccttttgaataaatctcactgtgacagccatgatctgaaacaggtaatcaataccactcaccttttccatccattatagtagaagttagatttatttccaataagagtatgtgtccccttacctctgaaagaagaaataacctactgctagactcctgctcagggaaatactgaacagattgtcataagaaacaaacaaaacataaaaagcttagccggcaatgtattttgggtataattatccacgaagaatgcaaaaaaaaaaatgagcactctaccttcaatattgaaaaaacaagctttgcatacatatcaatgataaggaatgatggactctgaggttgctgaggagattgcacagcaccggaattaatatcttcagaagatatacaatgagcaacagaaagttcctacagaaaggaaagccaaaatcaataatgatgcctctcaagatttgaaagtgctgatgctaaaacattcttaaaaggtaaaatcaccagaagaattcggaaaaaactctctgttgtatcatctcccttaagtaatccagtctggtgcaaatgcaggacatattgtgaacatgcggtttcatttgcaccaggaagttcgcagatttgataccagtttttaaatagcgtggacacctgccaaaccatacagaggaagacaaaaacaagatataaacaagaagtacgagagatgtttgttcaaacataaaactgattttatttcaaactacaaacacatgtatctaaggcagggaattaaagtgaaaatttaaaatccatctacaagacaaaaataaggaaaaaaacatgcatactgaacgaaaatagcttcatagaaacgtttgttttgaaatcctttttgtagcttgcaaattcattgtgctgatacaaacattttagcttttgatttactcttttgcaagtgaaaaatttagatatatgcaattcccaatcaacttttaaaaaagaaaaggtagagctctaaatcaatatagaagttcataaacgctaataacatgcagacaattacccgattctggaaacccgcaggatctgattccacataatccaagctggtactctcttctgtgttagtggtgttgcacgcaacctaagaaaaagctaacatgtcaaatatacatttacagtctgattacaggcaacattcggtaatgaagacatctgacaccttctcatccttttgcctatcgttgttatcatttccggttgaactatcagagaggccagctgtgttagtaactggatttcgtatgatgtcaattagctgttgcaatgactcagaagatccggattttgaggcaagctacaaccaaaacaagaatacaaattgcagcgtcaccaaatataacaatgccaaatttcataatatttgaacctaaccacaatacttgtcagttggcattatatgataaacagtgttatgcagtagatttaaccacaaaaaaaaaaaattgaacctatcccttccctagttgtatgttttcacacctattaactgtttttttatataatagaacaagaatatgcgactgcaacaacaaacgcagaagaatgttaaaattgcaacctttgccagcgcatcaacaagactgtggagctctgaaatgacactcgactcctcagtgaccaaggattggagtagagaaatagcaaagtcagttgcggtctctgcgtaacaaacaacttgttaaaacaagttcactagccaaaacaaaaaaagaatgttaccacacaaggacatcaacaaaggttaagcaattcagcatactgtttctccctccatcaagatgcttcgccatgtggacattgtactccgctaggctaagcaactcacgctggataagaccaatagtaatatctttgttgagcttccgatcctcctctgaataaatcacctgtgtcaaaagtttgaagaaagataattaattataactaagaataccaaagaacaaa

SEQ ID NO: 25206 - DNA, 828 bp, Arabidopsis thaliana landsberg
acacatgctatatgacacaagtcataatctagcaacttataaatgccaacataaacttaaaaagtaaaaaaaaaaagtattatatgtacttatattttgcttatgttttgtttattgtttgctcatgtttgttataactttttttttaagaagacgccatggataacgtcttattggtagttaccgttgtttcagttcagattggcttatcgataatgtcaatcattgcaaaatatgttctagataacggagatttctccgagaatcttgtttgctgagcgtctagttatcgcagctacaatactatcatccctttctcttgtatttgaatggtacgactaccataccttattgtttgtttctatgttttttttttattttgttttgtttcttgcgctcgtaataacttcaaaactataggaatacaagacctcaaatgactaccaagtgattcagttgccgtagaccaggtcactgcacgccaagaagattcacaggcatgatgaagacatcctaagaggagggctagtgcttgtgtccagctgcttgagttggagcttctatgctattcttctggtaaaaaacttgtagatcataatgtttctttaataattttacttagtttggcttggctttttatccatataagtagtgcatcagagcgactggttctgagttccctgcaataatatgggagacaaatgtccataaaccctgaatcaattatccctatgtgtcacggcaagcgtcttgttatcaggaaagatccattgtgtcaacaagtgcttcggttcacccagtcactatgtattatggctcagtcaccgc

SEQ ID NO: 25207 - DNA, 2100 bp, Arabidopsis thaliana landsberg
tactaacgtatgttgtacagagagaagcttcatgccttacaagtagtagcctggctggctttaacctaccccccaccaccaccctgaagataattaacgtataagaatcaagtcaaaagaagagagcgatccatacacttgagctcgacatgccctcttaaagcctagacgacgaaatcgatcaagattctacaaatcgtaaaactgtgcaagggattactatacaatttcattgccaagtaaataggtctcattccttcagaaagtggaagttagggttatcagcgagttccacagctggttttacattggtaaagtctttttcttgcatagagttcgagatttcatcagctgcaaaggggatgctgagtttcaccaagacaatattcaagaggttatggtgatgatgtttgaacaatttagagaaatttaggcgtattctgaaatcttcaatacctggaattattgtctaacaagaaggaacgactgtcttcgtcttcatctgtaactagaagtttcaagttggaaatcacctgcacccatagatatatgaagccgatgtagagattggaaatatgtaatttggtttatctgagaaatgttgagagcaaacatacgtctggagatacattttgatcctcgtgatcatcaattttgcagagggtacatattctatacaattgctgagtactaagagcctgagagattaaagaccgatcttaagatcattagatgaggaatccgacaaatcctaccctttttccaggcatgttttataatatttaaagacttttttcagatcagagaagcagagagtagttacggggcagaggttagtcgttagatcatcatatgtaattgtggacttctgttctgtaacctggaagaggattacgatgaaacattcaggaacgagaaagaagcaagagtgttgtgatgttaattaagttgatgttatttggttcataagaaactgaccaatagcactaaggcttgtcttgtgtttttgagttcatcccaagaagatcctacaaactgcattcaggagaacttaatcgacaagtgaaatcaagcgattgaaactgtctggttactagaatcatttaaaacaactgaacttacatcttcagttgcctggctgcaccaagactctagttcatttagccagacattcaccttcttgcccatgatgaatgtgcagcattcacgttgcagaaggctgcattagttagattacagctttaagtttattggctgatggtgggttaggtcatttatattcgttaaaggttgatgggggaatgtaaatattttacctgttaaagagttgaacgttgatgtcttggaatgtttggcagaaaataatctgagcaagaaacagaggaacctgaaagaagaagtttgtcagagtggaaatctaggagtaaacagaatcaaacacaatctttcatcctcgaatacagaaaagttcttacgtagtttttcttcaatgtgccgagaagctgattcaaaagaccaatgacgtcttgccaagtttccgtgggtgaattctcctcagatggttttgccagtgaattctctgcggatggctttgcctgtggattcacttcggatagctttgcctgtgagttctcttcagatggctttgctggtgaattatcttcagaaggctttgctgctaaataatcttcagacagctttcctgatgaattatcttcagacagcttttccggtggattctcttcagatggcttttctggtgaattctgttcagatgactcagctgataaagtctctgcagagaactcatgtgatgaatctttcagtccctgatccattagttgagaactaataagtgagatgaccttatctagcacagatcatgatctgaaggaaaccataaatagttctacctgaatgcaggacgaaagcacaggtgcgagttctctcttcacattctcttgaaacatcccatatatagtctcaatgtatgctgtaagctgctgcttgaaaagtaaagcaggatatcgagcatctacttgttgcactacatcacctgaaaggctggccgaggagggcgaacggaaaccctaaacatat

SEQ ID NO: 25208 - DNA, 896 bp, Arabidopsis thaliana landsberg
ccatttggcttttgtttttggtgagttctttttctttattttttttctgtttggttggttatttttcgacgtttatgcatgaatacaaacagtacttgaggtttgctggttacagaccacttgtttgtttcacggccaccatataaccttatctatcgcaaactattttaaagcatgtaaattactaaccaaaattaattgcatctttagttttacaaatagaatagaaaaatcaactaaaaattaatgacttgcacattgtgtttctgtgaaaatcgaaccgattccttcgtgaaaatagccgtgtcttcctccagatcgtgaatttggtacttcatacttaccggtcaaaagctcagaagcaacatttaagtcatggcgaaccgtatagtatatatcaaggaaaacctcataacataaacaaaggttcagaacttcagacaaaacctgttttagatgacagagtcatggatcaatctcagcccaacaacattaaaactttcagcccatcaaacccaccaagtttaaatttctcttctctcttgaatcttgatccagtagctgatccgacaacgttttgatgtttggtcgaaacagttgaagtctcttcctcttaaatgtgattatcaattaaaaaatattatttgacccaagatacatgggtattgggccttctaatgtttaaaccttttagtaacaaaattaggcctccaaaaatatttgttattgcaaaactaggttctttgtttctgtcgacaacaaaaaaaaaggttctatgtttctaaaattttcatatttagtttcaatttttaaaattatctatttactgtcgcaaaaataggccttattttcctgaaattttaagatttgatctcaagttttactttatcgacgca

SEQ ID NO: 25209 - DNA, 2377 bp, Arabidopsis thaliana landsberg
  unsure (1)..(2377): unsure at all n locations
aaatggcaggagagaatgaaggtcgaagggccgaaaaaaattgaggaagttgcacagagatgctgcacaagaacgccaaactcaagcgaataggctttcacgtggaccctcaatgaattcgtcaggaagaagagggcatatggagtttagtagtcctaggggaggaggaggaatgctatcacctccagctgcccaaatgggtagttaccatggaccacctcaaggtcgtggctttagtaatcaggacattcgatttgatgacaggccatcttatgagcctaggatggttccaatgccgcaaaggtcagtatgtgaggagcctattaccttgggtccgcaaggtggtcttggtcagggaatgtctattagaaggcctgcagtagcatcaaacacttatcagtctgatgctactcaggccggtggtggagattctaggcgaccggccggtggtttgaatggttttggctcacatagacctgcaagtcctgttactcacggacggtcaagtcctcaagagcggggaacagcttatgttcatagggaatttgcaagtctgtcgcgtgcttctgatctgtcaccagaagtttcgtccgctaggcaagtactacaagggccatcagctacagtaaacagtcctcgagaaaatgctttgtctgaagaacagttagagaatctgtcattgtccgcaattaaggaatattacaggtactatatctctcctttcttgctggtcatttgtttcatttttcgcaaagtcatcagatactgccacatttaggaaattattctgtgggaacctgtgtaggtataattggatcaaattacagttcattcgtttacagttagagcgtttgtttacaacgacagatcatctgataaagtgtatatttcttgaagtatgtaaattagaatttgctccaaacaaaacggcttaaaaatacatatgagagactgtgttctttgactttaatagaatctctaatacaggggtaaactctgttttttttactgactgtgcgttttatgtatgatgttagtttctattcgtttaccctctttattattgataagcactctggtgcgttccaatgtgttcttgtgcagtgcccgagatgagaatgagattggtatgtgcatgaaagatatgaattcaccagcttaccacccaacaatgatttctctctgggtaactgattcgtttgagagaaaagacaaagaaagggatctcttagcaaagctccttgtgaacctcgtgaaatctgctgacaacgccttaaacgaagtccagctagtgaaagggtaagtaaacaaagcccataaatcttgaagccctagtctaatcaaacgtctgttgcttaaatcttttactgctttttttttcacaggtttgaatcggttttgaaccccctggaggatgcagtaaatgaagctccaaaagcagcagagtttcttggtagaatgtttggaaaaagtgtgacagataaagtagtgacattgccagagattggtcggttaatccaggaaggaggagaagaaccagaaagtctgatagagtttggattaggcggcaatgttcttgggagtgttttggagatgataacaacagaagctgcagaagaaacgttggttgagattcgccggagctcaggtctgaggattgaaaatttcaaacctcatgcacctatccggtttaagatattagagaaatttacttaggaaaaaaaaatggaaccatcttttgggttcctttcttcttctctttttttgtttctctattaaaagtcttttatgttttcaagtgcttcaaagaaaggtaatctgttataacggcagtttctctcttttattatatagcaaaaaacttccaaaatttctcatttctgtgtttaaccttttcgtacatcagttttaaagcacagagagctcaatgttcttccaatatcgttattaataaattttgattaaattcaatcaaatcggagttatattaccacatgaggttaaagggccatattaaaaagtctgcacttcatatgagcaacaaggcttttatgtctttatggttgatttgatggcccatataagatagttcaaaggcccatattaaaaaatgccctaacatgattcgattcgtatataaagacgcttaatgtgacaagcgaacttgctcattagggtttctcatctacgacggcgtggtgttcctccttcctgctctgaaaaatggtgaaaaacctaatcctttctttttgttattgttcttgaatctctgtaattccatagcaagttattcgagtatacttccttctgtctcgttctagctntcgttttgagatttcaagtttcatagttgatctgtggattctgatagaagtct

SEQ ID NO: 25210 - DNA, 3941 bp, Arabidopsis thaliana landsberg
ttcgtcacgtgcagcgatggttcatcttccaccattacaccaacttttagagcttccgttctgttctcatccactagccagggctcctcctcatgagacacagctatcccttttaaattttcatggtcattaaaggaatcccgtgaactggttattgatctttcattagcatcctcttctggttcaggcactgtccatcgttcatactcatgcagatgaaatgctgcagctttttcagaagtccattcaaatggattgctattatattcctctaacttcaaccccgctccatctcccattgtctctgcccatgaattttcactttcacatctgcttccttccggataaaccggttcttttgttccgtaggaattttccatatcttcattttgagactccatttgatgagataccgagctgtcttcatcctttttgcttatgaaagtttcacccgccttctcaacaggaacaacagatccatctccaaccatcttacttggctcaagtgtttcatttctctcatatctatactcttgtaattcagaccttgctatgtcaaaaacggtgtcactcaactcttgtcttttgcttgagttctcatactcatagtgggactgctcaggtatagcaacttgagactcatgaaaaacgaccctctcttctgaacctccatcgtcattgaaggagccccgtgaacttgattctgatcttccgtcagcatactcgtctggttcaagtattgtccctagctcataatcatgcatgcgaaatgttggagctgtttctgaagtccattcaaatggtctgctgtaattctcatagttgctttcatattcctccaaatgtaaccccgctctatcttctattgtcccttcccatgttctttcacctgcaaacccgctttcttctagataaaccggttctaatgttccataagaattttctacattctcgtttggagaatccatttgatgagataccagtctctcttcacctgtcttgccttctatgattgtttcgaatgcctcgctcaccttctcgaaagaaacaagagatccatcttcgcccaccttgctcggctcaagagtttcatttgtctcgtatctagactcctctaacttacacgtgactctgtcactaatggtcatttccaactcttgtctttcgcttaaattctcatattcatacttggagtgctcctggatcctggatattgttactgtagcctcgcctgattggtcaagatgtcctataaacctctgattctcattcaccaaagagttcaagggagaatgtgttgtagctgacttcgcatctgaaattgtgtttgatatgtgctccgtatcttccttgactgatgtatcctcaaatggttcaccatagcttaagctgctgtcacatatagaatctcgagtgtacctagatttatccaaatgcaactgcggtttgtctccgatctcttctaatgtactttcaccttcatattcttcagtttcttgagtctcctcccattcaaactcgtaagtgtctccggtattctcagactgtacacgtgtttcactgacgtattctttcttgtatagaagttcctcactatgagataccgatctctctgcaactctctcatcttcttcacttgattcactcatcctttcgttctggtttactggaacttccaaggactcacctgatccttctcctacaatttcttctggcttaataatttcgttcttctcatattcaggctcttctatatcacaaatgttattatccatctcggttgacttttctgaatgagcttcctgagattgctctagatgaatcttggaagtctctccaatagtctcacttgatgtaggttgttgctcccttaatctgcggttccccataggttttagatgaggctgtaatgcctccaatttcaaatctaaaaatttggtggatatattccttatgtcttctttaatccctttatcctcaaatgtttctagaattttttgactcaatataacagcatcgttacttttgcagattgtttctccagaatcgtcgtctaaacacgtcagatgacttccatcaggataaatctcttcatgaccttctgatgctgaatcctggtgattagtaacagtctcatctgcaaaatccatgccataatccacaaagctaggtgaatccaggacagtatctgctttctctcgaatagagaacttaagtacaccggaacaactgccacatctcacttgatatctttgacgttttccttggggagacacttgaggaagctgtagaagttccaagcaataggaacaagttgcaaaaggtgcaccgccggctgaaggaagaatatggcgcttcactaccggattcctttccctgacataccgttttttgttccttagaatgctcttttcactacttgtgtcactcttagaaatccctacagaatgctcagagtatgtagagcggtgtggcgcagcagctggtacataactacgctcagagtacacagagtgatgcggggtttcagatctacttggttcataaagattatgatactgaagatcatgtagctgagactgagaagacctgtgatagtactttccatcagatgtctcacccggaaaacgagtaggtgaagcaacagaagattcttgaaaccagccttctctgctatactgctcgaattggtttggttgttgatgataataagactgctctgatgcagaaacgtaagacccgtgaaaaggactactgtagccatattcatatgcagaagaaggggaaggacttgctggatagaaaggaacccgaggtggatctgcgtatcttccctcatgttgtgcccattgcgcagcattgctgcgtgtgttatatggagagcttctttctgaagtaaacacatcagaatcaccggtctcactgaagtcatcagtccttctcatccattctctgcggatatcagatgtctcaggcttgtaaacagtttctggatgataacctctttcaacagaagtcgatggccttgaattgtactcccggtgagtagttctcattggagttctactaccatcttctggagattctacctcagcacttaaactacggttttgagaagaaaggagagcctcaggaatagtgtttgtgtgatcattgccgtcaggttcccaacgttttgctgcatccaaagaaagaacacacgaaaaaagaaaacacttatgaatgaggtgggttacttgtaaacatgactagggggctacttaagaaggctgttgtaccatgaagaatcgagtcgcatccaccacatttgtaagaagtagcatctaaaggttcctggagaagtttgtggcacttaggacatctcacgattctagattgagaagataatccgggcacggttctactcctcatacctctgaacatatgcttcaagtctttactacttgccaactaccaaaaaaaaagataaaagacaagcacttcagctcaaatccagaactcaagaacctgttataggaaaaatcaaagatctaagagagagagagaggaagaagatgagaagtcaccttagaacggataatggagaggagcctaggtgaaggtgaagaatctgaggatggttcaaaagttttcttggtagaagaagactgggatctgctctgtttcttcttcttcatcatggtttggtgattgacttaactctgatgaatgatctttttcttttttctttctgggaataaaactttgttgatgatctttcaagcaagcaagtaggaggaggagatatatatattatatgaatcagatcaggcactataatgaataatggtcaaggtgatgaaggttttaacagacttgtttattgaaaattattagaaatctttcaatttatttcttttcaagagaattaagatctgagagttgcattgagtagtagccat

SEQ ID NO: 25211 - DNA, 688 bp, Arabidopsis thaliana landsberg
aagacgagacagcacaagttttaagatattaaaacagtaaaaagaaagttcatttttcacgaacaaaccttactgccaacgcgcagtgtcgctttaaaattggtggtcggaacccaagttgtgtctgtgattgatctagaacacggaaacaaccagcccgtctaatgtcccagaaacgtattgcaccatcacaacccccagtatacaaaacccactcgctggaagtagaccattccactgacataacgccatctggcatatcatcacaacaagacaagtttttagcctcttttttaagctttttaactaaggaattttggcattgtggaaaagcatgagtatagtagcttattgttccagtagtcatcaattgattctatctaatacactttcttttccaaagaaaacaaaagtaacataccacggtgacccgataatgtgtgagagaatgccccagaagctatatcacagaggcgaacctggacatcttcagttccagcagcaattaacgtgtgagacattgccatagaagacatggcagttctataaacctttccaggcattttaaaatccacaaccgcctaatacatatcaaaagacaaaaattagagagactagggaaacaaaaatgatatactttcttagttaagactttagtacctgagcagtattggtatcccagactttt

SEQ ID NO: 25212 - DNA, 1152 bp, Arabidopsis thaliana landsberg
gagatggcaaaggagcttagggaccacacggacgcattcattgtgatcatgttcgttggcaacaaagctgatgttcgtcaccttcgagccatctcaaccgaagaagctaaagcttttgcagagagggagaatacctttttcatggagacttctgcacttgaagctgtgaatgttgataatgctttcactgaagttctcactcagatttacagagttgttagcaagaaggctcttgaagctggagatgatccaaccactgctttgcctaaaggacagatgattaatgttggaggccgagatgatatctcagccgttaaaaaacctggttgctgctctgcatagacacacttctcacttttttcttgtacttttattactaaacactaacatttttcaatattttcctgcaaatttgtatacattcttggaattatcagacaaacaaagttcacactcaaaagtttttttagtttcggtttcactctttacaatcgcttgctttcgtgctctctctgcttctaccgatcgatgtacttctgaatgttcatgaagatgttccattgttgacgcgctcctttttccccatctgcatatagaggtaaaacagcctaatcagtttatatcatatgagcgtgaaatcttaaaaattgtacttttaaatgtttctttcaactgtgagttttgtctagtaatgaaaaagctaaagccaacatggaagcagaagaagaagaattgcagattttgagtgcaacacaaacttaggaattatccaaacatacttggtacttgagaaatggaccttccatattctgatatttcatgctaatgtactgaaaccaattgcgaaaacagaggactatggaactcatttataatatcactttgtatggattctatatatgtgagtagcaaaatgaacctaaccatgaaccgtcttcgcttttttttctgcataaagttggataatattcagctcaaagaaaactagattctgatcttaatcatctataagtaaacaaaacagagtccatacagatttcgatatcttaggatcaagcaaagagtagttcaataagaaccaaggatctacataaagctataacaatcctaaaatgtcaatggcatactagagcaaattcaacaatttgcttt

SEQ ID NO: 25213 - DNA, 1667 bp, Arabidopsis thaliana landsberg
gtctggtaatctactcattgttaatcttttgtgttcttgtttctattgaccctgcacactacaaccatctcagacactgcaaaacaatgttctaaaaagagtgttttgttcctaaagtaaagataacatgaaagaaagggaaagctaaaactctccagtcagtgggaatcaacagatagtaattatattcgaactcaaatagctgaatgttgaatatcaactcatcaaaaagaaaagacaaataataataagtattgacagaatctaatggagttataccgatcatgagatactcttatagcgttgaatgtcaaatgtctcagagtctaatttggacgaccaaaaggatcgtaaagcaacaacactcaaccaccatcgaagctaacagatagctagcttcttataaagataaaaaaaatcaaactttccaataaaaatgtcaactttgagcacaatgcaattgcagagaattcgaaaggttatgaaacattaatcaagtcaatcaaagggaccatcttcagggcatagagttaaacaagaaaaccagaaattgaacctacctggtaaataaaggatgcgactttagtcaaacccaatacaaaaattgagagaagaaatggtggaagcttccatttcacagagcaatcaatttcagaaaataaagagagcagcagaagaagaagatgaagacccacgttggtgttgctaatctcagatacaatcaatgggttcttataaccagagaatctaaaaaagatttgaaaagaagaaacgaaaataataagaaaatgagacgagttggtcatgttaatggtcaaaggaggatcagtcgtgggtatatactcttttgttctctcgcctgaattttcttcattatcagagtggcagaaggagagtgtgttctaaaagaaagaagttttctccagccttaggctgtgactattagtttaatcatagtttatctcttaattccctaattatttggtatttaactacattcctggacgccattattatatcgagtttggccatagttgcacgcatgatctatgtcttcctcgcgtctatttgtctcctcccctttatgcatagtggagtggtacaagactttggtagagttcacctacaacattggtttgcatttgaaccgtgatttggccggttcaatttaagcgccggtttacgagttttaacctctggctgattaagtaaccaattttggcgaaatccaaagacgaaggcaaaactctctggctgatcaagaggattcgattaggctctttgaccttgtcaacaaagaccttagaatgaaagcattcaaagagaaacactcaaaacatggtatgctcaaagataacatcccttggatggctataagcgacgtacttgaaacacgggaccacgtgacttgctgccagaaatggtatgagcagttgatatcaccaatggtagcaaagggaatgtgggctaacgttgatgactataggctcttggaagagcttttgaaactggatgctgcttgtatcgacgatgtggattgggataatcttttggagaatcgagatggagaagcttgtagaaaacggtggaaccagatgatcattcatatcggcgtaccgaaatcgaaaacatttgcagaacaagttgagattttgtctgacaggtat

SEQ ID NO: 25214 - DNA, 1136 bp, Arabidopsis thaliana landsberg
ttttgtgtgttgtcaagtcctgagattttggagatctctgtgataaccaaggaggaattttccacaagagtctaatcaagtaatatcagtttcatatcgtctgtcttctctatccaattttttgaattttaaccttttaatataatttgagacgaaattgcgtctgtatgacgtcaaccaaattaccatattgttcatgctaaagacagacaacttctcatctaaactctttgattattttcatgccttatctcgaattcatacaactaaagcagtctttgatatctgttggaataatgaaaagttgtatgaggagattaagaagtgaaccaaatcaggatcgtcacatttcactcaacgtctataaaactctctcaagacgaaccacttcgcttcaacttcaacaggcctactcatctcctttcatgttttcatcgtagcttcttcaattcggattgccaaaattgggtcgttatttatctgtgattgtgcatagaattttattttgtatagatccacccttacgaaatgagactcgggctacccaaaacatgatcaagtcacacttagagatctagattttacctattacacaaaaaccactcaaataacgaagtttttttattatacattatacattacagagtgtagatgatcagtttggaatctgaatcaaaaacaggaaggatagctttaaaagagtcttctctcaggagagaaggataaaacatacacaaacagaacaatcctttctagttttcagaggttctttgacactgatcaactgatcagagcaaacctgtcttagttattactaatttaatgtgtgaagaaaactatggccgttttgtaagttccacatcatctcaaagaaaccatgaactcgtcttgattttacattaagagcaagaattttgagtctggaaaacaaaaagagtaaggtcttaactaggtgtaccgttgccttggcttctgtacacaacttctagacattctttggctcgatgaactttagattgaaggtaaaagctccctgctttcgcattattctcaaacagtttgtcatatttctgcattcatatataaagccagtccttttagttattcgattcagagttccaaaagtaagtcattca

SEQ ID NO: 25215 - DNA, 3383 bp, Arabidopsis thaliana landsberg
  unsure (1)..(3383): unsure at all n locations
gcgcatgcatccccatgaccaccacatatctttatatttcctctcttcctaaacatttcattcactataacttgcgcatcaacaggtggtagttgcataagttccttcttttgaacctcatctagtccctccatcttttcaatataaggatgtaaagaaaacttattagtcaaaaaatcagctggcataggaatacttgaatattgcggaacgttatcaagtccaatgatggctgcaagctcattctttgcagaattgatttgttcatctaaattttgaagctgatttttgtagtggttaaagatgccaacacaaccaaatatggggtcacgttcaagagcctcggcctcgtaacacaaagcgtttacagcagtttcacgttggataggatccagattagctaggatcttgaagacattacccgctccaaatattctgtgaaggcgttcgaaagtttcgagattggtcaatgggaaatgtggtgcaaatatacaattaggagcacaatcacatttcatgaccttgcatgcagagcaacatgtggaattcattcttcttctttttttttctcgcttacctagtaaccaaaaaacatatatgagaataaaatcatccaaaaaatttatatatgcatattttctgtatattaacaatatgattacctcaagaatcttgaatattctgatatcacaaaagaattaaggtccaataaatgtggttgatgtgctatggtaaaaaatggttgtgtgggttttatagtcaagccttgaaacattattcaagttgtaattttacttatttaggtaagttagcaatgaatccaataaatatcagtttgatttcttgcttatgcttttttctagataactagtaataatataatagatttgactaatacatacttcattcttttggcaagataataaaatgaagtagtcaagtcaaatctatcaaattattactagttatggagaaaactcatatacaggaagttcaattgataattaatggattcattgtcaacttacctaaataattaaataggagtttgatagattttgactaagaacacttcattcttttggcaagctaatgaaaaaaaaaatcttaaaaaatgaaaatctttttcaatgcattgactaagtgactttctattgacaaaacctaaccaaaccgaagtttctaaaccaaaccaagatctttggtgtttgaatcggtttgagtaatgagatcaaaaccgattggcaacaattgtatatgcaataggttatttgttcggtcttgttctgttcatatttactgagcggctaaccaaagtaaaaacaaaaacaaaaacaaaaaccctaatttccgcctttatcgccaaatcgacaagcctttccgtaattacttttgattttctacataatttgagatctagatatgtaaatcaataccagaatcatgcttttgaattttcaaaatatctagaaataagggttccacaagtgatggcataccaaaagaaaaaaattgttcaaacgatatccatcacccccgatcacaaaaactttatatactacaagaaaacatggtgaaatactacctattttcctacgaaaaatttggtatgaaagatatgaaatatttcctaccatatctctacgattttcttacgaaaacagattttgtagatgaaagatatgaaatatttcctaccatatctctacgatttgttatgaaaacagtttttgtaggaaattagtagaaaattttcatacgaaacttatcgtgagaaagttatacgaaatttctacaaaatatatagttgaaggaaaatttgtaggagattagaaagaaatttatgggaaaagaaatgataagaattgggtcggaaaatatccttttaattccctatgaaaactatattgaaggaatttggtaggaaattactaggacgcggactaaggaatttttttatctgggtcaaataagatatagaaaaattggtatatttatagttttggaaagttgaatgtaatattagaagaatctgacaaaagaaacggtgacaacaaaatatatgggctacggcccaataaaatatatgagaaaaaatggcaacaacgggaatcgatcctgcatttgtgtgggggggtgggggtgggggtcaaaattgtagcttcataccaaatcagtcaccgaaacaagatgaaaactatttaagatttaaaccggaaaatttcctaaaaatctcaaactatttaaaacgggtttaggtagttttctggcagattttaaataaatcgggtttttttcgggaattttcccgatttaaaactaaagggtgtcaaatgacccctcttttcaccacatgggtccgccattgggaccaacttttccaatttcctacgaaaacatagtcatatgtttggtaggaataaacaaacgagactatatcagtaagctaagtggtttctctcccaagcatgattatcaaaacttctcctccgactttgttttctattggattggcttctccgacgatgttggcggcggtgtacggcagcgctcctcttcctagaggtttcctagggtttctccttttgggtgggcctcttttgggcctatttgtttatcttcagcccatccttggatttggtagcccattttctccactagtttggcccaggtctgttactcttaaatctctaattagcccattagaattgatatcccgacttagcgccttaattggttatggactctgcttaagctttttgttgatttcaatggttttggcgtgtaattttagctctagaacctaggccaattgtaattcctcaagtgcttcatcttctcatcaaagtttaaggctaatggacttggtgtatctaggtcttagatatgctattagattagggaataacggcattatgatctcctccctacggagagacggttaccggaatttctttattcctctctccccaaatcccttaaatattgaatccgagccatacttggctaacggtttttaagattgatattcatgaaagcaaggatttgagaagctatggcattatgagaccggctctatggagcagtgcttaccaaatgcttctcaactctatacctctaaacccaccgggtgacagaacccactcaacccctctccttgtcgacgaggatttcctgcttaatctacctgggacagcgagaatctcgactttgagaatcttttcaatgtcacctcatctattatggaccgtgaccatcacttcgtccaccgctctgtttgtggatgacgttttgacaacccgtgctctcactggtaccagtcggctccgtagcattggccctcaagtttcatggatcctttggcggntatctttgctatcttt

SEQ ID NO: 25216 - DNA, 1373 bp, Arabidopsis thaliana landsberg
taactacttaaaaactttttttggttgaagtaagtggtctattatgattataaaccaaaaaagtagaaatagtggtctactatgcagttgaatcagttaaatcataaattaagtgcgagctagcaagctagctaggtttttattttctttgagggttatgtgatttccttgacaaaaaatggttatatgatctctcttcagaattatttaattgagacatacgctaaattccctgtaatattaatttctgataaaaaaaaaaaatagcaaaagttaagagttaagacatcctcatcagcataccagcaaaagtgacgtgcacattggttcgcacatatagtcataatatttctcaataagggtaataaagaagaatcatttttgttacacgcttaccccaaaaaaaaaacaaaaaaaaacgtaacagtgtaacacgcttatttttcatgatctagtacagataatatatcgtgaaacttccaatgtgattttattactatttctaatggatgggaattgaaactaaagttagttgagtgacttgagcatttagtgatatttattggatgatggacattagtcaaaaccactttcacttcatcaaagacattgcccacatgttcacatttttcttcataataaagaactaaatacagataagttgcgtatggttcgactttatttcaaaattaagcagggaaaataaattaggtcgcattattcatattttcttccgggtagtgtaatcgctagatgtattttgctcatcagattgtgaaagttgagtaactcgtgactacgtgattttatttcacaacattcattagtcaaaaccatttcttaagaatgtagttagaaaaacacctattacgtaaaatatatacttgcttgattggagttaattgatatattatgcagatcaaatcaatatgaacaacttatttcccctccacaatgaataattgaacggatgaaagcaaagttcaaatattggagcttttggctaaagttggtgagattccttacggtgaaaagtaaagatggagctaagtaaaagtaattaaggtaatttttgtaaacctctctctatataaacaccttagttgagaagattaatatcacatccactaaaaacatttgctccttaaaaaaaaaaacaaattcgataatgacactaaagggagctttgtctgttaagtttgacgttaagtgtccggcagacaaattcttttcagctttcgttgaggacacgaatcgcccttttgaaaaaaatggtaactcttttccattatttacatcaaccctcctcattgattcatcattccattcatattcttgatttaacgctaattaactacagtgtttcaaccata

SEQ ID NO: 25217 - DNA, 1535 bp, Arabidopsis thaliana landsberg
tttaactagttaagtttaatttgttttgtttttctcttttaaagaacccatccataaccattttcattttatatagccattttattttgcgtttttcagtactttcactttttagatttttaagaacctttgaatttgtaatgtataaacataacttaaagattttttagtagcgacggtttcacctcgttagcctcaaaatcattcttgaattttgatatgataaatattcagtagtaaaaaccactatagtacaaaatctagtaatgtgtacttacttaaacgaagactgcagttattgaggtttttagagcctgtcatctataaaatatattatgtatcttaacagcaatgtgatatttgcaatagctgtggttgacatctagaaaattttaggggtgatttcttattttagaaaattttaggggtgacattaaaggacccattttaaagaaaacctaagcaaagatcatcacacaaaaagattatagctagtatccttcgggagatcaatcttgagatatatatttagattatcccaaatttttatgaccaggaaaatagaggataacccttgactttctgaatcatttctgtctcttcttgtgaaattcagcattcgtttcctctccaatttacaaaacgttaaaacaaaaaatagaaacccaccaaaaaaaatataacaaaacccatcttcagatattggatcgtgttccttgtcttccaaacttcttggaacgtcataactaaagacaaaagagtgccgaccagatatgggaacatataaagctgaagacgattacgattacctcttcaaggttgtcttaacgggagattccggtgtaggaaaatcaaatctgctatcccgattcaccagaaacgactttagccacgactcacgctcgaccatcggtgttgaatttgccacacgtagcatccaggtcgacgacaagattgtcaaagctcagatatgggacactgctggtcaagaacggtaaattttcctatctataatttatcatcgtagatccttgttttagttcttagaagttgaaaattttggttgcttccaatctcgactttcattttaattgaaagcgttgttcgcttggcagtcgctaaggactttgaccaaaactttgtcgtatagaccaaaatttgtagtggcttatttattcagttaacataataacatgtcgtagtcgccaacgattgtcaaacgaataggttcatagtaagaactattcgtaacatgagatcaatatttctgattgtggagattttgtttaggtatcgagcggtgacgagtgcatactacagaggagcagtaggggcaatgttagtttacgatataacaaaacgacagtcgtttgatcatgtagcgagatggttagaagaattgagaggacatgctgacaaaaacattgtgattatgctaataggaaacaaaactgatcacgggacacttcgagctgtaccaaccgaggatgctaaagaatttgctcaaagagaaaatctgaatttcatggactgaa

SEQ ID NO: 25218 - DNA, 1303 bp, Arabidopsis thaliana landsberg
  unsure (1)..(1303): unsure at all n locations
atatatttataatatgggcttcaattcatgaattgtgtcatttctgccatatcttggttctctacggaagggtgtgatctttaatcatcctttcaaatacctcacataatacattttaaatatctttcatttcatacactgtatcaagtctaggggtgggaaaaaaaacgaaaaccggaaaaccgaaccgtaccgaaccgaaacaaatggtttggtttggttatggttttgtataaaaatccttttgattgtaatttttatttaagttttggtttaggtttggtttggttaaaaaccgtaaaatcgaatgtttttttttgtttttgattaaattaaaaataattgtatatatataaatataatgtccatttgatatattatatttaccaaactatcgaaaaacaaaaccctaaccctaacctaaactaaaattcaatataaattacatgctatcatttaggatttgggtatacaaactagattttgattttatttatgcattatacttatattttttttttggtaaaaacatgaaaaaatcggaaccaaaccggaaccgatccgaaccaaaatacatatggtttttaactggttttaatttttctaaaaccgaaaaaccgtaaaaccgttaaaaccgaaccgtaaccaaaccgaatttcatatggtttttatatggtttcacttttcttaaaaccaaaaatctataaaaccgaaaaaaccaaaccaaaactaaaccgaaaaaacaaacgccgagccctataaaaaacagtggctataaaattctaaagactgaaatctgattatagtacagtttcataatttcgtatacgttataatagaaaacatgtaattgctttatgttcgtcaaatatcacaattttaactatactatatataatatcaaaatctcacacttttctgaattgccaaagtatatatacatgtgtgattatcactcaataaatttgaaatctaatntacatttaaatcttcatagttaaaatctctaaaataaatcttcattcaaactaaactattgtaacgcccgtgaaccggaaaatcggttaggatttgtatttaaattgtccggtttaatcgattggattaattgaaaaccttagagtgtgcctgtaaaagaagaaaactcgaaattagggctttatttagccacttttcgttttataaaggagaaaaagagagagaaggagaaaacctagaattgttagggtttggaggaaatggtttcgccaaacaaatcgttgccaagggaacaaaatttggtagggttattcccaggttttga

SEQ ID NO: 25219 - DNA, 1330 bp, Arabidopsis thaliana landsberg
agcagtgaatgtagacctcacgaagtcacacccttgtaggtctgccaagaacggtccgtacttgttcaaaccatagcttacattaaccgctgcagccatctggctgtaaagctttggtgtcaaccgtcccggtgtactacatgttcccggtgttacaatttggcaagtgaagttcttccacacctgcataaaaacaaatcataagacagactgatatgacttgggaatttatatatcatattatgatggaatcctcggattacctcggttgcattattcagatggacctgaccaggctggcattggcggtcagagagatcagcgttgaaggggttacagagtagaggcattagtggacctgactggttgtaataaagaggccggaattgaggcgggaaattcctgttggtcatgttgctaatggcattgtcaagaagattgaccaactggtatgttacaagcttagtccgagtcaatgtttctctcgcggttgcattatcaacacacggtagaatatcgtctagagccgtgtgagctgttgggttttggacccattggtccatcgcaacacacgtatccactacaacgctgacaaagcagaagccatttatctcttctaagaaagctatcaattcttgagtagacaaataatggtagtgagagaagagaactcacttgtgtagaagtaaaaatccaccacataagacgaaggtaaccgtgacgagaatccaaccaaggatcaccaacctgtccattgataatcacaacaaccttttcagcatatagtggaaccaatgtaaaacagaacataagaaaatgagacttcacttacgtatatacaaggcattgcagtccaaaaatagagagaactgtatgagaataatgcaagttaagttctgcaagttaaagaatttgctaatgcatataacatgaagacttacgaaatccgataaacgcaaggaaaagcatcacagcagcgatgatgacgagagcaagtctcctacaacaattagagacaaaaaatcataagcaaaaaggtgaaaaacagatgaaagataaagatatggtacagaatatttacatgatgtccaagacattttgtatcttgtcttggttctccattgttttcacagaaagagttgtggcggacgagtttatctttccctgtatgttgtcgatactcgagagaacatcttgtggcaaaatgctggattgcacatcaaccttcttagctgcattaagataatctgacacattcctgaggttttctgacgtgagattcgcttgactcacgacatagtccaaagtatcggttgtgctagcatgaaat

SEQ ID NO: 25220 - DNA, 1164 bp, Arabidopsis thaliana landsberg
agaatgaacaaaattctctttgctttttgggcactcattttcactttgtcactcacattcactttatttttgggttttgagttttccctcctttttattttcttgagaaagtgagagaaaaagatggaatgaattgaaaagggttgaagtgagtgaaagacattatgatcgcatggtgaggaaattgtcaaactcatgtaatgctaaagttggtacaaaatatttacatctaaaatctcttcttctttttattctttgaggagaacactccattttcccaacttttactgtttatttttttgtcacacacaattatcaattttgaccgagttgaaaaaccttatattagttgagatttgttgactgataagttatttagtttagtgattataatcactcaccaattgatgttcatcttcagatgcacatcgcagtttaaagttatcttatactaactaaatcatgatcaaggcttattattcttagttgctgatttagatatatgtcttaatgtttttgctcatgtaggttggactctctttctggattctacgagatcgatctatggcttttatgtttatcttggcaagtctcttacctcttgaaagttcaaaaagcaaaacactattttcgaagaactattaaaactaatacagtagcattactaataataccaaatatggactcacctaatcggaataatatatatccatgtgttactttaacaaaataaatgaataaataaataaagatatatatatatatatatataacggagcaaactatattctcatttttcaaatagaattcgtaacatacagtaaaatctctataaattaatcatgttaggatcataattatttataattagttttggtctcattttaaaactttctgaaaaatatgagtgaaaacaagttgatctaaataaaatgaatggtttatatgttataaatgtttgtagttttagacttaaacatttaatatttagaagagaaaacattttttataatgaataaaaaaagattatagaattcacatttacaaatgatatacataaattcaaaatttataaatagtgacatcaattgtttaaaatttgaaaatttacagaaaagaatggataaatttataaaaaaacttaaaatatataatttacatgat

SEQ ID NO: 25221 - DNA, 463 bp, Arabidopsis thaliana landsberg
gttgatggcagaagaggaccgggccttgctagttttgagcgtccaccggaacctaccgagaccaaagtatgctgctttcaaagcatatatacgataaatatcatactgggtatagcaggataagttttgaagcaaagactctttctttacttagcaggatatatcataccgggtatatctttctccacatcagagagcaatccttttctcctgagatcctcgaagggcaacagcagatcagaaatccacaacacaaggccatcatatacaaacgatatataagcacgatcaaagtgcaaaactgatcatctggtacgatttaagtaactaaaaatggatgctgatacaaaagaaagggttacacatccagaaaaaagggattcagagaagaaggtttgggaaaggatggtaagggtttggctcaaaagtatttttctttctcatctcatgtgtttgagatttt

SEQ ID NO: 25222 - DNA, 9967 bp, Arabidopsis thaliana landsberg
atcatctatttaccaaaaaaaactaaaaacaaataaaatatgataaataaggggggatattgttttttaaaaaacaaagaaaaaaataatctgtcaccaaaaaaaaaaagtctcggtttaatttggtcgggtctccggatggatccggattaacaggttggatcctgatattttactaatttttgatggttttattgagaaaatatttgggaagtccctttttgcacaactctaacctcatatctccccgagaaaaacagaagtcatttcttgtttacttttaaataaaaaaatggggatttgaccagtataccccaaccgaaatccaacttttacagagaaaacgtagatctatccgaacccacacccgacccatttcgtccaaacggatattccatgtttcaaagaaactcaatttccttcttctctctcaaaaccattctctctcaaactctctcaaccgaaccctaatctcctctcttctcaaactcttcgttatctcaaccatgaaaaacattgacctcctcctcaaactcttcattcgaagaaccctaatctctctcgtttcagataatgccgcctctaaaaaagaggaagagaggactaacaaaaccaattgatggaagaacaaaagaaacgacggaggagccagcagcgaagccaatcaatgctgtcacaaaggcaacgacgaagaagccgacaacgatggaggagccatcatcgacggagcaaaatccggcaattgagggaggaggagttgaagaagaaccagtcccaacctaaagtccgattttagaggcaatggaagaagagaagtctgacaagaatgaggaggaaaagtctgagaaaaatgagaaagaagagagtgatgaagaagagaaagaagaagaagagaaagaagaagaggagaaagaagaagaggggaatggcgctggaggagagtcctccgatgatagtagtagaaccttgggcgaagaaacctcgtccgatgagaatagggatgatgagactacagtggaaaatcaagtagaaattccggcagcaatgataagtatttctcaagtatttgaatggtatgaaactagtagaacaggataatactatgatttctggagaatactgtcattactaggatataactatgtgtatgaattttgggtaacattggtagtactaagatagaactatgtatatgatttgtaggtaatactttcattactaggatataactatttgtatgaattatgggtaacattggtagtactaagatagaactatgtgtatgatttctgggtaatactgtcattactaggatataactatgtgtttctggttaatattatcattactaggatacaagtacgtttatgatttctggataatactgtcataactaggatataactatgtgtatgattctaggtatacttggtagtaatatgaatgaatgtctattgctggagatcgacaaagaaacagaagcaataccaccgctgagtatgtaccgccgtcagaatatgcgaagaaaatcaagctttcaactcggtgctatattcatgaagtgttgactacattcgataagttgcagcttgcgatgagcaagtccgagagggcatggtttgagaatcatccaagtttccaatacatcttcgcacgacgcgcattgaaaggaagaaagaagcgtggttcatcgtcaatggcgttccaatttgatatggtatatcggaacacgcattgatatcgggcttcaattgcaagaactatacacttgggtataaaaatcagggaaatttggatttcaagaagaagcatttcaaaaatactgttgtgaaacgcgaagacatgagagagaagctcataggaatatgatataaccctatttttactgcttttagctatgatttaggtatagtttttagagtctatttgttattctagagtcttttatagtccttttcaggtctttacatgtttgggattcatttggagacaatggagcattctggaggaaaatagagaatttatgctgctgaagaaattcagagactaaaaaccgcgtaggtgtcgaacaacaccactcctggtgtcgagcgacatcaatacctgacgacaattcgaagacgtaacttattgacgttttgaagatctctaaattcggcccaaaactttcgcctatgtttaatgaaggcccaacacgtttttaagacatatatattttttaggtcaatgttgagaccctaagcttggagaggctattctcctcatctcttttgtactttgggagcaaaaccctatggagactctctttggaaaagatcttctttactctttctcttgctattattgatttcttattcagactatgatttgtgttctattatcatatatgagaaatcaagttggttggtgaagggagtctcaatagggatttagattgattagtagatcgaaaaccccttaggattattcttagagttcttcatcttgattgctcttattgctagttttagattgatcacctagaacttgatattagataataggtatacccaccataggtacttgttatttgaactatcatagatgagcctatgcatttaagaaagaacatataggctcaaagaagggctctggtttagatactaggtgaactaataaaacttgataataatgcatgatttagtataggatttctcggcttctccggttatcttagctctaagtatagagagttttgcagaatgccactggttactctaaaatcatagtttgagtttgagaacggtgcgataacaatcctgatactagctagatctacaatttatctatctccctagataattccttagacccgactctttaatcacttgaatctacaactcatttacttgctttattgtctttacattaatatactttgtctagcttaattaaaatcatcacaagtttattgtgtgaacatcgagagctcagtggaatttgacccttaagtgctaacgacgatctcttatttgagggagtaagcttaaggcaatttgagctatatcaccactcacacgacgcatcgttcttagtgtcaacaatagcaaaagctaaaggaaatatattgaaattttcatcttgggttgttgctaataatagcgtacccaagtatttccctttcaaaaatatcgcgtccaccacaattacttttctaataaatgggaatccatcaatgcttgcaccaaatgcaatgaaaacatacttgaatctatctaacacatctatttcaagccttcttaaatgcaatgcttttcttatcatatataagtaagatggtagttggtcatattcagattcatcacttcccctaactaaatgcctcgcaaacttaagtgtacgatgtgacatccaataattaacctatatatataaaaataataaggcatgagacataagagaattctatataagtgccagtatgtaatactatatacctatttagctttactttaatgccataacataggtttagagcatctgcaacatgaacaggttgaacaccagctcgaacaccaccaacagattccttgtaaatctgtcctaatatagcatgagtagcttgacgcgctcgattagaacgcgctgtcacagagcatgtatggtctgatatatagacccgaatttcaaaacatgaaccaacccctgtgggtgccgctcgaactctccatttacaaccgggcacccatcatttgatagtatacaactccagggttgatcgaccaacattgaagtcaaacttctgaaatcatcttttgaatcaaatatttgaccaacttctaaatctactacagaaccaaaatcaaggttcacaaactcattttttctactataaacttgttgtcctcctgatgaactttcccatagttcaaacaaattgtcaccatttccattatcaaatccacactggttttgatcttcaaatacgttgcgcacacactagactcttcatccccgtcactcgctccatcagcgtcatcgaaacaatcaaatctggacatctcgtcttcatccttttttcatttgtatcctcctctgcatttacatcctcaacttcatccatattttgattagcatccccctcctctatcgaagctcccttcatatcggcgtactagataataggtttttaagatcaattatcctaatgcattatcatgtcgttgtagtactgaaggttgtcaatccaaatgggtgtgatactaacaatcaagatgtgatcagaagtcactaagtcaagccaagcaataacaggttttggtgtgttctagcagtcctaagtgaacaagcagaaaacagaaaatcaagcagaaacaaataaacactcgaccaacacagctcgttacagagcactgggtgtggtcgagtgataggtcgagtaacagacagaaaatgtaacagggatactcgactgcacagtctgttgcaagacaactgggtggtcgagtaccaggtcgagtaacagtaaagaattgcagtaaacagaagtagagtaaacaaagagttcaatcagataaagaattctccaggatggggtaatcgagtagtttcgtttccttagtttacaggtgattgacatgctcaataaattatccctagacaacaagttcattaaccaaatctaagtgccaccgcaacagagaccctcaagttaacctagtcccaaactgaatcaccattgacgagagctaacctaacaggcattacgaatcaacaagttaaagccaaaacgctccctgcaaccaataccttggtacagggccacgaatctctggaattagtgtttcattcatttcatcgaacaccttttgggcgcggaaatgtctagattcaaattccagttgatcagaaagcaataggcattaagaacaactaatccagaagggatctatcaatcaaactcaaccacctagcatagggagaattctaaaatactctaacccatcctcagaaacctattcactactcagacttcattgtagaaaacataagcgttgaatggaatgaaaacatgataacaacagagtaatagcaggatgataacaggatgaacaacaataaacgaaatcaagaacaaatattgaatactgaatagattagagaaatccggattacaaaaggtcaagaacacactgtctgcagaaaaataaaacttagatcaaaacttgttctcgaaaatgtaaagtacatgctacttatagcaaaatatttcgaaaccctaatactcaaaacgatgcagtattggaacggactaagaactgtacttgacccaggtggtcgagtgagaggtcgagtgataagctggagtcttcttttcttccttgtgctcaagtgtctggttgagtgcggaatgaagaagattctgaagctggcagtcgagtatgtagtcgagtgctggtgatggtggtactcgacttcaatgtagagtggtgagatcgagtagtggtctggtaatgaaggtgaagacactcaacctcggggtcgagtgatgtgatcgagtgatgggatgaagacactcgacctcggggtcgagtgatgtggtgaagtagtgatgtcctctactcgaccagtgggtcgagtggtctgttgagattttgaagcccctactcgacctcggggtcgagtggtttgacatgatcaggtccgcttcttccagatagctcgtcaacagctccaaatcacctgaaattaacgcaaatatgcaacatgcatgcaaatctatcctaaacatgtaaaatgatgacaaatggtataaaacagtgatttgatatgatgctaaagtgatgacaaatggattctcaaaacatgcaaaatacacacttatcaactcccccaaacatagtctttgcttgccctcaagcaaacaatcaagaacaagctggaggtgaggtttgaaagcggggactcacagtcaaagcacaagataaaccagataaaatcaatgtccaagttaaaagttctaagctgcaagatcgaattctacttaaaaacgttagccatgcctcattatcaatcaatcccactcatatgctcgacatacaaatgttttcaaatctaccaatcccttttaagccctttttctaatcattcttttcttttctcttaactttaggagaagctttctcaacactttgatatatctagcggatttggatttctttaacaacaaaggttcctgtttttaacattttaaaaccaagggcttttgcccatctccaatagctaacaagaactctttcttttctttacaaatcccaaaacctttactagactttttctgcttctttagcttacttcacctagagtcctttaccttttctcatcaatgaatcaatcccttttttttttcttttaaacacatcccaacccaaagtataagcgcccacctagtcctatctagtccgaaaaatgcgaactagaactacatgagacactatctctgtcgttacgaacctaacactttctaccaagcttaatcggaataagacctcacaaacactcacaagtgatatagggcttgaaagaaagtctaggtttgggtttgggttaactgctctaataaggagagtcagctacttgaattaacaagagtgatcaaaatgaataagaaaatccaagtattttagggtatccatgagttcaaatttgatgcagacatgataattaaagatcagattcaggttcaaattgatagggaatggtatcagatcatgagagtgtggtcgagtagagcaatctaggcatggttcagttttatttcaaattcattgactacgcaacagacaactagcaacgaaggcactgagtttattcggtgaatcaaaatgcttacaagactatctcatcatcatcccctatgcatatgcaacaatcctaaatgaaacattctagactcgatcctaaatgcgatgcaactacatgaacattcctttttgtgaaatcattttctgaaatttttcaattttttttttttggtttttctatgccttagatgaatgcagactcaaaaatatatacaatgcaacacacactttctaagccctcccccaaacttaaatcacacagtccactgtgcgaataaatttggaagagagtactcatgacaaattcaatcacagaaacgaaatgaagaaacaaatcacaacagatgatataatacaatggtgaagtgaggcgcgtacctcaatcgaagaatgaacttatttgctcgtcaatggctgcctgtgattgctcccaggccatagacgaaccgccctgttctgtatcagctccagcatgtgggtactcgacctcagtgcctctatggcggccagcaccgccatgagtatactcgacctccattctttggccagcaccgcagtcgagtgatctcctgccgtggataagctaaaacatggtcgagtatccttcattgctctgtggtcgagtatagtgttgcactctcagagccagaatccacttcactcagctctttatacttatctcttgaaaacactaaccaaatgcatcaaaaacaacaaggaaaaataaagatatgtacaaagatagacatgggatttgctcccaagtgagcttgttttaggtctctaagcttgacttctcatactcattaggcttagggtgggttatagagaggaaatgaggtctcctctccttcttcagtagagtgatcatcatactcattagggtttcttgacaggtctgcaattgagtactcagtggccatgtcctcacagtaagcttcttttttatcaagatagtcttctcctctagaccattccgacgtgaattcacatccttctttgctgactagtatagtggctccatcgtcaggggcgtccttgatgttgagtggtacttggttggcttttccattgagctccttgatttgatcctttagctctttcacaatatgtgttagctcttgtatggatttgtcttgccatttagatctctccttgagttctaaccaatcatctgacatctgagtgcttgccttgagttgtttggtcgagcatgagctttcaggacaagttggagacttcttcgagttgttggtggaattagttggtcgagcatgtgttgaacttacttcattagctttcatgacctttgtgtcagaccccatcaagcccttgtaaacctctgagccaactactgccttgtgtgagtctaatgacttcttagaactcaaagtttcactaaggagatacccacctttaccactcttgatcaaaacagtttttgaattacttgcttcttcaagttccactagcagttcaccagttaactgttccacttccttaactaagaaggtttgttcttctattgtcggcttcttcatagcatcattgatatcaaacttcatttccaaattcttccccagattaagatcaatctttcctcgcttaacatttatgattgctccagctatagccaaaaaaggccttcctaatatcaagagatcttttggttcttcatccatgtttagcactacgaagtctgtaggcacctccacatttccaatcttgataggcaaattttctaataacccatgaggtagtctaacagacctatcagccaaggagatattgcagtatttatacttgttgaaacccaacctcttagctactgagagtggcatgagatttactgatgctcctaggtcataaaggcatttattgaaagtcaatgaacctagggagcatggtagagtgaatgaaccagggtctcctagcttttctgggacatcgttctcctgtatgatggcactgcactcatggctctaaattgttgttttttgaacctcttgaattctctccatgatcaagtctttgaggaacttttgggaatccgggatacgcgttagagcatcagcaagagggatccttaattcgacttccttgatgttcttggcaaatatagctctgtacttatcttctaactctttcttgtgtcgaccagcaaatggaagtgtgggcttgtaaggatgaggaatgaagactttttctttgtttttgacagcaactggtttcagagcagttggtgatgttgctaggaaggtcggtcgagtaaaggggtcgaggggcatctcgagtgactggtcgagtggctgctcgagtgactggtcgagtggctgctcgagtgactggtcgagtggctgctcgggctgctcaagtgactggtcgagtggctggtcaagtggctggtcgagtggctgctcgagtgactggtcagcttgatctttattgagactgaaatcctccctatcttggtatgcactgtcctcagtgactgactggggtctctctctagtggagaactctcttccactccttatggtgatagcatgaacattagcatactccttgggattctgaattgacttccctggaagtcccgtaactttgggagcagaggtagatgcggattgtccttctaagtatttgactttggaattcaacgcctccactttagcattcaggtcatgctagctgcagtccagcttatggtgcaattcagataacttcttaacaatttccatggagctagatgcttgtccttgtagcagttgttgtaccatctgtttcatttcagcatcaggagcagcaggaccttggttttactgaggtgcaaacccaggtggtggttgcggctggtagttctcctggaattctttcttgggaatgaaaccttggttgtagggaacaaaaggtttgttctgaccttgttgttgctgtggaggatacacttgatcctaaggattagcaacgttggtgctgcggtaggagaggttggggttgttggttttgaagttggtgtaccctttgtagctactctagttgttgtatgatgtagttggcctcttctaactggttaccctctccatcttggacttgatagtgctcgtcatcaacaagcaagagca

SEQ ID NO: 25223 - DNA, 803 bp, Arabidopsis thaliana landsberg
tcgaagggtcattctcctccatactccatacgctcggcgtctggaaagatcttctgttgaagaaagtctcgttcttttgccttgaagatcctgagaagtcagcatcaatctctgcaatggggacaggaataggcgatggagtatggcatgcactgcttgctccgggaaggttattgagcgttttcctgatgagtgaatgccatttcttagcaggaccattgtcttcagctccaagaacattaccagcattaagaggaacaatctcttggaacctaaaagaacacacaagataagtaagaacaaaaagagacattcttgaaaagaagatgtaaaatggaaacacacccgagaacgtatatatctgcaggagctgaagaatgaagccattcgtcgaggtttaaatcttcaggaggagagcgtccagcaacgttccatgtagctacgaagatgctgctcaaagtaatcaacactagatttcagtaaaaacaaagtttccaagaaacatatgtgtatgtgtgtgtatatagacatacctgtagttttggacatcaatgatcctaggattctcataattcattctcctttgccgagcttgctgcttccagttcttagtgagtttctctgtgacaccccagtgaaatcatcagtaccatataaagattcaactggttttacatgaaacaagtcacaatatgtatgaatccttttaccagttttggtattcttgattgtggaaggtgctttctcagctgaaaagaaaaatctatgctctacttcaattcctttaatcagtttaacaaatc

SEQ ID NO: 25224 - DNA, 707 bp, Arabidopsis thaliana landsberg
aatttaatcgcctaatcagtttttttttttttaattatataagcttccctcgttacgatgtagtatatgttactctataagactttttttttttttgtcaaacatgttactctataagactataaccaataaacccataatttatctaactttgtacaatcgtaagaaaaaaaaaaatatatatatatatatattcgtatcatatttttcttacttttgcacgatattttaggtatatctagtctaggtatgggttaattaatttttattgttggagtaaatgcaaacttacatcttaaacataattaagtgaaggagatattatgtaggtaatgggggagattttggcacgtgtccatattaaccgacaacctatagatccggtgtccgtcaaagtgggtttcactagtgccacctgaggacatcaagcatccttgtccgttgccagctaggacacaccgtccgatcttcgcttctctctaaacgtgcaccatccgatctggttatctattttaagaaattaataaaaagacttcgacaaaaaaatggatacaaatttatttcagtcacttatgtgcatattaaagtctatatatatctgatcaggagatacaatattagcaattgctgttttacttcttataatagtctcttgatttagagaagaagttgaaacttttttttttttttgaacatctgattttata

SEQ ID NO: 25225 - DNA, 1381 bp, Arabidopsis thaliana landsberg
  unsure (1)..(1381): unsure at all n locations
tggttttgtgtggattctgaagaagaaaaagcagagactgtgaagatgagattgcgttgtctagcttcaggaatggtggagaagggtatggaagtgtagatatgaggtctggttaagggtaataatggaagagaaagtgaagaagatgaagcaatttctatgtacatcttacacaaaggatttttttaaaaacaaaagtacgnnnnnnnnnnnnnnnnnnnnnnnnnnnnnntctatttataggtaatatatcagagttgagagtcaacaaaatttaagctcatctctatctctcaaaagcaaagtaaagcttaaccaatggagataaggtattttcatatccgtagttacgtacaattcgtaaaatgtgttttcgtacctaaatatatttgtagagtaaactataacccaaaccgaaaaaatatttaaatttcatatctaaaatttgtgcaaaaacaagagtcaaattaattagtgttagtcaacactgccccagtgctaagttaagcgaacacatatatgatgatatttcttttaaagatatgtagactcgaacatgggggttggagcttttaaataagtatctaatacccattgatccgacaatcttctccgggttatacacaataaaacaaatttataaatcttaaatatctggtatcaattatcaattcttatttacggaccaaatttcacgctaaaatgaaaatctaccattgataaattcgtggagaaaatcaaatcagaagttaagaacaatgacaagactcatttagattcactgttttatgtattttgttagctatgtcttttgaaatcgaaatggaagaagagtctattgagaagatgnnnnnnnnnnnnnnnnnnnnnnnnnnnnttgttgatcctacatcaaaatcctagaatttgattattttttccaattcacaacgacattcttttgttaatctgaaaacacaacacacttaaggtatataaactaaaacgtttgggtaaatctcgatgaaggttatgagataaaaatggttatgtacctcctttaaaagcaaagatctaaaaccaacatttactctaataaaaattcagataataattgtaagtaacagaatgtactttcctaacatgtatacaaccggatatccatcattgtctgaaatggacacacaccctcgaaagtctaaattagttatcactggttacttctctatttgtgtctaacgaataaagtccttggttgacttattatgtgttccaagtttatgggctttatagtggcccatcacatagattccagatttcattttatttcctacctactaagatctgatctgattttaatgctcttgaccagtataatctttctcttttcgttgtttccttc

SEQ ID NO: 25226 - DNA, 595 bp, Arabidopsis thaliana landsberg
ggaagacctctgaaatcatatccgaagtaaaaacttcttcttcttttatgaatcttgtttcttattatatatcaaattttaactcgattatcatgattgcagaatgtggaggacaatgcacaaggagatgtagcaacacaaagtatcataagccatgcatgttcttctgccaaaagtgttgtgctaaatgcctttgtgtccctccaggcacgtacggcaacaaacaagtgtgtccttgttacaacaactggaagactcaacaaggtggaccaaaatgtccataaacaaaaagagagaaaccccaatctgtttcctattttatttaattatttccagtatgcttttgttgtcgtgatggttaaattatagtgtttttgcaggtatcatttatcatcgataaacaatatcatataaaatcttctatgtttctttcacgttttgtttcttttgttgtagtcaatacacgaaatgtgtatggaccttctaattaggaatatataaaattttatttattaattagataatctttcgtatagttaaaattccaaggattacttttgattcgtttgggacaatctattttatattttacttt

SEQ ID NO: 25227 - DNA, 992 bp, Arabidopsis thaliana landsberg
  unsure (1)..(992): unsure at all n locations
ctaactggtgtagtgatttaagtaaatatacatattaaattgggaggaatgcagtcctccgcaccttcaactgaagggtgagcaaatgcttcccgcaacataacttcaagatcctctcccctagcatattcattactcgaagaggcatccagttgtgtgactgaaatgggacgaccaagaacagagagcatatcaagagcagaacatgctatagctccgacaggactatctataggtccttgggtcccaatccctcctacagttgctccttgagcttccaaatcaagtacaagttttatatacttctcgggagacgaacgcgggtcatccccgtcataaacaagataatcgttaacgaaaagcaaaggagatggatcaagcttatgtgcaatattgaacatgagtgctctaacaccttttccaagtctatcttgatagaaagaaccatgaagcatctcgttgttgacatcatagtgcttgaatttacctttgtaccgcgtcaaaagatccgtgagacgcttttgtaccgcgttcataagatcggttttgttaagctggcgaacccatggctgaactgtggattcaacttcccagaagatacaatgtcctctaacgtttatgttgttgccaatgcagagatctaacatgtcgtctgcgtcttggtaatttacctttccacgttccgcttctgtcgcgtaccatttgagctcgtttccgaacactgcccagttaaagttctttgtgaagaaatctacaaagtcttcattgtctatgtctgttctgttgatgcatgttcctactgggaaactgttgtatgtttgtttcactttcactatgtaaggaaacaaatcaaaggattcgtcgtcgtttagtcctgagaatttcaacacgatgtcgcgcttacgtacctaccaagtaacaacattcttgaagtcattaacttattaaaactgtataactaagagagatttngagagattatgaacctcatc

SEQ ID NO: 25228 - DNA, 968 bp, Arabidopsis thaliana landsberg
  unsure (1)..(968): unsure at all n locations
aattctaaaaagatatttatagatagatatggctaactatagtcaacaagatttattatatatctaaatatgaggatgtgccttgaagtattaattcaacaagttgacaaaacagtaagatttcctttttttcatttttaggaattatttgagatttcattttgacttcaatatttattgtcttttttttttgggtaggattccatattttatgttatacatacattcctagggtgtctataagtaacaaattatagcgatatctaattctttcgttgtaattctcttcttcaaaaatcaaatcagagagagagagaaacataaacaaatggctaatcttcgcttaatgatcactttaatcacggttttaatgatcaccaaatcatcaaacggtatgaaaattgatttacctaaatcccttaacctcaccctctctaccgatccttccatcatctccgcagcttctcatgacttcggaaacataaccaccgtgaccnccggcggcgtaatctgcccctcctccaccgctgatatctctcgtctcctccaatacgccgcaaacggaaaaagtacattccaagtagcggctcgtggccaaggccactccttaaacggccaagcctcggtctccggcggagtaatcgtcaacatgacgtgtatcactgacgtggtggtttcaaaagacaagaagtacgctgacgtggcggccgggacgttatgggtggatgtgcttaagaagacggcggagaaaggggtgtcgccggtttcttggacggattatttgcatataaccgtcggaggaacgttgtcgaatggtggaattggtggtcaagtgtttcgaaacggtcctcttgttagtaacgtccttgaattggacgttattactggcccgccccttctaaactttgatgtacatacaacaaagaaactgtttttgttttatagtatttttcattttttgcaccata

SEQ ID NO: 25229 - DNA, 1422 bp, Arabidopsis thaliana landsberg
  unsure (1)..(1422): unsure at all n locations
ccgacagctacccaaaatggagatggcagctcaacggcctctgggactgctgaccattctatattgtttgctgacattaccactcaagttcatacattgactgttacttccagtagtaattctcaacaggcagtgtcacattctgaggttgcaaaagcaactgaagatgcagctcctttggaaaatgtttccgagtgtgagaaaccatcagaatctacatctcacccagactctctgaatgataaaacaatatcagagaacgttcaagaatcaagtaaggatgctaaagttgattctgaagcttgccagaaccacccaacagcatccccagccactgttgtaccagatcaagactcgacgatcactgctgcaccatccgtgacacaagaggattcagctttcaatacagagaaaacaccacctcagccactttcggtgtcatctaactatgattcacaaaccgagaaggaaacaccaaatgtccaagattctgtacataatgttccgggagattcagagaagggtaaagggttaaatggtttagatgatagacatcaggaacagccttctgagccggagttctataagtcagattcggtaaaggaagaaaatgctgcctaaaatttttgagtaatcacctgggattacttcaccagcaattatcgtcttctctcccctttggctctcaaaggtttatatatctcagttgttaacagaaaccaggaatattcaaaacattgaagctgtggatgaacttgtcaaagcaattagaataatgtgagttgagacgctgacggtttgatataacatgggtttaaggcatctttgatctaactctgtgatagccgaagggaactgtaatagaatcttgattcaggttttgcaacttatgaaatataatgatttttctcattgagtttaaactgttttgagaacctacaaaatgattcaatgaaacgattgaaatgttacatagcacttgcatcattttgttccttttccttagcacaggtcctatagatcgaagattaattctagggtgatacccgccaccataacccaaactagcgaagatatatcaatttgatgcttacgattatagacaccgattattatattgaacggttatcgtgttagacttgatattaacagtaatgcgtttggtctgtgatatcagccaatgatcaagtgagccctctctatgtttgtctctattgttgccaaggcttgttcgatacatatatgcgtgtacgctcacgagtcgcaagggttaggccaaaagtgaatgtannnnnnnnnnnnnnnnnnnnnnnnnnnaagataagagggatagaaatatttctcataagggtttgtgtcatttttcaagatgctctgggatgtcataccccatcatatcatcaacagtctgcaacgttttcc

SEQ ID NO: 25230 - DNA, 768 bp, Arabidopsis thaliana landsberg
tctaaatcaaaaatacatatatttataagaaaaaacttgaggaaataaatacccatttcgcattttttttcttaaactcaaacttactaattagtattaatgttacatagtacaaagattgtaagcatccttctcaatgattggtctgaagccaatctggagtacagttatctaatatatagcatgataaatgtaaaaagaagtggctcttttagtaatgccgtttttccatataaaaatctacttttgagagtttaaattattatttttaagcgttagggtttaagagttaatttactttgttggcttttaaaaatatggaccatgttattagttttatagaaaatattgcctgttttttgaagagtctaaaacaaagtacaattaaaactcaaaataaataggttatttattatcttttatatcatcgacatttctctaaaaaacaaaggaaaaattgaaagtttcttcatgtccactttaaatattcactctctttattctttgtctttttttttttgatgaatctctttattctttgtctttttaaaataatatagcacgacataaccccaataattagatagaggctgatttaatgtacctttcctttgtagagactgttgaaggaattgcaaggtccatagtgcttgtatgagaataagtacttgtcatcaaagggcactctaggcacaacatcattgttatagacgaatctctcatactctattccatgctttgtcaccacacccttcataaactcaccaa

SEQ ID NO: 25231 - DNA, 1165 bp, Arabidopsis thaliana landsberg
gctctaaagttataacttgctctggcctctggttttggttctgatattattgctctgtttcttttcttgaccaaactcttttgtaaatatcttttggttgattaattaatttcacatttcaacaaataaactaatttagcaataaaataaaaaccgtcttataattaactcattaaaaattacatcaggtagtaatagtggtatttacgtttatatatacaatatatattgtaggatttatatattgtatcacgttattgaatatctgaattattgacattttagcaggggtttaaagtatgtcctatatacaactccattttgatgcgaaatgttaaatattgacataaaataacatagactcgctaaataaaagtgcaagaactgttttaccaaaaaaaaaagtgtaagaactagaatgatcccacattcctaagagtactaaaagcattcatttgaaatatgcgttttcgacacaaatattctatctttatttcatttcttaagaacatttgcctgtagtgcacatatatacatttatagtttgaagttcaattcactgaccggggcatcttttaggacaaaacgataactttcagaaatgagacactatattatttaacaacggtcagtcaatgttttgtacttgtacgtttgcttataacatttgcggatatacgttcctaaataattgtagaaatttttgatatattagagaatttaaagattaaagcatttttagtgaagaaattgagtgaagtttgctatggacgacacacgtacgcaaaacgacgtaaacacatgtagtgtatatcagtatatgtacaaagtatgattttaaaaatgtatacattatcatttagaggtagcaagttacgtattagttttatcgtggggtccatttgacgattaagactaagattaaaaataaaaataaacgttttacataaaagtgaaaagactatagagatatgttgattattcagtagtaaacaaattgagtgattttttatgaaatcaagaatttttttactgtaattttttttttggcaactactgtaaattgtttggagtgttttctgttcagatttcaactgtttatatctcgaccaataatatttatttaagataaatctcacaatatatagattaatggacaatagag

SEQ ID NO: 25232 - DNA, 1142 bp, Arabidopsis thaliana landsberg
caagacaacaataatattaactcaacttaccaagataattgattcttataagcaaaaacaaaaagggacatgcctcaactatttcaggatcattccagggtcctttgttagacctcaagcaccctccctcgttaggacatttgcataagcctcccaagaattctggaagttgactgtacagagaggaaagaaaagcaataaatactaatgttagcatgccataaccaaaacttgaatgaggctatctacaaaacaaaaactctatgaggtgagctataaaaaattaacctggaatcaattgcttcaagtaactttgacaaggaccttggctccaaaacctaagtaacacaagtaatgaagtggttgctaataacagaaacgaggatatatacttaaaagtaaaaccagagcgatagtcattacttgtatctttgcaatagtcatcggatcaagaagcttctgtgcggcaggccaaagaaaactcctgaatccaatccctgcattgacaatgaacattcggtgcaaagtctgcaagagtcagagaccatgattacaaacttttagagcaaccgaaacatccatgtcctcttggctcattggattcatcccagagagtgctccccttttatacttggagtagagcttctagtacaaaaagtgtattcatcaaagagttaagtacctcagggtaataattgcaatcaactttagcaatggtggccaggagattagcagcggtaggagtaaagttcttcataccctgaacaaccacaagagcaatattataattcaagaaaaaccatgtggttcctttaaagcatctacatgagtttaccataccaggccttcaacatctagtattgtagtagttgtagtaactcgtctcttagctgcaactgaacacgcaggtagcttctcttgaagtgtcctctcgaattcttgaacatggtacttcaagtatcgctctatagtagtaacctccataagtttaccaggatgagcttttccaagtctctcgatataaataggtctcccatctttatcaactccatgatacccttgaggatagtgccttgtcacttcatccaactctttgaaattgaaatcctattttatcaatttgtaaaaagttgttagttcca

SEQ ID NO: 25233 - DNA, 753 bp, Arabidopsis thaliana landsberg
aggaatgcgctattgaatatgttcaaaagatttcttggtactcatgaacatctgtgagaataatgggttttaaagaaaaagagtttgtttcggttggtgcaggatccattagtgacaaaaggaggaagcttggtacctctggtgggtatagatgtttgggagcacgcctactacttgcaggtaacaacacttttgataccttaagtctcatgagttagcttaaaagattaagctctctaatcaatctgtattctctcattcagtacaaaaatgtgaggcctgagtatctgaagaatgtatggaaagtgatcaactggaaatatgcaagcgaggtttatgagaaggaaagcaactgaatcgtttacacgatgacatatggagatgaaccagttccagctcagcttttgttttaaggttgtctgaaacaaacttacagtgtctctttggtttttaagatttgctcaactcagctgtgtggtacgttgttttacaatgaaagttttcaagaataaaaatttgctattattgtcagaaagcgctattgtttattctacgaagaaaacaaaacggaatcttattggtataataattacctcatttcaataaaacaataactaattttctcgtttttcactactcgacacatatatgacaggaatattataacgaagaaatttgggattaatgaaatttgtgaaataacgcatacacacttgtgtaataaaaatgcattatctttgtgtctgcgttgga

SEQ ID NO: 25234 - DNA, 764 bp, Arabidopsis thaliana landsberg
  unsure (1)..(764): unsure at all n locations
ggatctgataggcaaaatggggggggatgagcaaaattccgcgtaaagaggaagtagttcaccattttaactgatagcattagtcaaaattagaaatagatagattctagatgaaaatagaaagagccaaaactagacgttattgctctatggacgacaaaaagagattgaacaaatttatgaataatagaatatcgaaagttaagttatttatgaaaatatatgcggatacgaaattatgcggatacgaaattaaataaggaattgccagtgataaaatgtgaaaattattagtttacgttcactaataaatgttatatatgccatgcaaatgaaatccaaaagtgcgtaatgagtaaaggactaatgaaccgtatggactgaatcacaaaaacttgtttgtatggtaatggatccatcatccatgtcggtacctttggcgaggaaaccgggaacaccggtgacaagaatcgtcttgtcctggaggaactgaatgcaattggattccattgaagaaacttctatctatacaatgaataactaagtaggatagattgttttgaaccataagaccttcggcgatgaggtactacgaatatatagagacccgtaaatgttgacccgttttgttgagccatcatatctactacttgtattgtacgtaaacctacctacatttacttttataaaaaanaaacaatattaaaactacttctgattaaatatcacatatccaattagaacatgctctgaaatctcggagc

SEQ ID NO: 25235 - DNA, 2204 bp, Arabidopsis thaliana landsberg
aacttataaactagtggacatctttctcgtttatcatgactaattccaaaattactaacgatcggttatatctgattggtatggggtgtgtggatagacatataaatattcatttgtatctacatgtaaatattcatagtcatccatttcattaccaagtttttaaaggtttttctattattaaaaactaaactatataaaatgaaatcacatgtattagtcgatattctctattctataatatacaattctctaaatgtccacattttttattcaaaaccaacaaacttctaaccttacatgcatttttacattacgatgttttttagcagaaatttggcaattgcataagttttaaaaaggaatataatgggaaaagatgtttgtttacatgggtgataggttctaattccattttttaaatctgagctgatctgaaaataatttggtaactataactaatatttcaacatatatttatttatgtaactgatagggtatctttcaatattgaaacatgaaattcgaactaattttacaaaatagatctaagtaagtcaaacgattggatatgatttgatggtcaagtatatttggatagaaaacagtaatattcgattttcatctacttgtaccttatctgcgacattcttgcgagtccctggtgtaatataagcagtataaatgaaaaacctaattagcatccaataaacaataaatatttagattttttacacttacgcattacattacaaaagaaaaacaactaatatcctaaatagcaatctcaaagtcatccaccgtaacaacttgttcaaattggatttgtacaacttgtcctgttatgaccagtgcctttgcacctcgagcaccggatctgctgcgtccttccagtcttaggtttctacatttaccatgtacaaaccacattatgcattaggttttaacaatcaagtagaaagtactactttagctaaaaaaattccttaccttgtattcccctgttgatggaattctggctacctttggcctccctgatggtctccttgtatatggtggcaacatcgatcggtgttcaagctcttctggtatttcgtcgtctcttccaatagcttcagggaatactgcttcccggtaactcgaaacccatgtgtggggcatgaaacagtcatcaattaaagccttgtaggaaattttaaaactattcgcagccaccaaagcatgactgcaagggatcttgagtttatcatacctcttgcaagtacattgcttcttctcaagatcaacaacatttcttccacctaacatgccatttatctcgtagctccagttggtgatcctcccaaacttgctcccattagttgttaacatggtttttgttatttgcttgtcaacttccggaggaacgggacctttatgtccgagagactttttccgacacgcattaaaccatctagttaacatagacctgataaatcttatcaactcaacaatatgttaccatcgacctttgataacgccttgtttaacgtttcagcaatattgctagtcatcagattgaaacgctggccagggaaatatagccttgtccaatgagccatccctacgtcgtgtagatactttatgcaaagggggttaatggcattaatctgattataaagcgttttaaactttccactcgtaaactcatatccagcgtttttcactaactgcgtcaatcctctgttcttgaaccttgcttgtatattcctacataggtgaataatacatgcaccatgatgtgcttgcggaaataccttcttcacccctacctttatcgattcgtgcctatctgataatatagtgagtgtgttgctgtcagctattatcctctccaactttgtaaagaaccaagtccatgcatcatcgttctcgctatccaccacagcaaatgcgagtggatacacttggaagtttgcatcttgaccacttgttgtgagtaaaacccccttgtattttcctttcaaatgtgttccatccacaaccaaaacccttctcagatgcttaaaaccttgtattgaagccccaaaagctaaaaacatatataaaaacctctctttcctttcatcttcaatatcaggctctgtttctatatgtgttatcgtccctggatttgataaaaacagaagatgcaaatattcagccaaattgctataagacgcttc

SEQ ID NO: 25236 - DNA, 2805 bp, Arabidopsis thaliana landsberg
aggtatcgttttctttttatttttgggaatcatttttttaatatatagaaaaacacaaagacgtaagcaaaaagcatctttgaattgagaaattgggattccaatttgtcagctgaagaaacatgtttccttctcttttcctctaagaaatcacctgttgagttgagatgaattttcctccaagttactaaaaggatagtcattgttgtcaaacacactccaaatggtaaaaggcaaaagcataaatgagaaggaaaaaaatgaataaggtaaagataaaaagttcgaagaatgtattttcatctcattcattctttttttcttgaagttagttcaacatttttagagccgtttagggtattttcatgacgtagacatatactcaaactaattaaacatattcttttcattattcttcatttcttcaattcaattctttagaatccctctcgatttctcactttcatacgtgtgaatccctctcagttcaattacgtaactgtgttagccaatctgactctcttattactgctgacagtgtcaatccttgagtggatacgtgatgattccttcatttgacaatattctttcaaagttttaacatatactagaattgattgttcgatcatattcatcattgtttcatctgatttcaaacttaactcaagagagaatacaagtctaaggttgaaataagttcatacacgatgagtcatgatccaaaaacaaccgataaaaaaaaccacccatgaagggttacatgaaacttgggtaaatcggtccctttgagatgccaagacgaacttccatcccgtggtggaagtctaccggcttgaatgtctcggaatcacgaggatctgcaagtgatgaaaaaaactagattcagctagccgatatacatactgaattactgagataccatcaaattggtttctactgatctaaagaagcgaatctagcattgagacacttgcaatttgagtaaaagacatttaccattcaagtaatcctcaaaaccaaagtcatccacagctcccgtgtagacttctaaaccgagcatcgacgacggaattggtccaggaggtctctgaaacctaaatattccagagaaaaagaaaaaattgagaactatacgacttattttcatagtgctattaacaaccagcagatcatacagcaaacagtttagaccctgagctcaatgatacacacacagatagttttgagtacacaatagataccactaatgcacacaaccattatacataattgggacctattaagtgtgtgcatcttactaagcaacatagaatagcttctcaatgcattgattcacacatttcatgtaaatctgagtgttccagtacaaagaagtattagcagaagcttaccttgagagaatttgcctatccatatccatcttcaacggaagtgcagtcccgtaggcatgcgcaatgaccgtcctcttcaacgcctctttcgatttcttttcctgaaaccgatgaatcaacagagattcaagatctagagagtaagaacagaaccctaattattaacccaatttagaaccctagtaagattgaaacaacagtttctactcaaattgaaccctaaattagcgaattgcaaaacaaagtaatcaactaatcaggcgatagaagagattcaggaatgctaatcaaacacacttaagttcctttcttaagctaatttctcagttaaccaaggaacaaacagattcaatttcaaactaacaaacaaagaaaaactaaatcggggaggatagttttacagattcgtatgacgattcgagtgggtgagatccgatgatgatgctcaaaacgccgtgaagaccaaagcgaagagcatcgttcttcatacctgcgatctcatgagctatcttcttctgcgactccatctctcctcttcctcttcgtttttttttcctccgccggtctacttttaactttctcggcgactttctgggcaagcaagcaaggcaaaagtttcagagaaagaagaaggaatgattttgcttaagtttagtagaatgaattttatgtaaagctcaaactcaaggcccatttgggctttgcttatttgtaagcccataaaactcttttttctgtcgcatattgctttcctaaccctttttctttgttacaacacatttttctttgctaacttatgtgcttaattggatactatttttaaggctttagtttggtaatttaaaacaaactaatatattttgtattgttcaccaagatatgaataatatacagtatatgtattttgtttactcaaatcaaaattactctagaacacgttgcaatcgtagcttgtccccttccgaccgtattaccattcgacaaggctagttccaattcccatttctgtaaatagtatgaactttttatacataggatgattatatagaattgatttacaagaccaaaataacattgactgaaaacgtcgccgtatacatgattgtctatgttcaagaggtagaagatacagagttggtggagaggttggaaatcagtcttacttcatagagattctcactttctcctttaccttcaaagcaaaacaacaataataattttttaagaaccgagaacaagaaattcataaacatgaatggagaattgattcactacttaccgacttctgccgtgatgtttggtccaaagaaggaagtgaatttcgcctatcaaaacaagatttttatgcttagttccagctttatgttttgctacttcttaaaaactagatttgataaaccaacgctacttaagc

SEQ ID NO: 25237 - DNA, 1628 bp, Arabidopsis thaliana landsberg
tatttatagtgctttgaacgtgaattttatttttccaattaatcataccaaattaaagcaaatgggtaagtacatgaacaatgtacagcaccaaattactaacaaaggttcaaccattttgatactcgcgtcttttctgcagattattatttggataattatactaaaaatataatttatcatgttggatgtggtagatggttgtttacttgtttagacaggagagaagaaggagattgagccataccattaagtagtggagttaagcccaaatatataattgggttaaaaaggccataccattagtaaacaatcgattccgaagttgatccataccaatagcacacaatcaatttggccataccatttgttgagttcagtgactgctttgaaagaaggcacactaatgctttcgtagatacaaaagttaactaattcaggggaatcaaagtttggtttgcatgtagtttgtttgggttttatttttatattttattttagaactttgtttctttaaattaaagtttgcttgttaagctccgcaatattcactataaaaggcacaaacacatcaaattcatgagaaagacacaaacacattataaaagaaactcgcacatagagtttcaaaaataagagtaaacacagaaacttaatcatttttctcggataccaattcctcttgttccttcccaaacaacttatgctcaatatgttgagcaaaagtccgtggaggaaacttagccggagactcaacactcaccatctccggcaacggcttaagaacaatcttatcctttgggggttcacaaaacacagcccaagaaatcctaaccttctccttattcaccaacccacgatgaagtatactcttatacttcccattactaagaatctccaaagtatccccaatgtgcatcacaatcgaatcaggaacacattttgcagtgacccatttgccctcgtaaaaaagctgcaaacccggaaccatgttgtgtagaatgaaagttaaagcgcttacgtcggtgtgagcttccacaccgagtgctagctcaggctgaggacattttggatagtaatttatcttcatttgtagaagaagctcttctaaaccaccaacttctttctctagacggtcaggctctaaacctagaccgacagagagagccttgaagactttagtcgctagcaaacaaagacacttcgcgtactcactcgttgcttctatacaatcatcgaaaaacgttaataaaagattctaaaaccaaaacaagattttgttttctttagtaaaacaattcaaagcttacatgtaatcacttggtgtcttaggccaaagtgatagatctctcttctcttcaggatacgcaagatgaaagaagtaatcttcccattccaattgtccactcgcgttgttagccaatttacttccatagccttgaatctttccagtggcttgatcgtttgcatacttctccttctcttccacagacaaactgaaaaactcttcttcggctttcttgacacgctccattagatcagctggtattccatggttgatcaaatgcatcactccccaatccaaagatgcctttttcagctcctcaatacaatttttacggatcttt

SEQ ID NO: 25238 - DNA, 1003 bp, Arabidopsis thaliana landsberg
acaaaaaaaacattttttcttttttccaacaaaaattggtatctggggaaggggttattttaccttcaaaaaaacaaaaaacgaaaaccaagattatggtttttggtcgttggtttttggggagtcttcttctcgaaccgagattatcatgtgcacgtgcgtttggtcactacttcgtgattaacaaacactttccttcactatactagtatccacattaaacaatgatattgctttttaaagataatttgattctaatatcataaataccttcttgtatgaatattaaactaatgattccgcgaatgtgtgtaataatgtaccctccttggacagttggactcgcgataatgtatccttaagagttaagtctttttttttcttctgtttttgggtgcaacctaagagttaagtctctagctaacttttaaccaaaaatagaaggtctccacctaactattgctagaacttaaatgttttggagattagacacataaagaaaagaaaacacacacacacacactagatattttgatattggagatgctaaaaaatatactcacctcctcaacatatgacaaaatgaacgaaaaggagggaaaaaaaacacaaagcaaaaaagctcaattgcgactaaatacaaagtgtatgagtactaagccgcagacaaaccctaagctacattttgtggtgaactatacgtctatacgtctaaaccgaaagcccaaaggtttatgtggatttaattttgatctttatttcataaggttttgttttgttttccttctatgatgtgagattccttttcgagtcgaacttacctctttaaattacctcaatttaaaaggttttatgcggactatactaccaatctttacctatcacataaactttagatcccaaactaaagtttcgcttgcgtagcttcaagaccagctttggttactatttttttgttatgaagtctgtctatagaaatagtagctggtattatatggtttgc

SEQ ID NO: 25239 - DNA, 972 bp, Arabidopsis thaliana landsberg
aacatactagaagaactaaacttaacaagccacaaatggttaatttagttgatgtaccgtacatacaggatttggtgagagtcaaggcttttctttagctgatgcagttaagatcagtgtttctggattctttggattgaaacttgcaagccttcttcattctctttgcagcttggacaaaccccacaataacctgaagctcatccatttgctgtattcatttcacagttatttacaccattttattgattatcaggacaaaattaagacaaatccataacacagtgaatgctcagagatgttgacgtacctgagacatgaagtgcctttgaacaatgtcaattagttgctcctttgatggatttggaattgcatccacctacaaagagtttcttcagaagcaagcacatagaaaacaagattgagaaaacgaaagtaagtttcttctcttccttttcttctggaattcaacttacaaggttaaaatgtcgccaataattcagtaaagcaggcatttccaatttgctaagatcaaccttctgcttgaaagcatatgatatagcatcagtaaacttacgatttgttgcattatgttcaaatggaatagatgtcaaaaaatttgaatgcataccatgttttcaggaggagtaaaacccgaactttttgattgcgagtcagatgatagagacctgctcatcgtcttgtgagatgaccgagatgatctctgccctcttagcttcgacttatgaggcttcagtgtgtcctcagatgctggaaaagaaacaacttatcatagaaacaagtctgaaaaaaatcagttaaaagggttcccatcaaagaacaatatatcacttagtagctcacaggagactaaatcaagtttagagatctctatatcaagtttttgacatattggcagaatcgttacaaaaataacaggaacaaaacttactcatatcagagccattcctc

SEQ ID NO: 25240 - DNA, 1253 bp, Arabidopsis thaliana landsberg
aacgcttacatacacaatttgttttaactactatggtctatggaacttgaatgaatgagagaaaaactcattaatacaggattctatatctccattcaatttttgaccaagtaaatgtcgggtttactctggttatgatcttatcactcatagaatgtgagaactataccctagagttagaagttagaaccacaaatgaaaggaaataatagagttagtatatatttccaagtagaaaacatattgtgcattttcaagtttaattttttttcttgttgacaatacatgtactaatgctaatcacaaacagaaagaaagtgttgcttaacagtcagaatttctcagttggttggctgatttaaagaagggaagtttgcaaaagctgactgacttttgatacttcaggtttattctttccaaaactttacggagaacaatgagagtaaatttcttttttattcacaaaaaaaaaagaccagagaatttgagcagaaaaaggctgccagatatttcttcttcttttgaaaatttgaaaaacatattgtaaacgctttctggtcctagacataaatgtctcgtcaccaagagggttttagggtcctatacataaattgtctcgttatcaagaggactttgtggtcgtatatacgatcaagagggctatatagcttggctagatatttataaaccatctacaagtaaatatttgataaattaataaacatgataacataattaatgttgtatgtctcgaattatatcaatgtaaaaaaaaaatacacaatattcgataaaataataattttaaatttttatgtaaggtaatagttctttgcatagataactaagttgatgtacttaaatatgattcaattgtcattttgttttatttaaagttgaaatatcattagagcttatctacaaaatttattccatcaaaaaactctttaaactgtctttttggcagcatccaaaatttgtgaaaagctgtaggctttcttcaaattcatcatcaacgtcaaggagagttgtctcagtcgcttaaaacttctcaacttatgaacatcatcatttttacctggatagtttagtgtgctattaacatccatataattgcggtaaccgagattattaatcatacctttaagtttatgtatgtcattaacatgattagattcggttacattattttatataaaacgaaaaatataccaatgcaatgtcatttttacggcgctacaaaaagatgcgca

SEQ ID NO: 25241 - DNA, 2908 bp, Arabidopsis thaliana landsberg
tgaaattttttaaaagaataactcaaattatatttattttatttaaaaaatattattgaaaagaaagcgaacaaaatgatttttagatatcacggaatgttgggatgggtttaaatggtgagatgggtttatatggcaggatggatttagatgagatgggtttatatgtccggatggatttggataggacaaattttgatcgatattaatatgaaacaatataccacaagacggataaaatcctagaattaaccatcaaattaaaaatatacaatcttatacacttaaaaaactacaataataacataacaactgcaatttaaaatctaaatatttagttacaaaaaattgtaatttctaagtcttttaaaaatcaacattatagtgtgtcaaaataagcgttaatcttcttcgatacctctaaatgttaattttctttaacacatgtaaatctgtaattgtaatacaaagttactaaattacatatgttctacgggttaaatttaaaaacactaaagtattaattataattttaatacaaaaaagagtgaataaaataaaatattatataatcgtgcactacatgtcaaatcctagaaaataaaataatattagacttgctaatattataaacttacaagggtaatattagggaataacgtaattcgacagcaatattaagaaaatgacctttctgcagaaaagttgggtaaataacttttttgagcctgcaaaataactattttaccctttacagatgagagaaactctttctttccgacaatagctgctacatgtagggaacaaaagacaatatgaagtaatgattacaccgctacttcttaaaaaatcattcaatattagaccactacttattaaaatcacacgcaatatttcttataccttaaaaatgtatacgtaaaaaaaaacttagttaaaagatagccatttagaaacagttgtgattgagtatagaagtgttgcataagatatttaaggacatgctatttatttttattacattagaacgtaggtgtaggtttattgttttgacaatatggtaaatgggtttcaatagagataagcgaaccacatatgtgttatttatagattacatgtgattgtacaaatttgcatgtgattataaaaaaatacatgaatcatgaatcagtaacttacttgtgattttagtagaaaacatggattattagtaaaatgcacattatctttaaaaaaatattatcttatcaaaaaatacaaacgttttaggaaaatatacatatcaaatagaaaaatagcatgaattattcaaaaattacatgctatcgtttgaattgagacacacggatcattgtaattttagtaaagaacaagtattatttaaaagaaactttgaaaaatacaatgttttagaataaaaatacatgtcaacaaaagtaaacggcgatggtgatgaatacggaagaggcggtggtgttatggatatgatggtggtgaatacggaggcggtagtgtttacagatctagtaatactaaatacggagaaggcggtggtgttacagatctagtggtggttattgttgtaagggaagaggaggttatggaagctttagtagtaaagctatttgcctataaagctatttgtcccctcaaccaaaaccctattataaggatatgagagtaatttaaagttggtttccgacagatactatacgctcatgattagtttctataatattatggatttcatagtcatctagtacatatacccataaaaaaatggtatattttatatgagaagtatcgcatcatgtcaatagaaaggtaaaaatgtataaataagacatgaaatttaaaacaagaaaaaatcaaacaattataaaatctacaagaaaacctatataattaaaaaaaaaaacactatttatacatactcggtaataaattcaactaacttaatgctataggtcagccgatacaaccggcgtagaccgattccgtcgccgtttcttacgtgctttatgcactttaggatgactaccaccaaactttaaccgtccagtatctctaaaccggttcttctcagccgtcacaataacacactccggtggaggcaccgagtatcgaatggtgtcataacaatacgaataatacatataacgttctcggaaccgtcgcatagcagttgcttgtttaggactaatggttgagtagtcattgctcatgagaaattggtcggagacagaacaatttatgttattgtaattaccgatgttgttgttgttgttttctccggggaatgagtcagagacattacaaccgtcgagggctatatctttgaattcggaaacaaaaggtgaaaatgtgtagtcgacgcctaattttccaccggaagtagcccaacttgaggcgtcccaaatggttgcatagagagacattggcttttgtggatagtctccattcatttcctcttttcttaggatttctcttattggtacatcatctacccaaaatctgcaaattacaaattaatcaactttttgtaatgttgttactaagagattttattctgtagttataaccacattgtgattttaatgttcataattttcttggctaaagcttgtgttattcatgagtcttcaattttaacaaaatcaaactgattttagaaaataaacattaatgatatatttgattaaaacagaattttaatagaaaaattgaatcgaaactaaattctatccaaagtgatatatgtaccaaatttggttattatatcattttcctacacttaaatccaaattgtacattgttaaatgcgtgtaaatgagaaaaagccaatagaaaaatgaaatctgtgttgccgtgtcaatttttgcgttgactaaacaaaggaatactacta

SEQ ID NO: 25242 - DNA, 1716 bp, Arabidopsis thaliana landsberg
  unsure (1)..(1716): unsure at all n locations
ccttgtttaaggatctttatataaaggtaatcacaaggttaaaccagaaatctgaaaacaagagaaagagaaataccttaatatccttgttcatcattttcaagaaacctccagtaccagttacagtaccaccagttcctattccggcaacgaatatatcgacattacccattgtatcttcccagatttctggtcctgtagtttcaaagtggatcttaccaaacaaaccataaaaaaaataccttattaggccacacacctcatatccaaaattaaaagagtaaaagctcgataacttcttacctttgtatttgctgtattgtcgaattgctgaaacatatatgcgttctttgtcttgagaacaatctctttggctttatcnnnnnnnnnnnnnnnnnnnnnctctggattcgttagcacaatctctgctcctagtgcacgtaaaagcatcctcctttcaatattgatagaagctggcattgtcactataagcttgtagcctttagctgcagccacaaatgcaatcccaaggccagtgttttcggttgttggttctactaatacagtctgctttaataacaccatcgaattagcaatctacaatgtggcaacacagaacattaaaatatcgaaaggcaagaagtacaataaccttcctcggagttatagctccgctgttttctgcctcgttgatcatgctcagaccgatcctgcagaaagggtaaactgttaagaatgttaaatccacaagactgataatttagagaagacgaagaatcattctgacctatctttgacgcttctacagggctccattgattcgagcttggcagcaatgtcagccaaacaaccatctgtgactctattgagatagaccattggtgtgcttccaatcaactatacaaacaaagttcgaatcctaaattatcaaacttcatcacataatctaatctttaataagaaaaaaacgtttctttactcataagcttagtaattttttgtttcctttgaactcacttgagtgacatcttcggcaatgttgactgtctctgactcaccaatgtgttgctcttcagccacagtagtgactggcggaggaggaggtggtttccgtttggttttggatttcgatttcgttccggtagaggattttccggagatagcgccgacgacgaaggaagataccggagttctgacagccaaagaagatgaagaatcatggtgaaaggagaagagtgagagtttcgcagtactgaaacggtgtagtttagatgttattcgacctaacggagactgaggaagaagacggagcgaaggagacgcgaaagccattttccgtcgccggcgaggtttaagggattaggtttctgttttatccaaatggaaataaatgaattaaaaaaacataaagatggtgacgtgtcagctaaaaaaattcaattaattttgctgagataattttgttttattattctttaattgaaggtaaataaatatttcatgtcggtccaactaactaatataaattgaaaaaaaaaacaaaaaaattagctataaatttagtcctttttttgtcgtaggtatatattagtccgtataaaaggtaaaattatgttgtttcaaattaaaaactgtttttcaaaaattaagttatagaattacaattattggttgttgttatttattttttaccgtgtaagaaggaaccttaacgtt

SEQ ID NO: 25243 - DNA, 754 bp, Arabidopsis thaliana landsberg
ttcttgatttcatctcaggtgaattctcctgcacctgaaagaactagatcaggactctccaggaaggtttgtgattattatttgtgtatacatacattatctagcgcttttatttgcaaggatatgtagtaatcgcaaactgtagtaatgttgctactgaagtgatagacagaagtgctcaatatgtattatcgtctgagatgaaaccttttttagatgtttcacttttgaacgaaacatgttttttttttcattgtgcagatgcttcttgctcccaaggatttaagttttgttggctacacatacaagaactttgacgctgtaaaaggattgcgtcattcacttggtaaattcacatgaccctactattattaaattatttttaatcttgtaccttgactcgtgaattctcctagtcaataaacagtgcctgataatatgttttaagtaaacgagacgcaagaatttattgttgatgaagaccttaggaagaattgaccctttttttccaattctgtagagatggcaagaactatgtctctagatcgatcaccaggtaacttgtgtttcaacattgaaaacttccttgcttcgtttatttgcctttttgcgtgttcagatccataagcttctttcacagatatatacatcctgagattagttttaagttcatgcggtgtatagtttataccactttagaaaacaaaaagtgaactgatatgatcaaaactttgatgcagctgaggcgatgcct

SEQ ID NO: 25244 - DNA, 744 bp, Arabidopsis thaliana landsberg
ttatagttcaatgtcttgattgattttttggtgaaatttaacatttgaattacatgtctttttaaaaacttgtggagttatacacacgcatgcattttcattaatacaacactaatttcgttataagaaagtacaacagactaggctatattgtgtttggtttggtgtctacgcaacgcatgtttactcgtcgcatgaatcatggtactgcatgtacttttgaaattttgtattcgaaaaacgtaaaaatagacagcaaaaaagaagctagctagatacgataatctcaaggctcaaaagcccaaacattaaattgggccttaaagttccgaacatcatagaattggcccttatacaagatatccctaaaataccctttgccttgtaggatgagtaaattaataaacgaattgactattaaacccttgggtcagagtatatattcacaccaaccccaatgcggagacctcgaagtgaactccattgacgacgagtgaacgaaaggagggaagaaaaaagttaggtttgaaacgaaagtaaactagttaggtgaaaagcgaaacaacacccacagagcaatggcccctgctctcgccgttacacgagatcttaccgccgttggatcttcagagaatgcttctgcgaaaggacgtgcttcggtttacagtgaagttcaatcaagccgtattaacaacactttttctttgccttttgttttaaaaggagctttcaaaatcgttgaag

SEQ ID NO: 25245 - DNA, 1033 bp, Arabidopsis thaliana landsberg
ttacatgagagcaaaagcggtgaaagcaaaacagagagcaattgattccggtaagatggagagaccaaagccggacaagaaacaaagccggagtaaaccaagaaaccagcctcgtggtgaagagatgaaagatctgttcaagagtgatatgggcgagaagaaacagggcagaggcggtgccgcggctgcagcaaaacctcggacgaagtcgaagaactcattcaagagcaaagccaggtaagaaacatttcatcataaacatgaaatttaccagtaacataaattgtaatttgttggtttaactcggtattttctacttttatcgtgcagatataagcgtaggtaaaaggaaaaagcattttgagaagatatcgaaggacaaacccacgagaagaaggacatttcattgagaagggtttaaacaatttaaattattgttgtaatatcataatttagaacaaaactggttaagatgttcgaaattttgttttctttgtcctatggtttttataatctttcataaagctttaccatgattattcgtagtatgaagaagcaaaaagtggtttaaaaaaaaattaaaaaaaaaaagaagaggtaaaaagtcacgtgagttggcgacggttgtagttgtagacgcgtgggcacgtgagaagactatgtatgttcacagacttcagaacttgagactgtaacctttttgtctggttcgtcgtggcacaactcattattcataaaatgtttcgaccgggttaagaacctatatgagtttttgcatattcaagatgcctttatttcacaacaaggggttttgatactagttagggtctataaaactaagtcttaagtgttttaagcgtgaccttttggttttttgggcaagcgtgaaaggtttctaagcttttaaccgcattaaattttcatgatatggataccagatgtccaaaagaaaaaaatgtatgtggataaagattaaactcttaccttaatatatttagatagatcgcatattatatttgttgggaaaaaaaag

SEQ ID NO: 25246 - DNA, 918 bp, Arabidopsis thaliana landsberg
agcctattatatgagagttatatttagaagtcgtatatatgggtatggcacatgcatgtagattaaataattttgtatatgtaagtgatttataataatatattaaacttgaaccattatgattatgtgttttttggcaatgtaacttcacatgatctgcgagcatcttacaatcattgacgtaaagtttttgccttgattaatagttgttgttatattttaataatatatgttgtttggtgtgctgttgtgcatatactattataggtgcatgtgcggccaaggaacgatgacgaaccatgattaatgggaaaatgattgttttcaacttaatttattttttgcattacaaataaatttatagctttttgtattcccaattgcttaacatagcggtctctcaattagagaaagcgaaaacattaattatcccaatacaataatgaatatattcaaacgcagaagggaaattgtcaatagttgttaaggttttaataaccttaaacttcaatacaaccttcacagttcacacccttagaaaatggtccagttttggcccaaatatttaacaacatttgggttacgagtatttgccctttacaaatggatcaacaatctccctggatcaatattttagtggccggtttcatgaatcaacatattcttttcttttttttgtctaaagaatcaacatattctaaatcaccaaaacactttggtcaacaattttcgacaatatatggaaattaggttggattatcatgcgactttttttctgattaattttatgtatttttaatttacgatgtaattcggactactaatttgtattatgataactttacattttccatactactcaagtccaagtaaaatactattggatatatatctttggattttacataaattaatggg

SEQ ID NO: 25247 - DNA, 1869 bp, Arabidopsis thaliana landsberg
cttcattgcttccgaaataggaacagtctcagtagcttcggtctcatctccctcacgatcgacccaagcagtagagtgaactctggccatttgattatgacttacttgaaatttttggtgttgacttttttgttttctccgaagctcttactcttgtgccgaagcagaatcacaagcgaagtttcgtctgagcacgatgattaagcttcggctatgactaaaaatttggcagcaaaacagtgcaatagcaatgaatgtcatggtaacttcacacctacccgtctgtttatatagtgtcgcaggtgggaaggtgaatcggcaaggtctccagcactgaacaaacagtcacccgcactcactgaacggtgggccatagggtccgagaaggtgaatcgctggcgcgcgtgtaattggtgcaagatggggcgcgtgcgacgattattttaatcgtttctcaccaacgagctcagggaaggtgtttcttggatcttcggcgtcccgaagcctagaagactttttcacggatcaagctcgttacgaaaaatgatctagcaccgcgaatgggctactgttgggggtatgcctatcgtagccgaagatcctaagaagatcaccttcgaaaggtcttctcagaagcaagcgccgaggctattatctgtacatcttcggcacaaagacaaatctcaagatgaaggatcgaaccgacttaaagatgaattgacttaaagacccatgatgttttgtgtcattattgtagttgattgaaaaggacataaatgtaattttgcgcaggttgcatcctgtgcctataaataggtgaacagtatcccggtactgttcacgcgatacggtaatcacgtacatcacgcttgtacttttgctatcattcaagccgaagtatttgagaacaagtccccaacattggcgcccacctccggtgaactcacttccactttttgagtttcgaacaccttcggcaagcatagaccttcgtcatgccgccaaagaaagctccagcaacatggcgtgccgcgctgcagccgctggaccccaaccaggagaccctctctcttcgggaggcctgaagccagaagaggaaggccactagtccaatgcctcaagaggacgacttggatcaagagatcagaaatatggagatgctccatcaacaggtccaaaggaagaaggaaaagatggccaggctagctgacttgcagaggtagatagacgaagcctctgaagaagttcgccatcttactcaagatgagcagaaccgaaggcctcagcacagagagcttcatcaggagggcttcttcaacgaggatgactggtatgagaatttccatcatggaaattttgcttttgatgacgcttctcctctgtcagcagaactgcaggctacaccttggcctccgtcttacaagccaccccagctccccatgtatgatggacactcagatctgaagcagtttctgatgagttacgaagcaacaatatcttcctatggcggcaacacagcggtcatggcgaaatctttcatcatggcattaaaaaatgttgcacaaacctggtactcctctcttcggccaggaacaatcacatcatggcaaaagctgaaggacatgctggtcaccagttttcaagggtttcagacgaagccagttaccgctcaagctttgttccagtgcacgcaagatcaagaagaatacctccaagcgtatgtccgaaggttcttgcacctgagggcacaagcgccaacagtgcccaatgaaattgtcattgaggccatgattaaggggcttcggccaggaccttcagcccaatacttcgctaggaagccccctcagaccctagagaaattgcttcaga

SEQ ID NO: 25248 - DNA, 955 bp, Arabidopsis thaliana landsberg
aggtttttccataaaccttttaactctaaacccttgaaatccaaccccggtaataaggcaaaccccaaaagacaccccccccattcgcagaggcccgatttaagcaaagaagtccaccaccgaaacctgtaattcccattggtgtttggatatagtctgataatcttacgaaccagaatcgaaaccacgattacccaacggtgatcctctgcttcttcatcaatcgttatcgtgctccattcgcggttatcaggcatctccaagaactttgccttgctcgtttggtcatctctcacaccgtaccggaacaagtctatgtacccacctcggtgcggtcgaacaatcaagtagttcgaaacctgacccggattcgaacccgaacccgaatcgttgtctttgtgcatgtctctgggttttgtattcaatggagactagcttatactatagatatgcatgcatatatattgctctgttttttttttagaatttaatttgttgcagagaggagggaagttgcttctctagattaaagtttttgttttgcagagaaactttggtcatttttcattttttattaggcgactgcagattctgatttttatttagctctgtaacttgtaatttttcttacgcttttactttgaaattatttgttgttactgagaaaaaccaaaataatttttgtcaatactcaatatgtattgtaacttatatctaaaaaactcagtttaagaaagttgcagtagtcatttggtcgaaaagaaacaaaaatcagaaattaaacctactcacctaccgttttactttcaattgagtctgttttaaggaacattgtctttgatttctacccgtaatgaaatctcaggtgttactgtattccgtttttataatacttttaaactttacgtatagtgtatataacatttattcaagaagcccaaccacatccataata

SEQ ID NO: 25249 - DNA, 2821 bp, Arabidopsis thaliana landsberg
atgatgattattatgactatttatttcattttctccgctctctaattatcttttctaacatctccataactcttcctctagcctgcatcactcaacacacttctcatgaatcaaaccacattcaatttaaattctagatttgtatatagtatgatatctaaaatagggtaattgaaactacgtagtacgtaccatgatccccttgtggaatctagtccaaggtaaattgagaggaaaagcaagcatggcttcacaaacaaagcccacatctctttgcatggaagccagttcttcttccgtttctagacttactaacatcttacacattgctttgaatgttatctgcaacatcagttaagatttgccttcaataagaaaaataaatgaaattttgagttgactaaagttaatttatcatagtcctttttatagtcctagtcatttcagaatttctatttatacgagtagaaaactgggccatgatccatttaaactatgaaccgaaagagagaaggctttaaataggcccaatacaacgaaacatgtgaaacaaacctggagcaaatctgtgagcaagaccaccgtaccacagtgttcccatccactaagagcgtccacgacgagttcatcaaagtgtctaaccatcagagccgttgatcttttggagaacaagttgatcaaacggctacggagaatcttgtgatggtgttgaggagcacatagaaggctccgttcacctacaagctcacctatggactttatgtaccgtttcgtgaacatccctgagtcgttgttcagaacaagccgagctgactcggtcgtcgacaggaacacgtgtgtctctccgaacaaacttgtcctaaagcaactaccgtacctgtaatatatcaaaagtatatatcatgtaaagtggaaaccttctagatgggccagaggcttctttcgtttacctgatacgacgactacggacgaattcgtagaagcctttgccgctgttaacagaaagcataaactgaagtgtttctccgatcaccggaaaaccatcgcttcccggaggaatatcagctgttgatttctttcgatcttggaacataattttgagaatttttccaagtgttagcatcgcagcgcagaggacaagacagaggcaaagatgttccatttggtttaatttagttctaaattttggtatacaatctttgttcgagcttataatctataaatatagagagatattttttgtaacgagtgagtggggtgttgatctttttttgctcctcatgatgtttctttagactaaaatgaatctattgaatatgtgtgtgtatatgtattttcttacagataaatcaatcgaggctggctatacaaataaggtatatcaaaccaagtgactaatataacgtctcaaagtttttttttttaaaaaaacacttttctttttgtttttgtttaattcaaggtaaattttggtgtataacattttcttgatataatttagcaaaaaaaaaacattttcttgatgcatgaaaaattatcggtatatcaaactactgtaattattttcttgatatttatattagttgagtgatacaaaaaattcatctcgagactagggttagtgtgttacagaatacagaggcaacagtattgacgtattgtgcaactaatcacgatccttggcagattaaaaataaatcatgagcatgtggaaacatttgaacggctataaataaatgttttggttatggaattttctcgcttcttaagaaatgtcttggtcatgggaggtgacgccatgcgctgaaagttgaaacaaaaggaacaacagaaatacaaaaatagaaaaattataatttgggagacacgtgaacggtgaagagaagctgttgcggtattgccctacattctcacgactcacgagtggccatgattaacttgaattccaaatgttgaggcacaactcctaagtggcaagttaaagtgatgatcacttttaacattctcacgtcacattccgccttaatgttgcatcttataaaggaaaagcaaaaagaagaacaaatagtgattgcccaaaaggtagttctatttgaataattcacgactaatgcgtctacatgcatccaagctctctcatttcaaggtccgaaccagctgattctatttgttttaatactataggtctaccgtaaatgaagaaaaaaaaaaaagggtctaccgtaacatcacactttattttattattttattctcgaagcaaattatattacatatgcttgattagaaaactaccaaatcatgtcattgtaggcccaaagacatgtatattggcatatgttataacacgatcaaccggttctaacgagcgaaagaataacaatagcgtatcgtggcgagcttacatagaagtactctcccacgatctttgcatacctttcaaaaagctcgtccatcacattttcaccgaaagtaggttctagcatcggctcgaccacagctcttatggtattagacactcttcggccactagctagggcttcgggtttggaccttattgcaaggtcataactctcctcactgatactcccaccttcccaatcaatcggacttatctcaagcctatcgatcgaaaatgacccttctttctctatcaccattttcaactcttcggagctcgcagcatagtaaggagcgttgaaagcatcgatcttctctttctcgatgatacccttaagatggaaaaaaataaacgcggcaccttttagttatgacttactgaggatttcttctattatggttttttttttttttttaaatc

SEQ ID NO: 25250 - DNA, 3577 bp, Arabidopsis thaliana landsberg
  unsure (1)..(3577): unsure at all n locations
aatcagtcaatcacttagctctaattattttagttattacttattagatacaataaaatatataatcaatgttttgttagttagtttttctctgcacattatttatggctgatgaaacatgcaataatagtataataccatgagtcttaaaagacttatatgcgttcagcattcgtaaatctaacaaaaactcctattccatgcaaatgatcacatcatatacatgcatttacctttacattttgccgtttgataaaagaagactgacattttgttacgagttcgaaatacgttgaaagagatatagtcaaatatcaccgacgattattcctgatttaagaatattccataatagttgaactctattttccaatgagtacacgtcattttggatattgtcaaagcgacaagtcacacaagcaatgtaaaatccaaacaaaaatatcctaatcaacaaataattaaagcgaaaagtgaagacgaagacatttgacaattggcaacgctgctccacgccttcaatcttatccatctcctaaatttttttataatccagtgctctcatctccaccgtacttatcgtannnnnnnnnnnnnnnnnnnnnnnacactctttccgaaaatacccttacgttgataaaaaccagtgaaacgaacattccacactataaaaaaccacaccgcatagcagctgattccacctaaatatctacatatccattttcttttcttaatccaaaaatttacaaatccttaatctttctcttcttcctaaaaacagctttgagctttctctcagataaccacattttacctaacaatggctacaatcatctcctgctccgctctttcctcgatccgagcatcttccgaatcggatccagcccgtaagaaacctgtttcgtcggtttcatggtgggctcctctttttggcatgtcatcggaacctgattacgtcaacaaaaccgtgaatctggaatcagatctggataaagctgaaaagaggtctctgcgatgttgtctcacggaggagaaggctaagcagctgcggaggaaaaccgccgaagcttctacattccacgacgttatgtaccattctgcgatcgcgtcgcgactcgcgtctgacgttcgggtcaagaagtaactggatcgggtcacggatccagaaataatcaataattcgtcgaacttaaaatgtctctcttttatgggatgaagaataactttttgtttacgatgatactcaagaaccgctttattgtgcggcgtcgttttctgtttgtacggtctggatcgtgtatgatgttgctttattgtgaaccgttggatcattagttagtttagctttttatttgttgtcagttgttaatgctttttttttttttcctcagttgttaatgctaactgttggatcggtagatatgttcaacacgtataaagattaaaatgttagtatacaaatataattacgattgcaatctcaaatatatgaagtaaattttcttaatttcactaatcatggatactaataagcactaaatgttggataattgaacacatcgcccaaatgatgttgctccttagtaatgacgtggcctaaatataaccgttgataataacctattcccttcttttatcttacgctgattaccgcgcaaattagcaaacacagagttgaagaagcgtatattaaccacatcttcgtcttaagaaaccttctctcgcgcttttcaaaggcgcgaatttctcaaaagaaacttctatagaaatctcaaacatattcatgcaacgattctgcgtctgttcaccttcaagttatcgtctcaatcccataacatcaatggctactggatccggttcactgatttggttccggaaaggtctccgggttcacgacaacccggctcttgaatacgcctcaaaaggttctgaatttatgtatccggtttttgttatcgacccgcattatatggagtcagacccatctgcgttctctcccggttcgtctcgcgccggggtaaaccggatccggttcttgcttgagagtctcaaggatctcgattctagcctgaagaaacttggttcacggttgcttgtttttaaaggtgaacctggcgaagtactagttcgttgcttgcaagaggtaatgtagtgtttcttattcgacagtgtgtttaaaagctgtgaaattggtttactgtagacatagaaatctgaaatgttatgaatggggtttttggcagtggaaggtgaagaggctttgctttgaatatgatacagatccgtattatcaagctttagatgttaaggttaaggtaaaattcgtttcattacgccttaaagttttgatcttgcttaccactgattgaactatgcgtgtcattgagattttagctaactcaagtgcatttttataatctctataggattatgcttcttcaactggagttgaggttttctctccagtgagccatactctgttcaatcccgcacacattatagagaaagtaagtggtagtgttaaccgagttagtttagatgtttcatttatggaactgtaatatttatgtacatttgtgtggttttcttgcaagttagaacggtgggaagccacctttgagttatcaatcatttctgaaggttgctggggagccctcatgtgctaaatctgaacttgtgatgtcttattcttcacttcctccaattggagatattggaaaccttggcatttcagaagtaccatctcttgaggaacttggctacaaagatgatgaacaagtaagaggtgatctgttttctttaggtcgtttaacaatttatccatctgagaatcttatgctcatgtaaatgtctgtaggctgattggactccttttagaggtggtgaatcagaagccttaaaaagattgactaaatcaatcagtgataaggtatggtcaagaacttggaagtttttctcttttagaaaaaaatggtaggaatctgctcgattgagtactttgtcggactgaaggaaacttactcctggagaacttgaattttatcactttaagattttagaattgatattcttacattgacttcatagatttatatcttctttatcaaagtcaagggctgaattcgttatgggttttatttgtagtgtaggcatgggtggcaaactttgagaaaccaaagggtgatccatctgctttcttgaagcctgctactacagttatgtcaccatatttgaaagtgagtttcatgacatagttttgcccacttaagcttcaccctcgattttcctaatatttccatctaattcctgacatttaagaagttcggatgcctttcttcgaggtacttttatcaatgccttcaaaatatttataaggatgttaaaaagcatacatcgccgccagtttctctcctggggcaggtcagtcaatgacttacagagcgttttttatactgcctgactgcagaaagttgattgctttacttttttactttagttgctgtggcgagaatttttctataccactgacaatggaactcctaactttgacaaaatgaagggaaaccggatctgcaaa

SEQ ID NO: 25251 - DNA, 633 bp, Arabidopsis thaliana landsberg
actaacttttccgatgaactccaactcaaagtcggcgacgaagaatggtcctcacggccgatttcttccatgatcttctcaaaagtatcgtcaaaatcatcgaacttgaaaaattcagtgaaatctgtggagctagggttagggtttgaagggtagttcatttttagtttctcttttttccaagaaggttgtttagtttttccggcggttgaagctaagaggagggacagatattgttagagtaatactgtttatttatactacaaaatctaagaaaaataatgatagaattaataaaataaaataaaagtctatttgcttttaattaagtaataaaataactttcatggctactttcgtgcgtagattcaacgaagcttctccaatagaatagctatagcgacaagtgatttttctttattaattatcatttatttaagttaaaaataaagtacccataaaagtgggaaatttactttttaacaactttaaggttttattaaaaaagttttgaagcgttgtccaatcaaatcctcgagtaaaaaatgcatgtaacatcactgggtccttcatatataatcatattacactaattaatcactttcaatcaaagctaagatttcgaatgatgta

SEQ ID NO: 25252 - DNA, 1147 bp, Arabidopsis thaliana landsberg
  unsure (1)..(1147): unsure at all n locations
ctgtttttacattatatgaaaattgcttcaaaccatttttcattacaaatcaattatcatgtaagcataaaatctatacttatcgaaattgagagggattgaaatattataccaaaaaaaatggcgtagaagtggggaccaaagcaccgcctaaaacatgagaatgatgtcattatcataagcacaagaaaaaaacaaaagctctacatctctcttctcttctacctctctctagatcttaaccctaatttaccaatcaccaaccaaagcaaattaagtagacaacccccacagacacctcaaaacaccaacacatcacaaataaactaaaaagtaaaaattacaaaagaagagagtgaaaataaaaaccagccaaaagcccttttcacttccttccaagtacaactcaaatcagaagagaagctataaacaaacctagagaaaaagagaatagaagacaagagtagagagagaaaataaaaccttaccaaatcaatcaaagaataagatgaagaagaaaattccagcttgatgtattttgtgaaaacattattattcttttcctcttctatctagagtctctcctaggtcaaattatcaaaatcaattctcatctcaacatagaatggatccagttcaatctcatggatcacaaagctctcttcctcctcctttccacgcaagagactttcaattacatcttcaacaacagcaacaagagttcttcctccaccatcaccagcaacaaagaaaccaaaccgatggtgaccaacaaggaggatcaggaggaaaccgacaaatcaagatggatcgtgaagagacaagcgacaacatagacaacatagctaacaacagcggtagtgaaggtaaagacatagatatacacggtggttcaggagaaggaggtggtggctccggaggacatcatcacatgacaagaagaccaagaggaagaccagcggcatccaagaacaaaccaaaaccaccgattatcatcacacgggacagcgcaaacgcgcttagaacccacgtgatggagatcggagatggctgcgacttagtcgaaagcgtngccacttttgcacgaagacgccaacgctgcgtttgcgttatgagcggtactggaaatgttactaacgtcactata

SEQ ID NO: 25253 - DNA, 1841 bp, Arabidopsis thaliana landsberg
  unsure (1)..(1841): unsure at all n locations
ttgaatagcccaggatgtattactagtagcttaccaaagaggtcaatatttgtgtacacaattgaagcaaattcttcgaaaccacgaaatctaatcttttgttcatcaatttgatggtttgccgtaggcacgagtaccatcaacgttttgtcgttgaagaagatgccatgtttgtggtcggacactttgtatattattttccagggggtgatcagaaattttttgagcttgtatatggggttgcgtttaagactctcttggtaacggaatagacggtttgccgaaatgaatacttgcattgtgtttgactgtaggacgaatgattagtttaaattcgtgttgggtatgtaaattcagcatattagatatacctgggagtcgattagcagtaattcaagatccatcaatatgttgtcttttttgaaatttcgggattcctagtaatgaattagtcttactaagacatcatcaaaaatctgaaaggtgaatggttggggagactgttgagctttatttggtgccatattttgagtgtagtaacaggtcgtttttgttttggtttctcggtgtggtgatggtgatttggatttatagtgaaaaataaagctatggcattgaagatagtggccattagtttcttttaaagtcaattgaaatgaatgtatgggggattgaagatgagggagtggagatttgataaggcgttttcagtttttgtttttgaagaatctgaatcgatagaatttgagagaaagaagacgacggtgaaaggtggtgacggcgaaggtttttttattggggctaatttttgttttgttaaattagtagtggtatgggctttcttttttgaagtgtttttttgtgggccttgtaatgttttattttgtttcaattagttgtagattagagtttacattatggattaaatttgtttggcctgcattttttatagtaattgatctaaagctgcgttgatttttttagctttgttttttctgtcttgagaaagatgctgacgtgtccattaaagagagtgtttttgagaatgcatatgtggctaggctgagaagcctcaaactgttgcttttgttagtagtagattcataaccatgtcatccgattcaaagaagtggtgcaccattgagcagacatcattcccaatcaagtcccaaaattgttggtagaaggcagccgtgaaaccgtcaaaatttggagctctatttgcccaaatcgaaaggactgcatcctttatttcctgatctaataatgactataataactctcgattcatctgatctgttactttgggtacaactttagaaataacttccgccaaaccagtattctacgatgtagaaaaaagatcattaaagtctgtttcagccactttcccaatagcatcgtcgtggaagtgttccattccttggtcatcagtgattgccttagttcgatttcgagactttcaaatcttagtggatgcattgaaaaactttgtattacgaagtcccagtctcatccatttgtttctactttttagatgttagtaaagttcttcatctctataaacatggttcagatcgtgtctaagttgattaactgttagttgggatgtcgagcagtttctctcagcagcatataaccggtgtttcagagcctgaatcttctcaactgaatttgnctttgntcttttcttctaatttgctttttcttttctacacattcgaagcttatcttgatatccatttcgtgcatcaattcgtcccctttgccaacacatttgcaatgtgtcaaccaaatctttagagtgaacatgtcatatataatatctgaattggccctgt

SEQ ID NO: 25254 - DNA, 2176 bp, Arabidopsis thaliana landsberg
caagccaacaaaattgctccacctttagaagatggaatctctttcagattgttcttcgcctgagatatggtccaagagcattgtaaacaagtagaaaagaatcgcatatcaggttacaaataaaactcttcttgtcaagtagcatgacaaatgagatacgtctgcagacttacacgcaagtatttctctgcggcatcgctgaaatttcctcggctatgaagctcgtttccctgccaaacgtagtagaaaatgagattaacatcaaattacacaaaggtccacttgctgaagccattcttgttccttactttataatcaggaaagcaaaattcaatagaaaacttctctcaggaagtcaattgttacctgttttttaagcatctgagctgcattgatctgataagtaaattgagcatcagcatgagcacgcatagctgcaatatcttcaggggaagctttagccatcttctcgctaatctcagccatatcttcaggccgagtatgcttaagctgttccgcagcttgtttcaaatcttcaggcctcatgttcttcatactctctgttgccatattcatcaaatctggatttgacatcatctgtataataaacaatggtataaattcatcatacaaagccataatcaaatcaaatcaaacaaattctcctcagaatcgatcgaataattcgaatcaggaaaaataacgaaacctgttgttggatcctagcgaaatcagcaggagtcatacgactcatctgatcttgagcgagccgaatcatctcaggatccattaacccgttaaacatcgtgtttttttttctcgaagcttcgatgtggttctctgtaatcaggtcggaaacacagaaaatcgaaattcgccagagaaggataagctcggaatctggatcgagattgagtttgtgagaatcggaaaatcgaaggagaattgttttgccgacccgaaagtagtttccaataatatagaatcgaattggaaaatttatcgctcaacctcctcaattcaccgaccggaatatgcctggatgatggagaatgactgttttacccttgatctacgatgatgctgtgacgtgccataataaattaatttacgtaattgtattgattaacgtaactatatgattacgtgcaaattgtcatgtccttgtccatgttggaagactaatctcgtgttttttttcttcttaaactgaaacgaatctcttgttaaactcttttttatttcgttttagaaagagtcgtccaatttaactgttacacgtgttaaagtgtcaataaaattcaatttaaatttgtttgagggtacaaataattttttgatattttaaaattctttagggtctggatatcgatatcatatgtttgcccagctatatctccaagatataggctccgaatggtgattgcgttttgcggtgcgggagaagtgcggtgcggttcaaatagtaacgaaaatatatagatacatatgaatatgtagaaattttaatactgttacagtactgttgcggtgcggttttaagtgcggttttacttaccattcagagccataatatatttgttggaatccaaaaatgtttagtattcagtttcatagactcaatctctaaagtaatccatttattaaactttaaaatatgcatgtcttctgcagaatttttagtatcttaaatatcaaaatgatcttaacaaaaaaatacatatgtacaactattcgggcaaagaattttatttcaatacgacaatcttttcagttgttgaacgagttttagtgttttgaccatacaaagaaaaaagacgagttttagtgacatataagttgtgtttggtaatacttttttcaatattgtttcgatatagtttcatcgacgagtacatctatcaattaatttttctgaaatgtttatttctctccaccgcagcataaatgtttcaatgtttgaaagaatggaaacggtggtatagtcacattagaagaggaccactttgactaaagctagctacaactctcatctatctctcgtctcccaatttttcaatattagcagagattatgattcactaaatgatagcagtctgcgagaagtgaatgttgatatgatatatgataatcaattaactaatcactaagtactattgcagcgagaacgagggaa

SEQ ID NO: 25255 - DNA, 383 bp, Arabidopsis thaliana landsberg
aaactcctgatgtacgaagacaaccgtttacgagttaccaaccttggaatcaatctagacctctctctgctccggagtttaaagtcgagatcacagctcgtaatcccaacgaaaagattgggatttattacgagaaaggaggtcatatcggtgtgtggtacgacaagacaaagctatgtgaaggccctataccgaggttttatcaaggacatcgcaatgtaactaaactaaatgtggctctaacgggaagagcgcaatatgggaacactgtcttggcggcattgcagcagcaacaacaaacaggacgtgtaccgttagatcttaaagtgaatgcacctgtcgccatcaaactcggaaatctgaagatgaagaagattcggata

SEQ ID NO: 25256 - DNA, 834 bp, Arabidopsis thaliana landsberg
taaattggataaaaaattgaaacttggaaacaatggtagataaatcaacacggaatcccacaaacccagatttcgaatttccgacgaagtaagagaattccgacaggaatttgtaagtacagtatcttcgagttcttacttttaagttttgtttagtttgtgttgaagatgttttttggtgaagtggtttcgggattggagtcaaaggaagagaaagagagtaatatacagagaagagaggagagcagtggttttgggagccgtcaagggatgatctgaaaactgcccatggttttgtggtttttaaagttttgtttcctttttgggattacaaatcaagcctaaaccaaggggctggttttggcaaaaccaatggagctgcctttttttggccactgtttttacctttctgccaataataaaaatccaacctaacttttcataagatttttttcttaaattttttcacaaataaatgaaaaacagtatctgctttttttatttcacaacttttttatttatatcatacaaatctgaaatctgcatacaataaaataaaacaaatatcaatcattattgaaaaacggtttaaaacatcgattaaacaaccaaatatagtaactgtttaaccgcgtaatgattgtgacttttttgccattctaaaactgacagtcacaccaatcttaaactgacacaaccaaagaagatgctatttgtggcacatcacaccaatgtccggcttgtataccgagttataatgctatatacacggacatatacttcatgtcgctttaaatttaataccaatatatcatcaaactatttagcattatt

SEQ ID NO: 25257 - DNA, 4216 bp, Arabidopsis thaliana landsberg
aggaaacaaacgaaagagagtatgctcatatcgcatattgtaaaagaaagaaatataaccgttggtgagtagtcatttagttggatgacaaatctctctcaccttcacatggaccaacggcttctatgtcccaccaatttgtactctcaatctcctttaccttatttattcattacaccaaagctacgacacgacatggcttttgttttattttcattatatttatgttatttaatgttacagtacatacaatatttagcttttatgtcatgcattggttattagtattttgtattactagtaagattgaaaacggttttaagaatgtaggagtgtgtttcacaaaattgagagtattgcacttacatgagagtgttcagacttcagagtattacaaacctaacaaacctggatattgcgatatgactggcttttaggttttgtaggtctcccatttgattataaacaaaatgtatttattacctatattccaaaagtacccttatgttccatgttctcttcttataaagcaacacacaagatgcacgaaatctccataactagagagagaaaccaatctttttagtgagagagaaatcttagagctgagctaagaaagatgtcgaaagaagtgagcgaagaaggcaaaacccaccatggaaaagactacgtggatcctccaccagctcctcttctcgacatgggtgagctcaaatcctggtctttctacagagctctcatcgctgagttcatcgctacactcctcttcctctacgtcaccgtcgctactgtcatcggccacaagaagcaaaccggtccttgtgacggcgttggtttacttggtatcgcttgggctttcggtggtatgatcttcgtcctcgtctactgcaccgccggtatctctggtaagtttgaatcccaccaaaaaccctaacttttacttgtttggttcgttggttttattgttaatctcgttcttgttctcgtcttctcgtaggtggtcacattaacccagctgtgactttcggtctgttcttggcccgtaaggtctctttggtgcgagctcttggttacatgatagctcagtgtcttggagccatttgtggtgtgggtttcgtgaaagctttcatgaaaactccttacaacactcttggtggaggagctaacaccgtagctgacggttacagcaaaggaactgctctcggagctgagattattggaactttcgttcttgtttacaccgttttctctgcaactgaccctaagagaagcgctcgtgactctcacatccccgtaagtctcaaaaagcttgaatctttaattgagttttttgacaaagttactatgaatctaattgggtctttgtagattatgataaaggttgaatctttttaggatttaatgataaagttagtatgaatataaaatgggtctttgtagattctgatgaagtttgaatctttttatggtgtaatgacaaagtatgtatgaatctctaaggatctttactttgtagattctgataaagtgttgtgggttttcttgtgattaggttttggctccacttccaattgggtttgctgtgtcatggtccatttggctactatccccataactggaactggaattaatccagctaaaagctttggtactgctgttataaaataaaagactttatttgtactaaaataaagagacacaaccacattttgaactatctttaaattatagaaagactcagactatttttatttatgctgatttaagcatactaacataaactagctatcaatgcaagagagatacaatctggtgaagtttcctcgtttggcatgggaccctcgactggcgaaccctcccccggtgtaggttgtggtggttccacggtttctttcaattcagctggactgtcaatctgtcattaatctctggtggttgctgagacgactcgtctcgagcttctgccgtcgtctcctgcgccttttccgccaacaccgtctcaagagtagctaacgccggtttcaaaggaggaagcttttcatcggcgtagtaaaccctaagcccaatctcacttgcacaagattaaacaaacttttcttctccaaaggataatatatcaaagcctcttctccttgaccaacaaactgatcggacccaagtcggatcctaccaagaaaattgttcctccgggtttgtccaaagttcttgtcatggtacatgtcgagctcaagaacatcggtaaagagctgatgagatggtcgctttgcgagactgaactcgagtgtctcgttccaaacagggtttaagtcacgtactatggttcgtgtccgtcttctttgcccgtaatagtcgaggacaacgtacggacttgacgttccatgaccgtcttttggtgtaagatcctttgcgtctactacttctactaccagtttccgggttgttgccattttgtttttcttattaaaactgttgtttcaatgcatgcataggatttaactgaggtgatgagtttgcctcaagatggctttgtgaaaagagagaaagagagagagagagtgtataaagaaagaagaggtttgatttgcaggattagtggcttattatatgttaagaaaaaaagtgtgaaagaatcaaaaagtaggaggtaaattattttaggtgtatctgataggaaagagcctgtgttttatgtttatatatgtaaaaatagtaaatatgaactgtatattcactgaagatactttaagaatgagagaaaaatacgatagatgtctaagttgttgcatgcacattcaaaactgtgctatcgaatcaatgttaaagaattttgtgcattttaatttttgtattgagtgtaaagatttcagtttttgaacatatttcgagttaaagccataatttctttttctttttttcgtttcttttttggatacttaacttgatttagaagcaactcctgtcaattcacactttgttttctatttcttttgtagttttcccattttgctttccctttttgggtttgttaatcgaaatacattcatatgtttctctttcaggtcatagattacgtaattcgcttactttcggcttttgtttttctaagtgcttttgactaaatgaagattctctcttttggttctttaatagctttagactttagtatacacacaaggagattgaaggtggtggatgacactcaaatgccagtaaggacatgtcagattttaagcaaattgcttttgttcttcttcaaaaagtgattggtctctttgtctctcctttttctcgaatctcaccgacctttagcttaaatagctcctctcaatcaaccttacccaaattccaatgtaagacaagatatattaagtttggttcaattgtctgattagtactatatatatatatacaatatattaatatgatcacaggaaggaaatagcggaaattaggatttgtttaatctcttcttaattctccaacaggaaggaaatagcggaaattaggaagcttaaacaaccttcgcattcaacgtatacttgctctgtcttttgttcataaaatgctctgttttctgtttcggttcaattttttgttttcccttaagtaacccttcacgttagggtctttacaccacaaaaccaataggaatacgatttgaagtattgttatctgacaaacaagcagatatactaagtaagactaagttatataatttagtatttaaaaacttttggtaatttctaagttatataattttaaaaaagttttggtaatatctcactatattttagttaccctgagatcattctcgagttcactcgattggttaacaggttaatataagatcaacaagttcaacaaaactaatattggaatcggtctgccaatgcagtgtaggactattgactcagtcctaagctgcgagcctaggcaagaatgtaaagaagtaaaagcttgactcagccctattgaactctttgttctttttcctccaaaaaaaagcttcttaattatgtcgcgagatccttgacgaacaagaaaatcaaaatcttctcttgcaagattttgaacgtacaatattatataccattctataaacatcagctgaagtaagaaagcgtttgatttatatcctatctaattaaagcgtgttgataaatcatcatatttttgttttgttttgtttttcttttggtgatttgttatgttttgt

SEQ ID NO: 25258 - DNA, 1149 bp, Arabidopsis thaliana landsberg
agatgtcgttgcaagacatggcatgttgactaatttatagccaaaatttacgttgactcgagttcgttgttttgatctttgttacattataatatttaaccataatgtaaaatatatatatgcacaaattatattcttcaattcgtgctggagcttgctggaactcgatcaccacttctaagttctaacttagtaattgaagtcgtgatatattttattgacatatggtattaatttagatttaaaacagcttttagccaaggaattgcaagtctaaattcatagtcttcgtagccagaaggcaacctttgatattatttttattatctatatctttgtttttttttggacaaagcttgtatctacatctaactgagaaaaaagaatgtttttctttgtcatattattgctctcaaattctgattatacaacttttgacatcaaatcataattatgcaatcgaacaaacaaaccaaaaaagaaatatgcgactattttaatttttgcgccacaatgtatgggatatgggtagcaaatcattagaatcctagtacaactgtacaaagttcgagttggacacctagcagcgataattcaaaccatgtttccatctaatgtaacagtatagacttagtcgtctatcaattttaggtgcaatcattcgtattaaaaagaaaacttagttttttttcatactgtttagaggaacaaaatacatgtaacaagaggtacatttttgtttgagttaaattttacaatttttgaatatatagtcaacgaagaccgaaaaggttgagtcaattcctaagaatcaatctgccacatgcatcgccgtgcttgaagggcggctcactgtcttcttgcttattactacagttaaatcttttttttcaacatctaatgctatacttttaatctataatatatattagatgtgacttaaggtcaatagttatacataataaaaatgaatatttgttagtgttacaaactgtgtgtcataatcatcattcatcaggatttcaaaaatatctcaaaattgttgtaagttcatgtaattcgaaatgaatgtgcactataagaaataaatttacaatttaaaaaatgcttaatactggtacaaaaaaaactttaatactagtattatac

SEQ ID NO: 25259 - DNA, 1547 bp, Arabidopsis thaliana landsberg
  unsure (1)..(1547): unsure at all n locations
aatgacaataacacacatgaagtttcttcaactgttgttatctttagtgctctttgtattctcaatgtcaaatgcaatgccaatctcagacgtacataatttttgcaaggaaacgtttgaagtagaattctgcatgaaatacattgggtcggaccaacgtctcctagccgcacgcgacttcagtgacatgcttttaattccggtaacgttatttaatgtgacaattttgattagtgatatgtcagattagttgatcacatatattaccaaaaaaggcaagatatttgttcagtgttggtaaaattagggataatagtatagattagttgaaaattttcaccacaccagttcttgtaagattacatggcctccaaaatactaaatagaagttatagaaatctgtggtttatacatattctacaaaagaagtattatttttggtttgtgattgagaccttctatcagatatctgagactcgaattcaagtgaccaatgcattcacacaaatcagcgatatccgccataggtttaatgacacgcttgtaaataatcggctcgttatatgcgagaagaaatacgagagcgcgggcactagttttcacaaggcttgtctagtcgtgcatataaagtcatattcatagtcggaccatatggcaataacccgaaacacgcatagctggctttgatgctgtgtgcgagtgcaaagatgaatgggcaaagcatggtctgaatcaagagtctcctctcgctttctattaccataacgttctgaaattatgcccaattactcgtcttattatcagctagctttaggcttaagtacgtcgatattggaatttgatttacttacgatattaactggtttagcttattccctcacacgtttatcaaccccgattgttctctgcttctagttgtaaacccgatttttgaaactatatgtatttattggtttaaatgaataaaacctttgtgatgtttttgataatttatcatcattccgtgaaaaacatgacgttttaaaatctagagtttcaacgcaattacacctgaatgagagtttcaagcaaaaactaagtccggaaaaatgctaaagatgtatgctaaattagcacaaattcgaaagcaaaaatagttgtctatgatgtctttttggagatgcatgatgcaaatatagagtattctaatttagtaaggaatctcttgaagagattctcttccatacattatcaagagtttcctttttatatatgaggaaaagaaagcatgaagacagaggacaatttcctatccataaaaaaaaggaaattatctattgctattagtactagaataggaaattggcttatagtatagccacaacctatttagtataaatatggtgctaaagttttggaaaagtttagcacaaaagaataagagaattctaatacattaaggttataaagtntcttgtaagaaagaataacgcttaacagggctaagaaaaaaacacaagaaaacacttcttgtttctcaaaatggccacaatgctaatagaccacat

SEQ ID NO: 25260 - DNA, 3168 bp, Arabidopsis thaliana landsberg
  unsure (1)..(3168): unsure at all n locations
atgaatcaaagcttagccagagatgaaactactctaaaactctcagcttgtagtacattgattccccaaaagaagtcgaaaaaatcacatagttaaaaacttttttgtccattcaagagatgtcatctgagcatgatctaatctagattctgatatgagacaaactcctatatgaactttagcattccatgaacactatttaatctccctaaatgacttgtctctcagtctctatcttatgcttattcttatcatagatctaatccacaagtatgtatgtatcatcacttggagagatatataactactaaaaatccttattcctcactgaggatcaaacatacctctttatatatctttcaacgccgaattttacaatcccacttcaccagaattttgatatcccttgtgagaaaaatcagctcgcttttgtaaaagaaaaaaaaccanagagttttttcccaagggcctttntttcccttttaaaaccaaaaagaaagaggacgaaaatgaactctttctttttcccattctagattttattagctcaaattaaaaacaacagaatcgaattttctggaaaccctaacaaaatacaaaaacattgagcagaaatagaagctcggaagtcggaatcgaatgacgggaacctcgaataatttgaaaaaattgactgaagagacgatcgagaccttgtttttacctgatcgaatgtgatctctgtattcaagggaaagtgtttacgcaatcggttctttggttgagtgcttactgcttcagcaggaagaagatgttgggtttgggaattttactcataaagaaactttaaatttggtaccaaaaagacgcttttatcccccggttaggttgcgtcagccagctctacccacatgggcattgctgcagatattacagtttgtatttgttaacaagtattaaactttgtactaatcttatctacaatataattgatttattgaatcaatgtaaaagttgttttcattcatgcttaatacattaattgatcaaagttgccaactaagtatttggtgatgccgatgagtgtaaaggacagcctaagacaaaagtgtatgtctaattatgatttgggagtatgggattccaattattaatgtcgttgacccaaatgatttatcttcttcttgctgcttttttcttaataaacaaacaaatccacattattagcatttagcaatatgtttaattacattaccattgtttttaatctaggcccatatctcttaagaatattcaaacttggtccaggttaaacttatgacaaagcccaaatgttcctactctttctcctaaatcattattccaaacaccggttacgcattaaccggttcaggtccactggtaatttggaaatagatagaactcatctaactgaaatcatgatatgtggtcattataacaagcgaatcaatcacacgcttcttccttcctcttccatcttcttcatatctcccttagtcacctctactctattctgcaggcaaaaatagttatggcgacttcttcgatcactatcccgaccattagaactccgattcatcgatcaaaatttctaggccaaacacatcaattttcaactgtaaaccggtcggttttcccgcctccaaaacagcaatcaaaactgtatcaagtaaaggccatgggtaaattcaatctatgggaagtgatgggaggaagaggattatgcaacggagagaaaggtattgagaaggagctccagaggaacattgaagacgagcaagagacatcaaaggctgagaacaacgagacagagagagagagcgatgacagtaacttgtcttttaaagtacctgaagatggtttcgagaaagagatgatgggtctcacaggaggatttcccggtggcgaaaagggtttaaaaacgtttatcgaaaaaaatccaccacctcctccaccaccaccacctgcaaaacaaggaagcgatgcatccgcggttgctacagataagaagccgaaagcgcccaagctaccccttctcatgccggggatgattgctatagtcaagaaccagaacagtccgtatcacatgtattgtggaattgtgcagaggannnnnnnnnnnnnnnnnnntgtcttgttcgaaggaggaaactgggaccgtctcattactttcaggcttgaagagcttgaacgaagagaaaaaggtccaccgggtaagaatccaaagtcttgtattctcgagcctcttatcgaacagatgcaaaaggaagaggcagcaccataagtgatcttctcttctctgtatgtaagttcctgtgaatgtatatgtaacgtacctttgcgttttaggctacaatatttctgactggttctaaaagagcttcatcatgtgatataaaaaaaagaataaacgatgaatttcaatcataaagcacttaataatagagattcaaatgcactcaatcaatgatgaatcagtatagaagttaaaaactgcaatggagtagttttattgttatcattggttgttgtaaacatcaaccatatcagtttcttcttgactatcgagtatattctgtaaatggtaaagatgagaagtgatccaccattcttgtcaacagatcatgttgaaatgatcagatgcagcctcccaactgtaaaaaaaattcagaaaaggataaggaagttagaaacagaacaatattattaaatcatgaaaagggttctctcaacttgtaattggtcacataattataacttagtagttggtcacacattatactgttagatacatgttcatctaagtgttgttatacatgtcaaaatgaagttacataccaaaatggcttccatttcttcgtttgaaactggcgtgcgctttggctgcgatgatgccttcccgccagtagtcttttggatgttgttcaaattggagaagaacaatgtatcagcttcatttgccacctgactctttccctctgaagctgcaatgccagaaagtaaatcgcataacaaacagatgattacccaaaccaaaagctaaaaaacataagagcttctctataatgattcgagatttgataacaaacacgattcgattcaatggcttaacaaatctgtgtatcctttgaatctaactatgtaaatgcaaataaatcagagcgaaat

SEQ ID NO: 25261 - DNA, 1099 bp, Arabidopsis thaliana landsberg
gatgctctgtagagctttctggaaagtctcaatcgcaggctcaaagcctttcgagcattttgccattttcactagagcagatccttttctagacagagctcttgctatcatcttgaagccagaacgatgttctctgcctttttcaacagccttgtcacagtcttcaatgcactcctcgtactgataatctcatttgagaaatgaagttaaacatcacacaagatacagtaagatccagatgaaccaactgttaattaaacaagactaatgcaagaacacatagaccaatggaattgaaccactcaggatacttgaagattaattgattccagtaataataaagataaccacttctacagaacaagtgaataaactccatcatgaagccataaaccctaaatttctacctcatctaaagctaactactttcagcacaagtgaaaacttaagttcaaaactcttaaatctccaacaagaagcagatgaaagttatcaaaacccatcaaggtcatcacaaatgtactaactagtgacaagctatactaaacagacaagctacttcaagaacccaagatctcctccttaatcttaaagtaccaaaaggtttaacttttaagccaagtataagacttaataccttccccatctcaagataaacagcagcacgattcgtcaaatacgaaatatcctcatcatcgagctccatggccttagtataatgttcaacagctctctcagcatcggtcatattataagcaacatttccttcccctttctccttcatagccatctccattctctccttagtccgcctctcctcctccgtcaactccataggttccatctccggttcaggctctttcctctcatcagcctccttcatctcagtatcttcaccactagatccaccatccttaacatccaccaaaacccttatagcgttcataactctcttatccttcatatacaaattaagattattagggttcctctgaatctccttcatcgtcttaacaaaatcatcctgctccaaaaaaaacatagtcgccggatccgccgtcaatttctcccacatctccttcccttacacgcatcaaca

SEQ ID NO: 25262 - DNA, 751 bp, Arabidopsis thaliana landsberg
tagactgagagcagaatttgccagagaggacagcgccttccatggaagctaagtacttctgttttgtgtaatctccagctaagtagaatccttcaataggtgatctttgtagaggacgacatggttcacagtttgggatggtcttgtacacagacctgatcatgcaacaatagagaaagatgttgaatttatcaatgtaaagcctggtccctcatttgaagctaaataaatggtacaacttcactaaccttggagtcttaacgacatggtacttcagaattttagctttgctttggtcagctgagatttcatcagggaagagtttctcaagttctttcattgttgcatctatgatgtcagaatcagtccgtgatatccattcctctgctggtgcaaatactagctccagcattgaccggttaggatcgtaatattcctacagtttatcatagaaagaaaacgctttgttgaatcagattcggaatcaagataagccatcaaaaattatgagaagatccacagagcaccaatttatgatagataaacaagtggaggaacacgtttagaaaaacaagccgcgttcttaccttacaagttaacgacatgtcggcatacacgctcagaaggttacttctgcaaaaaacaacaaaacaagattgttgaatatacaacatatgtttaaccaagaacaagccttaactgttgctgattcaagacaaaacacttgtattctttttttccaacactgtat

SEQ ID NO: 25263 - DNA, 688 bp, Arabidopsis thaliana landsberg
atgtggttggggcaaacgcgaatccaccaaagaacgccaaaagcccaccgaagaacggaaacgtcataccaacaaacatagttgcagctacaaaaccataattaagatgacaaaaaaactcatcatcagattttttgaacaactaacaccttaaaaatgtaaatatacataagtaaataataaacgtgaatttcaataaattttcttaccaacgtagaaattacggacaaagaaccgaagagttgtggttggtctgaaatttagcttcttgaccaataaagtctccatcatatcaaataccggcattgcatatatctgcaacaaaaccaagatttggtttagacctagttaataacggttctctctcgagtatttaagggtacgttcttgtttagaaaaaccaacctggtaactaccaatgacatggatcacgacgaatatgttcgccgtggcgattaaccacgccggtttcttaagtgacatgagaatattattttcgactccgttcccgaaaatgtagtatccaacgagagccacggggaaataacagagcgctacgacgatgtaagcaacgatgactcctctccacatgggaccttgtgagggtttctcaggcgttgaagggatagttgcttggatctcaaggaccacattatgacccgcgtaagcaaatgccacatcacctaaa

SEQ ID NO: 25264 - DNA, 717 bp, Arabidopsis thaliana landsberg
cttcctcctctccaaagatgatagatacgatttttatgtacatcatccatcccctgtagcatcccggtgagataatgaatcagcctgtgtctggcatatatctcctcatatcactaactctgggtgtctctggcgaggtttagtcgtcgaatctttgttatttaaagtcggagagtagggatgtcataatgggtaacccgacccgacccgatccaaacccacatgggttcgagtgcttaatggacgggtttgacccgacccatatatttatatggattgaacttacatacccaaatccattattatagaaacccattggtttaatggattatatgggtacccatatatatgtataataaaatatataaataataaaaatccaaaaaaataacatagttttgtaagccaacaaaagtttgtaaataataaattaaaacaatctagatattaaaatagaaaagcatactaaaatcttaaaactacaaatccaaagaaccataaaactaaaaaaaaaacaaaaaatagtcttaatttaaaaagctttaaatgcatccgattcttccgcatcgaattcttcggcctcattcttcattttggcttcattgtctacaaacgagatgaaaaaaatattagaaccttggctataataataacaataacaaaatattgaatatagatgataatatacctttttcatcatccgcataacccaataac

SEQ ID NO: 25265 - DNA, 1746 bp, Arabidopsis thaliana landsberg
  unsure (1)..(1746): unsure at all n locations
taatcctcaatcacagaaaattaattttttaccaaaacagtaataagtatataatgcgaatatgtaacccaaattttaaatagaaactaagagaaatttctttgtgatacgaatttttcttctaatattactaacaaataaacgggagggtgtgtatgtagattcggtatttcggttgaaatattatcaactagtgttatttctttaaaaaaaattttggttactagtgactaatcagacacactaaaacatattactattacacacacattatgtggggttgattatgcatacgttcacattacaaccttagtgtttcttcactttgttgtcgggattaaattgtgccattaacataaaatattttcatcttagcattaaagtttaagctatccttcattttttctcatatgtttttggtaaatcgttgtagaagaaatcatggccgacaagcgtcatcatggtatcgaattctctattttttcatattttttgttctgtttatcttgccaataaaatttataaaagtatattcttttcttactttgataatgtgagtggaatcataagaagaatgtgattcatgtaattccattatctcttttctatctttcttttatgattttaactatcattccgtgaccaaaaaccgtgaccaaaaagcttttcttgtcatataaattctctttatttttatgacttttaggtggaaactttgcactctctttntggaatttggaaaacaccactgaacattttagaatatttttttcttcaattatagtctcatttcactaaatctttttcatggcgaagagtaatatagcttgctttacatgaatttgcaatgaggaaattaaaataaaaaagtatataaacgcatatatataacaaaaactctatacatactacaagactttgattgagatttgatcaaaaaactttctacaaattcatatatctaataatgacattgccaatccatgaaccgtagactaatataaagttcaacagatctaatcgaagagaaaaagtttgtgggggtgataatttatgcttcatcataagtgagaataatagtggcaaaggcacaagaatgtgccctaaagttataactctttatcaatttatattaacctctctcaattattccaaaaacacatcattagtctttgtatggtacgtacggtgacatcccacgtgccccgacgctccctttcgctaacatctttatctttataataaaacgaaagcaattactaaaccatatacatacatatatagagactaattaatcagcttgagaaaataataagaagaagagatgttaattaggtggtgggataagaacaagagaattttgctgtctcgtggacttaattggttgattaatctgatgtacggaaggagtcaatcttgcatactacgaagtttccaccttctaagttctttttcttttagatctctttggctctaattaaccatttttcttttctatattttaagatttttaagtagatattgatgtatccaaaataaccaaatgagaactagatgtctctacgtgtaaaaaatctagtttgctcttgttacaatcaaaagcttaaatgtaaccccggtgtttaactttagccttgcatacatttattgcatggggggaattccctaaagtttcgtaagggtaaatatatttcaaccttaattgtagtttagtaaaaacttaaaaattagaattttggttgtttt

SEQ ID NO: 25266 - DNA, 2530 bp, Arabidopsis thaliana landsberg
cggcatacttagaagaggaaaatatcttcttgtctacctacagagatatcttattctgaagtcatgcacagacagtttacagtttcaaatagatctaaacagtcagaagatacttctcacccttaatccctatactcactagcatggaaacaaatagtaataagacaatgcacttcagctatcctccaagttagataattgtagtgacagaaatgatgagccaagacaattcgctgagatggttattaatctgcctatctttctaaatctaaaacttaatatatccaaatacgcacaacaattcaggctatataaagtatcaacagcaaaagaaagtctgggtcaaaaaccatacctttactagttttggcttggaggctttgttgtgagagcccgtctacagaggatgggatagttctggtttcgaacaaccgtacaccaaaccttagcttgatactcaacaggaggtccatcaggtttctccctagccatgaatgtgatgaacgactttgaccttgatcctgctgaaaatatacctcgcaccacttccacaaactccacatcgaaacccttgaaacaatcagaaaacgaaccagatttattagataaatacacttgtaaagagttgagtgataattagccaaaaaataatataccgacattttcgattcttttctcttcgttgtactttttgagacacaggctagccatctctgcaaagtactcggtaggtttgcccaaaactggcaggcaaatccaaattagggactactttgtaatccgagtagttgtaccatggccaaagctctcgctccacataaaacccctaaattcaggcacacgcactagtcaagatttactctttatccagctaacaaattaagttcaaattcaatacggttaccttattctcgatgagctggcgcttaaagcggcgccattgattttcatcttcgtcattagagaattcatttttatattcagaggaattgtactcgagaccttcgaagctgtccacatcccattcagggactttaaaccacgtcggatgttttagctcctcgttagggtcaacgtactcctcgccaaaaaagaaacttaatttgctctcaaaattaaataaaattaaataaaaattgctctctaaatttatttattttgatcctttcagtttaatttaatataaaatatatataaatacaagaaaaattcaaaaattatttatttttagctgaacaaatcgttattcactttaaaatacgagtagcaaagaatagcaaaataaaagtgaaaaaattacacaatattctaatgttcaaatatcacaccgtaaaattgctctatataaaattaatgatcatcatcagtctaggtcggtgttccatagattggagatatgggtgttgattccttagttctcatgatgagtttgaacttcgagtttgtttctagcagctgtacaaatttggtactcatcagttttagccataatgatagtacaatcaatatatatatctaacatgcttatttatgtattttctgtctctctcaccatatattctagttacaggagtatatcaagtcatggtacaggtctagattctcttaacttgattactaaacattagttacgggaatcacaatattgattactaattaattaaggtcatatggattgttttaatttgatttattagtttttatgttctatatttcaggaatcttacaatgaatgatgacgatgaaccacgaagaccgataggtggaagacaccaaaaacccaagctaccaaatctggccaatgaatcaaaacgggctaagaatcgggctgctagtcaaggtcaacaaccagttcaaaaagaactagtcaaacaaggaccaatgagtttagtactggtatttatacgaaattcaccaatcaactatttacaaaacaataagtctagcactcggttttagatttttgttttcatttgataattcaacccagctggaatttcataatattttcagacaatactaccaacacaaaaccaaaattgaccaaagtccaaccaagatgaattatcagaatcgattgatatcccctatataaattgataatcattctataaaataaactttatcctcaagtgttattaacaaaattgtcatgctgatgtgtcgttatcatagtgactttttacccatttaaataattgcccaaattttactagactatatacagattttgtcattagtattatacaaacatataacacaaaaattaaaaacgcaatcataaccataatactacatctataatataaaaacaaattcaaaaacatataatcctgtatatagagtgtcaatatcttcttcatccacaataatacaaaacttcacaaatatatattacagaaaaattgttttcaccctacgaaaaatatataaaacagtattactaatactctaagcgaattattttataatattatattagttatccaagctataaatatcagaaaaaaatcatgatcatcttacagta

SEQ ID NO: 25267 - DNA, 1471 bp, Arabidopsis thaliana landsberg
gcttccgcagctttcatttcagagtcttggtgttgtttatggagatttgggaacttctcctttatatgttttctacaatacatttcctcgagggatcaaagaccctgaagatatcattggagctttatcactaatcatatattccctcacactcatccctctcctcaaatatgtttttgttgtatgcaaagcaaacgataatggtcaaggtagtattacatttcccggcttcagggcttttgctatgcgttttttttttttttgaattgtctcttgtttggcaaataggtggaacatttgctctctattctttgctctgtagacatgcaaaagttagcacaattccgaaccaacaccgtactgatgaagagcttactacttatagccgtactacatttcatgagcgttcttttgctgcaaaaaccaagagatggttagagaacggtacctctaggaaaaatgcgctacttattctcgttcttgttggtacgtgcatggtgataggcgatggaatccttactcccgccatttcgggtaatgtattattcattgactcttccaaatatatacattttgttgtttttccaccgggatagtatttcatcgtgtttaatctgttgcagttctatctgctgcgggtgggctgagggtaaaccttcctcatataaacaacggtattgattactacgttaaatctttcgttttgcggtgcccatttacgctagcgatgatagttgatcaatctaggtgttgtgattgttgttacaggtattgttgttgttgtggctgttgtgatattagtgagcttgtttagtgtacaacattatggaacagacagagttgggtggcttttcgcgcccattgtatttctctggtttctctttattgcaagtatcggtatgttcaatatatggaaacatgacccgagcgttttgaaagcgttttccccggtttatatatttcgatatttcaaaagaggaggccaagatcgttggacctcgcttggaggcattatgcttagtatcacaggtaaagaaactgatcaaatatttatcgttttgttcatcttttatgttattcatattttcttgttatgtccatcatatttcagggattgaagctctctttgcggatctatctcattttccagtctcagctgtgcaattcgcttttactgtaattgtgtttccttgcctccttttggcatatagtggacaagctgcataccttagaaagtacccgcatcatgtcgaagacgcgttttatcaatccattccaagtttgttatatatatctcttatcaattttcgtactatcgatggatgtctctggaaaaagtttagaaagagtttctgtttttgctttttggtgttgcagaaagagtattattgccaatgttcataattgcaactgctgctgcaatagttgcaagccaagctcaatatccgcgacattttgttgatcagcaagc

SEQ ID NO: 25268 - DNA, 1115 bp, Arabidopsis thaliana landsberg
  unsure (1)..(1115): unsure at all n locations
ttatttaaatgaaaatattatatataagctattctaaaaacaacgaacacgactcggtaagtttgaaaacctctaaaatttgcttttgacataaagataaaatgaatcatttcttaagacgtaatgataaaattatatataatatagcaaagactaataatgtgaagttgaagcttatacgttacaccaacttgaaattaaagctaaattatgaagtctttatttcataatcctaaagcagattgcatttgaaagcaatacaaatcaaacttttagtcagctccaccaaaagttggtcgcatttaaatccaagagtaattaggctcttatagaagtttaatttgacttagttttctcatgatgatgactccttgcatctttatccaaattgcaacactaatgnttagttgaataagtaatccaaccttttttttatttggatgatagatatacgtatcaattacagaattatacgtaagtattatcatttcttttcgtatccagcctcagtctatttccgtctatataatatcactaaaacaattttcttaaacatgtgtattactaaaataaataaagctcaacttctcaaaattgatattccttaattatataaacacaagatatctcaccaaattacctccatccataaacatataccactggattgatcttcgtttgtcagtgatgtagatgcataatatgaaaccttgaaacctttaacattgtattaagaactcttcgtatagcacatctcgactatgtaatttatcttgtgtaccttagcatccatttgccttcctttatgtgatcaagtgaaggacaactcataatcatccttgtaactccaagaaaatgagctaagtcagaaaacataaaaatagtaaataaacaatttaattttctgtgtttgatttgtgtatacaaacacaaatccatagataaaacatagatccattttataaagtcaatctagaataacttgatcggacttaatccatcatcgtatagcgataagtcatggcaactaaaagtcacaacacaaggcatattttattttcaataatccaatgtaagaggaaaaattactctttttaatttatgaaataaaaaac

SEQ ID NO: 25269 - DNA, 1113 bp, Arabidopsis thaliana landsberg
agcaggaagctgatgaatgagaggaacgtgaagaaagaacctggttatagttggattgaggtcaagaacaagacttactcgttcttggcgggtgatcggtctcatcctctcaaagatcaaatctatatgaagctagaagatttaagtacacggctgaaggatttagggtatgagccagatacaagttatgtgcttcaaaatattgatgatgagcataaagaagcagttcttgctcagcatagtgagagattagctattgctttcgggttgatagctacaccaaagggaagccctcttttgatcattaagaaccttagggtttgtggagattgtcatttagtgatcaaattaattgcaaagattgaagaaagagagatcgtagttagagattcaaatcggtttcatcactttagcagtgatggagtttgctcatgtggagacttttggtgacataataaatagaaaacattgttcagaacattttttttttacacaattcgagaaataaagcaaattcaatgttttgggaagaaatcaaacatgggtttgagattttgttttgcttctcagcacatacataaggagatggtgaagagactaataataatatgattgtgaaagatgcttgatgggaatgtcaaatctatcaaccttcttctccaaactcctgtgtgaatctctcgtggacatcaaggacagacttgctcactgatggcctttgtcttgcaagtaccttctcgaaatctgttctggtgattggtggtggaataatctgctgcaatctattcacatgaaatacacaattcagtctttagaaatcgtcatatgtaaagattgaaaggatctatatatcagagaagcttgaatacagaacctaactgatatattcagcatttagatgcgtacctttttggcccgcccttctgttgatagaacttgcattgtagtctggatggcaccagggagcctatgcccacatggcattcatgtgccatcaggagacttgacaatgaacattgcatgttgtgttctacgaacacggtccaactgatcatctttcacctgccagagccactcagactgtcacgacacatgcttatctatctatactaa

SEQ ID NO: 25270 - DNA, 2830 bp, Arabidopsis thaliana landsberg
ttgtgagtcaagaaaaccaaatcgaaaaactttcggatgaagatgacgaactcgccaacatctctagcgaagaggaagaagaaggggaactcaaggaaacccactcttgcatggctacctgcatgcttagtggggaaattcccacaaaccctaatctcggcggaattgggactcaagaaggagctagctctagaggaagcttgggggtcacacaacttgaccgatctgttcaagtaggtgaagaccttgatgcagcccaaagagtctaaccaagtcgttttcggactccttatccaagaagagccggtgaaagctatccggctcaacactaccgaccccctatcttgcctatgccatcgacccgagaccgctctcacatgccttggaagcacaagactcatgaaaagaacttgaagtcttggtgagccaattcttagatcaataaaccttggatacaagaaagctcaatgcaaggatcaatggcattgaggttactctcttgagtataattgatggtcttttgtacaggttcaagaagttgaagctaacaaagaaaggttcaagaagatcaaagatgagaaagagaggcatcttaagagcgctcaagacaacgccatcaacattagggcgttgttaaggcaaatatcaagctcggacaaagactgtgatgcaaagattgcggctttgtctgacaaggatactaacttggtgagccggttgggtaagcttgaagaccatttttatgaggagcaaagaagggttgatgacctaagctactaacaaaatcggtttcatgagaccttatccgaaaggcctattcttaccgcgggcaatgacgaactcaagccggaagacaaacatgagtggtcgccttgctccggtaaagatttctcttcgattagctaagatgacctaggagaatctaatctaggatggaaggtgtcgatgagagcatatggagacttcaaacgcggattaatcaattagaagataatgacgcgaacgaatatgtggctttggaggaggtgataaggagacaaggcaaagttgaggagaaccaagtcaagaacattgatgatcaattaaaaatctgggcatcacttagaagagtgaccatggattcctcaaggaaatacgtggagttgctagatagaattcttgatttggacaagaaagttgataacctatcaacacgcatataagggcatgaaccgatggtgagcaaagaggaagactctagcccttatgtgctttgcgatgcggttacaacttaccaagaacctcgtgaccttaaagaaggagagatcgacgagaggaatgaagatcctccgggaagaacaagcgtttacaaccggctcactctcctagaagccagtggcatccacgcatgattagcttgataagacttagagattttaaccgagccgtttctaagctacctcgaggtatccctttttctaaagtttaccatattgatcgtttctttcttgagagttgtgaaacaagaagagaaatgaaggaattgtatgaggaagccctacaccacttaaaaccattcaatactctttgaaagatagagagtccgggaagattccttgtgacttgttctatacgaggagttgaattcaaagatgccctatgcgattccggatcattgatgcgtgttttatttcacctcaggcttttacctgaaagaccacacgactactacaagtgcacaatatatcggagtagtattttaggatcgaatccacaaggagagaagtagttcagagaaatccttaagaagagagtgaagctcggaccaaaataaaagagaggggttattgtatgcaataagtaaccaaaataaaagacaagtaactaaactaaacagtaagcaataagagagaagcgttaggtcatcgggggtttctccggatgttcacgattcaataataaggtatagatctcaatctaggtgataacatggctaggtttgtttacttccaaattcccgaacatacgaaactctatcaaaactagttaatcctaactgctagtaggtgaaaaccggctattatcgactagtatattacgtactcagttgccctgtcggctagtaggtgctaacatggtttcaaaatacaagatcaaagcattaagttcagattcgattctagttcataagtccctatcactcggcgggcgtgcaacagttatagttctttattcagttgagttaggtcaagcatttaaacgagattttgccaaagaatgaaatacctaaaggcaagtactaggtggcgttccggacatacaagcattaagaataaactcaactagaaggaatagtgtaaacaatcaaacaaagccatagaaaccaccaacctagatgtttgatctatttgtccccatgaattctcctttgaaaccccctcaaacccaactagagaactactcgctatggcaaaggggctaatcaaagttgggttgagtaaaccataactaaaagatgaataaaacttaaaaggggtttagagattacttctttgaatgtagaatacaagaggcaaagctccaccttgagtcttacacgaaaccgagaaagagaaagagagagatggtgttcttcaagcttcaagaggtacggcagcaaggaggcagctcttggtgacggctagggtttgctggtgatgaaggcacacctagggttagggctaaggacaagtatttatacttgaggcctaagaattaggtttaggggtaagaacgtcattccgctggataagtaagtgatcgggccgagaagtgggcttcaaggcaagagcctaaaggtggcgacgcaaag

SEQ ID NO: 25271 - DNA, 1521 bp, Arabidopsis thaliana landsberg
aactcaaccagcataagacattacataatcaaactttattcccatagttctcttcttaatctatagtgcctcaaaaacttgaggcagttcattacaaacgcaccatggtttacttaaaatcatacatacataatgcaatacatgcatggtggtgattggttaatatattgttttagtgaccgggctgagtctgaacagcttctccggcatacgagcagcatctcgagcagccgttgtaacctctgtagcagcagccgtggcggcagtaacttcccccacttccccctcctccttgtcgcccaccgcctccttggtatcgtcctcctcctccttggtaccgtcctcctcctccttggtatcttcctcctcctccttggtaattacctcctcctccttggtaattacctcctcctccttggtaattaccccctcctccctggtaacctcctccgttattgtaatttcctccattgtcaccgtagccacgttgatcaggtttcacagtttccttactctctgaattcactgtggctgtccaaaaacaacacatattttaaacataatgtttagttcgtgtaaacgtacatgcctctccacgatactaaaatctgtccgaatctattagagtgttttcaaaagatttataacatcatatactgaagattatcaaaatattggcacaaaacatttgaatattttgagattaggtataatgaagattagacatcctactaaaatatataaaatcattttaagtaccagaagatgccgcggctacttctgagacgacgagaagaacagcaaagagacccaacagaaccaaagccttggaagccattttcttccaaatcctgcttaaaacttgtgatgaataatatgtccccatgcatgctctctatttataatgaaaatgaggacgagggaatgagaaaagtcaaataaactaatccacagtcgaaagaattttggtaataaaagaaaatgttaaaagggaagtaatgtatcacaatatagaaaaaaacaaagtggtaaggagataagtatcaaagtatgtatacggtgtcgggtcccgtatgggtggtcgttggatttactgtgaataagtttgaaacaccataaatagcacaaaccccacaagtgttttagatcttttcttatctacgtcatcacacacgtatagcgatctattattggatgatcaagtaattatatattctttaattgtagtaattttctcttctttattatttggacgtagtagatggtatctttgggttggctaagtgcaccactgataaatctcttttgcaggagattcaggagaagatgtttcttaggtttcaagactatttgtttctattcttagttgaatgattgtcctctttcgattttggtttgatatttcttgctttgtatttctagttatatttttagttcatttctttaggactttagttttgaaaaaatttcttttttcgttggctttgttttggggacatttttgtcaatcgtcgttttttc

SEQ ID NO: 25272 - DNA, 1114 bp, Arabidopsis thaliana landsberg
taattccgtcgggtccgttagtcactgtgtttaatatactcattccatgagatggttcaattggggagagacgtggtttgtctgacgtgtggttcccgtctactgtactagaatcatcattgtcaatcttttgctgtgtttgttcctccgccgtaggagccagaaacttttgtccgtcttcaacaacagctccatggttgccaactttgcttgtatcgtttgattttgcaactgccatcatattaagaaaatagtgctcgagtttttaaaagtcaaacgagagacgcagaagctaaataagagaagaaggattggttatcacgttttctatttattaaaaagttccctctcaacgtcaaaagctcaaagtacaacacacgaacatgggttccactttctaagagtgacattgcttatatgtaccttgaatcgaaggggtgtctataggctttatatcttgagaagcactgatctctgacccatttgcagaacgatgttttcaaaatgtttagttcagaaccaagggtaaaaactttgcagaagaatctatcttatctccattttttagagacattaaaaagattcatatcccctacttattagagattttttacctttgtttatttagttcaggatttactattggaaaattaccatttctgttgcatatattgtcattaaaaaggagaatgtcccctaccttgaatcgaagtggctgcatcaggctgaacaacggctgggacttttgatgggttatttgcagtagagcctgtcgtaccctttcccataggacttaggttaccacgtggtggattaactgccgggacactagactcacggggtggcggattagcttccgagacacaagatgataccacacctggacaacacaaaataaatacctttaatgctaaggctaaaatgttacaaacctccttcagcatcatagtgagtacaaaaggagattcattgcaaatttaattctcctagacactgaagtttaacagactggaatcaccgttttgcagtactaaaggcagggaatgcctaaatcataaatggattgatgaaactggaaaaggaacgaaacaataccttgctgaatagctgattc

SEQ ID NO: 25273 - DNA, 1214 bp, Arabidopsis thaliana landsberg
tggatgttggcttgttgcacaaacttatctctgtttcaagtgcagaagattcgagaaatgttatgtttaatatgatttcatgaaattccagtctttagagatgatatccgttcaaataataaaaaaggattgtcagaattttgaaatctattcatgtattctttatgttttgcttatttcttgtaggcctcagagttgcaactcaaagttgctctttataaaaatctccatgctcgtgttttacaatttgtcgcaaatactgggctactggatgaagcttcttttgaggtaaaatatttacttagttgtatgcatatgaatatgttaatatgttatctaatgtcgcaagagttctatccgcagttattggacaagatatatgttgaattggcgagaatttggatggagatgaagtttcaagccccaacaaaggctgacaatcttcctgggctgtactaatttcgttcccgggacttcaaaattgatagtgtcatgtaagtagatatatctgcccttggcaagtatttcccgaacgaaagtttctctgagtggccagagtatctggctgatgatgataccaaggatgtgtcagatatggtgaacccttcagtcttatggtctactggaacctgtgaattctcatctttattacttatcatttctgtttcctcttcacagacacatattgaccaggatgaggaaaatttggaggatgattgggacttgatacaggagcatctggatagtatatatagcacacataatgagttatttggtttctgtgacctctctgaaaaggtattggaactcaaatctgcaattgttgcatcaggctcactctcaattctcttgtatctaacaagacaatttattctattcagtctggaagattctgtattactgacagtagaagactggattcgttcactgattcctatgaacttggagtcagtatgatcaaaggtgattagacactatttctctctattgtttaacgtagttaaattcattttattaatgctattacagggttatctcttgattccagggctaaggggtttatttacatcgagcttggatgcaaaacttgttccagaacacctacttcgtctttgcctggaaaacaaaaaaaacttcacttcaaactatcagtcagccagtaaatataacttttacaaggtctgcgaaagcttttaccttcttaagaaagttat

SEQ ID NO: 25274 - DNA, 3305 bp, Arabidopsis thaliana landsberg
tatcatatctttttctttttgataaaaaattggcataatgactaaaaatgctaattaatgacatgtttaaccgcaattcgttcttctaaatcctatgtcgatgtctttaaaaactaatagcctcaacttttctatagtatagatttttttatacttttattttaaactaaaagtttcttcgaccatcattaacttatttttttttgtgttgttagttgaatattttttttattttgtgatctaatcaaatcaaatttaactcaaaatcaaacgaaaatgtcaaccctaattatttttccatatgttatttttataaggtttatatttctctttttctatatattgtttttttccttttcagaaatatcttaacatagaaaattataagaatttaaaaatataaactaacataatactaaaaatgttaattagcatatgcataatcgtgattggtttctactaacaaaaatttactttcttttcttttctttttgttactttctaaaaaaatttccatttctctttttctatatattgcttttttccttttcataaatatcttcatattgaaaattatcataatttaaaaatgtaaaacgtaatggcttaaaatattaattagcgagatggttgtttaaaatcttatgtggacggcttaagaagcaaatagcctccacttttctatagtatagattatataaagtacagttttgaaatttactaactcacgagatcatgacacgtggttatttcatcgatcttagattttgacatgtgtttgattttttttttactttttcctaaaagaaaataggaaactaaaaaacaaagatatttatatataattaatatgtttatatctaaatatttaacttacaattttcttaactaaaatgtaaaattaacaataagatggagtgtatataattaaattatataaaaaactaacaataagatgaagtgtatatcattaatttatatattttattatggtaaaataggtatttaaattgtattgcaaaatcgaatttgtaagattgaaatttggtttaaagaaatactaaattacatactgaaaaagtatgagagttacgttactatttaaaatcttattatataaagtacagttttgaaagttactaactcacgagatcatgacacgtggttatttgaacgatcttagattttgacatgtgtttgattttttttttactttttcctaaaagaaaataggaaactaaaaaacaaagatatttatatatactaattaatatgtttatatctaaatatttaacttacaattttcttaactaaaatgtaaaactaacaataagatggagtgtatataattaaattatataaaaaactaacaataagatgtagtgtatagaattaaattatatttattaaagtaaagtagatatttaaattgtattgtaaatcgaatttgtaagattgaaatttggtttaaggaaatactaaattaaatactgaaaaagtatgtgacttactatttaaacttcaaatatcgttaataagatggagtgtatagagaccatatagttcagattactcatgtgtatagaaaaactaatcgcatactgaatggattagcaaactatgcgttttagttaccgcttactctgcaattatttgatgttaggccgatagttgcaagttcgacattgttaaaggatacacatgggatgttgttttaaaaaagtgttcgagtgtacttttctgttatgaataaatcataggtggcttttgttccatacacattatcaaaaaagaaagatagagtgtatagaataacaagatagtttattatgatgaaatatataattaaaatatattgtaaaattgaatgtgtatgattgaaattttatttcatacaaaagttactaaattaaatattagaaaaagcgtgtagattactatttactatttgaaatttaaatattattgataaatatttgaataaatttataaattttatcatacacccgcctatttaggcggttcttatctagtatatatataagtagaataatattcatgcatatcttaagaaaacccaagaattagaatgtatgaaatagaattgcataatcgaaccaagggaaagaagaattgttttgcataatgaaatagaattagtttatattgtatttgtttaaaattaactctcaaaacagcaaaactctatctttcaatttagcagcaacaaatcttctagaattgaatgtacaacaaatgcaagtaggtacatgatataataataataataatgtgatattactagtttagtgaaatgagttaaacaaaaataacaaaataaatgaagtggagaaagtaaatgaagaggaagagtcatcgctgtcatggtcgcagttaaagaggtggtcagagtcagaagtctcccttaagcaaccttccaaatttattgacatttctgtttcccaagatccacccaccactctcctctctctcttcctcatttctgcgcaagaatctaaaccaaatctctcatcctctcttctatgtcccaaaacaggaacataactactactactaccatgtcttgactctgttgagaatcttaaatcctacctaacctccaatgggtaagaagagcggttcttcttcttcttggctcactgccgtgaaacgagctttccgatctcccaccaagaaagatcatagtaatgacgccgaatatgatgattaaaaaggtttcttattcttagatcttattattcgcttactatattcaaagtatgattattggttttcatttttctctgtttttttaaaaaatgaagagagagacgagacggtggtttataaaaccggcgactcaagaatctccggtgaagtcttccggtatctctccaccagcacctcaggaagattcacttaacgtaaactcaaaaccctctccggagacagcaccgagttacgcaactacgacgccgccatccaacgccggtaaacccccgtccgccgtagtccccatcgccacgtcagcatctaagacactcgcaccgaggcggatttattacgcaagagaaaattacgctgctgttgtcatccagacttctttcaaaggatatttggtgagcaattattaatgacctatatttttactttcatttttttaaccaacttgacttctagaccactttatagtgacaatgatgcgcgtctattgtctataaaattaacattgcttatacaagatctacaatttaaaagatagggatttcaatcaagataatttatttttggggtcttgatataaa

SEQ ID NO: 25275 - DNA, 1543 bp, Arabidopsis thaliana landsberg
tgacacatactaggtttacaaatgtacatatttacctgggaggagtcatattagatgatccaatcccccttagtgtatcgtgtgtatcttgaacctcttacttattgataatcaaaggtacagatcttccgtacgtttggttatgaacaaatgtacataattgcctacttatatatatatatatatatatatatatatatatatatatatgtattcaactcaaaaattatagacaaaacaaaaggatcacgtattctttttgtccctgatgaatctttcaccatatttaagaaaaactatcggttcgaaagaaagaatgtaccccgatgatcgccaaaatatttaaatcacatgaaaaataacactgtgatttagttaggcattgagtctttaggatacttttggtggaattgttgtttttcatttttaaaaaaggaaagatttttagtgtccaatgataaattcaatgatcttaaagagtctctgacttttatcattaaagacttagcctttcgttggggttatctgatctgcgtttgaaaattcggtacctttccttgtttgcagaaactggatttcaagttttcattatcagtttcatgtgttcatttcatatgttcgtcgattggagcatacattgtgattaaagtcttaaagcttaaacctttgattgtggttgatccagcagataggtggaggaggatttttccaatgtcatttgtgttctgtatcaacattgtgttggggaatattagtcttagatacattcctgtctcttttatgcagactatcaaatctttaactcctgcaacaacaggtttagggtttttttaagattgagaatttttcaaaataaagtgatttttttttattgttctgattggtttttgtgtaatggttttttgagtgcagttgtgttacagtggttggtatggaggaaatattttgattggcgtatttgggcgtcattggtgcctattgttggagggattcttcttacttctattacagaacttagctttaatgtgtttggattctgtgctgctttgtttggatgtttagctacctctacaaagaccattcttgcagaatctcttcttcatggatacaaatttgacaggtcaatgttctgtttcctgaggttttgatcttcagtttcacatgataggtgttgaatgtgtgaaacttacatttggtttcaatgacatgccatgctctcatagtccaatacttgatttgctttttcatatttcatggaactgagtgtttgtgtcctcctcattttcatgtctctctatgtagcataaacacggtatactatatggcgcctttcgcgaccatgattctcgggttacctgcatttttactagaaaggaatggaattttggattggtttgaagcacattcatcttcatggtcggctctcataattcttttcagctcaggtgttctaagcttctggctaacttctccatcttctatgtcattcaatccacaacagcagtcacattcaatggtagctggaaccttaagggaaatgaca

SEQ ID NO: 25276 - DNA, 1196 bp, Arabidopsis thaliana landsberg
aaaacgcgtaaagattgctaaatcatgggcatctttaccaactttctcaatgcatgggtgttgaaagagtattgatgcattcaccgctgaagattgatcttcgtagaactacatcaacaaaaaaggtcggtttaaatatgaaataatctttgtatgatttataaaagaaaaagatttgcattacctcttttgatgatatgaaaatgatgcaatcatcatcatcagtttctgaggtattgactctaatagtagcaccagtttcttgcctgatctgattaatgaaaccaccgccttttccaatcacacctccaacgttttcagctggacagatgaagcaaacacaaaattctcttgcatctgctatatctctacgcacagcgtagtttctgtgagagctcgtcagtgctgcagacattaacattgcaccaggttgatgcatggaagaacttgaagaagacaggagtaagtgttgaaatcttgaaggattatcatgaagcagtgaagcaacttgataaagagcttctctaacaaccaaaggctctccaattatctgaaaattaacaaacacagaatcattagctaaattcataattcaaatcttttttctctaatcattgtgagtgtatctcaccagaagaagctcatcatgactcaaagtcaaagcacaagcaggaagatgatctttgataacacgaatctgagcattagtgtcattatgcagcttttgaataacttgcccacctttgccaataacgcaacctatttgatctgaaggcacaagcatcctcacagtaacaactgtttgtctctcactatactcatcattgtcatcataatcatcatcattgtcaaattcttgagcaacaatcatatcatgaaccttgaaaagagcatcaaaagcaggacaaacaaaatcctcattatcatcttcaatacgatttgtctcctcgctattagaatatatagtatcaacacgctcatcacaaccaggcaatgcctcgtttaccctcatgtttgctttagtctcagacctaatttattttgcaatctcaccacctctcccaataatactccctgctcttctcacaggacacaagtaacgatacacagtatcttctaatccaacaccattattatctgtatcatcaaaaaaaaagctcttagctttaatcaaatatgaaaactaactaaaacaa

SEQ ID NO: 25277 - DNA, 795 bp, Arabidopsis thaliana landsberg
ttcagttgttttcttgtatccattttaagcttttacgtttcctttttatagtttgacgacggacttaactactctaaggtctccgactcacgcatccaaccttttcatagggcttgcgttatcgagctccaaggcggtcagggaaggcattgggatatgaatatgagactaacacttcttattacatcattctcgaatgggtgcgtttgatgccaaacacaactccattagtgcgatttattgaaaaccactattaataacgggtttcaaaaacaaactaacggtcttttaatattttttgaaaatcaagaataaaaaaatatatcactgcatgtaaacaacaccatagtgaccccaagcttgagtcacactattcctcaacttcatcctcaccaacgttcggttatgtatcttcctaatctcttgcagccaacacttgtctcttaggggatgctgaaaattgtttctcattccacttaaccttcctgcttcccatcaaaaggcattctacagtctctagctatgtgtccggctacaccacacctgtaacaggtcacttcctgacatcttctcttactatgcccggtttggccatatgatcccatcgcttccttttcttgagcgatcctcttataccgagcctcttcttcaagtcctatctccagcgaagctgccttctcaaccaagtcaatcatgttgtcgaagtcccgaacatggcaacacccacgcgtatatccactctcagccccgagatgttattttgaatcaactcatgctctcctctttttcttctct

SEQ ID NO: 25278 - DNA, 605 bp, Arabidopsis thaliana landsberg
attcgattgaaggtgtttggagaaaatgtacgtatgaaacaactaagctccagtcggttcgagtaagctatgagctctccgatttcctttggccgaacagaggcgaaagcagcttcccaacttatgtcgatgtattggattatttggaggcttatgcaaagcattttaaccttgtaaagtttataaaattcaactccaaagtcgttgaacttaggttcatcggtgatggtaagactttgcagatgggagacctcggtgcttacggcaacttgttgcctggaaaacctgtctgggaagttgccgttaataccggggatggagacatccaggtttgttacatttgatatcatctaatcacttattgtatttttgtttgcaaatccatattgttgggatatgttacatatcatatgtatatgaaccatcgtttttttttttttttttttgcggcgtataaatattattattaaacttatttcaacttttgaaaacattttgcatgcataatggattcaagtttacttagatttgtttattatattgtaaaacgtttctttttaataatatgcattcgtgtgtgtgcatgcagtggcatgcatttgagt

SEQ ID NO: 25279 - DNA, 1000 bp, Arabidopsis thaliana landsberg
gtctattgcaaactccatggctattatttatgcaggttagatataccaaggcacatgattcctcaaacagaacacccaactattctctctgtcttgcactctgagaatactactgttcttaacgtcttggtggatgtggtaatcttactttcagatttctctgtatttgtatactactaacttctcaccctccaacccctgtatagtgatattcattttagctttggtttctgtatatttccagagttgcgtagagaggcatgtgcttgcagaaaattatgaggttggcaagattattgcctttgagagaaggctctcacatctgaaggatgttttcactatagatggataccgaatgtaagtttccagttagattggcaagaacgaatctcttagagagccagacacaaatacttaggttcagattataagggagggacataaatatcaggtgttttcaaattttgtaaaatgagataatgattttacctaggaagaggtttgagttgagatcactagagccaacttctgatgattttactgagtattgacttaattactggaaaggctatatgtctatattaatttcatctgtagaggaagatctgcgtcaacattacagtaatctacatattcttttcttaggttttcccgcgggcctgttcagacaacccttcctcccgtcctcgaagacctactagattgtgtgcttcttttgatgaccaaatcaaggatcttgaaatagaggcctcaagagaacaaagtgagatacaggaatgtaggggacaaaagagggaggcagaaatgaatctcgagggtcttgaatcaacaatgcccacactgaaggtagggtaacatcactactgtctctttagctgtatccattgtttaatgcactggtcatgttcaactaatgtgccaaacttttaactgtgatacattttatttgtttccgcaaagcttaagcttctttggattaataaccattttgcatattttt

SEQ ID NO: 25280 - DNA, 2174 bp, Arabidopsis thaliana landsberg
catccctaaattgtctgactttttgtagccccaattgttgtccttctagatggataatcaatttttgaactgatggtttccttttgtggattttgaatgcaaaagtacgccacatagctttacaagcagacaaataacggcaatctagatactcttgaattttattcctttcctttacaactcttgttgtatctttcaatatcgaaggtgctggttgtacctttctcgatcaaaatggttgctttatttactccttttataacatatttgaatagatatttgatagcatttgaagtgttgcaccattccacatttatgtgcgcttgatatttcttcaagattggcagattatgcgggataacaaattgattatctatccttgttcctcctttgacgacgaaattgtcttggtctggccgacgacggtagacaaaatgtccagatttctcaacagatgtgaaagcattgtatgagcgtgggtactttttagtgcaaacctattagccctgccaggagatgatggtctatccgttccacaaggaccatgcatcatgtgttttttctacaaagctcaaatccgagtgggtctgtgattttgttgggtagttcagcagagatgattgcatttatttcagcagcggttgggattttagatgtcttctctagccacagaagtatatgtgcgtgaggcagcccgcgtttctggaactcaattgtgtgtagcactgtaaaaaattttaaaatattttaataacaaacttcttaaagacagtaattggtggacttacaaaaacttggtggacttaccagcaatagatggactgaagaatgtgcctttctcgaggtctataagcaattcgtcaagtttcatcttgaagacacgacattcaatatcaagtctctcattagctgaggtgccaccataggttgccaaatgttcctttatttctggtcaattagtgtttgcagtcattgtgatgaacaaagtaggattaccatatgcacgacatattgccattgcatcaagatatttctctatcatgtatctttgtcctcctgtaaaagttgatggtaaaattattcttttccccacttttatgccttcggtgtcacctttactaactgcatcgaatacgttgttcctgattgtcttttgcccagcgaagtcgctcttgttcgatgacagtgtatacatcaacaacatattggtggaataagcgtcctgcctttatgaatgtcattccttctgctagcctagtctggatttggtaagaatagaagtcttgtatactaagataagttcttttcctttcgccggctgtggagactacatgtggtatttctgtataaaatccatattcaccataagggaacaacaaaggatgatcatctctaatttcttgtaagtggcgtgactgcaattccaaaacaacatctctgtgaccagaagtagctgtcatatcccctacaatcaagtctacaacttcattgacttggggtagatcatattgcttacccttacctttttggccaaccaatctcattattaaatcttgaacttcatttgctttgtagctatctctagctttccgacagaacaaacacaagcagttgtgctcatctaacatcttaagcaattccacaactacatgcatcttcctgaattttgtttgctgactttttctgcgacattgtttgcatttgattggagatttcattttcggtatcctagacatacagttgaaggaatttaggtgacttccctagcagtggtagcaaggatccaatccgatggtaattttgccaatgtattctgaaacatggtggtcctctgcctgtgacactatgatatatttttgctcccatggtggtcctctacctaacgtgacatgtatctacttaacatttttgaagtacattttaaggaatccaattgggtcggattttttatttgattttgacccacaaatcttcaattagatctcccataactggtttttattaccattttgtacaaaaaaaataactaaaagcgaaattaatttaattaccaaatttaatatatataatatctctaaactacccatatttgttaattaccaaaactaattttctaaaatactttttatttaatttaaacataaatatataattcttctttcaaatttgtttga

SEQ ID NO: 25281 - DNA, 1916 bp, Arabidopsis thaliana landsberg
tattctcatgtttgtttgtttctcactttaccaatctcacttacagatcttccttcttcttcctcttcctcttcttcttccttaaaccctacaagcttctactctattgacaatttgattccgagtttacatcgataatggcggaccaaacctccgattcaacatctcccgtggctcctctctccgtatcttctcctactgctactgtaaactctctcaatttctctttaatcgctttaattttacgcttcatggacgcggacgtagtctcggagctctaggtttctgaattttaggttcaaaatgagattaatataatttggtttttgatctaatttatctagggtttcgagtttacatacggcatttcggacctagatctgtgttttgtcggcaacttcgaacatatcattttgttctgtattctcgattcgaattcaagtggtatagtatagaagaaggtttcgtttcttccgatttttgcctgaaattttactcttattactgtgtatttttatgtttttgttggaattgtctgaatttatcgttccacggatttaacaatttcagattctgattacattgatgttgagttgattcacatgcaaagctttttacctttggtggatcttgggctatcactgtgtagtatctctttagatttgaagtcagatttggatcgtgagccattactgtgtagtatatctttagttctgtgcaattaacaacaatctcacattggtcttaaagcatacttttcttgtttatatatatatatatatatatatatatatatatataacaggcttatgattttggtttgtacagcttaggagttataatatctgtttccctgtggaattgtttttaagtggttaaattgaaattgatgttgatcttggttgttctttctgctgcagaagaaagataataccaatcctgttgattcgaagctcacggtacgtcgctgtgttgttagatactattagtgtttttagtcaaatcttctgatcaagcggtttttctcaagtcttgatttcgttttatgtaggaattgaatgaatcaagggctgagttactaaacaggatccagaatctgaaacaggttttaacactttcattctcatctctgacattgtcatgttgttttagaacatctgttgtctttttaaaacaaaccaatctttatatcttatcgtcgcaggacttgcaaagttggagaggtaaattggacacttaagttaaagtctaccgtgaggtgagatccatttctagtcctctttatccattttgtggtatcaagcaagagaattgctgttttagccgggatcagttttgaactgttttgacattcgatgtatactcttccttggttttttacaggagctctctgggctaaagaagactctgaatcttgaagttgagcagcttcgtgaggtttgtatgtatattgagccagcagccacatgaatatttaaacggtttctattcatgatacatgtttgattcgttttgtctccataaaaactaggaattcaaagatctgaaaactaccttgaatcaacagcaagatgatgtttccgctagcctgaaaagcttatgcgtgagtctctcgtgatacactcttcttcctaaaagtattttcaatattataacccaaagaaaagaccggtttttagacttgcagaaactaatctatggttctcctccacgattatctgttttgtgctttgcagctacaagattcaaaagagcaaattgataagagaagtgaggtgacagaagagaaagtggaagctctatcgactgatgataatgccaaagaagcagaacattagataatatgaaattgtttggtcttatgatattctcgccactactgttaccactaccttgagaattgactagtatgctta

SEQ ID NO: 25282 - DNA, 1643 bp, Arabidopsis thaliana landsberg
caataaagtagattactacaatagatacgatcatgtaacaattctgaaatttcagcttttagatgataactccactttggctaatttcgtgctataagaatattttggagttattgtgttgttttcaaatatttatactttatttttttaaaattatattagaaatcatcccaaattgcacttgggccgaaacctacatcagatagagcccagttacaaaaaagaaaattttgacaagttgccggaaaaagagaaaagctcgccgcttgttgatagatgcgggcagaacgactggaaccttaaatccggcgggcttaagatccactgtttcgaggtagcaaccagagatcgggattctccgctgaaagagaccgattttcttcgtcaaatccacccctttgaagcaccaacccaccacaaatctctcggaaagttagtcgctcaaattaggcacatcgacgtaatcggatcctgaaaaatcaacccaacccactgggcagtaacccctctctcccaaccgagaaaattcttaagctatcacgattcaatccgacttgatagatgcaaaattgtggtggatctagaagctggtggctcaaatccaaaacctctaaacccgaaatccacaaccgccctctaagatcgaaaggatctgcagctaaccaccgtgcgaacaacgaaccctcctttatcccccaaattttcgccatgggcggagctcgagactgagggatgagccggagcaactgaagcaacccacggcgacaataaccgtgcgacaaatgttgcagaactcccttccaacagaccctagccacatccacatcgggggaaaacacgacaccactgttgacagagaatagattcagcccactcctggactttcattgagtagatttgaccaacaattgaagaacaaagaaaaaacagcaaactagatctgagaaacgaaactcgtccacaagagagagagtttcacggaaatcgatgcaacgattgtgtttttttctaaagagttatacttgctaggaaaagtttcttacttggctatggcattaactacacgataattagttactaaaatatttaatatcatttaactactacaaattattatttttgatattgcttttctgcatgaatataacaattcgattataatcatcaaaccgtagagatattttataacatttaaatactacaaaattataaaatatttagacaatgattcataaacttatcataaataagatcaatattaataaaataaatgagtttttttaacggaacgggttggcgagacgggtttggcaggacgttacttaataacaattgtaaactataaaataaaaatattttatagatagatataattgcaaacttttatatatactaactttaaaaaataaattgtccattcggtgtattgcggattaaaatctagttgacttatattaaaataattagcttatcttttgtttaatttattattttcgacttaattgttgaattttgaagtatgttttctgaaaatcaatttaataatttggttaaaaaattcaaattaatacttttcataattaaattaaaaataaacagtttatgtttttctctaattgaagaccaaacatagaaccagaaaa

SEQ ID NO: 25283 - DNA, 1984 bp, Arabidopsis thaliana landsberg
  unsure (1)..(1984): unsure at all n locations
atccctttaaatagtccaaaagtataaggatatttcattgaaaccctccttcataatatgtgattttcaactagaaataagcctttcccaaccaaagatttaatttgtaacaagagaaagagagagagagaatggcaatgccactcaaaccaacatctttcatgtcttcttctcaatgttcatcttcttcttcaccaacctcaagctccatgaaactcaaatccctaatacaaactctcatcatttctcaagtttgtcggctactccgagaaatctctagagtttcatccattcttgttagagtcttgaggaagaagcaatacagtttcttgtcagtttcttctttactccatccaaagagagtctctaagaaacaaaggaataatatattattcggctccttcagacttcactacaacttttgctcctctcacgtagtgcctgtctctgcgccagtgcgtctcccggaagagctctacttagctcatctcggatacgactctacttgggagtcaatgttttcgactgaatccatggatcgtcacgatggtgatgatgttgatggtcaagaaccatctcagctctctagctatctaaggcagctagaggataaagttaaagacggccaagaagaagagacagagncgctgatgagtgagattgatatattggctgatagaacaaaagcaaattgccatgagaagttcatgttggagaaggttgattcatataggagatcccaaggaaccctgaatagaagcggttgataacgatgatgatggggcctaatttgtatctttcatttctttttatgtgatttcactttttccttcttttcttcttttgaaattcctcacatgcatagtttgaattatctgaaaatgtgtattggaagcatagggatatatggattgtgtggtgtttgttgtgttacagtctaatgatgatgatattgatggtggtggtttataaactagaatagacgacagtccaaaaaggagaagagaggatacaaatggaatggatttttgtaactttggcttttgtggtttatgacgttcttttgctactatcttctgatattgttgttttcttttggttgtatacaacgggaccaatttcgattttcagtttacttatctgacttttctaagatccatcagaaataaaatatttccttaaataacatcattatgcaaaaaattaagatagtgtaaccttaaaaatgctagacaacatataaaacaagttatatttaaaatatcaaaatgttgataaaatttctaaagtgtaaattttaattttcaaaatctcagtttttcctaaattatataattgtattaactaaaactacattaatttaaaattatttattaactttatgtaatatcaattaaaaataatattcatatatagtttaagcttatgcataatggagcttatatatagataaatttattttttatgatatataaaaaatttaatcattaaattaacaagcctgattctaaacaattttagcataaaaaccaacttttatttattataaatacaagtcttagtttagactttagagactccagtagaggtgccttaaaaaaaacatacatttcatattttcattaacagtttgggccaaacaggcctatgttatcataaaataggcccaaaatgaaattaaacaaaaacgcatcgtcttgtcttaagctgcttccgaccaaactaaggtttctctctcctccaacttggaacttcccgtcttcgatcttctcttctctctctcttcatcgcacgctgtgcccagccagctcaaaacactgcacttgcgctttttatcaagatcaatctctaccaatacttagaaaagttctttcctttctgtcaaattctttcaatttctctcttcaattccctacgaattactcatttcggatccaatcagctctttatagcctctgcgtttgggagtcaatctttctctctt

SEQ ID NO: 25284 - DNA, 835 bp, Arabidopsis thaliana landsberg
gttcctcgtgccactgctgctgcaactaagaggaaagctgttgatgcgaagcccaaggctaaggctagaccagccaaggcagccaaaacggccaaggttacatctccggctaagaaagctgttgctgccacgaagaaagttgctacggtggccacaaagaagaagactccggttaagaaggttgtgaagccaaagacggttaagtctccagcaaagagggcttcttctagggttaagaagtgaagttagggtttgtaggtagaagaatggttaacgatagtttagacttgtataattcaatcatctttatgcgactttgtttgcttttcttctttcagtgttcttgttattcacagttcctttggactaccccttaaatcatatatagatttcatcaatgaagcaaactcgagtttctttgcagctaatttgtgtcaggctagtgctgttcttgttgagttatagtaaacatggatgttattatacaatcaacaaacttttacaacattgaagttatacaatgaacaagtttctgttcttccttgtcaactctgcccttgttttctatgtttaccattttcagcttttggtgttgttgatgagatgttgtttagatcttttttcaactttctgaatggaatatttgagttcctgttgaatgctaaaccttgaaggtgaaagaacaatgtctttccagattgaacctgcttcacaagcagggttgggttgtctatagagctcgtaaatggagcctgcgttctcgtttaaccctcctactcgcttcaaacaatctatctcttctgtatctactagcaatgtcttttccctattcttt

SEQ ID NO: 25285 - DNA, 1874 bp, Arabidopsis thaliana landsberg
tttttttttttgggcgtgtcttgtaaaccgccatgcttcgagaagcggtaaaatatcaattagcccaaaacaagaacacaaatgtcaggagacattgtggcagcaacgttggaccaaggcattgattggaccaatgcatcgaataagaagggaaagggcgagtgtgagggtgtgatgatgaccgtaggatgttgtagagaatctggtctgatagggttttgggttgcgcattgatagtggtgtgttttctatttttttcttttcaatctatccttattttatttcgtgcttcaatactttgtgttaatatctggaatgtgtgaagaccattgcacatgcaatttttattttccaaaaaaagaatatggaagcccttcgcttggattcgggagcgctgattggctttcagagtttatagaataccgaaacatttgtaattttagagattgtggtttaagaagatttttgactgaggagatttgtattctttttgcattttcaaattattcgtcatctgcctaaatcatatgacattagattttcatgtcagcaacgtaagagagggagtgatcgtgggtcccacattctggggagattgccaattcatacataaaactatgctctcctgaaacagagtacttggtggatgcaacaataacagactgttttaggaaatggatttgtgtaacgtttcgaggacttatcataatccttaagaaatactctaatgctactttttctggtgaggatttgctcagacagagaaatcatacacaaattaatagaaaagctgttgggatgtgaagattccaaaacacaaagatctcatacaacattaatgtatattggattactctcagctctatgcaactctataagatataactccgtccgttgtctcaaccacaagtctcttcatccgtgtcaggagcaacgtatacgctttctccttgtggcctgcaatacaaaccatcatcatatattttttctgtgaatctgaagatgatcaacctaatgatgctactacaggcagatgtgacgaggaagatatgaacctaccaagtcctagagtcggaatctcatctgcacggaagtagtaggacccgtttatttctttcttgctatcgaggaccgagttgaatttctgcacggcacttagcagatcctggaaacacaagcaggaattaaccatatttagaaaaatattaagggaacctttatgcgtttaattactataaataaacaaaacgttcaacccgttgggcatagagattatcaagacttgcaggggatagcaatttctcagtttgtcacaggtaatgaatttgatggcagggtattcaaaaacttggcactatagtctataggaaagatgaaagtttcatggctctccagttaaagatttattggttcaattcttaatacgctgctaggatatgttctaaaatgttagctaagaagaagaacatttaacataatacgagaatttagataattttcatacctcccacgatgctagagacttcatgaaagagggaagactatcatattcttcttttatcaatgttaatgtaggccctgaagttttatccatctctagtgttgcatactcatcttctgcatgcaccaaagtctaacatcaaataccagagactaatgaaactcaccgacaatcaaaatcacactagtaaaggattggaaataaccattggaaagctctgacgcatttggggcaggtagagcccttgtgtcaaatgatttacccctgtaacagaagaaaacttgatgatgtatgactaagaggaaaacacataagattttatttatgtctaagtcattaaacttacttcactgattctttcaaagacgtatca

SEQ ID NO: 25286 - DNA, 213 bp, Arabidopsis thaliana landsberg
atactgatagtcttctttatggtctaacattacttgctaatacgttatcctcattctgttctggattgtaatttctaataaaaaagatagctccatgagcaaaagctcctgtcatgatgaatcctgcaatatattggtggtgggtatatacacgcagctgagtcgtaaaataatgcgctatgtatgcataagcagcttaagagttcatgtgtt

SEQ ID NO: 25287 - DNA, 1057 bp, Arabidopsis thaliana landsberg
  unsure (1)..(1057): unsure at all n locations
tgttatgattggtagcaataggaatcgtaggttgaagattcaggtagatggaaaatctgtggtcgatgaggaagcttctgatctttggcgttgttctttggagtttcagagttactggattagtatctatgatgggttgattagcattggtaaaggtcggtatccgtttcagaacctggtatttaagtggcaagaccccaagcccaattgtaatgttcagtatgttggtctgagcagctgggataaacatgttggatatagaaacgtgagtgtgtttcctgtgacacataatcatatcttgctgtggaagcaagtggattgccgtgaagttaaaggagatgagtctggtgacgagaaggttgtggaggaagggactggttatgattatgaacaatggggacttgggaatttcttggagagttggcaattatctgacacagtcttccttgttggtgacaaggaaatggatgtccctgctctcaaggttatattacaagcatcaggtaattttcctttgagatcatctgatggggatgtcattcaacttcgtggagtgtcgtacccgattcttcatgctcttcttcaatatatctatactggacgaactcaggtaatttctcatatcctcttcccttgacgtaattgtcccttttgcctggtgaaatgctttgttaggaacctttttatttatttattagtaaacatggagattctatatcttcgtcataatttccttcaaacttttgttttgatgtagattttggaatcagaacttgctccattgcgggatttaagttctaagtttgaagtgatgtcattggtgagacagtgtgaagaaagtatagaccattttaatttgagcaaaacagcatttgactcctgcagaaaagtcaaactcttgtgtcctatttctcacccgttatctggctttatgttcccaagtgctttccctgttgatgttgggaagctggtaaagttgtactcaaccggcgaatatagtgacatanaaatctacctcagtgaccatagtcttactttccaatcccacaaagtcatt

SEQ ID NO: 25288 - DNA, 1127 bp, Arabidopsis thaliana landsberg
  unsure (1)..(1127): unsure at all n locations
tttatagactaagaagctcttaattgttcatattcaagaagacaattcaagttaaaaacctaatttaacaaaagaggaaatattccattagacttcttgaaagtacttagaaatttaacacgaacaaatacacaaagcgaatttttaatatatttctcacgcttgcagaaatttcctcacaataaccacaaaatttctcagcgataaaaaaaaaacagtttagatctttcaaacctactcgaaactaaactaatattcaaaagcacgtgctccctaataaaactcattcatgacccgactacacaatacccgacccgacccaaaaacatcttataaatatgttcatgcaaactcacaaacaactcaaaacactcttcatcaaaaccattcctctcctcaaaaccattaatctctcttctctctagcataacctctctcagatggcttctaactatgataagcttacttcttcgagagtagccatcatcggtgctggtgttagcggattagcagccgctaagaacttagttcatnnnnnnnnnnnnnnnnnnnnnnnntcggattcagtcggaggtgtttggaggagctgcacttacgagacgactaaattacaatcggctcgagtcgattacgagttctccgactttccatggcccaataatagagatgacacaactttcccaccttaccttgagatattagattacttggaatcttatgccaaacatttgactttaaattcatgaagtggtctaaggcatgagaaggtcatgggagggaaactctaaggtgaccttgggcttacgacttgtgccggaaaacctgttggaagtgtgtcaaccggaatttggagatattagttgctaattctttacatgctaattcagctatatatttgctatgcatgcattaccgagcaaatgggatccatatttaacttacgtttaaggttgctcgattgttttcggaacttgagcctaaccgatctaaactgcatattactgatgcatattatgaaaattgatatcaatgtttggtgcaggcatgcattgagtcgggtggtgtccgggaatacggacgttcaagataccagctttcggcaagaagggcgggatgtttaagaaaag

SEQ ID NO: 25289 - DNA, 917 bp, Arabidopsis thaliana landsberg
aaaaaggagaccttagttttttatcccctaattcctcaacaagaaaacaatcaaaacccattaatatacgttttcattttgtactcaaattctgatttcttgtcaaacaaacaaccagagaaccctaaaaggaacatccccaaaaggttgtcatttgagatttgagctctctttgtgataccacagcctgaagtagaggtttaattccccttttcttatcaatttaagcaaatcaaactcagaagataaccccctttaaaaaatatctcaatttcgataacggtttccgtaagaaccagaaactatgagcctgaactgcctcgcttgccacatcttgcaaagaacagactcggacagagacatgggaagccgtaaagattcaagctttaaagaaaacttcgcaacgtcagcgtttgaaaagatggtaaggaacagatcatcgttgcccgtagtgagacgggtcaataagggtcatcgcaggctttacagtgcggacatcatggtctatggggaactggacgagcccaagctggtcagaagcagtgggatcagaagggattggagttttgaggatctaaagaaacacaaagatcagctaagaattgaagagacaataaaggaataagacagatccctttgctaggtttcttccaatgttctgcgatgatgttgtgaacatgttcagatgctatcaagtctgtaaggatccaaccaaagaggtttaatgcacctacaagttcccggattctctggatccggcatgtcaaaatgaaagtctgtgagagttcatagatatgaattcgttttcctaatagacataatatatataagaactgccctgaagttacaaacaaaagtccattagagtttgcccgtagcggcccaacctagtaagatcatgtgaatcccaatagagt

SEQ ID NO: 25290 - DNA, 746 bp, Arabidopsis thaliana landsberg
ggctatcgtcatgtccttgtggtggatatccggaagaaggacccgcgggaggagcagggtatgcatacggtgcaccgtgtccgggcgggtaagcggtgacgggctgatccatagtcttatgatccatagccgaagggaccggcgcgtgaggaccactcgaagatccataagtatacttttccccaaatttgaacgagaatttgagagatcctttcgccttcccgttaggcaacctcacggcgtaagtaaccgttttctcctcgtcacctttattctgatccaaaagctccttcaccggaacgctaacctcaccgacaggtttatcaccagcgatgggacgatccgccacgatctcgaaaacaagagtaagacgattgtcacgcgccgctgcgtcatcgacggtgagcttcatttgatgcttccatttaggtttggtgccgcaatctttatcaacctttgtcttctgcttcgtcctagcgtcgccgttgatggaaacgacggcgtacaagtcttgtttaccgatcaattgaacgtctttgagatcctccgcagatataatcgtcagatccaatgatctacactccatggttactcggatcgaaattgaatgaaataaacttgaaatttgctctgagaatgttttttatgatgaggaaaagaaaagtggagagggcaaaggatatatatgcatttatgatatagtcggtttaaggaacaaagagttttttttttacacggggagggac

SEQ ID NO: 25291 - DNA, 1146 bp, Arabidopsis thaliana landsberg
agcaaagaacgcttttctcctaaacgaacgaaaaatcttcttctttactaacaaattctatttattgacttctacacaatcttatttttctcctaaacggttctatcttttttaccaagctactttaccaaatcatatctttttgaaatcattcctcttttcaccaaattattcctctttacttccttcaaataaagacactacacaatcttatctttcttatattcttcaaatcattcctcttttcaccaaaaaaggccttgtactacgtccacaaaaaaaggatcttcttcatcttacaatcttgacaaaatgcttgacgataagtttgatcaatattttgatgaaaccttacagagatatgacacgtattttttgattaatattcttataaacccttacacatccagttagacgctattgcttctcaagatctttggatatgacacgtattttttggacctccaggtaccttaaatgatatgaatatacttgatcgctcactagtttttgatgatataatataaggccgagctccaaaagtgaaatacgtaatcaacagaaccgactatcatttagcttactatctcacatatgaatttatcctaaatgggctacattaatccaatcatgaagtattaaaagctgatttagttgaacatgtatgacaacataattaccagaatcaatcttaaaatgtaatcgttatttttttcgctttttaatatgtttttttcttctctttctatatcatgtatgtttaaaattttatagttcctaataataatcatatttgctcaaataaaaatattaacaaattttcttttttaaattttcatttttgttttagaaacccacttaaagattaaaattttctaaaactctaaacaatttctaaattacaaaactatcccaatttattaataaaaaataaatagaaaccttacttagaaactaatcactatggttgttttgaatggcaataataaagcggtgcggttttcaaaactttcttaaaaaacgctttcaaatcaccagtcacagtttttttttttttttgcattttttataataggaagatgatttacgtgcacgattttctatacctcacaaaagtgaaatccactttaattttctgccgagcac

SEQ ID NO: 25292 - DNA, 867 bp, Arabidopsis thaliana landsberg
tccctcgtcttttaactgctctagaagtgcatcatatgccttaattttttttcaatatgctgctcctgcaggggtttacatatacaggatccagataactttgatctctcctaggtctatagtctatcgtccatcctgcatcagttagcattcccttaattcgctcacgccatctttgcttgtctgttccaccaccaccccttcctattctttcctttctcacatcaggattcaccaattcaggaaaggttgattttgatttggtattgaactcctttttgggcttactatactctgatttcttcctttttgacttcctcgacatgtcgctctcttctgactctgaattattgtctacattatttgatttcctaaagggtggtttaactacaacattctcacgcctttgtgccttcctggaggaaggcggtctctcatatatctctgcatcccgggggttgattgaggcagcaagagtgtttgtcttattgttgaccttcaccttcagaacaccgtttatcccttgcaccctcattggttcatcagaatcagattcactactcgaatcttcctgtgagctcgcactacatgtgccatttacaaatgtgtttcttcttctatcaaatagaccctccctgcctgatccagaccttcccacactactatcaacccttctggatgcaaaagagcttcttcctctaacaccaacactgccattatcaaagcgtttcctcatcaaattggcgctatcaaacccatcgtattcatcaaactcaaaaatatctaacttggtcatcttcataaaacttcctgacgcctcgttgttccttctcacatacccatttcgatcatgctcaaccctatccc

SEQ ID NO: 25293 - DNA, 1134 bp, Arabidopsis thaliana landsberg
atctttgtccacaaaaacttttgcaaagatcaaaaaacattaatcgtcccatgactctagaataacgcccgaaccattgcaagtggttcccttgtaaaatgctgcaaactgtccagcagctagagtgctaccttgaccaccttcaaataggtgtacaaccgcaacatgtgtagaaccaaaggtgtgcctagaatttttaatgccaaagtaagaaaattaatttcatgttctttttcttttggtacagtacttggtgggattcaaaaatgtacatactatatacaccaaccgccaaaaaatgagattcaaactacagtctattggatgcaaggaagactaaatactagggagctactgattatctgacaatcaaatcaagattacaaccccgatggatagcctctccctacataagggatttcagttcttactaacactttgagctccaaaacaaatacaatatttgaattttcccaaagcctggtcaagcaatatatggtcaaatttaattgaatgtgtatataaaaatttatggtaactgtagaaaattgtaaactattgttaaatattttataagaaatataatacaaaaatttaagcaatatatttacttatttaggtctgggcatatgagtattctgggagccagaaattttagttaaagtttatatatatataatatttaattatatattatagtagatgatatatttaaagaatagattattgtttacatggtctagagaattgttttttttttcacctaaataaaactaaaattatattttttatatgtagtattgagtttttgaccatttctcaacaaactaacaagcatcactggttgtggataaatatttgaataaaaagaactctgacttttgatatatagttttgaaaatgacattatttccctctcactgtcagaggaaagaacgacgaaaggacgaattgttcttccgcgtatttactcatatatcccttcttgatcgacgaccatccaccatgaaaagggatcttccgttggcctcgtagatttaatttatcgacatctattcagaatgagtactgacgagcttctcaccttcgatcatgtcgacatccgattccctagtacccttttatatatctttg

SEQ ID NO: 25294 - DNA, 985 bp, Arabidopsis thaliana landsberg
ctttatattactaaaatcgagagagccaacaaaagagaggagagggcgtaaaacagcagacggtggcgctttgtagcaccgccccctcctaacctgcgccttttttccttctctttcattttttttttttccggtttcaggaattattcctctcctcctctctcaggtcgcttcgatcccaaggcaaaatagtttcctgatttttgattcttaccttcgattttggcttcttcttcttcttcttcagatgcattcacctagaaaactctggcggacatcaaaggaaccctagcttttctccggtcttgttatatcgcctctatcgccgccgatcggtggtttgatttcaaatccaagagaaagaaacgcagaggttcatttctcaggatgctttggatcatgagattctccggtttattctccgccgctttggttatcatcgtcctctctccttctctccaatcgtttcctccagctgaagctatcagatcctctcatctcgacgcttacctccgtttcccctcctccgatccaccgccgcatagattctccttcagaaaagctcctgttttccgcaatgccgcagattgcgccgccgcagatatcgattccggcgtctgtaacccttccttggtccacgtcgcgattactctcgatttcgagtacctgcgtggctcaatcgccgccgttcattcgattctcaagcactcgtcgtgtcccgagagcgtcttcttccatttcctcgtctccgagactgacctagaatccttgattcgttcgacttttcccgaattgaaattaaaggtttactacttcgatccggagattgtacggacgctgatctcaacctccgtgagacaagcgctcgagcagccgttgaattacgctagaaaacacctagccgaccttatcgagccttgcgtgcgtctggagaactacctagaatccgatctaatcgtggtactacgacataacatagctctgg

SEQ ID NO: 25295 - DNA, 1222 bp, Arabidopsis thaliana landsberg
gctaccatttcatcagccagatccaactcaagaaacaagacggacgaaagagatcttggcaacatgtcatcagcgtacgtatgaacacttatatatgcacgatcaagacaaggcatgttcttgatcaagcaatactgttttgaacaattagtgaggtgaatgtacttcactgccggagtatctataaccaagaacctgaccgagtttcctacataactataaatatcattgtaatcagtatacgttaagtcatgtaaagaaggcactatcacattgaaattcttgatattgtcattcccttctcgttccactcgtagtttctcaataacagagcagcttgataagaacctaatgagagaagcatcgtctttataaaccacattgattaggttgagctttttaagggatgggaggcacgcgggagaagaaggaaaatctgtgagaaccttgtcggagattttcagtttcactagcgtttcacatgtgtaaaggctcttaggtaagctgattggatctgcggaccagagaagcttaaactttagcttacgcacaaagcgatcaacggcctttgcaacccatttgccgacttcaacatcaacaggacattgtgaaccaagtttgatacacaagctgtgtagcacaggtgccttgtggagttgcagtgactggtcaagaaacaaccaaatactctgtttgcttttcttatcatctttgtactcaagtctaggcatcattgtccatatgaaacgccaggcgttttgacaaaaccggggtggccactgcatcttttgtggagacaagcaatagaatctgcacaagcaagtcgtcggacaatttactgatcttgacttcataaacttcttctggaatggggaagaccttttttttagaacagataagacgaaccttacgaagcagagtgctagatgacttgcgacggtatatttcatgtaagcaaaaggaagccctaattagttccggaactttctttattggtttttaatctttttttttttttccagacgcagagagtgttttttaaaaaaacaaattttgttacatatatatctttttcagattggattttaaatttagctaactgataattttattttaattttttggtcaaaactataacaagctaattaatatacactatcttttaaaaaaaaatgtacatcgttaattttaggaatggaaatgatcatgatcccatattcta

SEQ ID NO: 25296 - DNA, 1768 bp, Arabidopsis thaliana landsberg
gatttttttatttcttacagtatcagaaggtctataaaaccaccgagccgtgaaatacagtttcccattaaccccttcaaacatttcaatgattttacaaatgaagggatcctttccctcaccagactgcacaaaaattacaaaactcagttgttaaaaacagaagttatatatggtaaagcatctacctacgctgtacgaaaaacataaaacaacatgataaacgttcatatagccaatgcataatatgcaatgccagtctaaataacaatcagctagttattgttacagatgagaactcagcttcgaaaggtaactactatcataaggacttggagatatacaaagcatgacaaacagagacaatgcacaaatatttattgcggacagttgatagtggtgagggaggagaatgtgatcaactttggttaattatttaccctacacatcaaattttctacacagtaaaaccatgttggcacattaaaaaagtggtaaaacctcaatagtcatcaaactcaaacaccaagaaacacaatgtcatgcatattctcctctctaactcattttcttcaatgtaccacataaatctacgctttaaaatgtaacaaatgcaatttagacgtaatagagtcatacctgtacataagcatcatcattcagctcatatatctgacgctcatcaacaatcgcacgtctataatggcatcgagcacgaatgatctcaactttttcatcatccctacaaaacgaattcacttaatcaaaatcaaaagtaaagcctctcaatctgactatacacaagaaccaaaggattcaaggaacttacttcgtcttctttctcgacgaagccttaggtggctgtacctgaaacaaaacaaacaaaaaatccttcagaaatcaacagatctgcaacaaatctcagcgaatttctactagatctaaccattccatacacaaacacccaaaattccagtttccgatgtatggaattacctcaatcggtttgtatctgtcaggccaggtactcttcgcttcagattctggaattggctcgtctagaaacctcgcaacatgcttttccccttcctcgaccactgtcaccggctcttctttcaccgtcttagctcgcttaggagctctcttcttcggtttgggaatggatttggtagtgtcatcctttgtcgcaggtctctttcgcttcggcgccatgattgagtcagagaatcgaaggaagctaaagagacgaaggaagataaagagacgaaatgaaaccctaggaagcgggggtgtgacgagtgtgaggactaaataatctgagattgagggcgaaataagcgcgtcacataagcgccaaagtgatgggtttcgaaattttcgtggaattgttttatttttataatgaatttaaaacgtttgggcctaataaaagttttgaggcccatctctttctctcgctataatgagtacacaaatgtcaaaaaaattagtagaaaagttttttctttctatatctatctatgattttagtaaatgtgttagtgtgaatttaatttcgtttggaattcttcccacaatcttagctatctatgatttgtttttaataaatgttaaaagattacacaaatgggttcattcccggggtagtcaacatcgactctacgaaagatctaatcatttttggacaatttcagaattttttttagcactctccctttcttacacatgaaagcacaaagttgtaaaaaaagtatattgtttttttttt

SEQ ID NO: 25297 - DNA, 850 bp, Arabidopsis thaliana landsberg
tttctgttgccattttaaatacacatttgcgtcaaaaaaaattacgattttgctgtctcgaaaatagcaccagggcccagtatttcttaattgtattttttcggctaaggtttctaattattaatttattatcaaaaccttacatatggtaatggtacactgtacgagtttttggttgtcttgtgtttttcaatttgttcttcctctttatgttttgagttttgttgtcctgtttcattttattcttacttttgttttctctgaattttgttttcagtgaacgtataatttaaaaatctgcaatacaaacaaacaaatatctaaaagtcaagttggctttacgcatgtgatcgacgaaacacctaattgtcttgttctttttcattcgtctgaataatttcatgaaattaacaagacaaaggttcacatttataaaaagggaacgagagcaatcaaactacagaagatcactacatcaaaataacgcatttctcagattctcagattcaaacacattcacctaattgttttgttctagctaggccttttagctatacaaattttgcattaacattacaatttccatcggcatgtaaacaattagcactaactaattaattagtactgcaatatatcaaacataaaagatggttaattaattcagtgtcaagttgctgatcctaatgagaatgcagtgctgagacaagatctgatgagtctaacaaaaatgtgactaattcaaatcacattaattactgtatgtagcaaacataagacttatatatataatatatcacaccaaaatataaagggaataaaacatatccttgtatgcaatgcataacggagt

SEQ ID NO: 25298 - DNA, 974 bp, Arabidopsis thaliana landsberg
tttgcgaaaagaattcaaagaatcagtctccttaaaaatttcttaagacttcgaaagaaaaaaagaaataggcgagtgtctgtctctgactcggatcgtcttctcagatgctgaggtgcagaatacccctcgaacagacgaagaacctcggcctctagatcgtcgactgacagcttgatgccatcctacggacgttgcccgatatctatatgactcctgaacctcccaagaaacgatctataagcgggactaagcttctccaatatcgaaatcttcaactcttccctcagctgagaatccggaaccaaccattgtgattgaaccctatgaacttcctcaaacaaagcattaaaagatttaaacctctctctcaacgcacttctcgaaacacctgatgagaaacttcctttcgtatgtaaaccttcatctcttaaacaatacaagactttaacccaagcagctctttggtaatacgtcgcagcttgcctgaacttacccgttagctttctcaagtaaagatcaccaatcatttcccgtagctccggtgaccctttaatcttctgaacaatgtaatgtgcgttgttcatgataaagagatgcgataaagctgcgtttttatagtattttgatttgccttcaagattgaattgtaagatcactatgatccaaatcagatgtaatgctaatggacctttgttgttctctaactcggagaaatcgaaatctggagtgtttgaatccgttgcgtttctcgatggtttcgacatgatgagatcgatcaacgttggtctatactctgagatcaagcttatgtagttcatgacatacctcgtcaatggatgtatcgtacctccaggaacaggtactctagaaggttcacgaagaacggcgttttcaaattccgataatatccctcttgccgcttccgctaatctcgataatatctccgccgcttgaactctaatcgaatctga

SEQ ID NO: 25299 - DNA, 550 bp, Arabidopsis thaliana landsberg
tcataaggacccacccatgcacccacaatatggttcatgattaaatatgctttatctgtgtattaggggatatggtttccttttcctttgtcactatctcactcatgaaattcaatgatcccattcactttagatagtgttttttgtgatcacaactcaaacatgacaaaatttccaactttttctatttaattttattaattaaaatcactcttaaaattcattgtcatgtcttttaagctttaaacatggagagattaagggcataacttaagaaattttgttcgaaaaaagtatggaccaaaggaagtaaggcaagtagctggtaaatagttttgttatatttgaataaaattttggtattgtgctatccaaattataacttagttgtgtgggcgatatgatcatctacttttctaatctttatttgaatcagaatttccgattattcgtcatcaaataaattttgacgtagatttgtgttctgtattatgcaaacgtcatttaaatcattatactcccaaaatttctatagcaagttgtcatcata

SEQ ID NO: 25300 - DNA, 521 bp, Arabidopsis thaliana landsberg
agctagtccaagtccagtggaagtgggagacgcattcagtaatgtaaagcatcttctcctgccggtgattgatcggaatccttatctttctgaaggcaccagacaggttattgtttagcttgttatctttttgagaacatgttgacaccaaacaaaaaagctgattacacttaatttgataggctgctgctacaacaaccagcttggcaaagaagtatggagctgatatcacagttgtaggtaagaacaattagtgtttgcattaatatccccttatgtattatatgaattatatagccgtgttgatcatctgtgaccaccgttgttgattcagtcattgacgaagaaaagagagaatcatcttcggagcatgagactcaagtatccaacatccggtggcatttgtctgaaggtaaaattgaggaattacttgtaggaaattgtaggtaaactatagtgttggaatcccttattgaagaaaggttaactataatgtggtggttgcaggtgggttaaaggag

SEQ ID NO: 25301 - DNA, 3242 bp, Arabidopsis thaliana landsberg
  unsure (1)..(3242): unsure at all n locations
ataggaacagttgcacgaaacaaaattcgaacaaaaatcaacaaaatcgccatagcaaaacaaagcaataatcagacgaaaccagataataagaagaagaaacacgagattactgtttcagtgaggtggtccagattcacggaagtgaatcggagaaggtcattgcagctgaatctacgtatcgtcgtcatctcttctttttctcaaatcccttcgagcttcgtcagattctctggaaaaagaaagaggagacaacaacaaagcaatatacatggcccagttagaaaattaataaagcccatttatatttgggcctataacactgatgacgtcatgtaaaagatgatcaaatttcattatctcccgtcgtcgcgaccttctcagacaacagaaccaaatcctcggcggcgattgaagaaacctttccgatggatctgctcagggaagagattctgaagaaacgtaagagtctagctgaggaatctggtggtaagaagttcttcaagcggtctgagatcgagcagaagaaaatccagaagcttcgagaggaagaacgacgcgagcacgagcttaaggctcagcggagagccgccgccgccgcttccggtggagatggaaaatcatccggctctgctcctggttcttctaacgcagctacgtctgcgtcttccaaatcctctgcatcggacgctgctgctatcgccgattcaaaagccctaaccgacgaaaacctaattctcccgaggcaggaagtgattcgtcgtttgagattccttaagcagccgatgactctcttcggagaagatgatcaatcgcggctcgatcgactcaagtacgttttgaaggaaggattgttcgaggttgatagtgatatgactgaaggacagacgaatgatttcttgcgtgacatcgcagagcttaagaagaggcagaagagtggtatgatgggagataggaagaggaagagtagagatgagagaggaagagacgaaggtgatagaggtgaaacaagggaagatgaacttagtggtggtgaatcgagtgatgttgatgctgataaagatatgaaacgtttgaaagctaactttgaggatctatgcgatgaggataagatccttgtgttttataagaagctgttgattgaatggaaacaggagcttgatgcgatggagaacactgagaggagaactgcaaaagggaaacagatggtagccacttnnnnnnnnnnnnnnnnnnnnnnnnnnnnnnnnnnnnnnnnnngcaggaagaaggtaaagattcttgctttcgattgttaattaggtgtaaatcattgtttggcaagaaaattgttagggagattatctctgtttatgaaattggagatagattatctcagttctatctaataagcttagagaactatgtttattaagcatagtttgggtaggaagaccaatgtgcagtgtttaggttccattagtttgtgtacttttgattatatggcgacaaggacgagttttctaataagttctagtgataggtagacaatgagaacgtagaatagcaagttggaatctgtatgcaccttgaatttgccattgaggcctctgttagttatctccatttacctgaagaaaaataggctggaatctctgaatgcagaaaaagtttctctctttctgtctttgtcttataagtgttaagaatgtatactttcttacactgaaattttatgaggtttcgtgaacttgatctttctagttatggcttaaaattgcagggtttaccagctgacattcgtcaagctttaatggtgatggttaaccactgcataaagcgagactaccttgctgcaatggaccactacatcaaactagctatcgggaacgcgccatggcctattggagtgactatggttggtattcacgaacgttcagctcgagagaagatttacaccaacagtgttgctcacatcatgaacgatgaaaccactcgcaagtatcttcagtcagttaaaagactgatgactttctgtcaaagacgttatccaactatgccttctaaagccgttgagttcaatagcttagccaacggaagcgacttacagtctttgctagccgaagagagattctttggtggtaatcgtgaacaggtctcagaggagagactccggctcatgccttctcagagcgaaaggctagtcttactgtgttttctgctttgctgagtttttattttttgtatcaaaacgttgactctgtattatcgtctatttaaaacgttgactctgtattatcgtctatttaaaacgttgacctgattgtctagtcttatgtggcatgtgggaaacatatccaaactcataaaacgacatggcctaaagatctagtaagggtaagaggagaatcgaatcttggaaccttattggtccaaatggtatgatcaccttatcccaaaatgttcgattctcatctaccctctcgttgtcagattctattaagccatttcatctctatccatttactccacagagaaagattcagagaaaacagaagaaactatggcaactcaagccgccggaatcttcagccccgccataacaaccactacttccgccgtcaagaaactccacctcttctcatcaagccaccgtcccaagtctctctccttcaccaaaaccgccatccgcgccgagaaaacagagtcctcctctgctgccccagccgtgaaagaagctccagttggattcactcccccgcagctagacccaaacacaccatcaccaatcttcgccggaagcacaggaggtctcctccgtaaagcacaagtagaggaattttacgtgatcacatggaactcaccgaaagaacaaatctttgagatgccaacaggaggagctgcgataatgagagaaggaccgaatctattgaaactggcgaggaaagaacagtgtttggctttaggtacgaggttgaggtcaaagtacaagatcacttaccagttttacagagtgttccctaacggagaggttcaatatcttcacccgaaagatggtgtttatccagagaaagcgaatccaggaagagaaggtgttggactaaacatgagatccatcggtaaaaatgttagtcccattgaagttaagtttactggcaaacaaagttatgatttgtaagatctgtacactaaaaaaaacaaaaactatgtgcataaagtaatgattatgactatgtttcatgttaatttttaatggattttgt

SEQ ID NO: 25302 - DNA, 1094 bp, Arabidopsis thaliana landsberg
ctatatcttggtatctggaattaaggggactgttgctgaggtagctgtaactctataattcatgctgagatgtcatgcttttcaattagtttaatctaatggtatcttactgcatttcctggctttgtttccatttggtgggttagttttgcaagaacattgtgctggcaggagttggttcagtgactttaatggatgatcgtttagcaaacatggaggccttgaacgctaactttttgattccgcctgatgaaaatgtttacagtggcaaaactgtggctgagatttgtagtgattcactcaaggatttcaaccctatggtccgtgtttccgtagagaaaggtttccctctaatacctctccgttaatgttttaaaaacataccgactattatctgatcaatttttcaaatctttcaggtgatttgtcaatgcttggcactgatttttttgagcagtttgatgtcgtagttataggctatggttctcgtgctaccaaagtatttataccaccttttacatatttaccacttgctttcatctttagttgctccatacatctcttcatgacgttgggtgtttattttttgcagaaatatgtcaatgaaaaatgtcggaagttaaagaaacgtgtcgcattctatacagtcgattgtagagactcatgtggtgaaatctttgtggacctccaagattacaagtacacaaaggtacttgcatgatttgttgttgcatttcttctgttgattatgtgctgttttgacatttcatctggcttatttttaaatttctataattccattgaacatttaaacttcattaacaacttctaatttgcacaatgtcctttgtgttgttttcctgataattttctttccacagaaaacgcttgaagagatggtggaatgcgaactacattttccaagttttcaggtacaatttaacactagttctcgctactaataatccttacatctgcataggattgtgtgataaattagatttgtttattgccacaggaagctatatctgtaccatggaaaccgattcctcgagaacagcaagctctacttgtatgagagtagtactagtact

SEQ ID NO: 25303 - DNA, 1122 bp, Arabidopsis thaliana landsberg
tacccttactttctatttaagaatttttaaaaataaaaataaagaaaacatgtagatattcaaaaatgtagttgatatgtaaaaataaattggtgatttagttgaacaagatgattttttgatagataatgttttgtctaaacttgtttgaaaacattttccgtgttctactaatatttgagtttttcttttaaactgatatttagactagagtttgttctaacaaatttagaaaatcggataacaaatttctaagacctttaaaacatgtattctatgcttttcttcatgttcaaatttttgtgtaaaaatgtattctacgatttactatatgttcttaaaatgttagaaaaacattttttacttttagaattcatattcaaaagaatttagattttagaattccaataagtttagaatttctagatatagaaagtgtatcattgaaaaagaaaactaaatattaattaaatattacgtttatatagtctattattggttaagattacaatctaaggggtttagaaccgggagggtaagtgctctgaagcacttcaatgcctctgtttttttcgccagagttcagagatgagtgttatgtttttcatcacgatgtcggtaatgagaaagaaagaaaaaaacaggtttaaattaagggtgtaggagaagactccatttcaactagagagtttgaaaacccataaatttatctgaattattgtaaataaattaggaaatattgtttttgttaaaatttctgttaaataaattcaaaatcctgttaattaaattttcgacaaaaagaggtaacattgggggttttatttttaaaaaccctatttcaccaaattttgtagataaatgtgtatatagacattatccattgaaatatcctttatttccgttccctggattatttggattccatttctagatgctttagaaaagaaaaaacatgtagccagacccctaatgatttgtatatctaccggatctataaacttttgtaaaatgggtaggtgccattctttagatactagattaattaagtagttaactatcagatttagatggagaaattttcctattccgtttgctggaagtagataataactagggtcc

SEQ ID NO: 25304 - DNA, 980 bp, Arabidopsis thaliana landsberg
tctctctactttcttgcaagtacatatggcaaaccaagaattcaaaacttatttcaaaaagatccataactttgaactgaacaaaccagtttgcatatcaatgtgtctgatgataatacagatgttgtacgaagataaaaattcacaatataaacagagagactagacaaactaaaaagagtattaaagaacaagaaagtgattacttggaaactttcttcttccctgtaatggcaattttcttgcctttaagggtccttggatgcgccttaccccacggtaaccttgtacaatgtgttttcgtcagactaaggtctattctttttgtctggtcgaggacccaaaagattaagatcaatggtggctccataagtctcagctgatttaacaaccgcatcgtatggcttagaagagagtttaagcccttcgttttgagccttcacatgtaactcataagcaagccttggctttgcatcatttgcaagagcctcaatcaacatctcgtaagttatctcgttaggctcaacattctcacttttcattctatgaaaccactcataagccacaccacttaacccgttcctcgcgcaaccacttataaccgcgttgaaagtcacaacgctcggttcaataccctttgaagccatttccttgagaagggtatccaaaagattgaacttttgctgtcctgtcaaaactgaagccattgttgtgtacgcgtaaagatttggctcaatccctaccttaatcatatggttccaaacccgaaacgcctcatcatatagcttccctttcttaagagcactgagtagtgcaccgtatgagatgaccgttggcttttcaccattgtcaaccattgctttaaagatttggatcgcagctgtggtctcaaaggcttttgaacttgctacaagaaccgcgttccaaggtctcctttgcggtttcaatcctttatcttccattttggtaagaaacctaac

SEQ ID NO: 25305 - DNA, 1018 bp, Arabidopsis thaliana landsberg
  unsure (1)..(1018): unsure at all n locations
gtcttgtgctacctatatttgtttatatttctttaatcaattaaaagctctatttctccgctaaacctatcaattaagcattttttgatataactaacttctcgtgtatgttatttataggaaacacaatatagtgtagaaaccaaagatcttgagatataaaacacttttgatatggagtcattgatctaaaatatttatctgcggaatgaagttcggctgattttgaatcttgtcaaacaccaaaacaaatttgcaaactagctcatcttgattaaatttgtttgtttgctcaaagttgcaaatgtgctgcctgcgtgatgcatgaaattcacttctattcatttggactttcattatcgcggactctgtatatgtgttgcatacttacatatatatgcatgcagatacttctgaaattcggcgtttaacttatttatctatatataaactcgatcaccatcgaataaactntggataaattgaccaagcgcatcctatagtaaattagtttcaccacaaatattcgaatagatagttttccaagaatcacatattttttttgtcaaatatgtaatagaggtgtacactttctattttatactatactccgagatatgaaagtttttggttttttttttctggtagtatactctctataaagaaaaaggcgaaaataattaaattaaaggcagattaattatataaaaaaaggacaacatcatgcgaactttgaattccaaccagtcagaatataaaggagttccaccagtcaccatcactaagattaatactttttcgtttaaggaaacccttacctcaaatgggtctattcaaggaatcatcaacataattaaaaaaaaaaaagctaagaacttagtcgcatacatatcgaccatttattcgatttcatctactttttattccatgaaaagactacttatatatttaattgcgaatcttacataatcagcctgtaagggtgttctctttaatccttcacaatcaaaccttaatt

SEQ ID NO: 25306 - DNA, 1070 bp, Arabidopsis thaliana landsberg
aacaaattagtttaaagtggaggaattttcaaaattgctccttttgttgtactcattttcatacattttcaaaaatgctttcattaaacctgataatgttagtaaagtttattgtttacatggtacttctcgatagtaactaatttttgaagagtcgatccaagtatttataaggttttataagatatttaaaagtttttataaagtatataaaatgttttctaagatatttacaaggttttatacatgtaagaaatagttttgtattttttataagtttaacataaataataagactttggatgaagtttacttttaacatttttaagcgattttctttcttattattataaaataaattgtctatattaaacttagtcaattctatgagagtgtccaaaccaaggtaattattatgaaattttggtcaacgataaatatttacttcacaagatttttagtatttagggaataaagtttccaataactaaaactcgaactatattgtatccctatataaatatacgtctttctaaattctaaagataacaacaaatctactaataccaccacatatttttctgttgtcctacttttgaaacaatcccaatactagaaggctacgagaaaaaccttagtaaaatcttgagactaagtatcggtgctttagtccaaaaggtaaaatctcattttgttgaattctttcaatggctttttttttgtttctaatgggttctgaatttttgctagacaaaatattcgggatccaagattcattctgaaattcgatctaaaaataggttatccaaaatctttggatttagatattttgatttaaaaattaggatatccttattttatataaattgctcaaaaaatcaccaaaaaaaatattttaaatttgttgtgcaatattttaaatttaatccatttgaaaaatagttgataattaaatttgttttatgattaatttggatacaaacattttatttgttttatactattattttaattgtgagttatttatggtggatttgaatcggatattaacggatttggatctggatatg

SEQ ID NO: 25307 - DNA, 1530 bp, Arabidopsis thaliana landsberg
gatctattatcctttgaacaacgatcggagcagagactattttcaggaaaaggcggaagccaagctggaactgacgtcacatccaccgatcgagtcaccgccacgtgatccaaatctcctccgaacgatcccgtctctttcccgtctcggtaacggtttagcgaaaggaatctcaggagcgtaggtaacgaaatcggagaggttacggagaacagcggatttgatcaggcactgagattcaatatcgtgaaccgtagagccaccggggaaacaatcggaagtagataaagcgatatcttgaagaccattgacgatgtcgaagagattaacctccgtgcgattagcggtgttagagaacgacgatgcgagttcggcgagggattgtaagagtttggtggtggttagggttagagtgttgagagcggaggcatcggtggctttgtattcaatagattggcagatttggctgacggctattttggtgagagagaaggagaactctgccgtggatgtcggtgattggtcggaaggtttcttgaaatttaaagtttgaagttggggggtcgtcgcttcattggtgggtgaagagattttgaaaggttcgagaaagagagagaaggaggcgaattggagtttaatgaattttttaaagaaccctaaattttgtgaagtatcgaaccggcgttgcattggttatcagtgatttttaatcagcactacaagccacgaagccaagatcttgttccatcattgaagggaaaaaagaaactgttaaccgatacggatcgaccggtttgagcccatcgaaccgcgaatgagacccttgaccggtcatgtttaccatggaaaacctatgtttgaatatatgaatcctaaaaaccaatatcaaaaccagagaaaaccggcgaaccggtaaaaaccatcccctacgaaaacattgatttttcaagtttttagatttgaatccatagacctgaaatcaaggatttcatcgatccattttcatctataaatatggtttatcattaattttttacttaaaagacaaaaacatgacacaattcgatgataaaatgagaaagaacacacatcataatataaaaggtttgataatagttaaaaagtgatttaatttataatgaatgatgaaataagacattttcttaaaattttaagcatctaattttagtcatcgattcaaagtgcttaataacaacttattttagcattggaggcatgatagaacataactagggttcattgcagtcggttacaaagaaacttttagcataatttattttgggcaattgggcacaaattggctctgtttgcgacacactcattttccatttacgcaacacgcccaacgatcgtcaaaacatagcatacttccacactcaaggtatgtgtcacgtatccctcaatgattcacatcgatgctttttgtattcatcgcttggtaacgatagacacttgcaaattcccgctgtcacagtatctttgacctttgtcacaactacgcatgctttg

SEQ ID NO: 25308 - DNA, 2667 bp, Arabidopsis thaliana landsberg
aacaatacacatcaatgacactatcagcctctggtgaagccattacctcattcagcaattcaatactctctgcattcactgtattgttacatttttgtacccacaaaggaaacgagttctcaagccagattggatccatgtatcgttgcaaaatcatctgaacaacattacacaaagccgaatcaaaccaaaaatactctaaaactttaacagcaaagagagtagcttacgctatgaagcttcacaagcattatcccaagatcatgataacttgtgcttctagtagcttccattgcaaattctttccagattataatatccctagctgcttcagaaacaacctgcaacattaaaaagcgttaaaaccaaatgcaatccaaatccttcggtatatcaaatactgagcttatacctctgaagggaactggtcaactatattgaacatcccaactgtaagcttccgcataatatagcgtctagcagcagttaaatctttaactaacttaagtccaatcttgtgagacttataagcaataggatcaggaaactcattgatggatcgaacaagctgcatatccgcccacgagtaatttttcgtatgcggaaaaaaaatcacacaatacttcttcctatcatgagttggtttgcctcttaaagtcgtcaatggccagtccgctttcgcacatcttattccagcttgccatttacctctccactacaacaccacagcaagacaccaaacattaaccatacaaaaatcgaatttaaagattccgaatttggagataaaaaacgcgtattattattaccttcacccacaaagctattggttcatcttgttgcagccatttaggctcagaaggtgacgactcgccttcgccatttttaccaataggtccggtaaccgtgactaaatcggtactagacttcaccgcatttaaatcagcctccggctcagatttcaccaacaactcactacctgttgcttcctcaacatccacgtcaagaaccaactcatccattttaacttccataaatcaccacttagaagatatttcacttctttaaacccaggatttgatacaaacccaccattctgcaataagaacaggggaataaaaaaacaatagtcaatataaattgctttcctatcctaatcaaatctcacacattcaccataaaaaatttctaataaggcaagaaattttcagacatcgaaggtcaattatattacatgacattgttggtactaatcagaattactaatctaaacaattcagatcttaagaagtaaaactcctaactggggaagaacaattagctaaaaccctgaattccacaaagcaaaatcaacaccaagaaatgaagaattgatctaaaccctacattagaaagaacccaatattgaattatacagatatatataagaaaaaaaaaagttggtccaaagataccaaattgaagatcaataacatgaccaatcaacaaacccaggtggaggtgaccaaaaatgttaaaatgctgccacaaaacaaaaactttaacatttgggtttttaataactatgagagaaggtcaggtaacacaataacttgttaggacttaggatatggaaacagacatggcggaatcaaaggctaggtcacggaagaagaaccaacgaaaaaaaaaaagagagttataaagtgggaacacgaaacacatcatgtatgtgacatataataagaagcaaatgttttttttttaaacctaaagatttggattttgggcatggaagggtcacacacctttgtgatttgatctgtggtggtgcgatgcaaattaagagaggatttggtttttgaatctatgaattttgagatttgtattataaaaggagaaaagaattactatatgtgtgattcttatcttcttctggattatgaatgaagattttattggtcgatggcatcggtatttgggcatgtaccatggccaaaatgtcgaaaatatggaagataaaatattttctatgctagggaatagggataattatttttatgtgtggtttataaattgaattataagataaaaataatactataggattggaaaaatatgattaggtatatgtatctatgtatgtatatatggttatgttagctttccaaaataaaaagcaaacaaacaaatagttacacataaatttagtttggattttaaaatttgggtcagtttggcagtattattctctctcttttttttcaaaataaaatacttttatattaataataaataattatgagaaaaaaattattcggaagaaaaaaagttacttgaaaaaaaaaaaagttacttgacatagtaaaggatcagaagcatttttgaatactgttttggtttcttttaaaagcaaattcaaggttttaacacagtaacaattgtttctatgctagggaatagggataattatttttatgtgtggtttataaattgacttataagataaaaaaaaaatataatactataagaaaggaaaattatgtgcaggttatgttagcgatgtgattaaaaaaataaaataaaaaatagttacaatttttaaaaatggatcagtttggcatttttattctttcgtttttttcaaaataaagtacttttatattaagaaaaataattgtgagaaaa

SEQ ID NO: 25309 - DNA, 1326 bp, Arabidopsis thaliana landsberg
gaatctgattcgtcgtctttaagctttgtcttctcccaattagctcaaagttcgtaactttgtttacttgccagtaagtaacaacgtttacttttcaaagtaaatctctaattcatgaagtggatctgcttttagttgtatctttaggattttggaatttttaatcgttagctttcaatttgatttgctaatgaatcgcatcagatttcgatctcaggaggtgtaaacaatgttttctgtcttagttaggaagcaactgttacagagttatctcaaattttccatttttggtgatgtcttctcttttttagcattaagctaatattcccagctcaattgttttatagttttcttctcactaacttgtaaatctctacttgcattcatttgtgtactggatctgaatctaaagattgcatttttattcttgttcattggtgatgcagataagaaatttccagagactgaagtttccattgaatgtattgttcttggagaacttaaccggattcaggacatggctaaccgaacagacaactcgaatcgctggttagattcaccaatatcctgagctcattgcttgattcatgtgttaagatgatcacattagaaaaatgaacttgtatgttacttccttttgttttgcagttcgaatggtaaaaagccaaatgatggaatgagactcattatagcgacattcgtaggaatagttgtcggtttcttcttggggatatctttccctacactatcactaacaaaagtgagctatatctttagctttttgttaatattttatgctctcatgactttatgcttaatgtgttgtttcatgtggccaacttgtaaactttcagctaaattttccctctggcattcttccctctgttgatattacttacgtagaagatgagacacccagaaacatcgagtgaaacgcttttgcatacattgtcatataggggtccgttacagggggataattcaagtgatgcaccgcattggaaggcatatttctttctctttgatataatagtgaagtgaaaagatcttgtatactaattttgatgaggcttatgcagatttgggttccatcgaatccccgaggtgcagagatgctgactactggtatcattgcacctgaatcagaatactacttacgcagactttggggattacctgaggaggtaatctaatgtttgacccttaagtatctcctcttaagaatgtttaatcttgtggattaaaatctaatcttcccacccgcagtaaattgtctgatcgtgggaaaaaatcagtctgcttttaggatgttcctgtgaagccaaa

SEQ ID NO: 25310 - DNA, 2723 bp, Arabidopsis thaliana landsberg
atacacatcaaacaaacaactgctgccactacgataaccgagacaaatgtcaacaccaaatctggtcaagcatcaaaaatgacgcctgcatctattgctgcaatgctcacagcgtcaacctcatcacatatgataatgcagtctgttctatcttcattcgcagctgaagcaacaaagacttctggtctatccaaatcagagagcacagttccggtctcagacactaatgcttcattcccttcttacaacaactcccagaatcagacacctaccacacaaggtcagtaccatgtaatacctaatccaccaccaccacagttcctaaaaccaccggtaatgaataacccttacgcctttggcaacattccgttaatgccacctgggcttccgccaccaccaccaccaccacatttgataggtaatcaacagcctcaaattcctcagtcgaactcagctcagcaatctcaacaaggtccaactttccagccaccagggataatgtattacggagctccacaccattcttaaaatagaaatgatgttagttaatagctttagatagttctgaccctttttatctgctcgaatgcggtttcgatgttacattgttgggtcaaatcaaagtagaactactgttcctctggttgtagaatcctcaccttttcccgttacagatatttgtaccacaagtttctacaacataatgtaataattttctcctgttcactctctatctccttccttcctgtatgtatacttctataccttaagaaccgaactgactcaaacatggagacataagagattcaattaacaatttgaacaaagcttttacattcgtgtttaaggtacattctgtcttaaaccccaacctgattatcacttcttcattaaaacctgcttctggaaaaaatctttgagccataagggcatatgatacatgactgccatgagggttgaatacctgcctgacgagaaccaagcgggtggattcttcttcagcactgcggctacagtgtctctggcaaatgtttctgcaggagttggattcatcctctgtgatataaacgccctttctctgatagcttcttcataaggcttgtatagtttcagctcaggcattttgttgaaagttgccacagctgagtttgctatgtttgttcttattcctcccgggacaacattgatgacatcaatcccaaacggacgaagctccaacctgacgttaagcaggaaacattacaaaacaattgacaaaccaaaaccatccggtgctggataatttgaacaactacacttgtcatgaacatcaagaatcatcaacctaacccaacatcagactttagtcctcagaaataatgatactcaagtttgatcacaccttaaaattagattagaccatttcaacaatttttagtttactaccatcaaatctccattgacagaacaaacagaatatatatcagcatgcgacataggaagattattcaaacgacacaaatagcggcgtttgataagttaaaacagtggaaccaaatctgaaaacggtaaaagcaaacctcagagtatcggtaagagcatgaatagcagctttggtagctgtatagacaccagcccatggaccaggtgccataacagtgatacttccaacgttgacaatctttccctttttcttagacaccatgtgtggtacaacagcttgagtcatcctcatggaacctgcattgaaaaattcacttcttcaaaactctcctaacagcccaaacgcaacacacatgatcaacacgtatttgagttccttgaatgtccacagaatcaacatttgaaatggattgtaaattccaatgattcactaataagcaaaaaaaacagaactgttgaagctccaataaatgtaataattgaaactaaaaatcaaatctttattaccaaaaacattggtgttgaaggtgtaatccatggctgaaattggaatctccgccaaaggtccgatacactgaactccggcgttattaacaagaacgtcgatcttaccgaacttatcaataacctccgacaaaaccttactcacattctggtccgattgcacatcaagctccttcacgaataacctcgaatcttgctccagatccgtcatcgtactccgtgatcgactcgtcgccaccactcgacatcccttctcagtgaactcacgggccagcgcgtgaccaattcctccctgagaacatcccgtaattagaaccaccggactctcatcgccactctccattttagagttccgtggaacaacaacaatggaatttttttttttgtgcaaaccaacaaatttcagagattaattaatgcatcggattaggcttaattactacgatgatttgttttttcttactacgacaccgtttccattaacttacaagaaactgtacttaaaaactaacccaaaagagtataaaaccaaagcttgtagaactcgaaacttaaagcaacatgccctctggtgattagagaagcaaatgaaagtaacatcatgcctaaactagatttccagcatgaggttcaaacgtgacttatagtacaaggatgaaacatagttaagcagaaaaaaagccactagaaaccgccacagcaaactgagatttagcttcaaatttcctcatcagactttcaatcttcttctcctcaatcccaaacatcatcaaccacccaacctccgctgtattcga

SEQ ID NO: 25311 - DNA, 694 bp, Arabidopsis thaliana landsberg
  unsure (1)..(694): unsure at all n locations
cctgagaacatcctgtgatgagaaccactggcgtctcgtcgctgctgcttcccattttatataattttgaatgaaaagatttaaaagagaaatccagaatataagggtcgaattgcaaaaattacgccgaagtttctcaacacagtattaagatgatgaagttttaaaattttagaattcttccccagaagtttgtccacgtatgcaacaaagtccctgagatttgtttttttttatctttttttactcaacagtgattcgccggagaagaccaagtcattgattcaacggttgataaaataaacagattaatttacatatatttacataaaacttcccaaaaagcaaaaaaaaaaaacagaaattaagaaacgaaattagctatgaacaaaatggaatcaagcagagaagaagccatgagagatggctaaagcaaactcagatttagcttcaaaattcttcttcaaactctcaatcttcatcttgtcaaaagctatagtcatcttcgccggaattatcttccaccaatcaaattccaccggcgatgatctcgaacccaccgtcgtatgcttcatcctcctttcgtactcctccgccaccaaaatcgctatgtccgccatttaatcggntatctccggtttatctacctctgatgttcggttatctttggctctatgtaggatgttattcaacg

SEQ ID NO: 25312 - DNA, 945 bp, Arabidopsis thaliana landsberg
ctggtaattcggcacagcttatgatgggaaatggcgaggcactgatgttgcaatcatttggatttttgatcgatgttttgctggcaaaccatctgagcaagaacgaatggtttgtctctgtacagctgatgatgcataacctaaaaaaatatttagacatatgttgaatagttcataatgacgtctatcttatatgcaaaaattatcagatcgatgacttttggaatgaggcacagaacctagctggcttgcaccatcctaacgtcgttgctttttatggggttgtgctggattcacctggaggttctgtggcaacagttacagagtatatggtcaatggttctttacgaaatgcgttgcagaagaatgttaggtatcgtattttttatacattcctcagtgctacgttgacacttcagattcatgcttagaataacgccatttgattgttatggtttattttacaggaattttgataggtgcaagcgtcaactgatcgcgatggacattgcttttgggatggagtatttgcatggaaagaagatagtacactttgatcttaaaagtgacaacctgctcgtcaatctcagggatcctcatcgcccaatttgcaaggtcaacttactcttgagttttatttttctgtctgtttttcctaagtaatagtttttgtttatttttatctgtctgcatccaactctaacatgggaatgtgggattcatgatcataagggacaacggtagagaatcaagtcatggtattgaggattgtaagcattttgagataaatgtctagattttttctgtagagaaatatggacatacataaggtttagcattagttttgaatagagtggtgctctttggtgttagaggaggaattgtacattatgaaattgtaatgcaaatttgtttacttctcatttaaagttcttaatagacgtg

SEQ ID NO: 25313 - DNA, 955 bp, Arabidopsis thaliana landsberg
aaatttcgaaaaccccattgctatacttcgttccaacacgagaattgatctcagatacataccgattagcaacaatcgggagagatctaggtatggatatgtacccaacaccatcactctctcacatcatcttctcattcccatcgccagaatcaaaatcgccgtcacctttctcttcttcatcgcatccttcgacatggtcgtcttctgcttcgctatcgtcgtctctctcgtggtctcttcctaacgacgccgtaatgctctccttcccgtctctctctgcctcatcgctctctcatctccgatccttcgtctccctctccaacggtcacttcaaactcgtcttctccgcaaccaccgtagaaacatctccctcttcctccggatctgttagcaactgggactgctgctccgtttcactcttctcaaaaatcgccaacaagcgaatcggatcgatggagagtttttcgaatgcattggcttcaaaaggatggacaatttacaaaacgaaagagaatccgacgccggaatctactaccaacggagtgagctcagtgtatctgtttaggaaagtgtatactggtcggatcatgacccgagaaggaaacgggtcgtgtagagtaagagagctgagacttcctcaattggatttcaggaacgcacctctacggattctgcaatatttgatgttgatgactgacgatatatttttccttgcgtaaatttgaaactttttttttttgtttgttttaatctgtttttgatttgtttctttaatgtaatcatctgatttacaaagattggatctctttggcctgtaaattttacatcaaactaaatacaaaaatcatagtgttgagacataaaataacttcctcacttatgggccttttcctttggttgagatagaaagcaccgctactctcggtgtaggaggacggggacgcccccggga

SEQ ID NO: 25314 - DNA, 580 bp, Arabidopsis thaliana landsberg
aaatgatttcagttaaagcaggaaacctgtaataagaagcctgatctccggtgaaatcgtaatccaattgtttccattgagtgtgttttcctgcctgtggattagtctctgtgaagaatgttgaacgttttttcaactgcacataaacattctcaaagatcattagtcaaagctcataaccttcgaaatgtacaagtatctttaaatagtacctcgattttgaggattccagtttcatcacgtgaattaatactctcttcaaaagatgagacatcattccattgaatctcgatcttactcttcagcctcggcatgttagcctctggttctccgaagagaaactcccataaaagtttcttctttgcaaaatagaatttggccacaatgtcatcagggtttttggcaacgaagacacagtcgccaatcttgatcgtggagattgggaaattcatagcttttagtttctcaggagacttgggaagagttaatgtctttgatgagttctctgtttgttgatgaggaaaagtaaagtgtactttgaggtaactttcaatcttgttgataagttccggagtttttg

SEQ ID NO: 25315 - DNA, 5994 bp, Arabidopsis thaliana landsberg
atgtgattagtcccatgaacgagatgattgaccttcctctcaaatctgtaatcaaatttcccgtcctttacgaattggttaccgacgtattttccattgacgtaagcgtgtagaacatgggcattgctgtgaacccgtaacgtcatgtttcggctccaaagtggatctttcttgtcgagatgaagcctaatgaatacaaaaataagttaagacaatacaaattatttcaagatattgtaggtctaggtaattaatatatatgttggatcatagatatacctagtcatgtaccaaagatagtcactagcatcgtttgtaacatctttttggtctacaagacccttggcaatgagatctccactgcctttaagaatcatcttctgagcggactccggtctccaggtccattccagcctctctggcttactagagtcctcggtcatgattgatgtttgagtgttcacttttgcagtgttgtaagcctctttatcgcagtccggaagaacacttacagaccaagccggtacgtggtagtcttttcctttgaagttgactaaagcatccgcagttgcgttcacattaccgatgaagcagcttgatccctcctttgttgtgtaaatcgtcgccttattacagatacagcaaacatgttgaatgttaattgatgataacgtcaacatataaccaaaagaaacagagccggatctaaccttgattgagttgccaagatcgattcttgatatgtttccgtaagtcagcgatttctccatggattttaagactgtgtggagctgtttcaagtgaccccatttaggctggttcaagttacctgaaaaaaattatgtcaagaccctataatcctacattttaagcgttatgtatatattcatttttgtttgtaaggtgtttataccgaattcatcaagaggagcatggtaatcatatgaagtggtgatgtatggaccttcagcgactcttccaaagttagtaccaccatggtactggaaaatttcacattagataaaaaaaggttagataagattggtcactaataataacgaataaaaatgatctgaatctaaccatgtaatagttttggaaagttcttccggtttggaagaatctagcaactgaaaaagcgagatcctcagcggttctgtaaggatgtttgcctccccaattcttgaaccagccggtccaattctctgtccacatctttggggtgctcgggttggttggttcgtactggtcacagtagaatccattgcacgtctcgagcataggctgaggagcgtttggttgttggcacataagccatggaacaccaatgtctagagagttggccatgttggcacaccaatcaatgtaggccttaccctctgctccatacgacgagatcacattcccgtattcattctcgatctaaaatatggaggaacaagttaaaaaaaaaaaaaaaaaaaaacggtttataccaatatagaggaaaaaatatgatcaataaaacgtttttgatgtatatgacatatatagtcgtcaaaggctgattctgagcccaatgggccagtccgggggataaaggatgcccataacatcctccataatgataaaatacatacctgagctaggataattggaccgccttgtgaagcaaagagcttctcttccttcatcatcttcactatctttgtagtgaaattttgcatttcattctgccataaagagatttcaagcaaacatttgaagaaattcaagaatctgacagtagcaagatttgtcaaatcaaagttttggttataccatgaaactagggttaactgttctgaatttcatgttgggcattagcccatcaaaaatatcttccagaagcatcgagaagacctgcaagagaaaattttcagattcatctatgcgggacgaagcataagctaaaggaaacgcagctgtctcctccggtgacttcaattccgccgttaatcacttcgccgacgcaatcaacctaacaccaaccaatcacgttctcttctcaaaccgttccgctgctcacgcatcgcttaatcactacgacgaagctctctcagacgcgaagaagactgttgaacttaaaccagattggggaaaaggttatagccgtctcggtgctgctcacttaggtctaaatcagttcgatgaagccgtggagcgtattcgaaagggcttgagattgatccaagtaacgaaggtttgaaatcaggtttagctgatgcgaaacatctgcgtctaggtcacgcgcttccgcgcccaatccgtttggtgatgcttttcagggaccggagatgtggtcgaaattgacggcggatccttctactagagggttattgaaacagcctgattttgttaatatgatgaaggagattcagaggaaccctagtaatcttaatctttatttgcaagatcagagagttatgcaagctcttggagttttgttgaatattcaaatcaggactcaacaggctggtgatgatatggagattggtgaggaagagatggctgtgccttctaggaaggagcctgaggtagagaagaaacgaaaacctgagcctgagcctgagccggagtttggagaagagaagcagaagaagcttaaagctcagaaggagaaagagttggggaatgctgcgtataagaagaaggacttcgaaactgcaatccagcattactctacagctatggagattgatgatgaagatatctcttatatcactaatcgtgctgctgttcatctagagatgggaaaggtatagttttcaaagtgttcttttttttttgtgtgctagtctaaagtgatttgctttggttaggttatgagtcttaatgtctatgtgttttgttttagtatgatgagtgtatcaaggattgtgataaggctgttgaaaggggtagagagcttaggtctgattacaagatggtggctaaagctttgactaggaaaggaactgctttagggaagatggctaaagtctcgaaagactatgaacctgtgattcagacttaccagaaagctcttacggagcatcgtaaccctgaaacattgaagagactgaatgaggcagagagagcaaagaaagagttggagcagcaagagtactatgatcctaatatcggtgatgaggagcgtgagaaaggtatatactttgcaattgtatgtgctgtttatgcgaggaaagaatctcttagaattcagtaaatatagctgaactaacatctttgtaacacaggtaatgacttttttaaggagcaaaagtatcctgatgctgtgagacattacactgaagcgatcaagaggaatccaaaagacccgagagtaaggcggattcatcatcatatatgcttcaatgttgtgctcaaaaagagttccgtatttgactgttttaataacttgtttacttttttgctcgtcacataggcatatagcaaccgggctgcatgttacactaaactgggggcaatgcccgaaggattaaaagatgcagagaaatgtatcgagctcgatccaacattcttaaagggatacagtagaaaaggtgcagtccagttcttcatgaaggagtatgacaatgcaatggaaacgtaccagaagggtctcgaacatgatcctaataaccaggaacttcttgatggtgttaaaaggtatttatataaataggtgttaagtcacggggagattattcgcttctgttatctagtaatgtcaatatgcttatgtaacatgttttaaaccatgcagatgtgtacaacagataaacaaggcaaaccgtggcgaccttactcctgaggaattgaaagaaagacaggttagattctattactgctttgaaactgctttgttacgggtttaagagaaacctgtgatcttaaactaaaacttttgggatttgctttcgtccttattgcaggctaagggaatgcaagacccagaaattcagaacattctcacagatcctgtaatgagacaggtaaagaacacacttctatagatgatgttagaattcacaaatctctctatgtttagatcaaacatctcggagcaatcctggaaactgaaattgagctatctccatgttgatatgtctcaccaaaatctaacacttgttctttggacaggtactgtctgatctccaggagaatccagcagcagcacaaaagcacatgcagaacccaatgatcatgaacaaaatccaaaagcttatcagctcaggaatcgtccagatgaaataaacgaagccaagacattgatttcgattttgctgagtcattactcttttataactccaaacactaagatcgaattcttctcatttttcagacttttctgatatatcaatttttctttctttctcatatccatgcgttttaagacaataacaaccttgtcttcacaaatttgattagcttacatgtctatatagaccaaacaaaatcacaataagtttttatgtctaggcaaaacaaaatctgtttaagcagcaacttcttgatccttggatgaaagttggttctgaatatgttgaggaacaacgtcgaacttagccagttgcattgtgtaagaagctcgaccttttgtcatccctctcaatgtactcacgtactgaaacatctctgccaatggaaccagagagtcgaccacctaacaataataagaacaacaatgtcaaaatcagatttcatcatttaacattttaggggttttttcgatcattttgaataaaacataccttgagaccaccgggtttgtctccgaagctgttaatttgacctcttcgtgagttaagatcaccaatgacatcaccaagatgttcttctggtgtaacaacttcaactctcatgataggttcaagcattctcggacccgctttcctcatcccttcacggaaagctcctcttgcagcaagctggaaagctagcacgcttgagtctacgtcatggtaagatccgtcaactagacaagcacggacatcaacaaccgggaaaccagcaagcacaccggtgctcatacactcctcaagtcctttcatgacaccaggaatatactctcttggcacagctcctcctttgatctcactcttgaattcgtatcctgaccctgcttccaatggctcaaaccggactgtaatatcagcaaactgaccttgtccacctgattgcttcttgtgtgtgtatttcacttcagctattttggagatactctcacggtagttgacttgcggtgcaccaacgttagcctccacctgaaagatgaaaaggaattagaagcttggaagcttgaagtagagaattagatttataggttatgttttaccttgaactctcttttaagtctgtcaacgataatctcgagatgaagttctcccattccttcaatgacggtttggttcatctcttcatcacgagaaaaatggaaagacgggtcttcttgagcgagcttgatcaaccctgtcgccattttgtcgatgtctgcttttgtttttggctcaatcgctaccttgatgacgggatcagggaagtccattcgttcaagaacaacggggttttctggatcactcaaggtttcaccagtgattgtatctttgagacccgcaagagcgataatgtcacctgtcaaagccactttaacatcttctctgctgtttgcgtgcatttccaagagtcttccgattctctccttctttcctttgttagcattcaacacgtaagaaccagctgagattttccctgagtaaaccctcacaaatgtaagagaacccacaaaaggatcactcatgatcttgaatgctagcccagcaaatggctcgtcatcatctggtttccgtataatggtaatttccgggttctcaggatctgttccattcatcggcgggacttcaacgggcgaaggcagataatcgaccacagcgtcgagcaatggctgcactcctttgttcttaaaggctgaaccacatagaattggcacaaact

SEQ ID NO: 25316 - DNA, 701 bp, Arabidopsis thaliana landsberg
tgcagaatgaacaaacaatgaaagaaaaacagagaagaaaactgaaatattatgacaagtgttgtctcttctttcaaagctgaggattgcgtttcattgagcctctattcatttcttcactacttgaagcagaagggtttaagccatactcacttgttccaccatattcactgctttgatattctttattctctaacgccagtttcttgaactttttcatgtctgccgtgtacgagcttgcgtcatactctgagctcacgctcccggggctcaagtacgtgctttgtcctggtcttgttccctcacttagatcatccattgacatatctccttctagtgctcgtacaatcttttcatttaccatacacatgtttcaagattcattagtatgtcacatttatcatcaagattaattgtgagtaaaaatataacaatagaaccaacaagtggtatgagtttttgaacctggctcatcttaggccgtcttcttgctgaatgtctgattgctgcagctgcacaagaagccatttgaaccatctcttgatgactgtagtttagctctagacgtggatcagccaattggttgtaatcttcatcttgagctgtttttaaacacaaaggccttgcttgcaacaacaaatagtaagatttgtttcttgttttgctttggaaagtgtttgtgattaccaagtaactgaaga

SEQ ID NO: 25317 - DNA, 1046 bp, Arabidopsis thaliana landsberg
gtatatcgaatgttgtatcaaatggtttagtgaaaaaacagacagaagttgggtgttaattccatatactcagcccatcttccagtttgtgagggtcatgtagatgggtggaggagactttgttgcgtattagacgatccacaaacttaattatttggtctgcatcacttggtggttctccatgtctgcgtttattccatttcaaccaaatcatgtggataattgcttagagattgagattgactcgtcaacttaatcagtttctggatccttaagggtattcttttgatatcagagcatcagtgaaattatgtaaaatagggttacaaacttacaatatcattgaaccaaaaataaaaatccttaatatataatttttttgtttgtttcagcgttgcattatcaatatgctattctatttgatgttataatctaacgatttcatcataaaatcatacaaaagaaaacagaaaataggcgagaaactttaagataatatattataaaaaaaaaaaaaaaaacccatcggaagacaaaatagctaaggattaatacaaatcaagctcagctaaataacacattgggttcaatcttttctcgggggcgacagacaaaccatgcataacccaacagcatcatgatgatgatgatcaatgcaacgcccacgattgcgataaccttgatgacttcataggccatattgttttacaacacacacgaaaaacttcttctttctgccaaaatttctctcgtcttctttttcataggccatttacatatatgtaaacatccgtaaaaattttaagttttacattttgttaaattaactagaaaaaattagaacttttacatttattcattaaggaacgttaactaggaaaaagagaaattttacatttattggtacttgttgatcgtcataagggtttatgcaagtaaatttttttacacacgctaggtaaagttaaaactatcaccaaagcttagtaatatttgacccagcaacaagtgaaagctaacatattttttctttggatcagagccag

SEQ ID NO: 25318 - DNA, 3901 bp, Arabidopsis thaliana landsberg
  unsure (1)..(3901): unsure at all n locations
tctgaggagatgcctttgtgctagaattaatactactgataggcttagggaactctgaacaatttatgccaaactccatctccaaatcacatactttgagagatatcctacctctcttcacattaatcctagcatcagctgtagctaggaatgctctaccaaggataagaagatccttgggttccttatcatagtccaggaccacaaagtcagaagggattaaggagttactaacttaacagggacatcctcaaggatttgtttgtaacgatccgcgaagaggagagtgattctagtcggcctgtaattagtcatgcctaatctctcagcaacagacttaggcatgaggttgatacttgatcccatatcacacaaagagcggctgaatctgcttgtggacatagagcaatcaagaatgaagctaccaggatctgtgagcttctcaatggtctgatcaggagtgatattgcggatgtactaagctatgtccactcgttgtgccttctctttcttgaccttatgcaacatgattgcactgatgtcccttgtcagcagtttaggttcatcagagctaatgccattgtcaacaagtcgtttgacatacctgttgagtggagaagaagatgtcttagaagcatccttaggaagagaagtgaggatcttttccatgatggttgtgcacttagcagcatgaatatcctgcttagaacgacgcttcgttggataagggacaggaggagtgtacgcagactcgagctgcatcgggattctcacctcacaaggtgcagtccggatccagtgtcgacactagaggtgtatcgatcgacaccctcgtgaggaaccaattctgaaaacaatgttccatatggtgttgatcgacactagtaggtgtcggtcgacaccaactctacagcagcgagctccaactcgtcttcaatgtccaattcttcccacacataatctccttctttgatcaagatggcattacaactcttccttgggttagcatcatgattactaggaagaaagccctcttgtctcttaatggattgtacagtttgagctaaatgtacatccagcttcttcaagtgagagctaagattgtcgatgtaccattaaactccataacaagctttgtttggctctcaagaatctactcaagcatggattccattcttgtctctaatgagggtagagggaggggggggggcttgctgaattaccataggtcctctggaagttcctttgaggaaatgtcttctggaaggcaagatttggagtgtagtttgatgaactctggttccctgtaaacccgttcccactgaagttaccctatggttgtccaaacttccgtagctctgactatctatgtagaagagtccctcttcagactcctattcggactcaatagtcttatcctctgctatttgattacctgaaacagctccagcaatcttcttcctcccaaagtcaacattcttggtgctgttactacaagcgagattctctatcaaagcggtagcatcagctgaataacgtgtattgaagttaccattgctcgctgcatctagagccatctagtattttgataacaggtttttaagtcagttatcctaaaacaccaatcatgtcgttgtagtattttaggttgtcaatccaaatgggtgtgatgctaacaatcaagatgtgatcagaagtcactaagtcaagccaagcaataacaggttgtggtgtgttctagcagttctaagtgaacatgcagaaaagagaatttcaagcagaaacagtaaaacactcgaccaacacagctctttgcagagcactgggtgaggtcgagtgacaggtcgagtaacagacagaaaaatgaaacacagatactcgactgcacagtctgtnnnnnnnnnnnnnnnnnnnnnnnnnnnnnnnnnngtaacaggaaagaaatgcaaattctaagcaacaggtaacaagatgaagtaaacaacagaagagtaaacaaagaaatcaatcagataaggcattcccgaggatgggataattgagtagtttcgtttcctcagtttacaagtgattgacatgctcaacaaattatccctagacaacaagttcggtaaccaaatctaagtgccaccgcaacagagaccctcaagttaaactagtcccagactcaatcaccattgacgagacctaacctaacaggcattacgaatcaacaagttaaagccaaaacgctccctacaaccaataccttggtacacggccacgaatctctgaaattagtggtttagacatttcatcgaacaccttttggacgcaaaaatgtctgggctcaaattccaattgatcagaaagcaataggcattaagaacaactaatccagaagggatctatcaatcaaactcaactacccagcatactgagaattctaaactactctaacccatcctcataaacctagtcactaccaagacatcattgtagaaagcataaacgatgataagaatgaaaacatgatagcaacagagtaatagcaagatgataacaggatgaacatcttagtaaacgaaatcaagaacaaatactgaatactgaatactgaatagataaagagaaatctggattacaaagatctagaacacagtgtctgcggaataaagctagataaaaacttgtttgcgaaaatgtgaagtacatgctacttatagccaaatattccgaaaccctaatacttaaaacgacgcagtattgggacggattaaaaactgtactcgacccaggtggtcgagtgggaggtcgagtgaatagttagggtcttcttttcttccttgtgctcgagtgtctggttgagtgcggaatgaagatggctctgaagcttgccatcgagtatgtagtcgagtggtagtgatggtgatactcgacttcctggtagagtgatgtggtcgagtgatgatcaggtaatggaggtgaagacactcgacctcggggtcgagtgatgtgatcgagtgatggtccggtggtggggatgtagacactcgacctcggggtcgagtggtgaggtgaagtggtgatgtcctctactcgaccagggggtcgagtggtctgctgaggttgtgaatcgtctactcgacctaggggtcgagtggttttgcatgatcaggtccgcttcttccaattagctcgtcaacaactccgaatcaccttaaaacaacacaaatatgcaacatgcatgcaaaactatcctaaacatgcaaagtgatgacaaatgatgagaaatgatataaaacagtgatgatatgatgctaaagtgatgacaaatgaatgctcaaaacatgcaaaatacacacttatcaaacacctcacatcaatttcttaaagtaccaattctacttaatctatacatttgcgccaattcaaattacagaaatatataattctcagatcccactaggcactagttatggcctcagacaaatccaagtaacataatgttgtaaatctttgttttcatatttctcattgtcttacacaacatcactaccacatttaattaacaaaaaaaatttatagaagaaaataagacaacaactctttaaccactacacaaccattcccactagacttacttaactcttaaacttagtttagtctttacttaaaaaaataaaatacaaattgatgcaaaagaaaaccaaagaaaacagattgcttgtcaaacaagcaaaacaaattttgatgaaaataactgaagagcttgagaggaagttttttttttctcacttaaagattttcattatataatacatcggagaaatatatttttgggatgcgtttttaaaatacaaaaacagaggctatacgaagatatctccggaagatagagcccgatacaccgggatcagaa

SEQ ID NO: 25319 - DNA, 754 bp, Arabidopsis thaliana landsberg
  unsure (1)..(754): unsure at all n locations
gggatactgctggacaggagcgtttcaggaccatcactagcagctattacagaggagctcatggaatcattgtgagcaatctttatattcgctttcttacttgcttttttttggcttacctagactagtgttatgtccctatttccatttctcattttaagtggtttagtctgagattggtattgtaatgttggaatatgaatcattttaatgttgtaatccaccctttaagtgatgaaccttaatgatgataattgcaacagattgtttatgactgtactgagatggaaagcttcaacaatgtgaagcagtggttgagtgagatcgatagatatgccaatgagagtgtttgcaagcttttaatcggtaacaagaatgatatggttgaaagcaaagttgtttccaccgaaactggaagggtaagctcacatccctagttaagttcccagcaatttttccatttatgaatttgcttctatcttatgcataacatcctttgcatggtactttcccctttcctcatttgatcatttcatgnnnnnnnnnnnnnnnnnnnnnnnnnnnnnattacaaccattgagattgttataccagaatttacggctatgaatgtagatgatctctgaccaaattcccaaagctagatgatctgaatccaccgagtagaaattgcttatttttgcagcagctgttactcctgatacaactgtgaattggttttcttacatttcatctactcaaaatcactgcaggc

SEQ ID NO: 25320 - DNA, 2063 bp, Arabidopsis thaliana landsberg
gaagtgtatctcatggtgtgtacttcccgtaggcgatagctacaaagaaaaatctgaaaacattaatctaatttttctatatataaaagaattgcgtattgattctatttttttttattttttttgtaattctatcgatcgagttcaaaagaaaattttacgtaataggctgcaacggttccagcagaattccctggcacaagtttgatgagcatttctacgcttccaaacaaatgagccacctttgatttaatagcagatcctgcaaaaacaaacaaaaacataaaaacagttatacatgtttatctatcaagtttctcatgaaataatagactaaaattaaatggactgattttaaagttattgtgttataagattactatatacctgcagatttgtctaggacaagtcgaaggttggtaccattcatgaacatgtgatctttaccccatgtaacaataaaattcttactgaagtctgcctccacaaatgtgcgaccaagagtcgctaaggcagccgccagaacgaacattaacgtcttcgcttgaagacccgccatcttacgaatttgatttgtgtttggaatgttttggattggaactctattcgatcaccatttgtttgtcagtaaggctttctttatatataacttctaagaaatcgaaattttgacgtagtccaaaaagtatagaattttgacaattgacgtgcatctaatgaactttgtatgcatgaattagacaacataacaattaaagaactaacttttttatgtatttaaaatgctatcctggaaagggactatgaatatgtatgtttattagtaaccaataaccaacatgtgtttgataaataaatattatatggaaaaaaaaaactaacatataagaggatggacactgttagctggctcacgcggttgtggtagaggccgaggaatatacctggggaagactccacaaataaatggggtcgatgaacttgcaacttctcctcttccaaatcagaaattttaccaatagtaacttcgtttgtcatcaatctgttttattactctattgttccttacgatttccatatttttaatcaggtattttcgtctcgttgcatactgcatagggcttagataaaaaaaatccgttacattgttttaggatttcatgaaaaaaacttaataaatcatgcttaaccaaaaaataaattttgatacattttggttttacttttagatagattatatttggtttgttttcgttcacataacagagattggacactcatgaagtggtgaaacattgtaaacaacgattctccatttagattagtttataaagttcgttctaaaagtgcaagacatcattaaaacgtgttttaaggtttttttatttaatgatttaagcaaggaaatccagtgatcagtcaagaataactttcggtgggtgttgaaatattcttgtatattatattcacaataaatctggatcaatggtaaatagacaaacattgtacgagaaaaagtttgataatgagtaaaaggtcatgttgatcgcgtttttgttaatcttgttaagaaatcataattatatattcaaaacctttagtttcattttcattccttgtgataattagatcaacgccaccaatcaccatcagtcaaaattattgtatcgcttaccacaatccaaaagagaccgaagaggccaaccaattattatattcttacatgacaattaaatttaatcttaatcacaaaggcaatcaatcaacatcattttatcgatgatgtcgtaacattgttggctcttcttacaacatataatcatataaaagcatatggcttacttttttatttatccgaaagtaacttttgtcttagtttttttcttaatgtatacataagagggtcagctctatttacaagtatttgccgttacatgaagtttaaagaactaactattaaggatattcaatagaggaggcgatccaatgcccaataagaaagtttacaaaagtgaagtaagacgacgcgattacacaaaaccccgagttaccaatcgagaccc

SEQ ID NO: 25321 - DNA, 1029 bp, Arabidopsis thaliana landsberg
atgtgtttcatttgcaggtgctaagctcggtgattgttagtttcacaaacttttggaaaataaaaaatatttgtacaatatttctttggtcggactctgacctaaattcaaagaaaaataaggtagcttggagtggtgtatgtaagcctagaagtgaaggtgggctaggtttgaaatcaatcgttgagatgaacaaagtttgttgtttcaagttgatttggtggatagtctcaaataacacctctcttttggttaactagatacgaagatgactaattcgctcagcttcgttttggtcggtcaaggcgaccacaaataaaggctcttggatgtggagggagggggttcatagaagtggtttgcacaccttttggtatgatgcttggagcccgcttggtcgtttcaacgagagccttggagggagggggttcatagatttgggaatcttatctgatgcaattgttacgttagtggttgctaaccagagatgcaagagtaaggcccttatctcttatcttaccaattttcacctcgattgatcttagaagagaagcttaagcaccaaatttaagccgtggttctcttcatcgaacacatggcaacaaattcgtcatgtacgttaattggtataaaggagtgtggttctctgattcaatcccaaggttttcttttctaatatggcttgatgtgaagaatagattatctatatgggagcgaatgttagcttggaacaatgcagtaaacccatcacttgttctctgtaatgagcccgctgagactctactacatttattttttgggttcccatactcctcacatgtttggaagacaccgactcacaagcttcttctaagaaattactcaagtaatctctaaaagattctatcatcactatcatctccaacattcaaaggccacaacctattatatacttcgactagtccttcaagcaacagttcataccatttggatggaacgagataaacggaggcattgtgagcttcccaacccatctaatcaactattcaa

SEQ ID NO: 25322 - DNA, 1005 bp, Arabidopsis thaliana landsberg
gtcgaccattgaaaccgtttttttttaatgttagcatttggtatggttactaactttttgttctaaatgtgatgctttgaggaaacttgaggaaagaggaattgtcatacgttttgtgattggtcgaaggtttgtccactaattttatctttgtttgtttatacgtatcaagcttttcatcttttcgtgctcgttatcaccctatggactatagtacttatgttcttgtttcaagaattccagtccaaatcgaggtgatagcttagatcgaaaaatcgacgaggaaaatcaagcaagaaaagattttttgattcttgtaagtaaacaatatcaaaagctttagcatcctttagtagcctgcttgatatttgcttcttctacttagttttgcacacacagttttcctcattgatgtaccttctaatatcttctggcactactgctttttcaggagaatcatgaggaggcccaagaagagctagccaagaaagtgaagttcttctttagtgctgctgttcaaaactgggatgcagagttttacatcaaagttgatgacaatattgacttagatcttggtaaagacttcctcttttatttcctatctgtaaagttatgtttggtcctaccctgcatcagcaatttatgttaaattatcttgggttcaatctcacatcaccaattctatttgtgtgattcaaactgatagaggggttgattggccttcttgaaagtcggcgtggtcaagatgctgcttacattgggtgtatgaagtctggtgaagtggttgctgaagagttcgtatcatactcaactttcataaatctgtgtctttgtcagtatagcaaactaatatatttccatctacatgggtctttgtgtttcaggggagggaaatggtatgagccagaatggtggaaatttggggacgaaaaatcgtaagtgatagcaaatgttatatacttaaaaggaacttcggtgaaataaaaatcttctgcgacggtagag

SEQ ID NO: 25323 - DNA, 693 bp, Arabidopsis thaliana landsberg
cattgctaagcatgggaaaagagcaactagagatcaagagtatatgcaacgagctcgggattcgtttaatctcttatagtcctcttgggctaggaatgctaactgggaaatactcctcttcaaaacttcccactggtccacggtaaagtactaatagattgctcaaagatcgacaaaactagccgttgtttcttgttcttaactatgcttgaacactgattaacagatcattgctgttccgacaaattcttcctggattagaacctcttcttttagcactgagcgagattgcaaagaaacgaggaaagactatgcctcaggtattatttcaatttcataagattcttgggaagaagaagtgttgaaacttgtaagaacgagttatcatttgttacaggttgcaataaactggtgcatatgcaaagggacagtaccgataccgggaatcaagtcggtaagacatgttgaagataatttgggtgctctgggatggaaacttacaaatgatgaacagcttcagttagaatatgcagctaaagaatcaccaaagtcaatgattcagaatatttttcagacaagatgataggataagagacgatgcttatacacatctagaccacaaatgagaacaatgtgtataaatagaagaaataatctacttctttatatatgcacatattgtaagaagcattt

SEQ ID NO: 25324 - DNA, 989 bp, Arabidopsis thaliana landsberg
tcaacgagattgagtatttatatcaccaggttcagagtttatgttttaaaccaacgaaaacaaaaaatgtaaacttgtgattgaaatgacattttcccccatcgtaatttggctcaccataaaggaccaaaatgaaatttgctcggtcagagcttcgtattcgttatttcttttttctaagtcaaacaacaaacagaggaagtaaattccaggatgtactttttgggtagattttctccattgacagtaagaatcaaagattttcagtatataaccaattaacggagaaatgaatagaaaacaaaaatatcattacagtgtaaaaatatgaatcaagaaagtaattgggatgtagaaaggtttcagattaatgtcgaatttcactatcactccccaacttctccatcctctagctcgtcattaccacttcggcgactactctctttcttctgtcgtttatgccggttttcactctctgattcaggcgagtttgcgtgctaccaagaaaaaaccatccctctttattttaaatctttaacgaatttcagaactcaagtctagggtgtacctacctttcttgattttttgcgatcattaccatgtttacgggatgatttcttcgactcatctctgtcatccctatcagaactaacatcttcatcagaattgttgtgatgccgtcttcgatgttttctgtcacgatcttttccctttcttttctcgtctttatgaccttcgctcacatccatagcagtctcaccatctgattcttcccgtttactcctctcttttcccttctccttttcacgttctctttccttttcccttctctccttatccttgtctttccgtttctctttctcgtccctttccttctcttttctaacctgaaaagtccacaacaataaaagtcttaagagatccgttcttacattaaaaacaaataaatttcatggcatgaagaatcagtccttttcctcatcacgctt

SEQ ID NO: 25325 - DNA, 1489 bp, Arabidopsis thaliana landsberg
aatgtctctttggcgtgttatgacttatgacccatgtgtgataatctcatgtggtatggccgtatggatgatgtgcatgaacataaaagtaaaaagaatcatttagagacccaaaacaatatagggcttcaaaacgttgggccgggtttgtttcagagccctattatagatagatgggtctgaagaagtctgaacaaacaaaaacatgtctatcatattagccgtcgatcctcattagacacgtggacggttgatatactgccgagttcggtatcgtcgcaaattttgatctttcgggaaaaagaaagaaaagagaagaaaacaaatcgttgaaaaagtaagtaagctcaaggcgcgacgaggaagaagacgaagaagaagaaagtaacaatctttagtaatcaaagtccaattactgaaaaggggttttaggggttttcttgtgagaagagaaagagaagctatgagtgacgcgttttgttcggactgtaagaggcacacggaggttgtgtttgaccattccgccggagatacagtttgttcagagtgtggtctcgtgcttgaatctcactcaatcgatgaaacttctgagtggcgtactttcgctaatgagtccggtgataatgatcctgttcgtgtcggtggtccgacgaatcctcttttagcagatggtggtctcactactgtcatttctaaacctaatggatcctctggcgatttcctctcttcttctcttggtcgatggcagaatcgtggatctaatcctgatcgtggccttattgttgctttcaagactatcgctaccatggctgataggttcgtttttcgattctagggtttgttttttaagcccaatttctacaattcagtgttttcttgaagctcaatttcagcaattttgagaattttagtatgtagaagaattggtaatacctagaattctagatgaatcttatgatgggtataagcaaatgtatgtcactgaaaatagaaactatctatttttagatatctgggaaatgagaaaacttgattcttgctcattatccgtggtataataattggttcaatgcgttatgaaatgttattgtgagctgtttttactctaagttaggttgtttgacaaatgccatttactaattctatgaaccttgttgttgctccaggttgggacttgttgcgaccatcaaggtacttactctctttctctttgcaatcttatggcttctacttgtaaagctttctgttttgttaagttgctgatggtttcttggaatctagcttaccaaatttttttgcttttctattgaaggaccgagcgaatgagatttataaaagggtagaggatcagaagtcaagtagaggaagaaatcaggatgctcttttggctgcttgtttatacattgcttgccggcaagaagacaaaccacggacggtcaagggttcagaacagttatagagtcttttgtatttctgtttcttaatcgtt

SEQ ID NO: 25326 - DNA, 706 bp, Arabidopsis thaliana landsberg
caggacatcaccgggttatcatcatcagtggggaaaaaccagttcccgctgtcttttacgacaattgttcctttggtacagttgcgtaatgtgaagtatgaaacactgtttccgagacttggttttctagacgaggcgttgtatcttccatttcaagatagaaagcctaatcagttggctcttggagatgggaatcagttggcacttccgggcaataaggaggctgaagaagtcctctcccttcctcttcctgagactgtgatatctcagatcactgatattattgatggaagcactaaacaggcaggctttgctagcagattttctggtttgattgtcctacttttcggcttttgtgttactatgctttctgtttgcggccttttcttttgccgattaagacagagtatgcggatcaaggaaccttatgtatctgaagtgccaatcgtaacaccgaagaagaaaaagtccaagaaaaatggtactacaaggcggttcacaagaaagagaatgtatttatatctggagggaacacagatccctctcatgaggagaatgaaaagaaactaattactgctttccctggcctcaataatagttgatccgaacgatatagggttggtaaactgactgtctccaacaaggagattgctaaagggagcactggaaccgttgttcttgagggatcctatgaacgccgtcttgt

SEQ ID NO: 25327 - DNA, 562 bp, Arabidopsis thaliana landsberg
  unsure (1)..(562): unsure at all n locations
catgagttcctttcctgcattctacatcttcgatctatgaacgctaagcagaatgtgagttacctggattcataatgcatcaaaggagctcaagaactagagcagaagcacctcctcctccgttgcacactcctcccacaccgtactttccgtttctcttctttagtatcccaagcaacgtgattagaatacgggcgccactgcagcctagagggtgtcctaaggagacagctcctccatttacgttcactttctcctgtttaggcaaagaggaacaaaatccatgtttatgaaaccacttgattaagttgattgagaagatgatgatttaacagactcggtgatataaaagacttactggagcaatcccgagtagcttttgatttgcaagtgctacaacctgtgaaaagtcagtttagtaaaaattacgcatcacaatggtttgtcaattatgtaaggaagaagacagatgttcttactgcaaatgcttcattgatctcatagtaatcaacttgagaagattccaaaccagcatgtgcaatggctnttggtatagcaagag

SEQ ID NO: 25328 - DNA, 1086 bp, Arabidopsis thaliana landsberg
  unsure (1)..(1086): unsure at all n locations
cccctaaccccaagtttaaatctggtatctttctccttagggtaagactttttacatttacttctccgcccaaaccgtctgaaaggtttgaaataactctaattctgtaacttttggtcttttcgaaaaatatgaatatatatgtaacaaaaaggcccgttgaggaaaataacaagaaagcccgttatgtttagactagaatggattagagaagcctctgcatgcgacccacaacagtacgttggtttaaaaaataaaatacaatcatgatgttactttcagaaacggcatgtatcatactaggacgattacgacaagctaactcaactcttgaaacataaagtttggcattaagattgcagaaaaaaaaaaaaatttattgaaagggtcgttgccaagattccacaacttattattaaccaaagttctcataacataaagataaacttacaacaaatagagaagacaacgatagagaaacactactgacccatctcaacggtcaacactactgactcacctcatcctcagtctcagctgcactacttgcacttgtgcatgcatcagtcttggctaaattttcttgactcgcctcatccgcagtctccgctgcacttnnnnnnnnnnnnnnnnnnnnnnnnnnnacaatttccgccacacgagattccattaaagatctgtactgtaaaatctccattttatacctcttcccatcctcacgacttttctcataataaacctgttcaaaaatcataaaccaaacccgttaaatccattcgagataaatgaaacttgaaaacgtagtttaaaatcatcagttaatttcttaagtcttttgaattacctttctatcagattcagagagattggtccacatgttccccaaattcttagggctagatactttttgtccagcgttctcagctttaatcctcacggattgctcagcaacgaagaagttgtaaccggttctttgacgcttaggtggcttatgagaatccccctgagatgattttgctttcttcttgcctcttttagtttcaggagaaatgtggtaaagcattcctttagctttactagcctccg

SEQ ID NO: 25329 - DNA, 849 bp, Arabidopsis thaliana landsberg
  unsure (1)..(849): unsure at all n locations
ctcccaagatttacgcaactaaattaattgatatgtttttttgtgttaattaagtcattatggagtattgggttggtgatttgttatggataagatttttgatttcctggtaacgtttctcttggcaggttttgttgttgtttgaagatggtgtcacatgaagagaacacaagttttgtggaatggtttcttggtccacatccatacacgtatcctccttgtggtattgagatgattcatgaggatgatgaagtagcagtagctcatcatcatcatcatcaccagagcggtgagtattacagagagtatgaagatcatcgtagtagcgatgtagataacgatgagatcattgctagaactctccaagacgattttttgcagcttgaaatcgcagaaagtaacgattattcgcatcagaatcaacaacaacatcaacaagaaggttatactaacaactatagtaataannnnnnnnnnnnnnnnnnnnnnnnnnnnnnnnnnnnnntggattattcttcaggttattattcattggtttatgcttttcctctgtgttgttatggtattagggaatagattacagagatgcgtttttggttgttgtagaatggataggaaatgataatgatcaagatgggaggagcgatgattcggttaatgtcttttcgtgttcaagcccgagtgacacggatgagtatgtatactcgtgggaatcggatcagtgtgatgctgatggtgaatttggaaggagattgaatcanatggttcccattccggtaagtactctaagatgttcaaattaaccgtaatattgttcttatgattttacaatcgatcataatatgtatg

SEQ ID NO: 25330 - DNA, 1405 bp, Arabidopsis thaliana landsberg
  unsure (1)..(1405): unsure at all n locations
aatctccactttttcattttgatgatgcatttcaggaatagttttctccattgtgatcctattatcagttcagtattttataaactcaccgcaaatgtactctttaccattatcagatattagacactcaatttgagatttatctcaaccatacttgttcttcataaagtaaacttcatactggagtcatcaatgaaagtcacataatagtgtgatactcctagcgatgcaacataagcaggttcgaacaagttattttgtactagctccaacttcttagatttcaacttcctaccatcactcaaaacctaacccgtttccgctttccaaggatgcaactttcatacatgtagtgatttaatatctttaaatttggagattcaccatttgttaccatgaaattcatacatttctcgctcatatgcctcaatctataatgccacaactcagttttgttttaggcattttcggcaacatcaactatatatatcttcatagttagtggtcatataaatagtgtctcttttatagctttttgtacctgtcatggaaccctttgtcactattcaagctccacaaccaacattgatatcgtgtcatgtatcatcaaattgtccaacaaaaaatagatttcacatcactttcggacatnnnnnnnnnnnnnnnnnnnncatacgagctcatctgacatcttcaggttaatgtcttcaacagcaacaatgtccaaagataatccatctactagagatatcttctcataattttgggcaacatagttctccattatgtcctagggagcattagtgtggaaagaggctcctgaatcaagaatccaagaatcgatctgactataagctgaagagatcgatgcttctcgcagtgcgatcaacaaccgcaacatgagcttgacttcctcttggagaattatactaccaatgcattatgcatcaattattacttttgtacaattccacaattctctaattattctcgagaaacgacaacacgtaattcataattaatgttataacctagttttttcttaaagtgccataatatattatgtagaacgtgaaggaaattaaggtcgatgcgtactaaaataagaccatcctttacgtaaaattttaccacttaaattatttatgtaaataagtgaaagtttcattttcttttttaagtaactgtacctttcgaatacctaacgcctacgacaaactattttaattatataacagcttagaattaatgtcgaagaacattttatgtggttatacataacatatacccattcatgtcccttaaccatttagatattttggcccaaaatattgataagaaaaaaaaaaccatttatatacacattttttgattcctaaaccccacaccaattcaggctaaacta

SEQ ID NO: 25331 - DNA, 1356 bp, Arabidopsis thaliana landsberg
tatgatttaattctatggcttcttttttcaagcctaatcgggccgttgtctgtatagagtggacaatcataaatcgctcctcgttcattaaaagaatattgcgcagcgtgtttatactatatcaattgtcaagacacgactactgcatactatcctaagtctcaaggcactggatagaattatccaaacttttgagtactgacgtggcaagttgtgaatggtcagaagaaagatcgttattaatccatatcatccctgtgattggctcttctcaagattcgaggactaaattgcatatcaaaaactagtagcaaataacttatgaatgttattatcttaaaataattgatagatatgataaaaggccaaatcatcaaagagagggacggctgtccttggcaatgtcgacattgattgagaatccttgtctgcacctgattgtattctaaatgtctatcgaatataaaccaccaaaatgtcttcttcattcttgatctcgttcttgattctctgtctcgcactaaaaccgtaggattctcactttgttgtgaccaacgacacacttctgtcataataatatgaaaaaataccttatgtctccaatttctatgtctattgttttgtgtttgtggttcgtacttatcacttatgctaattatgtttggactttacactatgctcttcaacacatgtgatagcttaatcaaattcaatttcctcggacaaaagtaaaatgccaacaagcaaaagaattacaaatttttaacatatatatgagccacttgcctaattaaaccacttgcctaatatgacttcacatatatacaaaattaaaaatgagccaacccgtaaaattctctatttggcccacgagatttttaacctttcaacctcgttggtacggcagactgaagccgacaggtcaattttctttcacatactaaaaattaaaagaactttatcaatactaatcctatccattggtggactaatccggattaatccacagacttcaatcagtttcacactaatttttgtttatccgtctggttgttcatcgcttagcattaaattaaagattataaagtcttcaatatctgagtgagtaaaacccataaagccactctctcaagtctcaagtcatagagctactaaagctatcatcaactatcttggccagacttgtccatacacatctttcttcgagtagcctcggtcccatgaccatggaacatctgaaaatcacaatgccagtaaaaacgttaataacttgagaaagaaagaagttatatttgctggataatgaatagggaaaataccttcgggtgagtatgacttaggaggtagttgataagc

SEQ ID NO: 25332 - DNA, 1091 bp, Arabidopsis thaliana landsberg
tctcattaaccgaatctattacacaacccaagaatgtatattttgaaatacctaacccacatattgaatactgagcgaggtaatatacatatttttatcatcaaaaggagattcacaagattgaatactggcaacgctgatcactacttaagaacatggtttagtaatcatttgaatttgttcatgaccaatttcttattcacttatacgtctttcagcagctattaattatctatagctcgttgtcaatctccatcaacaatttttcaagtttcttacgtttgtatatatagatggatctcgataatctaccatgtcttattcaaacaatctgcatcaaaagccccgtatcttttaacttttcatatgctacatataatttgattcaaaagtattcaatgcttttgcgttaaattagctgttctaattcatataacgcatactatatattaacaaaaactctcctactatctttcaattgctttcacaaaacattttttctacttttccacaaattataaattcacgaatactatggtctatggctgctcgcgctctatgtaacttttggagctagagcttaaatggtatggtgtaaaaatgcaatggtctaaaggccatgttttatataaaaaaataatttaatgtttggcggcaaagggatgaaaccattatatttataccctactaattagtaaattcattatgcacgaaagaaagtcaaacatgattgataagtagcttcttgttttgggaaacgtattttttttggatttaccaaatatagaccaccatattcatgattccaagtcatcaaaaattgactacaaaatcatgattccaagtcttttatttgggaatatctaatcatatacgtaatcgtaatgtactaatgtggattggaaatgttagtgcaaaaaagtcttgtgacacctgatgtaacaagtaccaaccgacgtcgtttaatttatccatcagaaacatcacaggtaagaagccacccaaaaacatcgtcgtatttgccatcaaatgagtaaaggcaattatgtgggtctttaagattcaaccaactacacagcaatggaacggac

SEQ ID NO: 25333 - DNA, 1452 bp, Arabidopsis thaliana landsberg
acaatcagtagacgagttttaccggtcaagagttctagccggagtccttaaacacaacactcacgacattgccgatttcacggtagttaataaaaccttcctgacaattttttttaacatttttgtatacttttgatttcattgccctaataaaaaagtttgtgtttgaatctctttgcttatagtattgcgataagtacgcggattatgttgggtttccgcatttagaagattggagaaagctactatgtttgtctgctctcaataattcacaagaaaatcttgagacttatcgcgattcttgggatgatcatgaactcctacaagaagctcttcaaagctctcatttcacaaacttcaattcttgaattactcatttatcgttatgttagaaagaaagagtttattatatattcatacatttgtttgtttgttgtttctttcctttatttagtttgatctgcctacgtttttggttgactatttatatccatacatatgtttcatcagtatagtacaatatcgtaagcaacatcaatggagatctggtattttaaaaagacatcaattttgttataatcattttcctcagaaatcagaaaccatataaatttgaggcaaaagtaaagctttgaacctttgaatggaccaagtcaagaatcattaattaaaaacacaatggccatggtcattgtcatggtaatgttgaagactgataatctttggtctaacaaactttgaactttcatttgcagtgcttatatatgtataacttcttcagtaccatctccagtttaaacacacattctttgccttttgatgaactgatattctaacagtttaatatcatctcctatgtagtcttcatttctagaacaagacttgttacaaaaatcatcatcttccgtaagattcttgattctccaaaaaaacatgaagcaaactatagcaagtattgtaattacctctttagtttggctatactacttggttgatgatcatatgcttaaaatcagcagcaggaattctagagcctcgtcttcgctttcttaatgctccccaatcgacgcctgttttttcttccccggaggaagtgaaagcatctactggtttaggaggagagcttttgctcttgttcttagggaaccagcaattccattttaagtcagacgcttccattagctttcctattacctgcagatcatcattagcttcccattctgaaaatgtgtctacaatgtgctggtcatcttggcatttccgcttcccttgcctggctcggcttctcctctgctttttaaggacaatgctggagactgctgcaatgttgtctgaagagttcaaccttagatttgtctcgtgctcctctagcttcttttccgtcagctgcaatgtgtatattaaaatgtcctcagcaaccgaggaagaaatgtcggcgaaccaaagtaggtt

SEQ ID NO: 25334 - DNA, 1113 bp, Arabidopsis thaliana landsberg
gaatttgtttaacaaatcttggaatgttagaaaggagttaatgtcatgattatattttttggttattgtggacggttaggagtgatttgtcgcaacataggagatcgtgtgatgatgttgcaatctctccaagacagtttcacgcatccacaagaacatagtctttggcccattttgacgttaacttttatttcttaaattcggacacaaaattatgattcgtgaaatgaacattttatattttcatattataatctcatgatcatccgtccaaattcttcattttaacataaatttaaaactaagtctttattttttaacagaaattccatcatattattttttaaaaccatgtttattcatgtctcacaagtctataatattaaaaaccataatcatactgacaatctaataaatccatagtcagaagaaaaaatgtcaccataaaaaaaataaattcggatatgaaaaaaaaataaactcggaactaattattatccgaattcgatgctctcttataataccatattgaagtaaaccttaccggaacaataaattattgttaagatttggacatgtagccgagaggataccacttgagctagccaaaaccaaaggagtcaaggaatcatcaaggatctgatgatgttgttgtggtgattatcatctctatgattccaaccaaacattggaacataactccaatcatttccataatttagttatttttttaaaatgagatataagatcaattacttaaatgaaaatgtgtgacaattcagaaatagtactagatatgtgggaatagtgtattacacaaaatctgcagtttccaagtagccttgcaagttgcaacgtttaagtcattttcttcattggtcggtattcgccgaaattaaaaggtactatcacacagtactactatacagtaaccggccactagtggctaaaaggaaaaaaaaaatatccaagtaaaatggaaatagtcacgtaatttctctcctacacatttacatcttttataaattctctgactcacacagtagctttccaacacaccacagtctttttctttttatctctctacaaacgacatcctacgatggaagatgc

SEQ ID NO: 25335 - DNA, 1974 bp, Arabidopsis thaliana landsberg
ctatgaagtcttggtgacatctttcaacactgcccttatagaaacaattccagatacggtaattaagctactttattcggtatcccacaaccgatcttgttttaatcttggaaagcgcatgttatagtatcacctttctctcctgcaggcttctattcattctattaaaagtagataccctaacatcacaagcctgcgtgatttttttgatgccaagtttaaagagaactctccaagttttaagcttgctcaggtaatgtactcttcaggtacattttatggttttatggctcaagtccacaagcaagttggctgttttctttcagaaactttctgttaaacatgatgttgttctaatgagagctgtggaatatatgttaaattttctctcccaaaaattcgttggagaacccaatttcgttcattcatactggagccttttctgagaatgaggaatgtagggcttgatatgtcttatactatttctaatctaatttcctcttattcagcagggttttcataaattatacaaatatggattatcatatgaaaaataggttgcatcaaagtcttctccatgcatcaattagaagttgtgtctataattgcaaattgtgtgagatgtgacaccatgtataatttttcaaattgtcttctttttcagaggaattttgttgagagcatggctggatattctttggtctgttaccttctgcaggtaggttgtattttataactgcgtctctcaagattgtgtattaatatatataggcatatatgtgctttgaaacaagaacgaaaggaatctacgagtttgacactctgatggtgttcataagttccttgatggcttgctttagttgtatggctagtaatatccattgcttgattgtcttctcgttcagataaaagaccgtcataatggaaaccttctgatggatgaagagggtcacattatacacattgattttggttttatgctttcgaattctcctggtggcgtaaactttgagagtgccccatttaagttaacccgtgaacttcttgaggtagacaccagttcatatactcatatcttggatcgtcgtctcttctaagttttcgttggtcatgtttccttgctaagcagttgaaaatttacaaaaaaaaatgtttgtcacatccaggtcatggactctgatgctgatggggttccaagtgagttctttgactatttcaaggtatctgcatggcttaccctctcacctttcacttttaaatgactattattgttttcacttttaaatgactattattgtttcatatatatgtggaatggccgttaattgtcaactcttcttaattaggtgctatgcattcaaggattccttacatgtagaaagcacgcggaacggattattctcttagttgaaatgttacaggttcataatttctagcttctttttactatacccgaataagttataacattgcagcaagcctaattatttgccttctgaattatatatattctggtgttgtttctattaggattcgggtttcccttgcttcaaaggtggtccacgaaccattcaaaacctaagaaaaagattccatctaagtttaactgaagaggtaagcgttttcttttatctttgtcgtatcaatttatataatccatttcacatgatccacgacaatatcctcattctttcttttttgtttattttttgggggcaatcacaaaaccagcaatgtgtctcgttggtcctctctctcatcagcagtagcttagatgcttgacggacacgacaatatgattactaccaacgggtcttaaatggaatattgtgatgttccaaagaaccaacctaataagggtaaaaaactcacaacatacattggtacgttgccgttagctcataaaacaatacgttttaaaagaaacccttttcatagtagcaatcagaatccttccaaaggtgggggaagatg

SEQ ID NO: 25336 - DNA, 1074 bp, Arabidopsis thaliana landsberg
taacgctgcttgtatatacctttctcttccatctccatgttcttgatcttacgacgattaaggattttgatagcaaccttatgccctgtgacaacatgctctgctattttcaccttcccaaaagacccaattccaagagttttaccaagcttgtaattcggtaaaatcgattccactccattattgccaaatctatttgatgaatgatccatttcctgtgtcccaattcaacatcaaactcataagtaagctctcttagcaacttctctatagaaaaacatcagtaaacatattaacttgctcaaataaaaaaaaacattcttcaactcaattttcatttcatcaaatctaatctaaaccaaccataagcttgtaagaaaactgacaagaaccaccgacataactactttgtaatggtggttttggtctgaaaccaaacaagagactcacaagtttgagtttagaagacaaaattgataaacctttacaaagaaaaaaaagtcaatttacctgaaaagcttgttaatttcgaaaaccctcttggagtagatccgagaatcaaaaacccagataaattgttcaaacaaagagcgaagaaatatacagaaacaaggagaatcagattgatgggtataaatagggcagaattgtaaattacgatgtaatctgaagaaattcttggggaagtcagatttccaactcgtaggtgacgcagagctgagtcaggtttttttaagtcttcatggtgaaaattggtaatgacgaatcaagaaaccacaaaacccagataaacatttattgccatttgcaagcccttaaattagggcctttttgcccattttctgtttttgtttgaaaaactagttttttaaggtttaaaatttttatattactgtttttatgattttctatatataaaagcgtgctaatgataaagcggataaattaagaagtttcagacgcattttattatataaagtagagtttttaaagttagtaactcaactgatcgtgacacgtaacaagtcaatcgttcatatgttgatattgtgtcggattttttttttacttttt

SEQ ID NO: 25337 - DNA, 1328 bp, Arabidopsis thaliana landsberg
gacgggctgcttaactggagtctctctcactcttatggtactcttttctactcgccaattaaagtacggagtttctttgggatttcaagttttgttggccacttagaagaccttatgtagttagttgggctgctttagaaatttgcgtggatctgcgtcagtttcttatgaggaatgaatcatgtagtggtttttgactatttgatttggtattttttggtagatggtttttgatgatatgaaattgtttggttagacagtgaggaggatcgaaaatggtttgcagaagctatgcaatcacaaacggtagatgtagtcaagcggttgaaggagattacacaggtattgcagacacctcaacaagttttggaggctcatgaagtgacccctcaagatattgaaggttcaatatggagttcactattgttttcttagctattttctctcttgttggttactaagattttgagttatgatgatttggtaggtttgttggatgagttgcaggaacatgttgaatcgattgatatggctaatggtgagtcttttcatactttgaccttgtaactttgttctatatctgtcttttgattgctgggcttaacttgtacttctttgaatgtatgggcagatcttcattccgttggaggcttggtacctcttcttggctacctcaaaaactccaatgctaatatccgggctaagtcttcagatgttgtaagcacaatagttgagaacaatcctcggagtcaagaatcagttatggaagccaatggtttagagtccttgcttttaaggtttacttcagacaccgatatgcattctcgaacacaggctctcggtgcaatatcatgtaagctgctctgagttctatcctatatacttagatggtcgaatgcctttttcaaaaacaaaaatgtctatcgtaaatctgatgaatgatttgtggtaaatttggggtacagctttgattcgcaataataaacttgggatcacaggcttccggattgcaaatggctactctggtttaaaagtttctttttaaactgatagggagagatttcaaaggtaataatactcttcacttttcttcatgcttggattcctctgaactttgagagaacacaaagttgtaaccgtttgtcttgctggtgcataactttcaaaacttttgtcattactttctcattcttcaggaaagctttaaacttgttggattatcttctacaagagaatgactcagactccgatattgatatagaattcgggcttcaccatatgatgatgcacctcgtgtctagcttcgatgctgatgtaagagaagctgc

SEQ ID NO: 25338 - DNA, 1251 bp, Arabidopsis thaliana landsberg
gagggaatctttgggaagatgctaaggcaagagtgacagcaggattgaaatgtgcagagaggtggccgatacagttaacaagaaccattatcactataccccaaaccacagcaatccccacaagagtcactacatggttgtgttgagcattcacggcaatggcggcacagccagcaaatatcagatagtaagttccaacgagctccgctaagagctgcagatcaaaagtgctcatcgtaagtatcagttaacacaaaaacttgaaaagcctatgggttaaaaagaagctttgaagagtgaataaagcagtgcttcctcaatttggactgagataaacttaccttttgcaagaaatggacagagagcaaaggcggggacgatgactcgtgtttgttggaaggaagagaagtgtctgcaagagaagacgctttgatgttgagcacaacaacatttccgtggttgcttttgctcactgatatgtcatccatttttctttttgtccgagaaatagaaagaaaaaaaagttctgtataagctttgattgatgtttgaagttatgtgtttgagagattttttttttttttttccttcttgtgtgtttgagagattgtaatgaggtttcttccttttatagttactttaccaaaaccaaataagcagactgagaacaaagtgaacaaaaagtcaaattttgcttttcagcaacttgctaaaccaaaatcatagtttatttagtgtatatttgttttaagctgaatactgctgaattgcagcagatggttttgtattatgcaaaagacacaggtcgacccgaaatggataatgttttgaaagagtgaagtccatttcttgtttctggtttaacctaaaccgaggctgacttgtgcaccatttttaattcctgtttgtactctttgactttatgagtttgcaaatgctcatcaaaccagagaaactagcgttctcgatttaccgccaatttcctaaattcaaacctagacaatttgaagaagcacgacgcggcgatctcgagagggactttcttttcctgttgaaaaaatgtatctccgtgaaccaattgcgacagattcaagcccagatgttgttacactccgtcgaaaaaccgaattttctgattcccaaggccgtcgaacttggagacttcaattactcctcttttctcttctccgtcacggaagaaccaaaccattactctatcaattacatgatccgagggttgaccaacacatg

SEQ ID NO: 25339 - DNA, 837 bp, Arabidopsis thaliana landsberg
tgatattcttttcgttcattcgaacagtatcatggttgaacaaacttggctaatttttctagttcatagatcttaacgtcaagattgttgagctttccgagcccattccaactctttctatatagttgtttttagccttcttgcctaaaggttttctactaatcggagttagatttgacttatatatcaaaagcaattattttctaatcttcccatgttagacgttgctctgtctcccaagaatcctccacttaacccaaggaccatgaatctttagcctcccctctagcgaaaccttggcacccgggaaccagcactccttattcgcgaggtctccttgagacacccttccgatcgtgtcacattgagggctcctcccacaacaaacatgcagcccaagctcaccttcataggtccacctttttgacctaggctttgatatgtaaaaattaaaatggaaatgaggtcaaagcatgcatggattcgtatgtatttcgaaagttaatggtgtgttggctgcgatgacatctaccaagatttatcccaagaatttgtttgatctccttgtttttaacttttttttgccaaggaatcatatttataggtttaacatatgttgtaaaaccaaactttttatatttctgatatttacatgcgtaacaaaaaaaaaaaaaatattaacagaccaattaattctcgtactcacattttgtagttagcattacaatatcataaataagatagatgagactcaaaattgttatgtttggtttataagcgattatcagaacttgcatgtgacgtcaaaaaaataaaagaagtgatataaaaaataca

SEQ ID NO: 25340 - DNA, 1314 bp, Arabidopsis thaliana landsberg
aatagttacaacctctctctctcgaggaatttggtcgtgtgtcaacggatcaaaagtattgcaggacagcgatcatatcttcactcgacattatgaaaaaatattctctgccaaaagaaaagcttcttcttcacagacacaatgttctcctgcaaacatgcaagtcaaatatcaaacgccgttatggaggagaattctagtctaccctatttttccggggtgggcagaaacaaagctttggccctaattgacatcttacttaagcatggtatgagctaatgcattgcatgtcttttctaattttaggaattaggaccaatacttcggaaactggtgaatgaataccttatcagggagctccaatgccgtaaatacaatcttttttgcaaccttctctacaccccagcagctgttttagcttcaggacttgcctttccctgaaatgaaattggacatacacatctcactcagttccaatcattttcccatgttgcaaaaccacgagaaataactagatggataagttttgactgttcacaaacaaacctcagaggagtctttgcggaatttcctggttggagccctcatagtgacaaactcctcagctgctgtggggtgttcacccactgtagcatcaaagtcggccttagttaaaccagctttaactgcaaccccaaatccctgaaaaattgtaaaaataaaattcatattcaatcatatatgttttccgtgattacttttcagagaataccaatcatgttaaaaaatgaaacctggatgatttctggtgaatcttctccacacatgtgaacaccgagaatctttattggtgtttgcacagacaatgagtttcataaatactcggtctggaagtcctgaaagggtagcctttaatggcctaaagttcgatgtgtaaacatccacatcaccatattgttctatggcctgcaaacacgtagttaatatttctatgtagtggcatgcatgataaaccatatttttgacaaatcatcctacttacctgctcttcagttagaccaactgttccaataggtggctgggagaaaacggcgcagggaacagctctagttgattatagaacacagaaaggataaaagccatcagagacaacagttataaaatgttatagatcactgatgcagcatgtaagactaaacagagaaaaactctcatcaatcaccaaaaaatcccaaaggtttaaacatcaaaagttaagattgttatgttacctataatcaggctttgttggctcattttgaaacaaagttttagccaatgcacctccctccatca

SEQ ID NO: 25341 - DNA, 921 bp, Arabidopsis thaliana landsberg
agcgcaccaatcccagtcgttaactttggcagattggatgctgcaatggtcaaagggttcataaaattataggcatgcatagaacagttacttgatatgatgcagacaaaggagaattgagaaggccaaggtaactacccaaaacaaccgaattcgtatatacgagcagaagcagcaggatcatgatccaaagaactggagcgagtcccaactttgacaatcttccgaggggactgcttccgtcacaacgcttttcaagcaggcttcgagcattaccctgcacagtagcgtttataagacagattcagacaaatatcgacacaattttctcaataatttaagcataatgctgctcattttgaatggataagaaaatctacagacttagaaaaactaacatagtacagctataagtagagttaactacaccaggtatgcaaaggtcaaatgagatgcacataactgccaataaaatgattcaactactaattattgcaagcagtacagccactacgaaagcatcaaatcaaacagtatgaatacatattgctacacaacaaacaagtaaaacagatacctacaaggaaaaaagaaacttgtctgggattcttttcagcagcaagttgcgcaggggttagcccagtcttgtcagtaatcatcaaatcctctttctttccagcctgcaccaagacagtgcaagcctccaaattacctcggatggcagcccaatgcagaggagtgcaacctgataacagaatcaatataacggagaagatgttagaaacgtatagttaatctaagaaaataaacaaagaagatttttaaaaaaaatatgtttgtaaccaccttctttgtctttggcgtcctctatatgcatctagaaataaaagtaggcgaatgggatctgcaaaacctttatat

SEQ ID NO: 25342 - DNA, 1989 bp, Arabidopsis thaliana landsberg
gatgtagttcgaaccacgctcgggccacgagggatggacaaactcattcacgacgataaaggatccgtcaccatttctaacgatggtgctaccatcatgaagctcctcgacattgttcatcctgctgctaagatcctcgtcgatatcgccaaatcccaagactccgaggtctttgttttatttcaattttttaattcccaatctgagttttcgaaaaaatcgtaattggactgatcttgagctaattagcgattccatattagatctctagtgtttatattaagtgcgatctagtattcagatcttagaatgagtgactgagttcatgaacactgaatcttctgttgttgttgtttggttaggtgggtgatgggacaactacagtggttcttcttgcagcagagtttttgaaggaagcgaagccatttattgaggatggtgttcacgctcagaatctaattaggagttaccgcactgcaagcactttggtttgtaattttttctcgttagtataattacaagtctttttgatttattggttcttttgttgccttactcactattaattattgatgtaggcaattgccaaggttaaagaactcgctgttagcattgaggggaagagtgtacatgaaaagaaagggttattggctaaatgtgctgctacgactctctcatctaagcttatccgtggacaaaaggaccttcttgctacaatgggtgttgatgctgctatggccattgcgaatgacaacaggctaagactgattgggatcaagacggataacacatttctatttgtgtctatactgtgaagccaagttaatgatgcatctaatctaatgtcaaggtttgctctgcaggttcctggtggcaatatgcgagactctttcctcgttgatggtgtagctttcaaaaaaacattctcgtatgctggttttgagcaacagccaaagaaatttcttaaccccaaaattctcttgcttaacatcgaattggagttgaaatctgagaaggaaaacgctgaaattaggtcagcattctggatttttatgtttattttttcccttcaattaaacatcttttggccttatttgacttggctccacccattgttcacaggctgtcagatccatcacagtaccagtcaatagttgatgcagaatggaatatcatttatgacaaactagacaaatgtgttgagagtggagcaaaagctgttctttctcgattggctattggtgatctagctactcaggtttgttgataccttttctttgtcttgctcatctgctggatgatgtttttcctgcttattcaggctgaaaattgacgtctatctgtatttcttgtgaaatcatttgacatcttagaggcatgattacattggtaggttatggtcttgcaattctcagtataagactattatgcatgagcaacactttaaagtttcaattataagttcgtgttgtagtaagttttaagatgttttatttcctctgaaacatatgaataagttctttgctcttgtcaatcaatattgttcgctacagtaccttgcagcttggtgtttcattttcaatatcaatcaagagtgcttgactgtgttttacttggcattttcttgcagtattttgccgatcgtgatattttctgtgctggtcgtgttgctgaggaagatcttaaccgtgtggctgctgcagctggaggaacagttcagacaagtgttaacaacataatagatgaggttcgcgaaaaaggaatttctttgtttgctattggatatgcttattagctttaggtgacttgttgatttcattcatctgattcagagattgattttaatttctgcaggttattggaacttgtgagatttttgaggaaaaacaagttggtggggagagatttaatatattcagtggttgcccttcaggacgaacagcaactattgttctccgtggtggagctgatcaggtatgcatcaaatat

SEQ ID NO: 25343 - DNA, 983 bp, Arabidopsis thaliana landsberg
  unsure (1)..(983): unsure at all n locations
aattttaatgatgtctaacatataatggttatttattactattgtttaggccactctaatgtttttaatggttggtaatgtaggtggtgatgaaaccccatgctttggttctgtttgaatagtaacaaaagaaattacatatatatgaatatgtatacaattttgttagtatttgaaccgcaccgcatttaatccatagttgaaccacttggctttattccgaacgtaatttgtaggtgtattatatatactttttgtttggtattggtaagtgtacatatatattgcgtatttatttttgtgatagtttttttttttatttgtgtcttatgtctgtcatatgggttaatattgttgaataaagatttttatttctatatcaaatttttgttttacttttgttgtaatcctaattgtttaactttaacgaatttttgattagatataaatctagtttcataatattttttcaattttttgatatgtatttttttatgtaggggtttgttattttcacaaatgttttggcaaaaaatatcattttgttcctttttaataatataatggatgtaataaaatctgttttttcagtaactttttttttaattgagagttgtaaaagattatagtagagcaccattttagcttactcttgcatatttttataaatttgattttgttctcctcttttgttattttgtataattgtatttaataataactattgtttttcaaatgtttgctacataatttttgcatatttttattcttgccccatacattcttttttttttatggatggttaacagttttaacaatatattgaaaatactatatgtaatgataggtaatataaaagttggattttattttaattaaaaatttcttgcaacaacaagagaggacaaacatgaaaaaaaaagaacataaatttatttgatagttcatcgcctaaaacatcattggtgttaattntaacaccg

SEQ ID NO: 25344 - DNA, 1679 bp, Arabidopsis thaliana landsberg
  unsure (1)..(1679): unsure at all n locations
cgtttgtccctttgagtctatagtattctttggacaccgtgtgaactacaattgggcaactattaatagccttatattatttatacccacaaatgaatttttttaccaaattaagaatgtagttcttctaaatacacactatcgaaaataaaacgaggatttaatcaaattttctgatactttgagaatataatttttttaattataaaagaaagtgtacacatgaactcaatctctttaatgcaagaaaaaaaaattgatatgacaaaaatagttttgataacttcggtttttctaagcgatacttgacaaataagtcataagaatatcatttaaactaagttttctctaaatttataatattttcaaacggacaaaagctgtatgtcgttacatatagagatctgcaatattcgacaacatatataattgaataaatgataaatcaaagtgtagaatagtggttttttattactcaataacggatcggatcacacacaaacatatctatatcaattatatatgaagacacacatacacaaacattcttgagaagacttacgaacggtatatgatatcattatgaatagaattcgacaacatgtcaacatatatgaagtgaaaagacgacaatcaagtaatgtgcctaatgacccacgccggggctagggactgattctagtcgacggtatatctccggcgagttttctggtaccatacgctggtcggtatcatccggaggagaagtgtgacccttgtcgcttggacccgaaggtggtacattgcccttgggtagggcactaagaaacaaacccttgcttgtgccgtaagggactagaacttttctagcttgagaagattgcaagacaaaaccaacaatcaaaatgagtaagcaaatcatcgaaatggagatccttggacgagccattacctgattgattttgttgtataattttagatattaattaattagttatgaagcaagaaattttttagtttattttttgggatttggttgtgtttctgtgagtgaatactttgatagagtgcatatatatagagagaacagcagatggatgaggtcaatggtaatttatttgggttaggtacaaatgaactaaattggtgagttcgtatatataaagtgtttatgtttgtaatttatggatcaatgcatatatgtaggtgttttttcctntctttttggaccaaagtgtatgttataattccaagcagcagacaaaaacactttcacgttacatgcttttcattgcttatctgaatatgataatttaacaataatatcaaaatagcagaattgagttttatacaacataaatgtcatataaaatatatatgtatatcttctttttggtttttgttttgtctttactttgatcaccactataaaacggtatataaaataattagttgtttgtattcagttaaatattttgtttgttaggtggtaaaaaaattaaaaaaattgttcaatgtcttgctaagttgctgactgagatgttccataagagacgataaaagttgatgaagtgatctcgatgactacttatttagcaaaatataaatatcgatgaccacttatttctatggctcattatcagtgtggttcaatactattgtatgagtgctttgttgaaagcattgctttctgttgtttt

SEQ ID NO: 25345 - DNA, 926 bp, Arabidopsis thaliana landsberg
  unsure (1)..(926): unsure at all n locations
atgaagacatagtctaatagataagatagagggggttactccctattccttttaaatatatagttggtgtgtataagctatggtaatgtgaaattatctgtataatgggcattgctgatacatatagataaacaaggctattttatttatgatttgggttgatatttataagtcataaaacattcatgaaccttaaacattgattaaggtttatctaattgtcatatattgatataaggtttagccttggtgaatatgattttatagatcatatagtgtttaagtatatacttgtattatactaattcttgttattaggactggccttaacaccttccaacacatatctacaaacataaattatttgtttaagaacaatatgtacacctaattgtatcaaccggatctcatagctaattatatgaatttgttcatataaatatccttaatattataacatattcattatgtgttaatttgagctacttatatgtaggttgttgtgtaattagatctttgaacataattggcttcacaattgtatctatacatatcttgatcaccaagatcatctggttattaagatatgtgttatggacttaatatatacattataaagataacttaagaatcaaaaaaatatagaagtttagatataatgaattatatttgtacatatatctataacccattcatacatatatttgtactaagtatatatcatacattgtgtataacccaaagtcattatggttaaatcttcaagtaatgtttgtaaagatattaacttctattacacaaacatgatatatgacttgatgtcatgtgtatgatacacatgattacattgccttatgttaacctatttataatattatcttgatatacatnattaaacatcaaacatgattattaatcaaacatgt

SEQ ID NO: 25346 - DNA, 1556 bp, Arabidopsis thaliana landsberg
aaaaaaaacttgatgtgggttttctttctttttctatcatcattgttttggccaattcttttcttcccactttttctgtatgtctctcttcttctatgtaatgaagtacaaagactttgtaactttgttactgttgcaggataaagtatggtgaagtacatcatttcttttttactttttcaaatctgtatactttttcagttgccttttcaaattaatagaatcttttctagacagatttaaaagaaaaccaatcatcaaaaccatacaaactcatttgatatatttaccatacttgataggtatctgccaaaacccattaaaactcgatgaaaagctgttgttaaaacatttgaatcacgagtttattctatttttgatatttttgtaaagcccgtgtttaaggaagagtttatatgtgcatagcacatggtacataacaaaatttatatattttatggttgtacaaaaaaaagtgcgtaagagaaaatatttaatagacttcatattattaagcccatacacaatacaattctactacttgtagcaccgaaaccgtatctttagtgctgctctagaatctgtctattgggttcgttgttgggacagagaatcgttctttagcttttcatccataccagtgatttcttatttggactcttgtaattataccaacatacataattgataattgtgtacgttcatacaaagattctttaaaaatgttgtgatttacgctacttaactagactttattccctaattgacataaccatgaaacaatgcgttggctatcatttcaggaatagaggctcgtggtttcctattcggtccaccgatcgcgctagccattggagcaaaatttgttcctctgcgcaaacccaagaaactacctggttcttatacttgcatacctttcatatgatttatttttgaagtagtactaacactaaatccaactaggtgaaacaatatttgaggaatacgagttggaatatggaaatgaccgcctagagatgcacataggagccgtcgaggctggcgatcgagctttggtcgttgatgatcttatcgcgactggtggtactctctgcgctgccattaacttgctcggtaaaatccctaacctatatgacaatccaattgagttttaaatttccaacctaaccgatacaagatatttattgccctttttgaatggtttttggaccatgttagagagggttggagcagaagttgtggaatgtgcatgtgtgatcgagttacccgaattaaaggttcgttgtcgtggaatttaattcaatacagtagtaatattcgaaaacaataaattgagatcgttttgtattggtgtgacatttaatatttttgaggtgggaaatttaattttttgcagggaaggcagagacttaaggggaagccactatgtatgcttgtggagtaccgatgatgattttagctttacttatttggataaaattattcggttaattaatttatgctccgaaaattcggattatgcagacttcttattattggatctacaatattttggg

SEQ ID NO: 25347 - DNA, 985 bp, Arabidopsis thaliana landsberg
ctgcaataaaaattgatagagggtaagtttatctactctagaatgttgacagcttacttgatgtcagtgttttgtgttaaaagtgatcatctaatatgaaattaagcctcgttttgacgttgaacatggaattgagtgtagtaccactcactaatcaaattttttaatatgatatgtggagtcattgctttcttatttcgtgtctactctagaatgctaacaatgtcagtgttgtgtgaaaagcctataatttgatatgatcttcattttaattgagtctcgtcgtgacgtcgaacattgaatggaagagtggtgctagactttggatctttattttaagtggtttcttcagtattggatcagtccatacttttgcaaatggggtgaagtcatgcgcgtattacatatcctatcattttgattgtgaaagccgatcattttgcttcacacaccgagtttttcatttgcatgctttcgcatcgaaatcatccgaaatttgttgaatattctctgatccaaggcttattgtttatgcagtaccatatagacaagttatggcagcgtatggatgtgttgtccaactaaaggttttgtaagtgtcgtagttacctgaactaacgttatttgcatgttggtgtcccagcttacttttggttacatgcttacttttggttttggaatattaaactccattggtacaagcttacttttggttgtggaatgttgcactgcattccctagttctcggagttggtagcaatgtaggacttttctctgccgttttgtcgtggaaaggtcagtgaaagactggatttattctggacattgcttttgtttgatttagtgtctgaaattcatttgcaagtctcagaacaaatatatggtgacttacagaaagagagtaaaggtggaagaaaacattgacaatgtgaaaatctcatatcctttgtggggagatgtttgttttgtgtaaagtcagttgtgt

SEQ ID NO: 25348 - DNA, 907 bp, Arabidopsis thaliana landsberg
  unsure (1)..(907): unsure at all n locations
ttgtaaaacagctaaaatcctgaaagaaactttttttttattgcaaacctaccacaaggcctgtaattgggccgcacagccaaataaacgaagaaaaagcatgcgatattccaagggtctgcatcaaccaaccaaatgcaacactgttagataaaactcaaaagggttcttcagcaacaagaaaatcaaaatacttccagcaaacagatatttaacaatagttctatctaccaccataactacccacctgatacatatatgaccagtacaatactattctaaacacagtctaatctctgattatacaatagttccgaaaaaggctaaggtcttttatatttttacaaatgcttatgtaatccaatgaacataaacaatctagctaaattccaacgtcatatactcttcgataagccaatgctatagagttccatacgaaaatatctcatggctatgttggtgacaacaactacctaacctaagtattagaattcattgcttcacctacaaagtactcgactttctcgtacaaagctacacaaaagcaaaaccctcgaatctaaattggtagagagaaagccacaagtgacagaaatggtaacaatgacaagagagtagtagtaagtacctgaatataaggagtaagaagagaaagttgcaatgcccaaccaaattgaacaccagcagcgactgtacaactaagtaccaacgtcactaagctacaattcttcgacacagattcaccatcagcagattcaggatgatccaaaggagaagaagagaacgacgataaaccagaccgtcttgatcattcgtgaccgaatcaagtacaacatccttactcagattctcatacnggaccgagatcgacaccgagtaactcatcttcttaacacagagatcccta

SEQ ID NO: 25349 - DNA, 692 bp, Arabidopsis thaliana landsberg
ttattaacaggtgcagagagctctcagttctttcactttttattatcacagcaaaaacttccactgccaatgagaaaagcaaaaacgtgccataagatttcaggtgtgtgtcaagcagcttttggttttcatttcacaatgaccaatgcatacactttcataacgaattcaactccatttataaatcttgttttccaacagcatagatcaaaggctaacatcaaattattgaaacaaggaaaccaaagccaacaaagttataatctgaaacatcctcatagcctcatgaggctgtcatatgactttgaaaaggcacaagcaggaacgtataacctgagtataataaaactgcatacaaagtatgcaactcagagatgttgaaaagggggaaaacaaatgatcacctgataaaagcagcgtccttagacaacattgaaaagaagaactagtaagatggcttataagcccaatgcgtagaagagaccactcaccctcaagatccagcttataagcaatcttaccattccttctcttcaatgtaaaagatacattaaaccaactgcaaacatgttcttcctaaccatcatgaactcactcatcaacactctactactccactttattgcttgcacataacaatcaccatatcttaaactaacttttcacataaaacttatataacatatattaat

SEQ ID NO: 25350 - DNA, 1618 bp, Arabidopsis thaliana landsberg
ccatcacgatctacaatgctagcaatttgaagggcatcagagtttgctagatcggtattagcaggggtaacagccaatatcaagcaagtatcttgcttgatgtaagacaagatcatcgttcttatacgtgcttcaatgtcggatggctggtcaccaactggcaccttggtaataccaggcagatccacaagcgtgatgttcaatacattaggtgaagaaattttaagacgaatctgtgtatctgctacacctttgttctctccaactaatctattcgtctcagcctacaaagatgttgcatttcatacattaatacaaacttggaagagcaatagagtatcaaataaagcaaggaagggaataaaaaacctcaatttctcgacgaatctcagagaaatcatagaaacgagtttcaggaaggtgacgaaactccccccactcatcatcggatccgccattagcgcggcttttagtctggaggagctggagaacaagaggacgacgcgtgcagatatcattaccacgagggagaaagtcacggccgacgagtgcttcaaggacgctagacttgccactgctttggcttccaacaacaacaacctgaggaagcgcgatcgtagactggcttccgagctgagcgaatatgtcttgtagcttgtttacaatcggaatcacagaggatcccaacggcgctgcgttggtggtggaggaagactgagaaggcgtagaagaagaaagaggcgtatactgaagagtctcaccggaaacttctttcatagtcatcgttggatcggattttgaatgaatcaaagtgtgctaggggttttgaaaaaattaagttcgtggagaagaaaagacaacactggaaagaagagaaggtcaattactcgggattttcgtgcttagctctatctctatcgaagagaggaggatctttttattagagtcgctaaataatttttacttgctcaagaattttaaaaacgtgaagaagaaattgaactttaatcacaacttaacaaaataattcaaattaattttatattcacttaacctttgttaatttataatgataacaactaaataatttcaccttaatctccatggtccaaaagaagcgaataaacattttcatttacctaattacattagtttttaatttataaaaactttttttctttctaatattagcctgtgcttttattaatcaaataagtttagaaaaaatctatagatacagttttagtgaggaactgaagttctgttctgtctttaaatattcgttgttaacttaaacgcaatcttttgctatttcatcagtaattttttgtatggataaactaaaagaaaaaaaaaatagagaaaaatcgaatgttaaaatcgtggtaaaccggctgatgtcgtatcatttattaaggtctcaaaccggaggtgtgtgtgtgtgtgttaattttcaatgttgaagaaaaatcggtacgataaggttttcaaaccggttaagtgtgcgcattttggtcttttcaaccggattaggagggacaagaatgagtccatcgagctgtcttcgtcagaaacagaaagagtctcttcttcaatccaatctttttacaacattagg

SEQ ID NO: 25351 - DNA, 823 bp, Arabidopsis thaliana landsberg
attgcatcatatgatagatatctcgaaaacataagttaaggtccaaaggatttgtcttttgtttccaagatattattttcatttcatagcataagtagttggattttgttcatttacaccatccgatggttttgttggttgtgaaaccagattcggaggaaggccgaagcggttcctgttgcagaggccgtcttggttctctaggtcttgcaggatcaacaaaaattacccaaccgtccaagaactttgcattcatctctgccttggctttctctgcatcttcaattgttgcatatgtcacaaaaccaaaaccctttgatctcccggaatctctgtctgtgatcactctcgctgcaacatgaaaacaaaacctattgatctgatgctctatatatattggattaaggaatccaagagtaacattaccatcgacgagctgtccaaaagaagcaaatgcatcctgaagcttttcatttgttgtgagtctggagagacctattcatagataccaagttcatataatggggttaacattctttaacttcaagccttaaaagaggattctaaagttccaaacaaacaaatacagtagcaatctataaactcaggacattcttatgagctcgacattttgagacctttcgatagtagcaaagaaggaatcaccaacacaaagatgattagcacactgaccacaagcctcccaatgcctctctaaccactaaattcaactataagaaaattggcaagtagatcaaaaccttcatgttgattctagacacaagatacaactgattgataagatcacagatcctaatctctc

SEQ ID NO: 25352 - DNA, 1160 bp, Arabidopsis thaliana landsberg
  unsure (1)..(1160): unsure at all n locations
gtaacgttcaacttatttatctacatttttgcagaggaatgagttgaataagattcagctcaacttttttcaatctaatatttttcaatcatttaatttaaaacaaccatttgcagcctcagtctccaaacacgtgataaatttttgacaagtctaagtatcatcgttcccgataacaatcaagcggtcaaaaataaaataaaaaaatcatagcaggaaaatcaaacctcctctttaaatttgttactctcttcttctttcttcattccccaaagatcacatattttccttcacaaaaaattctttttttcctcatcagaaagatggattattctccgataacaaattttacggacgcagatcctccgaacgcaaatcctctgaacgcaaatcctccggacgcaaatcctccgactccaccggttcgcatgaaactgtgagtagtttctcgattctcttgcgagtagtttaacgattctcttagggttatggtttacgcgatgattctctttcgcgatcttagggttaggcggcttatggttaaaaatttacttattatttattcaggaaaaacattatatagaaatttattttaaaaagtaaagaaaatataaaaaaataatctatactattaattgaagaggcagattgtgttatatttttgtcaaaccaattctagagtcttttcaagatagtataaatcaatagatataaagacgctcattcgtataaatataaaaagcaaggtaaggataaaactcattgtatttgtataaatcccctatatattaataaagaaacattttttaaaaataactttacccttacgtgtggttaacgaaagtgacatgctgacgtgtcgtttttacaaagctcatcaacccatttaattaattctctattttctattagaatatttacatcaatttgacattgttactactaacacttattttactcattaattaatccaaataaaaatttaaaaatgaacttaacatagcaagacacttaagatgttatttttcaatcaattaattaaaacgaaattacattntaatatatgctattaagagttattaatctttacaagatgaaaaacctaatatttgtgtatccactaactntatacatgttacggntatctcttatttatacat

SEQ ID NO: 25353 - DNA, 1650 bp, Arabidopsis thaliana landsberg
cccccccccgcccagataagcatagaacagggtaaaccaactggcaggaatctttggtctggttttagataatgattaaaagctgtattggttatgttgaattagttggaaatctctaaatatctatacactatttattttctttaatactatatgttgtgtagtgtgtatatgaataatgaaaatatctgaaacatgctttaccataaaggcttttgatgagctgtagtattgacataattggttgaagagaatgagtgatcataatgatacctaacatcttttatttaatcaaaaatacctaacgttatttttatttgctactataatagactccaaccaatttattagtatcattttatacagtttctaacatttttgccactgcttagatttatgggctttccctttctgtctgcatgggcctcctctcttatattaataatctgacttaatgaaaacttttaaatcttttgtagtttattttcctctagatgctaattttagcaaaatgaaaagatgtgtgatggaaacgtaaagttaaagcaaaagaagatggtgaattggtgatgcaatattttagtcatgtgtcattgtttacatttatgatatattttactttaaaatacttttcttcattctcaattgttataaatcttcgtagaacacatattcacaaatgatgctactttggtgatcagttactaaaaaataccgaaattgattttagaagatagagacgtgaatctgtttgccaatattaattgggctcaacttaagcccaaattatataaggaaagactacctagtaacgaacaagtagcaggtcaactgtccgagcgttggccaaatctctctcacttccacaggtttctctctccggccaaatctaacctccggggaacgtcgttggtcacttatcaccggttagaatttccttcccgctttatcccgtaaacttttttcccattgattccgatcgtttatgttccttcaccaaatcgataaagtttgatctttttccttttcactattattaacagaccaatctgtttacacaagaaatctacagtaacttatcacttgaaaagttttgataaatagttagtataataatttgttaattgggtgtgtaaatttgatttcttgattgtgtgtgaattgtgatgaagagggaaaacaaaaaatggcgactcctgttgatccacctaatggaattaggaatcaagggaagcattacttctcaatgtggcaaacacttttcgagatcgataccaaatacgtgcctatcaaaccgataggccgaggcgcgtacggtgtggtttgctcttcggttaacagagagagtaatgagagagtggcgatcaagaagatccacaatgtgtttgagaataggattgatgcgttgaggactcttagggagctcaagcttctacgtcatcttcgacatgagaatgtggttgctcttaaagatgtaatgatggctaatcataagagaagctttaaggatgtttatcttgtttatgagcttatggatactgatcttcatcagattattaagtcttctcaagttctaagtaatgaccattgccaatacttcttgttccaggtatgtgatttgtttgcatttgcttttaccattagtgtgtg

SEQ ID NO: 25354 - DNA, 973 bp, Arabidopsis thaliana landsberg
  unsure (1)..(973): unsure at all n locations
tgcaacgtgaatgtgtttgaacctaagagctccaacatctaatttccttacacttccaatatctgattttgaacctgtttcttcctcctacaaaaaggtgaccacggttactaacgtcaagcttagattcataatattcgattgttggactaaagcttaatggtataactcacttagatgccagcaaaagatcagattttttgtaaggtagaattatgttacctctggattagttaatgaaatgaaggtggcttgaagtctacttccttgatggcaagaagaagcattctggtccgactttggtgaaacttcacttccattgccactttccatataaccagtttttccaacctttttcaacttcaccatcaacacacaattctctcttgacaggttagttatctgcaaataagtcactatatctaagaatccactgtgatgatgatgaagctacaagnnnnnnnnnnnnnnnnnnnnnnnnnnnnnncgaatatggtaatacctgtttatgaagtcgttctcgttcagcagctagttgcatgaccagttttttcatgatcttgttatgtaccccgatatctttggcggttcgcaattttctttcttctgcttgctgtaaatatttctccccttctttcaatctacccttaaagaatttcagttcttcgttgacctctgcgttagactcagataccatgatcaacttctcttcggtaatgtcggccctgttttcagccttcaaaacttttgattttagatcctcgatcacatcctccatatcagaaacagtagaatataacaagttctgcttttctttacttgcttcaacagctgcaactgcatgttctagttgtagatctgagtccctcaagtgtttctcaagcgatgctaacttatgtatagtgaagcccttgtctctgaaattccccaacttgtcttgaagctcctttttgctttcttctaggattttgca

SEQ ID NO: 25355 - DNA, 1262 bp, Arabidopsis thaliana landsberg
atgaacagagagaatcaaatcgtaaaatgcacatgaaaactattcgacgaagattagccaaacacacacttgagtaaattgaaattatccatatttcgaaaagctaaaaactacattgcaggataaatgatcttatcttaatcgaggaaggaatcgcgtaccttggagagaaagcgagctttgggctagcagagagacggaaagaaactctgcgagagcggctttggattgggaagtgcgaggaggtttgagtgactgcatattttgattcagcagcagctggagatgtgactgagaacgacgaagacgccattcgtcttcttattgttattggttcagatcgggtttaggttctctctcgatgaaaccaaagagcacaacaacaacagttcacttcagaaagagagagagaagatgtcggattcggaacgcgtttctctttgattataactctctttcagatttcgccacgtgtcatactctgatctgttgttctgtattcgcgattactcccaatccttgtggactatcgtattttttaccttgaagaatttaaatgaattattacttttaaataaatataaaaaatgttagggttaaaatcctgtttaggaaattacaatttctctaaactctttagaggaaacacattttttcagcaagaaaaaaatccgactgcatctaaagatgaaaatgctgtcggtgtctccaatttttataaaaaaatacatgaatagatccaaatacattagcctaatatacatacgccaaatgtattaaattttaaaaattaggcgagactggatttggtgaacaactaaatgaagatatgacttgttaacaatctagctggaagttggaacatccattgaaaacaaagcacaagcatcgtacatgtaagccaaaactataaacaaaatgcatctatttcaacaatcgggtcccccaaaattaaaatcaatcttaatttttaaatttcttatagtttacatgcatatttacttggttatgaacttgtgatgcatacagatacacattcagctcatcattccataactttccagcatttatacatagatagtgaaccaaccgattccggttaagggaacagcaaagagttacatacatagaaccaaacgaattacatggatggagaatgatcctaatactttacataatgagtgatatagagagagactcagcctgaccttgctgcttcaatggctgcaagtaagtcttcatattttgtcccggtcacttcc

SEQ ID NO: 25356 - DNA, 1199 bp, Arabidopsis thaliana landsberg
agagagagagcgaaagcgagagaagagcactaagcaaagacttctttaatcttcttcttctgatcgtcagtgagagaagacggaaacaaaacctcaaaagtgacaaagaggttgcctttctttgtgctgtagtgaagtggcatcccttctcctttgaacttctttacttccttcggctttgtaattccctgttgtcgccacacaatatttaacccataagatgataattgatggtcattgtttcaagtgttttgcgtgtatggggaaagatattagtgttaccttggaactgatgtcaacttcgtgatcatccaagtgtttgaatgatttctcaaaaccaactagcgcctcaacctgaagaaaagagatttggtggaatcagaaaaatgaatcaattgttggtctatgatgtagagatactgatataagagtagtttgttgaatttatttaccagtgtaatgttcacgttcatgtgtagatcgttgccatcccttctgaaacgggcatgtggtgcagttctgattcggaactgcgaaatgtacaacaatggtttattctctctgattttgatgtttagtgaagtcaaggatagtgaaatttagggaagaggctaaccttaaggtcaccagggtcaccgtcaagaatgggttcgccgtcttcatagaaagacacttcctgaaaagtatttggtatttagaaactaagatcggaaaaatcgataagctcataaataaatcaaaatgaattaaagagctactatgaaacgtagtttcgattgattttacaatgagggtagtagaagttcgatacttacttctccatctttcattcctttctcgatatcaactgtcacaaagtatccctcccgttcgtatttgacattagggcatttgtcacagacctgagggggggaagaggatacgtcgttaaacagtaattaggttggaacaagaccatctgtgacaattgaacatatccgtcctttacctgctctgtcatctgttggaacattccaggaccaatttgtctgtgatagacctcgttcctgcagttacactttctctatccaggagctggttttatcacattcttttccctccatacctgatagttcaatgtggaacattctcactgagaaactaatgcaatttcttttatttgcattaatgtaaaaaaaaaactgtctactctaaccaaa

SEQ ID NO: 25357 - DNA, 1814 bp, Arabidopsis thaliana landsberg
aatcaaatattcgcgtccttttgaattcgtttccttaattaaaaataaaacgcgtttcattaaaagcagaatttatctctttctctatctatataatcttcttattcttcttcactgagccatttttattcttaggctaaacaaattcgaattctgaaacctctgttttgaatttctctctgaggcaattcgtcgaacaacatggggtccaaacaaccatacctaaacggcgcgtactacggaccatcaattccaccaccgcctaaggctcaccgcagctataactcacctggattcggatgctgttgcttcagctgcctcggaagctgtctacgttgctgcggttgctgcatcttaagcctgatctgcaacatcctcatagctgtagccgtaatcctcggagtcgccgctcttatcctctggctcatcttccgtccaaacgccgtcaaattctacgtcgccgacgctaatctgaaccgattcagcttcgatccaaacaacaacctccattacagtctcgatctcaatttcacaatccgtaaccctaatcaacgagtcggagtctactacgatgagttctcggtttgtggctattacggagatcagagattcggatctgcgaacgtttcgtcgttttatcaagggcataagaatacgacggtgattttaaccaaaattgaaggacagaatctggtggtgctcggcgacggagcgagaacagatctaaaagatgatgagaaatctgggatttatcggattgatgcgaaattgaggctaagtgttaggtttaagttttggtttataaagtcgtggaagcttaaaccaaagattaagtgtgatgatcttaagattcctcttggttcctctaattctacaggagggtttaagtttcaaccggtgcagtgtgactttgacttatcttagtaaactccaagttttatgaattcttttttcttttcatgttttttttcttctatttatctacattagattttgtttcttcgcttgatatggattatgttgatttatttgttcttactctatttttcctatgaaaaccaatcgaaatgcacttactcaattgtcaattagatgtgtgtatacacttcaaacgcgggatagaatttggataacaaattgctttttgtgtgtatcgcactaaaagctaatccaaacggcataaaacatctttacttttgtaagcctttttctttggctttttagcaacgttttcggaaaaaagaaaagccaaagttcagaaaacaaaagttagtattgccaaacaatagatttttttccaagttcttaatatgagtttaaatgaacgcaagtttgctgattcaatttcatttgcagacattcatctaaatagtgtcaatgtatagatgatatgtttttttttgttcggttcttgtggtttatatctggttgctcatcctgagatattaccaaaacttaaaacttacaactctagctaaaaacattatctgcctttcacttttggtgaactttttttttctcaattctttaaagataggtcttcttttttttcgacttgccatgaggcctgactcatgtcctttaattctctgtcgagtcaatttttatatgtgcaatcacttcaaaattgaagtctgatggagtcttcttggaaattcttcttgacaggtgcatttttttttttggtctctaagaccaactatgcatctcatgcaattacaagacccacacatacctaaacatttagtaacttaatcacacttgaaactaaacggaaatcaaagtccagggaaccaaaataatctcgttcattt

SEQ ID NO: 25358 - DNA, 1396 bp, Arabidopsis thaliana landsberg
  unsure (1)..(1396): unsure at all n locations
tctgccaaagtagagattagatgtactaacagatgcatataatggaaaaataagtgaaaaaagttatgtcttacaacaaatctgtgaagaaggcacaacggcatgggcatgattgcgctaacatgaacatggacaacatccctctgcagaaatatataaaaagggacaattgacttgaaaatcatttggttcagaattgtaattttgttatatagaccaaatcccgaacatagttgacagcaaaagaatcattcataagctaacctttgtccacttttgttgtatacagtcatgcacaaaatgtttatgctggggaatagaagcacttgcaaaaactgtctgacgtttatcgcatgaagaaaatgatgtcaaaagcttccgcacagaaccaacttgttttgatgagtagaataagaaatcaacctatcaaagtgaccattcaaatatattcatgggtgagataaagttccgagcataatgttcaataaacaaaacagcctcaatcatttcctatggaaaataagctgtaaagtacaatacatagttgagaaagtggatacgtgatctacaacaagaactctcaccgagtcaattctaaatatgtgcttttctagcatgtgacacaaacttgctaccgtagcaaccaaaattgnnnnnnnnnnnnnnnnnnnnnnnnnnnnnnnttgctgactaagtcacaacctaatctatctaacttaataagaaacggaactatcaaaagtccaacctttagccagcttttgtgccttcttagcgtccctccatctaagagagccatcacagtacatcctttcacatcaatctccgattttgcagccaacattcgagcaacttttgtaacctaaaccaaaagaggcaacaattactttcatatcataaaaagttaaagtcaaaagaagatttaagatcaatgcctactactacacttacttgcataccgagctctcgagtgggaacaacaataacagcttgcacagaagatcgttgagggtttataagagagaatatgagtagcaggtaagtcaatgtctttcctgaacctgtctaagatttaccaaacaacataccaatatttaaccaaaacagataatcgaaagagagagacataaaaattgaagatatggattagaaaaaggacttgagcatggaggatgcaatcacggcctgtaaacaaagtaggaagagcttctctttgaatatccgtggggaagacaaacccaatctcctccattgtgcatcaattcacaaaaagttcgaaattttaaatacttgtcaaaattcaaaattctacagaaataaaaggagagaaacgaagcttgcctgtgcaagataaaaaggaaacaaccttggcagatttacgtagagtcaaagcagt

SEQ ID NO: 25359 - DNA, 2321 bp, Arabidopsis thaliana landsberg
  unsure (1)..(2321): unsure at all n locations
ggacaaatacaaaacatcctgcaaaaaaaaatgaacactaaaaccatgttttcattttaatccttaaatgtgtgtttgctcctcgggtctgggtggaaagacgttaccaatactctctacaggagcaaacaccatctttcatatggtgaaacctctttgcatcttgcgaaaataactctcttccaactatctttgacatcaactcaaatgcgttatggcaatctgcgcatacacgtagatttttcattactcgtattaatgaacgcgcaggagtgtcaagaaatgtcgagatgaaagcgaatctctcgttatgattgaaaaggttttcgtctttgctctcttggtccacgtcgtgcaatgcaagtttagatagaggtacataaccaatttctatcatatgctcctttaaactcttcaatgccatatacaactctctgttttctggacgagaaatatctccagctgccatatatcgaatcccataatttggccctttggccattctttgtaatttctcttttactaggtctgatgatttcacaggtacaagacccgcctttgactctttgttcagtctacttgcatcaagctgctcaaccatatcttgacaccggtcgccaagaattaaatccccatgaacccgtgatagattcatcagggtttcccacaaatctacatttggttccatcgattcaacaaatctcaaggcttcatctaaataaccaggctccgccaacattttaacgaggctcacgtaatgttccatacaagggataattccatactctttgtacatggactcaaagtgcaacagtccctcgttcatgtcaccaagaacaccacacgcaaagaagatctctttaaacatttcaccatcaggtttgtttccttcttgtttaaaccgagagaacgtatcaatggcgtcttccccttgcccattctttgcaaaacaccttataacaccacaccaagtctccaagtttctctcaggcatactattgaaaacggttaatgcatcttccacagaaccacaaccagagtacatttcgattatcgagttgcaagcgctgatatctgaaatcccaaccgaagaagtaataaactcatgaacaacttgggcttcttgaaagcttgtgcatctccacaaagctgtgctatccaaaacagtctaggtaaatccacaacataaccctcatttcttcatgatttaataatttcaacagcttttttaaccttcccttctctgcaaatcgaatccaattcgtccaacgagctatgaccactatgatcttgctgaaaatgattcccaccagtattattctcttgtggaactccatttccagtagttccatacgaggaacaaccatcactactttgccaattttgatttctctgattaataatttcactatgttccccataactctgattccgattgtatccgttttgataaaacctattcgtcggattctgcccaggaacagggtttaaactctgctcatatgaattctgctgaaacccaccaagcgattgttctccaccgttaaacccatttacataaccaatgtgatgcgaagaattatccatcggatttccattagtagggttttcaaaacccaatctcagcgcagctgtgctcagataagaaaataaagaagagtagcgtagcttacaggtagagccgagaagcgaacctctcgtcaacgtgtatatcattggccggggaggagattgctgattgtcgccggggaacaaaaccggttaaccggaagcagaatcgatccgattagaagagaagaagaccaactttataaatctgcgaaagaaactacaaacagtcaaatgggttaatttgcagagaaagacgaaaaaaacgaattcaatttcttctcgattcacagagtaagccgtatcaagacgaacctaaaactcagttccctcctattcgtcacaaaagctaaagaagcttctttttttttttttttttccagtgaaactcagtcgcgtttgttcggttaacgaaaacaaaggttatcttaataacccggtataactcagcattctaacnnnnnnnnnnnnnnnnnnnnnnnnnnttgtgataggaagaaagaaattggcgaattggtttatacttccacgttaccggtacactggtacggtggatttttacttccaactgtgctattcaaaaaatttacaataataacaagttttaaaagtgaatttaagttgagatttgcatcttgtgtagaattagaatgaaattgcaggttcatgacttgttttcttgttactgccagtagttaccagaattgagtcag

SEQ ID NO: 25360 - DNA, 1306 bp, Arabidopsis thaliana landsberg
cttcttatcccgactgtgcgcagaaccgcacattgagaccaacttctgcatcacttggctaatctctgatccaacaacatataccctcgacctacaaggtcttctcgatttagtcttccaaaagacgcaattattgggcaataagaacctagcggcgatgaaaggctcagtgaataccacgactgatccgacgctcaagatcccatttgagacttgcgtgagagattatgaaggagccattaaagcgatcgaggaagctcaagggtttgtgacctctaaggcgtacccgttagcatctcaaggggctgctaaagccttcattagtatatcagtgtgtgaagctcagtttgcaggaaatgtgccggcttatgtagcaaaactcaatttgttttttaagagaatgtgtaatattgatagggttttctccgacgttttgacttcttgattctttatgtatctttcacctgcaagaaggcagaaactactaaatgtcattcacgctgatgtactagtaacttaaagaccaataaatgaatatattcatagtcaaaattaccgtgtcttgcatctcagctaagactttaatctctcgttacttctggtgtatatttatgacaattatctccatagaacctcttcctacagtaaaactttcttaatgccaaaaatcatgaatacatatttgtgaatgcatatctacataaagaagagaattcaggaaagtgagttagaagaatactaatcagatcactatctctacactaatgctaattgctaagaatagcaaagtttttctctctcttttattaggacatgtggtctaactaagaagcagaaagagcaagaacccattctcataccatgattacacatccgaaatggtaaattgactgacaatagttgtagcagaaatcaagggtcaacaataaaaagacacatacatgtttcaataccaattttttcatgtttgataaatatcattctccaaacattcacataatgttatagaaactattgtttttgtttttaacatataaatcaattgataatagttgaatataacatgtatgtctatcttacaataaaaaaataagaaaaatggatcaaaaaaattaacgggtggcgggctaggattttgaagaggtcgatttttcaaggaagaatataagattaactttgtcatttatccttcattggaaaaatataacttagggggttcgaaccttcaaagccataccttcaactcttaccactagactagagtaatattagaatcagtattacacaattacaatttaattacatt

SEQ ID NO: 25361 - DNA, 1365 bp, Arabidopsis thaliana landsberg
taaaaagtgagacgtagcaaattatattcatttaaaattaatgttcgttttttgcgaataaagtaataccaacaggcaggctttccaccaaatctaaccttgtccagttggttgtgtactggtttaggcctctacacttcaggacaagagttcgactcgtatttggtaccaagtcgtgccatctctttatctctctctctttcgccttcacaatccaatatccatgtcgatgttgttgtattgaacttaaagagaggtaataaaaattaccttttttttgaataagatcaaaattttatattttttaactgtaatcacaatttcttcctatagctttagttttcaactttgctcagccattttgggcaggcctaaatttacaccaagtagattaagaccaaatgagagtatataacgtaacacaacaatggaattggttccgcatagtgcatcaaatatcaaaagcatacaacttcaaaaaataatacacgaaatataaaacaagcctgggagagggagagggagagagattcatcattataaattgtaatacatgatttaaagttaacgaaccaaactaatacctaacatacaatattatcaccaaaaatcaaacaaacactcacaatttctctcaacgggcttcgttttgttacaagggatgataagggacgtagcccaataagcccgtgacgttagccactacttcgttgcattttgacaaaaggttgagcatctggtgagagatgtccccagcgctaaccgctgggctcgggccacggaagtttcttgaaggtggcattggtggttcgacgtggtctactggtttaatgggaagttgttgtggttttgtgtattgtggagggagaggaagaattggaggcaatgtagaaggaggaagctgttgatgatgaacaacgttttgaaacttcttactaacaaattccattggaacagatgatgatgatgaagaaggcccactgtttctattcaaggtacattgggacctgtggtggtttgttgttcgctttactcgagttctctttaccacctaacatgaatttgactcttaccgctgcgcggttaccgcttacattgatgctactactgctcgggtcatccactgggttcttgaaacaggatttgaggttgacgtttggtggctgcaatgttggttggcgaagcggaggtgcttggcccaaccactgcctctgcggttcatcatcttccttggtattttctggcccacgaggctgccctgtaggagcatccacatcactgcagaaagggcatttacattcacgctaccaaatacagtgatgcgtcctgttgcatatcgaaaagcacaccgggcatcggctttgc

SEQ ID NO: 25362 - DNA, 1511 bp, Arabidopsis thaliana landsberg
  unsure (1)..(1511): unsure at all n locations
gtagaagaagtgacacaaaactagtagtccggtttggctgggtcatctttaaaataaagaccaactttattgataatacaaattggggttgttaagtattgggatcctagtccatgacattctttgattattctaaaaatagtggaaaccatttgatgggaagtaaattatattgagattggatcggatatagaaacataaagtagcaaaacagaagaaaaatctccctttctcaatgttttggccacttgaaccctaagggaaagactgttaacttcctttcgaccttgttattcttcgtcagctactctttgtacgtaagacataatctagctagttctaagagagagacccctttttctaatgatcgctagcatcatatgattttagtttgtacatgtaaaagtaaaagaaacaaaaacaaaaaacaaaaaaaccaataaattagtcaatgttataagaattgtgatagcataagtaagtgagagagcttttctagtatagagcaaagaggatggaagcaacggaaataaaagtttggtcatgaagatcccaaagaatctctccacggctttggctacacaactctctctttcttttttatcggaatattaaacggttagagattatatttgtttttgacaaaaaaaaaagagattatatttgttagtagtttagcagaaaacaaaggaattgatcatccacattacagtcaaaggttatgctgcttattgaatctttctccacgggcaatattaaacaaaggaattgataatccacatccactttgacatctttgtatcatcctccttatacttggtttgattggaatgaatgaagacaagtctttgttcaaaaaaaaaaaaaaaaaaagaacatccctcattagtaagcctatcggccaaaacaaagaaaacattcagaacgaaatagagatcaataagctattttttcataggttcaaagagcgttaaaagaaatgtcaaaaagtccaaatatgaacacanccatgagataaacgaatatcactgcaaaaactttcaactaatcaccttagaatgttactttgattcagaatctaaattaatgatatgagatgtaattctttacaaatagatgttagtttctaaatttggttttcatttaatatgtaactgtagacgagtgtcaagcatttttatacgaaatataaataacatctaaaaagtagtcaaaatttttagggtggtgcaatggttgaaagatttgatcatattgttgaggcaaaagagttggagtcctccaaccgtatttaaccatgattttaccctgaatctctaaatgacaagaatagataatgttatatatcaaaaaaaaaaaaaaaaaacatagtgctccacatattctagtgaattatttttttggcagacacattctagcgagattagtctagaatgttttataagtaaacgacaaatttcaattaaatatatatttcattagacaaataaagaataaaaggggcatatgga

SEQ ID NO: 25363 - DNA, 1049 bp, Arabidopsis thaliana landsberg
agtatgtttaataaataattaaatcaacgtagagatatgtcatatgaagatggcttgtataattagtctgtgtacgaggcataggatctctaatttctgttttctttagttcagtttaattatgtgttatctatccaatcaatttttttttctaaactgtttggaccaatgtacgtacgtaccatcctttttgattttttttgtaaactaaattttcgaattagcaggttcttaataattgaacgaagaaaataaagaatagaggtagacacctgtagtattttcttggtcagaccaataatttataattcaacgtcaaagaagaagaaaaatataaaccattatttcattatgacttacgtataccaaaatacacaaattaaatgtataattgtgaggcattttatatgcgccacagcataaaataaaaagaatattaatatttctaaagaaaattgtaaagaattatgacccacttgtgatatatatatatagatatttatagattgagagattaaaacattgatggctagctatagagtctatggcagggtcatgatcacctatcttctgatctctgaagagataccaatctgattttttctcttcctaggtttaattttattttaccattttataattctttatttttgcctgtagtacaatttacagacccatactaaaagaaaaattaaattttgtcaaagtacaaaacaaagagagaggtgaagccacacaatctcttttcttctctctctctctgttatatctcttctgtttaattcttttattcttcttcgtctatcttctcctataatctcttctctctccctcttcacctaaagaataagaagaaaaataattcacatctttatgcaaactactttcttgtagggttttaggagctatctctattgtcttggttctgatacaaagttttgtaattttcatggtatgagaagatttgcctttctattttgtttattggttctttttaactttttcttggagatgggttcttgtagatcttaatgaaacttctgtttttg

SEQ ID NO: 25364 - DNA, 1164 bp, Arabidopsis thaliana landsberg
  unsure (1)..(1164): unsure at all n locations
agaaaaacaaatggtaataattaggaaccgttagattagattcatatcggacggtaaaggctgtgataccatcaccgacttacatgagaacgaaacactggaaaactcaattccccaatttctccaatctgagaaaatagggtttccgatttggatccttaattcagacacctgactcgtcttctcattctacccccaattcaatattcggcgccaatatgccgcaaagacactcgaagaacaacaatgatcttgcgtatttcacttacgacgagaagaagaagttaggttatggaactcagagagagagattggggagagactcgatcaaaccctttgatgcttgttctctctgcttnnnnnnnnnnnnnnnnnnnnnnnnnnnnnnnaagggtcatgtcttttgcagagagtgtatacttgaatgtttccttgctcagaagaaagatatccaaaggtataaactttttggagttttctttcaaaagtttggaactttaagttcctttgttatgtatttatgaaacactttggatttgtgattgaagtttctagctttagtatctatataggattgttgaattcctcatgaatctggtgtgaattggatgattgaggttcttagatcaagtcatggattagatcaagtctctttagcatcactctgataacaaagatctgatatttaatgcttgaatagtgtttgtttaaaggagtactggttttgttactactagtcccacagtttttgagaaggagaagctggtaactttacttgagttttggcatgaaagcttggataaacgtatggagtgataactaaagtaatgttagagttgattttgatgcttctgttttgggtttaatgagtacgggtctcagggttagcctatggttgcatatgattgtttgagtttgtatataaataaccaccggtgtagaaactgtgggagctgactctcctcacttgttaggacctgttgggaattttaaaattacatattttaaaaaagattttgtgtctgatttatctttgctctgtatatttaagatactgatatgtagtgctcccatgtctatagtaggcttgccccacattcgtctcaaaagaagcaagataagaatgaagaagaagagaggctaatgttacaaaaggcgagagag

SEQ ID NO: 25365 - DNA, 1099 bp, Arabidopsis thaliana landsberg
cggttctgagagaaaaagagcaataaatgcagcgggaattcctgcacttcgtcttaacacatcgtccactgtctgtccttttgccacagttctttccattagttgctccatccaggattctgtcaacttagtaagtctatgaaaagaaaaaacaaacacaatatgtcagtgaatagaaaaacaagttacaaggacacacaagaagcttatagttaaaagcgtacctcggatcgttcgaacatagtaaacggtggcacaaagctgtaaatccagctcttgtcttatctattgcaccattgtgcttcatttttaaaagtacttccaagaagtggtctccaatcttttcaagttgcttcaggtcaagcagtgattcagaatttcctatcactaaatcattggggactgaagaagctgtatcaccattttctaaaggtctaaggctgctggtaggcaatggaatctttcttataatggttcccaaaagaagactcacctgaagaaagaaaacagcttctaaatgaagtttctcaaaaaatttagaaatgccgtattctgcatttgagggatgaaaaagagcagctacttgagacaagtattaagaaaaatgaaaacgcaaaacaagtgatgctaaagtaaggacaattatcagcaagatgacagaatcaatacctctttcatagcgagccagcaaccaaccataacaacctgttctgattgtactgtttcatggacatgttttggatatgtactcgtgtgttcctctgagagaacagcggcagaatcatcttgaacatttgaaaagaaactatcatcatctattatgtcatccatattcttaggcaaagacaaagcatctgcagaaaccacccaaagtgctaatgtagttattctcgtcaccagtttcagaagctttttcagttcttttctcatccttgatatacttaacactgcattagagttccagcccaatttctcaaaaggataacgcaaagcttataataccccatgaacaaaactgttttttgatgctttagagagatcacgctcttccttcgtcacagaagcatcaagccactgaataagtgatttgatatactca

SEQ ID NO: 25366 - DNA, 943 bp, Arabidopsis thaliana landsberg
  unsure (1)..(943): unsure at all n locations
tcgtattgtcgttgataattctaaaccaaatctgtaagaagcagagccatgattctcacacaaaaacattattggtggatatcttgtctttatctgttgaatctgcgacaagtgctagagatttgctcctggcccgagttgtattgttccagtctgtcatgaggtattctttcgagcttgacaaagatgcaaagcttgcaatcaccacaaagctgcaatggcttctcgacatattagcagacaaagaggtttactcttcagttctttcctctcagctaccaatggcagatggttctgggaagatagtaatctgggaatcaatgtattcagctctgcttctgtctctcaaaacccttatgatcatactctcttcaactcctgcctgggaagagcttgaaacattcctacttcagaatctcttgcatcctcacttcttgtgttggcagatagtcatggaactctggtgcttctgggttcgtcatgccactgacgatttggtggtcgatatgattaatcaactttgtacattcattatgtcaannnnnnnnnnnnnnnnnnnnnnnnnnnnnnnnnnnnnnnnnnnnagaactacaaagtccatctgctttcttcttacccatagccccaaatctttaacagttcaagtttacaaacatatttctactgagagcagatctgaccatgcacctgatgtatatctagcattgctgttagacgggtttccactgaattttcttccagacagaataaaaaacgacgcatagagacagatatttgcagatttcttcaacttcatcgagaaattcgatgagaaaccgtcaaattcctccagatacactctgcttggagctccagttttcacagtatctgcttgccttcggatactgtaagtaatgataatatatctattcttgagacttctctggggatttattacacgaga

SEQ ID NO: 25367 - DNA, 2232 bp, Arabidopsis thaliana landsberg
  unsure (1)..(2232): unsure at all n locations
aaaaactcaatgttcaaatctccaggacaatatataccctctttgagcacatcaacgttgatttcagattttaaaagtgaatcctctgcacatggcttaatacaagtcgatttcaagcgacctctcttgctgatcttcatagtagaacacgccgtaacccttttaccatcaatcttaactgatctagtttggactttgcacacattcagataatacaacatggcttgaccatagtcatcagccccaagtttgcccataaaagcaaccttaccacccaagcttgcaagagcaatagcaacacctcctgcacatcctccaggagcccggatatacttctctggagcccactttgcatctctcatccgttcgtgtagttcataatctaatagcctgtttgctggccttcccgaaggcacaaaagcatgttgtgcagatccaaagcaacacacgagaggaggccatccataagtgtgactaatatcttcaccttcatgtttactcagatcaatctcttcttcttcactctctgtatcagtgctttcaacagccaatgcttcctcgacatcactaacctcagcatccataatagtagctaaatcatcctccacatctttatctttcttaacagtcctctttcgtctcactttcttctcggtttttacttcctccacatcagaagaagctgctgcagctgtatatatgtcgaattcaaattaagtactcgtgaatcatcaagtgagaaccatcagctcagaaatggtaaaagtcattacctttctttctagttcttgtcttttttggtttcaaagctgagacaatgctttccttgtctaaaacatcatcattatcaaccaaaaattcagaaatttcttctaatggttcatccttaaccacaaccttcttcttcgttgttctcttaacacttttagatggtttctttcccacaagccgcaccgtttccatcattaccttcttcttcaagaggtgctgactctgataactttctcctaccagcagccatagaaaagctttgtttcccattccatctttcacctctaaacttcacaaaaccatgcgactggagcagacaaggaacatctgcattgcatctgccaaaatcaaagcacagctatgagaaaaccattacatcaaaatgtgaaattttcaaacagaaagacaaatatagccctcaattcaaatcattgttactccattcttctgtagaaagatatgatgagctaaacttaaagttcgcacatttttgggcagtaaactggttctacgccaaatccatagaaacccatatactaaaatttcctaaggtttttaaacaagatagagagagaagcaaagggacctggggaatgataagaattgggtgaaggagagagacgccatgaacatcaaataagagctcttttccaaacgaaattgtagtaaaactaagctccgaaacccataaagtcgaaagaagcgtaaacccagaaatgaacaaaggagagcaatatgtttatgagttttgagggagattggggtttaagctctgaaaccgcaagaggagctagctgggagaggatgaggaggaggtttagcgctttaacgaaacggcaagcattctatgatcaaaatactaaaacgtcaagatgtccctattctgtctactataatttatttacggctcatttttcttctttaaagctagtgaatttagtattgtctatatgacattcttttaatgtaggtagaaatatttgctatgtaaagtctttcgtgaaatcgtttgctattaaaaaactacttcaaggaaaatattttgttgtgaagttaattggctcatcatcacaaagctacaaaaaacttacgatttactgaaatcataattactatgatgatttacgagtaaatgatttgattggcatagaaataatgcctaaagatggtgtgatgaaaaacttaatacannnnnnnnnnnnnnnnnnnnnnnnnnnnnnnnnnnnnnnnnnnnntactgtatatttatttatttttcgtcaaaaaatatagactgtatatatgttatggtaaaacggctattttttgctatatagtgaaaataatatcgtctggagttataataattagaattttgtatggttaattaatttctattggtaatgtaaccatcagtgccttgagtgcaatgaaagaaaattgaagtagtcagaacaaatctatgaaaattttgatatgttt

SEQ ID NO: 25368 - DNA, 1933 bp, Arabidopsis thaliana landsberg
atgatatagtattgatatagctcgaaatatcaaatttataaaagaaaatttgagatttttcgcctttttactcggaggttgaagtgaatttttacctgatatttagaaaatttactatattgaaattaattacatatttatgctaattatccgttgttctatattttttcaacatgtttgctcggcttaaattttatttattttggtgcagtactcgttggattttgtatacttgagtgtggctatactattttcatcatggttaggtaaataaaaatacattaaaatcaagtaatctctctgagatatataattcttttctaattagaaaacaaatttaaaaaatggaaacagaggttgcatgttggatgcatacgggagagagacaagcagcgaagattagaaaagcttatttgcggtcaatgttaagccaagacataagcttattcgacaccgagatttccaccggagaagtcatctccgccatcacctccgagatccttgttgtccaagacgctatctccgagaaggtacgctataccaagatcaaaccggtattggtcttaaattttggatgttggatttttaattttcctatagcaagcatgcatcttgtctagtcctaaattttttaaatccatgcataagggatatatcatatattggctcagtccaataaaagtaaaagattttggcatgcataatttaaatcaggttaatcggtatttttgtcgcaggtagggaatttcttgcactacataagccggttcatagccggttttgcaattggattcactagtgtatggcaaataagtcttgtcactctatccatagtccccttaatcgctctagctggcggcatctatgcgttcgtcgccatcggacttattgctcgtgtccggaaatcatacatcaaggctggtgagattgcagaagaggttggttacttcttggacaaggaaacttataagtgtatagttttcagttatttttcatattagtgtctagtgctggtgtgtatcatatatctatgtgattattcaggtgatcgggaatgtgaggaccgtacaagcgtttacgggagaagaaaaggcggtgagttcgtaccaaggagctttgaggaacacttacaattacgggagaaaagccggtttagccaaaggactagggcttggttcgttgcattttgtcctgtttttgtcttgggctttgctcatttggttcacaagcatcgttgttcacaagggaatcgctaatggtggcgaatctttcacgaccatgctcaatgttgtcatcgctggcttgtaatacataacttcttgattctttgctctgcacattacccttatttttttcgaattagtcataataaagctctgtttttgtataggtctcttggtcaggcggctcctgacatttccacattcatgcgagccagtgctgctgcgtatctcgatttttcagatgattgaacggaacacggaggataaaacaggtcgtaaactcgggaatgtaaacggagacattctattcaaagacgtgactttcacatacccctctcgccctgatgtggtgatctttgacaagctaaacttcgtgatccctgcggggaaagtcgtggctcttgttggaggaagcgggtctgggaaaagcaccatgatatccttaattgaacgattctacgagcctaccgatggagcggtgatgctggatgggaacgatatcagatacttggatcttaagtggttaagaggtcatattggtttggttaatcaagagcctgtcctgtttgcaaccacgattcgcgagaacattatgtatggtaaaagacgatgccacctctgaggaaattaccaatgctgcaaagctctcggaagccatctcattcatcaacaacctaccggaaggattcgaaactcaggtatgtcgaaca

SEQ ID NO: 25369 - DNA, 1508 bp, Arabidopsis thaliana landsberg
gttggtcgctttccgttcaagttcgtaatgggttcaagtggctcgaacagagctttccttttctcggacagaagaggagttgtggtcattggttccccaactttctcggtatccattgctgttatctcgttcttctctggtgtgacctccgtaacagcctccggtgctttgtctaggttcaacaatgctgcgatcaaaatagttaatgctttgagttccaaaatcacatgcaaacggatcagagcaaaacgaaagttacaaaagacagagagaagaagactaaagctccatgtctagatctcgaggaaatagttcacatagagctaaaacaattgatgatttcagtctgcttaaataaattccaaatctttcagaccagaaatagaaagggtagctaataaaggtctagaatctttaatggtctgagaaaacaagaaacagtggaaaaaacctgatctttttcttgatttcacgcgatcttggtggtagagacagggaaaaaacctccgacaaacccatcactcactgtcttcatgtctttctcaaatccaacccctttctccatctaaatctgaaaatttcccagaagatacacgaattttgagaaagagaagaagaagaagaagataacgtacaaggaatcgaattcccaagagaagagggctctctgttagatttcagttgaacggtaatgatttggcgttttggttacgactaccaaatgcttttgctttgtgcttcagctacagaggcttgtgaaaatgttttttattcttacaaaaagaaaaaaatcagaagtcgaaaatagttgtcttatcgtattccctctttattcctttgctaaattttcatgcaacctttaaccttctttatttttttatgaattcatctttaatccttttctaaactgttttttttttccttttgagaaataactcattaaacgatttattgactatgatcatacgtctcttccacaagtattcttccggcacaagtcttgccttaattcaatagaatataagaattattataaatcatctgtctacctcttttgttttggtttaatatcataatcaatgaccgttgagacttattcaaagtaatgtgatttgatttgttcagaatactaattttgaactcaaactgataagacctttatttttgtttaatcatttcttgtgttagtcaagaccttttgtatttacttgaaataaattttccatgcagccaagaaaaatatattaagctacatattattttaccaaatactaactgaatagtaaaaataatctttggggggcagcgttaggtgtctttaggacgagaattaaattactgaatacggagtagtaaaaataaattttggaacttgctgagagcatatgccacgaaacagagcatctttcttgaagttagtaattcttggaatgtgcgtcggtcttcttacaatttgcaaatattcgaatttgataaatattatcccaacccattgaaataagatgtag

SEQ ID NO: 25370 - DNA, 748 bp, Arabidopsis thaliana landsberg
agtgttgtaccggcggttgaaaatgattttgttgtttattattgattctaaacgtacttttgggcagatactattgattaaactgattttgcgtttttatttttacaatgtcatgtgttttgatgtcttcttacttactctgtctccgactaaccaaaagctgtaaacaagaccggctcttcaacaggaaacataaccaccaagtaggttgagtctcatttaagaacaagccatatgccactccttgcactgcaaaaagtcttttcctttttgcttcttctctgcaaaaaaattgttttggagtgcaagtaccaccaaaaacttcgtactagaccatcatcagctactggaatcaaagcaacgatagagtttgagtaaccaaatctgtttgggagtaccagaggttaaatatgatcattatgatgctctctgcggaagatgcaaccagtcccaacgtccattggaccttgaagtctatccaaagctctcatactaacatgaaagaagacagtcttgtggctagtatacttttgtggagcggatcataaaatccatctatgattcttcgaagccctttatataagtagctctttcgtacgtgcatattgtaagcatcagcagacaacccaagcaatgagctgattcttcacctctcccgagatgccaaatacagagtcaaccctcaacatgtggttaacagtatatttgaaactggttgttatggacagagcaaccaacctacgatgga

SEQ ID NO: 25371 - DNA, 1493 bp, Arabidopsis thaliana landsberg
ccagcttgcaggtccgcacgcgcccgacctttttcgtgtcgacgagaccagcgtcttccagcacgctgacatgcttcttcatgcccgtcagggtcatgtggaagcgatcggccagatcggtgatcgaggcgtccgaccggccaagctgctccagcaccccgcgccgggtgggatccgaaagcgcggcgaatgaggcatcaagaggggctatatactgaaccatttggttcagtatatagcccaaggctatgggacaagcaagggggtgtttgatgtcgtgcaaaatcccctctccctgctggcggggagagggcggttcgcttgcgaaccgggtgaggggctctagcattgggttttttaactagaatctgtctgctgttgtaggagttatcagtcacatataccaaatcattgacctgaggtggccagatttcttcatatttggaagcaataagcaaggcactgattcccactagctgtaactctcttttagggacagctttcacagagaggaatcgatcaatgatgttgacggtgaggtacagagtttcaaggttgagctcaaacttgatgtgaacttctagtaaccaatcaatcaagatcgctctcatcttctcattcatttcagtctgaatgtgcatgtacatcttaggctgactctccttctcaacttctttatagaacgagtacatatcatcaacatactccaccgcagccaaatggttatctttgtcagattcatcaatatcgataatctttggtttgttgactataccacaagcagctttgctccgagcactaagtacagacgagtacgtcactttcttattcttaggtgacatcgctacttcctttttagtcacctccttcttcgtctcgatcacttcaacaggcttcgtctgttgcttaaccactagattcttcttctgaaccgccctttgagcttctgggtttcttgcagcaagaggttgtctctttggaccaagagctggaaccttgttgtctccattgattggctttctttcgagttgggcattcgctaataactgggcacggaaacttcgagtaatgggtcgattaatcggaggttgagcctttcctccttgaactccgggaacagaaacaagatttccgatgtcaccgagggcacgccgactcttcacagcaccgtttttgttctgaatcttcaaaccatcaacgagaggagcacctgtttcacagaattcaaaagaaacccatcaagatctcatctttatttctaaagattcacaatttcaattctaaagattaacaaaatcgatcccgttacgagatacttcatattcaaatcggatctgtatcgtcgacgagtaatcataacaatacccaaatcggaccgatttagggcaaacgagttatattcaagttaaacgaatcaaaccaaacccggattttagatcggcgtaatccaaaaagcaaagatttcacacgcggatcgtacatatatcaaacag

SEQ ID NO: 25372 - DNA, 1115 bp, Arabidopsis thaliana landsberg
  unsure (1)..(1115): unsure at all n locations
ctatatacaatccaaatgtaaacaaagtttgaacacaaccattgatattcctttcactcatagttaaccaacaataagtaattaagttaaaccttcttaacagcgagtttctgaagcttaacaacatcttcagctaatcgcgcttttgtccttcgaacctcagcattcatagccaccgcggcagctctattcttctccgttgatgccaactccgctttctacatagtttaatacaaaatttaaacttaataacgttaagagtcactgaaaatgaagcaatattatttagattctattggttacaacactaaatatatcttctaagatacggtcgataaaatctaaagagcaaaaaatatttcatattctatcaattctcaaatcttttttttatatctcaaaatctttcttaacgagaaaaaaataaaaaaaaatcatcaacagaaatgattaaagattttatatatttcaaagtccagaacagaaaaacccaaaatatattaaaatattcctcacatagcgatcaaatgagaaaatcaagaacaatctagggtttcgttttcttggctttaatgaacgatctagttttttataaaaagagagagtgagagagaaggggacaaacacgaagaacagcttcgatgtcggaatcaatggaggtgaagaggcgagagaaggcatcgtcgccggaagcgccgatctcacggtgtttgtcgatgtcgtacttgtcgtactttttgcaaatctcgtcgactctgaagatgatatcnnnnnnnnnnnnnnnnnnnnnnnnnnnnnnnntcttcttgtggaatgtctccgatttggttctctgtttcttcgttcttctccgttgtccatttttggagtctctcttcagaaacgagacgcttagcgtaaacggcgggattagaagtattaatagttagaatttttttctttttttttatatagcttttcaaaccagttttagactacaatatcttaaagcataaaatatttaataaattgattttctctaactaacanaaagattttagtgggccttgtaacttgcatatgaatatatttgaataaaactcagttcactttgtgaaaaaaaaaaacgattctgc

SEQ ID NO: 25373 - DNA, 769 bp, Arabidopsis thaliana landsberg
agagagacattaaactaacctttaattccaccgatgaacctttgaaccactccaagagcaaccacaccttcagatccgacaaagaggaagccaaatacggcggaataaaatggatgttggctcaaacaaaccatcacccgcaattagccatttaggatccggccaaagatccactgctaacccctttgcaaattggcgaacccaccaatccatggctcaacttccgccgctcgccggagctacaattcacaaaccaccgaaccgtgagaaacaaaatccaatccactggagtccataaaccagcagagcacatgaaccgtttctctggctgtcgtgaaggagagctgccgtctagcatcgagccatggacctaacacgcctcacaccaccggagaagagagacgctcaccaccacttaactctacagcccatcaactatctttgaagatcttcaatcggaaaaaaaaagcaaaaaaagtagatttaacatctagttttcaagagagagaagagaggttttttttcgggaacgattggcccttttcaagtggaatacgattttcatagctatgtcaagtgtgggtggttagttctatctcttcgtaaatttttcttcggctttgttttgctcatcgtttgcttccgtggcaaggtggtcatactttcatttccatgtttttattgccgtcttctcattgcttggtgtacaataaaagttcaagctgcgagcatgcgtttcagcttctggcttgaaaccgtgaatttttat

SEQ ID NO: 25374 - DNA, 1737 bp, Arabidopsis thaliana landsberg
  unsure (1)..(1737): unsure at all n locations
tcgactctagaggatccccctgcgatttccctcttcattccgtaccaccaaaatttcttagatcctgatacatcttctcacttccagggtgtatcgaataagctgtctcatgagcttccttgaggatcaattcctgaatggactggacattgggaacacacaagcggtctttgaaccatatcacaccttctgcatctccccgaaagtctttacctctgccttctagaatcagttgccggacttcattgatcttctcatcattcttctgtgcttctttgatttctcgctccaaggtgggctttaactcaaatgttactcctcgcatattgttcagaaatccgagactcagcctgtcaaactctttggccaactcataaggcatcggacaagtgaccatcatattgacttgactcttcgtgctcaaagcatctgtaactacgttcgctttgcctgggtggtaatgaatctccaactcataatctttgatcaactttaaccatcttcgttgcctcatgttcaactctgactgagtgaatatgtactttagactcttgtggtctgtgtaaacatcacatttctgtccatacagatagtgcctccatgtcttcagtgcgtgaaccactgctgccaactctagatcatggattgggtaattcttctcatgaaccttcagctgtcgggacgagtaagccacaactcttccctcttgcatcaacacacatcccaaacctgtgtaacaagcatcacaatacaccgagaagggcttgtgcacatcaggcaagactaggacaggcgctgtagtcaacttctctttcagcgcttcaaaggcctcttggnnnnnnnnnnnnnnnnnnnnnnnnaccttgttgcctagcaacgctgtcattggtttcgcaatcttcgaaaacccttcaatgaatcgccgataatatccggccattccaatgaagctcttgattcctcgggcatctgttggcgctttccagttcaaaatatctgccactttcttcggatccacagccaatccttttttgttgattatgtgacccaagaacaggacttcactgatccagaattcacacttgctcaactttgcatacaactggtgctctcgcaatctctgcaataccatcctcaaatgacttgcatgctcttcttcgctttgagaataaatcagaatgtcatcgatgaataccaccacaaacttatcgagatagtctatgaatacattgttcatcaagttcatgaagaaggctggcgcattggtcaaaccaaaagacatcacagtgaactcatacaacccatacttggaaatgaatgccgtcttcggaatgtccgaaggtcggatcctgagctgatgataacctgacctcaggtcaatcttggagaacacactggctcctctcaactggtcgaacagatcttctattctgggcaaaggatacttgttcttgatcgtgacctcattcaaagctcggtaatcgatgcacatcctcttggtgtcatctttcttttccacgaacaagacaggagtggcccaaggcgaggtgcttggccggatgtaacctttctctgacagctcatcaatttgcttcttaagttcaaccaactctggtccagatattctgtaagctctcttaaagataggggcggttccaggaagaagctctatggcanactcaactttccgctctggtggcatacccggtaggtcctttggaacacatctgggaactc

SEQ ID NO: 25375 - DNA, 1545 bp, Arabidopsis thaliana landsberg
gacgaatgaacgaagttggtcgtcattggctgcctgttattgcttttaggccatagacgagacgccctgttctggggcaggtacagcaggtgggtactcgacctcatcagctctatggcggccagcaccgctcggaggatactcgacctctcttcttctactgcggccaacaccgcggtcgagtgatctcctcgagcgaattaggcatgatctcctgctagatcgagtgagtgtaaccttccttcttctcttgtgctcccaggactcgaatgaggactgcctagccgggacatatgagactctttgctcactaagctcaggcctgtactcaggctcatcaaatctcctcgatggcatctctagaggaggctgtccctgcggaatagctgtagtagaagaggaacagctcagcttatctgtcagaaacttgatagtcttaaaacacttggcgagcaacttgtcttgcttcttgcaccacttttgcagcttactgttgttcctatgagcttcactcaagctcttgctctccctcgctggaggcacatgttcaccaaagtgatacatgctagtgtcgaactccactgctctgtcttcatccatcccatcctcagcagcctcttctagaagatcatcttcatccaatggaggagcgttctcatagtagaggcgtccaacctcaggccgaaaatcaatgttatctccctctattatccgtgtaacctcagggctagggagaaggatgctagctctcttatctgtagagtgctcaaacctgaacctgtgcaagtcgtcaaccattgcaaactccaggaattcatagtgacgtaggtgctcgatatccattgctcgcggctcgagtccatcaaaagtgattgagactccacaagcgatcagaatcggtgtcacaacaccacctatgcacagagcgcctcgtgctctcttgtggttattgcggacagcccagctcttatatccacacagatggatcagaagaagtatcgagagaggtgtgtcattgatttcaccttggagagacatgccattcttagtttggcgcagagttcccttgagagccattgcgatcatctccatatcagagttagcaacagtccctgtgatctctcgagagtagaatacattgactatagaacgtaggaagtacctgatgataggactgtgtatctggtcgcttttggatctagaagaattcagcggtacagagctgccaatggtgatccataattcctttaacttttctctgtcaaacttgggcttagttcccattccattagggaaaccaaacaatccttccaaacgcttgattgacatcatgcaatcctgaccatacacatagaatctcaggaatcctaatccatcactttccaaatcatcagaggtcataccttggtaaagctcaacttgcagtgtggagaggaactgaatcgtttattcctcgtaggccacatttgggtaagccatcagagtgtccaggtgacaactccggtacatgtgctgaacatcatttgtaatccaacgtatgccaac

SEQ ID NO: 25376 - DNA, 874 bp, Arabidopsis thaliana landsberg
gtaatttacttgctaactaatgtaatcattataatcatggcatacatttccacgtacgccatagtacttgatcactttagaagaattaggctacacaaagtgagagtatataatcccgaattataatgtattattttccatttctttcagtgcatgaatttccaagtacgatatagtccataaactctttataacaagtctaaaacttgaaacacaaaaatcttctttcttgagagaaagctctacaatttcttcttcatcatcaacatcaaaatactcgttcttctccattggcctaaacatataaaacatcaaacaataaaacgaaagagttgcaatttcctcagctgcattgctcacccactgatacgtaaaatgtgctttcatcttcatgacaaccacaacgatccttgtgaagaacaaatatccaataaccaaaacgtaaaatttcctaaaaactggtaacttggctaagttctttaccgctttcccatcggttttcgatgtctctcttagacaacacatggaccaaaccatagcgaatacaatcgcgcaacagcaagttatatcagctaggaagaagatctggttccaaatcacccaatcttgggtgtacggtccagtctctccaatcacaatggaagcaatgttagctaaaacctgaagcggaacagcaatcatcaacaatttcttctccttaacatgtagcttcggtttcaagaaagaccaaccgtttccgattagaacaatcaccatgaagagcaaaacaacactaatgaattggaaaatgtagaatacaatgttccagccatgagctgtgcctgtgactttacgtagtgtttatacacagcagcacaattagagtcagagattt

SEQ ID NO: 25377 - DNA, 4566 bp, Arabidopsis thaliana landsberg
aaagcttccgaaccatttcgaatttatacctcttcaatacatggctgtatttatgtaaggaccaagaataatataccatcttgattactttaggagaagaaaaaatattttgaatctctaacaattttttcattttaactgttttgatcaaaatggtctttcaccttcgtaattcccgcgtggatcatattcacacaccacaagatagccacgaccgttattgcatttcacacgtgcgcatccaacggctgtggtctctctccacaccatctgcgtgtaatggccgcacatctttcccggtgcgcacgtgtttgttttcacgtcgtagttaaacctttcctcaaaccatctcgtcaccactttctccggcgaccacgtcttcttacgccggtgccagaaaatgttctcaccgtaaggcccacctgaatgtatcatactgcaatcggacttacgttgtttagcccatttatcagcgaatcgggccaggtctctgtcccatccgagcgttggcacgcctgaagaaacacgtgcatcgttgtgcgcttgtagaaattctttcgacagttttgctcttctcgctctgtttaccaaacgcgccgccgtgttcaccgcgtcggggatggaggttccgaggacggagggatgaccggaaaagagaaggaagagaagaagaagacatgatgatggatgagacaacgttacagacatctccacgtctctgtataattttgtctctcatcatgattcctctgtttctaagggagttttttttgttacttttgttcagttagagatttttccattttctgacattttaacaaattttcctgattctgttgtttcatatcaaacaattcttattggtgatgatgagaaaactaccgtatatttttagattaaaaaaacgaaattattaaggttgttatacttttcacaacccaacaaaagataaaaagaaaaacaattccgtcaacagcaggattcgaacctgcgcgggcaaagcccaattgatttcgagtcaatctccttaaccactcggacatattgacttttgctcattgtttctactatattatatatatactcagatattatcagtaccaaaataaacaaacaaaaataaaagcttttggagatagaagaagagtctgggagagctcttttactcatagcagttaagaagacatggaacagaaagaaaaagacaatcccgaaagtcgttttattttcttaaatatttaaaacaagatagcagacgaagtattaagcaacaaaatccattacacttatttaaaatcattataagccaaaatagacggcctataagcaatcaccagtcttcctactcttcattggtcttcatcttccgcaggactaaggtcgtctcttgggctgtatccgtctctaggacaacggtcctctctgggactaggactctggtcttcataatttgtttttgttcagattaataaggaaaagaatcaagaaaacaagacttattcgaatcttttacataattatttgaatatatatatattattttttctagacaaataattttcccggggaaaataaagtaaaggaatgagaaaaaccttatccaaacttttaaaatgcccgtggcgatctctctcccaacctcatctacttctcatttcttccctcgccgccgcggccatgcaaatcaccgatatcaacgcttttccggagctcaatcttccacggaagatccgtacattcggaagaatcaaactggcgtcatcatcatcggcgctggactcgctggtttagccgccgcaaaccagctcacctccaaacgaatccctttcctactcctcgaagcttccgatggcgtcggcggacgcgtccgtacagatatcgtcgacggcttctttctcgacagaggatttcagattttcatcaccgcgtaccccgaagctaaaaagcttctagattatgaagcactggatctgcagagattctacgccggagctaaggtgttttacggcggtaaatttcacaccgtcgctgatcctctccgacatttttgggattcggtggcatctctcgcgaatccgatcggatccgtcgttgacaaagggcttatcgctttgacgagagctagggttctaatcaagtcagacgaagagatattgactgccgccgatgaagttcccaccattgatctcctccgtaagatcggtttctccgaaacgattcttgatcggttcttccgaccattcttcggcggaattttcttcgacagagacctcgagacgacctcgaagctcttcgatttcgttttccggtgtcttgctctcggagaaaacacacttccagccatgggaatcggagaaatctcgaaccagttggcagcgaagttacccgctaagtccgtcttgttgaacacaagggtcgcttctattgagtatccaaatggatcgggttcggatccacctagcgtgaggctccaagacggcagcgttatgaaggcagagctaggtgtcataatcgccgtcgagcaaccggaagtgaataagcttctcgatgggatcagagacccggttataacaaaaccagctcggagcactatttgtctttacttcacagctgaaccgaaccaaataccggtacaagacccggttctatttctcaacgggtcaaattccggtataatcaacaacatgttcttcgctacaaacgttgctcggacatacgcgccaccgggaaaggctctggtttcggtatcattgatcggattgtttgaggatagaaccgatgatgatttagcagcagaagttcttagagaactctctggttggtttggtgagtctccggttatgtcatggaaacatttgaaaacataccggatccaattcgctcagcctaaccaatgtccacccactgatttggtcaagagtcctcgggtcgggtcgggtctttacttgagcggtgattacatgacttctgctacatttgatggagctttggtctctgggagacgagccgtggaagttttgctacgagaaacgggactaatcaaatagattttttttgttatttaagattctttgtatggcttaattcatgtcttgtatgtagaagtatgtatcctctaagatcatatgttggcaaattaagcattatggttaatgctaatgataatgtctagcaagactatatataaaggctcaatagagatgcaaggtatgactcaaccaataccatactaaaggctcatagagatgcaaggtaattcatgactcgaccaattacatacaataaagatctgtgtgtgctctcttgctgtgattatgggatcgactgctttgtcactatggactggattgaccctgaaaccgaattccaatatttcaagtccagtggaaccaccacaaatttgtctatttcagctgaggaagtagatatcaactctctcctgtttgatccctagaacaaaagagatcatcaacttggtactactaatacaagccatatacacctgaagaagcctcgagtatgaatcaaaaacaatggcaacagaggaaattgaagaataaacacaagttcattggcttatagtcttaatataaaactagggagtcgggtcaaacagcagaggctctgatcctcttcttactagcagattagtcttaggacaaaccagcttttatgatataagagaaaaatacacagttaatcccttttgcaagtaaactacatctgaagtacagaaaatcaaaaatcaaataaaagaagataagaaaaagcaaatgtcctcacagcttatacagtcgatgaaattccttgatctgcttcagagttcaaaatcatcctccttcaaggccagctcggcggcttcttcttcttcttcatctataacgaaatactcattcttctccacaggcctggacatatagaacatcaacaagtaaaacgccagacttgcaatctcctcagctgcattgctcacccaccgatacttataagctgcgattgtcttcagcgcaaacactacaatcctcgtaaagtacaaatacccgatgacaacaatgtagaattgtctaaacagagtcaatttcgccaagttcctagccgctttcccatcggttttcgaagtctctcttagcgaacgtatcgaccacacaatagggaataagatcgcacaacagcaaactatatctacaagcaagaatatctgattccaagtaacccaatcttttataaaaggtccagtctctccaatcacaatggaagcaatgttagcgagaacctgaagtggaacaacaaccatcaacacattcttctctttctcttgtaagaatggcttcaagaaggaccagccagttccaatcaacacattcacagttgagagaagaacaacacgaataaactggaaaatgtagaataaaacatcccagccatgaggagtaccggtgactttcacgtaatgcttatcctcggcggcgcagatcaaattcaaagccttcatttaaagccgagccgccctcagaacatggattctatgtacgacacggatattgacccaacaagcatatccccaga

SEQ ID NO: 25378 - DNA, 902 bp, Arabidopsis thaliana landsberg
ttgttttctcttgtgcttggccgagatatttacaacaaacgtctctgcagaagcattcgatatagaaattagagtaataatccataaccataaatcattttatacaataaacacgttctgataagaagacaaacaaggcggacaaacacccttagaagatggattgaagcaaatatagatcaagtctatattgtgcctacaaaatgagaaatctaagtttcgagtatgatcaagtatcttagctttaggctagagaaaccaatctcttttattctttgcggtgtggtttgatgtatagtatggaccctaaaagggcctacgtctaaactgaagatccagccaaacgtcttcttgatgcatttgaagtcgcgacttgacccaatttgtctgactctttcgagtcatccgtcactattctctctctcactggtgtgtaatgcctcagccacacgcctgtgtacacctgcaacatttaatattccaatgaaccatccatgtttcaaattgatccaaagaaaaatctttctcttattattcttggaaagagattaactatacctgttgtggtctttttttcttggtgtcaggatcatccagtgactctttccaatgtgacaagtatccagccatgcgaggaatcgcgaataagaccgtgaagaactccggtggaaatcccattgccctgttgtaatggtccaaggttgcagatttagatgaagttgacaggaagctatggctactgaacactcttgccatacttttgcactgatatctattcaagctatatagtcgacattctttttcatatttcatgataggccactatctaaaagaatcgagtaggtctggtttatgatacacgatgtcattgggaacactctgaatgaagatctcagcttacc

SEQ ID NO: 25379 - DNA, 1285 bp, Arabidopsis thaliana landsberg
ttgatttttatgaaataaagagaggaaaggaatattgaagaatgaataaaaagacaaaacaggagagaactaaagagtttcaaaacacaaaaccacacagcttattctgtgcccattctgttttgtttgcttcttctgttctcctttgtgtttgtgtttttgttttgttagtatgatgtcagggagggaatttatatacagaaaacgttatataagttatccaaagtttcgttgatataatcaattagttaccttgagggttgattgtgacgaaggagaaggttggagccttggcttcttattagtagacccaccaatctctaagctgttacactgcatcacatatatagataacaaacaaaacaaagatcaattagtcatttaatcaaaaaaattcagagcaaaactcatcctggttgcgtgttgaatttagatccaaaccttaaaataaaatatgttgtcctgatctttttaaatgacgttttagatttcactttttcatagtagttgatgtgtttactaatttatgtgtaaaactagatattatttccgagctttttccgtatattatcaaaatctctgagatgtggaaaaagtgttacctcagaggatcgatccggaggagtgtgtctcccttctgacaagtgaagaccattgtgattgctagagaaatccaacatattattattgttgttgatgttatcgtcgttactattgaggcttgttgtggtagttgttgtaacacaagatttgttaggaggtgagttcggggaagatatgacatagccattgttgttgttaatgttaccctcttgtttgatgtcaacagccaccatggaagcttgttggtggcttaacacttgttcttcccaattctccaatcttatcttcccttgaaaaccatggtgttgttgttcatcatgatgattatgatggttcatcatctccaatctctcttcctctcccatcatcaatccacccctaagttcacaaagaaaatatccaaaatattagattgtttgtttgatacttaaaatacaaacacatacatgtatatacgtatatacgtataacaaaaaggtaattaggactaagtagcaacacacgagaaaacaaagagtgaactagtaagtaaacacaagatcatgtcatgtgcgtatagagaatatttcattttggaatatttatagagggagagagatagagggatagttacaaaagaagttggctaaggctccaagactcaggagggagatcattgctttcaagccaagaagagagatta

SEQ ID NO: 25380 - DNA, 4728 bp, Arabidopsis thaliana landsberg
cttcgaaaactctcaggtatgatagtaagttctttgttttcaacagcaagaagagccttctcagctaaaggatccatgtggacaaaccattgtttgcttacaagtggctcaataacctaacaccagttaaaccatgcatgagaaaattatgaacttcaaacgaactgaaaaattaatgctgggtcagtagaaagatacttctccaccacgctgagatcttggaactcgtaaagtgtgaggctccttcttaacagctaaacctgtctcctcaagatctgcccatagtttctccctcacctcaaacctgtcaaggccactgaaaatacgatgtatgttaaggcgccatggacgttaagatgtaaccaaagggtattccattcagctaaaatataagttttaaacaaaatgttaccaaaacaagccagcgacgtcattaagtgttgcatccttgttcatcacattcagaatggggagacctagctttcttgcaagaaggtaatcgttgtgatcatgcccaggacttatcttcagaacaccagtcccaaaatccttatcaacatactgccatggtacacaaaaaaactgatgagaaatgcctgaagagcagcagaggaaatactatgaggtgactcaggttcttggttctgagtaactagaacttagaagtttcccagcaaaatactgatacttaaagcacgaaaaatggcaaagaaaaacaactgcagcggattccttgttggacttgaaaaagatatttgatcctaagagacatcctatagagtgcataggcactagatcggagttcaccttatcagcaataattggtacatgacaaccatatgtcataggaacaagtgctgtctgaccaacatattttgagttacgatcatactgcccgatgccaaatacatttgacaacattaatcctcaatcgatacccagaagagagcacctatttcaggaaacgactagaagacgatctacattcacatggggtccaaattaatcagcatctactttgtagcaccacatctgcttacattaaattggaccagcaacctgacaaactacctggactacattttcaatttcatttaaattttacataatagaaatataaatgaaaaccacaaaaggaagaagaaaataaaatgtgttacacattatatacttttcctccctaatattaaatttgcttctaagtttttatcaaaaaaaaaaacttgcttctaagtttgttaactgagctctgtgtgtattcaaaaattataaacacgtcaaacagactttgataatgccatctgtcattcccgatgtcctattatcaacgaaaccaaaaaaatatcaccacctacctcaggatgcacggcaagggccacgtcaccaaacaatgtctctggacgagtcgttgctatagtaagaaaatcaggactgtacgaggaaagatcagattagccatttccataaacagaacaaaagtagtcactgatcttccaagaataatttgctagcaaaatttaaggttaactactgccgaagcaactcttacagacccaacgctgtgtttcacaagttttaatgatcatacgacataatctaaagcctccataagatacgtttttcaaacactataatgcttctttgaactctctaatagcagagcataatcaaattgatgtgagaaaaaattatcttttcacataattttgctacatataagggtccataaaatacaaagtataaggaaaggcgaaggtagtactggtagttggacagtaccttccagctacacggtatttaatatggtatagaaacccaggttcctccgaatattctacttcctggtaagaacaaggcagtcacttttagaaagaaaaaaaaagtaatcaaacaacagagtgttagataaaaatacatcacacaccaagtctgaaacagcagtctgtaaatttggggaccagttgaccatgtaagatcctggaaaaacattatgccaaaatcaccaatagtcgtatgagtacagcacagctctacttacagctacgacaacagaaaccaaaatacataaattcataatagcttaccttgatatatcaaccccttgtcatgaagcttcacaaaagcttcgaccacagctcctacaaattcaaggtaaaagagaatcaaggaataaattcaaggtgaaagtacatacaatttgaaattaagagcaacgagaaactttttgaaccacctaacaactgaataatattttacttgccgaagtttttgaattccaaaataccactcaaaatcatataaagtcaactttgagcaccacctatggtctgctttaagaatcaccatctagaagatatggaaactatgaaagatgccttacgactcaattgctcgtcaagagtaaagcgctctctactccaatcacaagaagcacccagtcttttaatctgatttgtgatggttccgccatacctgagaaaaaccacacaaactataattccagccttacccttaacacatcagatacaagtacagtggattttatcttttaatgaaagcattggcctttggaatggttcaggaacatcagattactcaattataagaaatgtacaggaatcatctcctgcttaaaatacttcatagttttccagaagatcaataacttatgactcgttcgaagaatggaaacaccgccagagtatcatacagatacttttgaaatagatattttgaatttattcattgcagtgattagacagcatacttttccttccattcccagactcttttggtaaactcatctctacctaagtccactctcttaatgccttctgacgctagcatcttttccacgaccaactgaaagaaatattgcagcttcagtagaatatttcagaaacattcaccaaacaatgcaaatattatctatacaaattatactctacaagaaaagaactttttgacaaagtaaatgtggtagattggtataggaacaagagcaatggattgtgaagaagaagatgtaagaatcatagtgagcacaaaacaaacacgcaaacactagtagaaataccatgcaaaaaagcttgaaatttgaacgaggaaatgaacctgagtggcaataccagcatgatcagtcccgggaagccaaagtgttggtctcccattcatcctattgtatcgaaccataatatcctgtaaaaaacaaaaaagcgatgagaatagcagaactatagtataacacagttacagcacaaagaaaacatggaattactaaacaatatttcaagccaacttaagaagtgtggaaagcgcctagtatatacgagctaaagctagacgaacaaactaaaaaggttaaacgaaaataggaacataaattagaatacccaaatgactgtgaattattctcaatatggattccacaacctcaagagtgacaaacattgcatggcccatgtgcagagaaccagtaacattaggaggtggcatcggtatcacaaaaggactgcctccttggtcaaaatttggtttgaagtagccttgcgactcccacctaaaaatgcccaaatccaaatgatcatcagcattatcacaagaaatccatgttcccataggttacattgggaagaatgagacactttttatttgcattgtgatatatcttaactcataataattccattaactcacgagtagaatatttaccatttgtatatcttctcctccgaagaaaaatcaaaggtcttggatgtctcgggagaagtaaatacattatttcctgacgcagcagctgaatacaaaagaggaattcgaataaatttttactgtaacagaagagaagttccaacaaaatcgattggaaacagaattcgacactggagaaaagaaatagcgaggaacgtaccagagaaagagaatctacgttgcgagaaaattgagttcaagcgggatggggaaattaatcgacggcgtcggcgagtgaagaacagagtgttgagctggtgaggagagctgggagataatagagtagtagtaggtgtgggtagagaaaaagccgttttgagaatcatggcagattctgaagaaaacgcccgacagagattcccgagaaaatctggggcgagaaaagaatttgaaattcccaggaaaataaagataagctgctagtgacacaaaatggtaggggtttaaggcggaggagggaaggaatggatgacgggaagggtaattccgtaattattgttctttcaatggtcgtctaattgctctgtagcttacggtaaataatttgcagatggttcaaaattttagtagtgattggtcggtacattaaaacttatatgcaagcttccccactatgacacaatatagttttcatcatataagcaatcaaggattcaaggtatatatcattggtaacagttgaagaagatttgattattatgttttttacatttagtagaagacaaggaagcttgaggtcaacatcaaaatctcttaacccataacctttggtctccaaccagcaattacatcctctgtttccgcccgtgtgttcgtgaatgattccctcgagaaaacattctgtaaatcattatggtgcagttggtttaaccgaatgaaaataaatccaaaaaagaatgtggttgttcagaataacattcaaaggactagctcgggttttttctgaccttttattttaccctcccatggtagggaatt

SEQ ID NO: 25381 - DNA, 1743 bp, Arabidopsis thaliana landsberg
caatgttccatcttccatgtttagtgcaattacaccctggcaactgcctgcatatcagatagaaatgttgcattaacttcaaagtcgctttcccttaaatcgatcaataagatccatccaaccacctcataaaatcaactactagttctgaattctactgacatcacccctccaccaaattggcaaatactaatagaagcgacagtaaaaggagaataacttcgattaacttaccatcactagccatgagcagatccaaggcgaagtattcaacaaagaactgtgtgttatgcttcatagcttgtccatagagagtatgcaacagagcatgaccagtcctatccgcagcacaagcacaacgataggcctgaccacctgaagcagaaaaataggaaagccaatatgagagacctattaaaaaacaaagtaaataggaatatcaataatagcaagacatcagacaactcaccttttccaaagtcaagactctgaccaccaaatgcacgctggtaaattttcccttcttcagtacgagagaaaggcagcccataattctcaagttcaatgactgcttttggtgcctctctacacatgtactggatagcatcttgatcacctacacaaagaaataaacaagaaagaactcactaatcaattcactaaaccacatcacataagagctacaaaaagcaaaaaaaaacatttcactaaaaaaagagaagaaacaaaaggaagactaagattacctagccagtcacttcctttgacagtgtcatacatgtgccatctccagtcatcttcggacatatttcccagtgcagcattaataccacccttgacagttttttcgacaacataatctcaatcaaaaagaaacaaaactatatttaaaaatcgacagtataaggagatttgtaacgaaaaatacctgagcagcaacagtatgtgaccttgtggggaaaagcttagtaatgcaagcggtgttaaagccatgctccgataacccaatcgccgccctaagaccagcaccaccagctcccaccacaaccgcatcataagtgtgaatcactatcgtataagaggatctcgtatcggtctactcaacagataaccatgatagacaccacaatacagatcgatcataattttcccggatttcacaatttgctcgactactacgccatttgaatcgctgacaaaactatgattcgtgattacataagatcgaattagaaaataaacaaaactgaaggagaaggaagagagatcatacagaaccagtggagaagaatctggaaaagcgagatccagagacgccatcaaagagtgaagaggtctttgaagcaggagctcgaaagccacgagagacgcagcgccacatcgtcttgttgttgattccacaagcgagtcagtttcttcgatgcaaatctccgtagaagaaatgagagaatacgaatttcgcgtagaggaggtttcctttaagaggaagacgcgaacggagtgagagatagccaccgaggcgcttaaaataagaaaaatggaaaacgatgatgacttctcttaaattcccttaattacccctattctcactccatatttactcctaaaccgggtttgctttactaactaaaaccccctaagattagctcttgtaatggtcaaattgtcaataataccccactgcatacttttacccaaatgtttggtgcctgccccattcattcttgtcggcgtctcgtgttc

SEQ ID NO: 25382 - DNA, 1430 bp, Arabidopsis thaliana landsberg
actggaaccctgacacggggctagtagagttattatataactctttcattaggattaactttgtttcatgtaaacaagtctgttgtaactgttctatatcattaactttatattgagacgttatctaatgtcactaagttaatatctgccatcttatagtttgtcaaacttcatcaagtctgttgtcattatagcttactctaactactaactctatttaacatttgactctaccaccaaaaagtttaatttgttatttaaatctactatatttgttactctaccaccattgttactaactctaccacctagctctatcttttatgttaacttctctaaaactcctaactaaatacagctagccatgttaatttgtcatcctacttactctaccaaaacctattaactatgttgttactgccacggtagacttatgttctggcgagaaattttcccgattaacactcactttctctcactaacgtaacaatatttttgaatggcagttttgtaataaagttattgttacaactacaacccaaatgttaatggtcatatatgaacaaccaattttttaacaccatgtgagtaataaacaaatttttatgtgctatgggagtgattcaccctagattaaatgatactttgaaatgttttaaagattttcagcgtttttcaaatgaagcagattcttttattaaaatatcatattgttcttattggcaaaagaataatatattaaaatcattgatcgacaatttgctatttgaataacgtctaacaatagaaccttgacatatactaaaagtctttagaaacaagttggacagtggagaaaaataattatgctaatcaaatcgtcgagagagccacaataaaccatcaaactggcgtttaaataagttggacaagttggattcttttactttcatatctacggttaattgttttggaaaaatctcgtttaagaaaaaggcctttctgtgtgccgtacgtagaataagctgtgagagaggttggtggacctgttaaacaatttttggtttgtgatgacacgactttggttagttttgactttcatatattcctcgatcacgactatactcatactttcggagatataatcttgaataaataaccatccattttataggtgaactgacatatatgacttaagaccgtcaagcccaactagatatcccactcacaaatattcttgagatatgaaaagagatcaaagcaaagaatataggttcttctttaaaaagaattgaacacaaaataaatataagttgttcaaaattaaaaccgacattttgccaaaagtaatcaaacctcaattattgataaaagacatagagttttgatattctaacatagtcacaaataggatgacaatacggaacaccaatttgaatgcaaacaatgag

SEQ ID NO: 25383 - DNA, 1062 bp, Arabidopsis thaliana landsberg
aaaaaaaaagttaactttccaaaaaaggtagctcatatatatttatttacaattcgctcattcctagatgtcaagtatatatgaacggggcaaatgaatgcccaataactaaaataaacccatatcagctatatatttcttcggttgttaaaaattttgattttataaaatttattgcacaaatgattttctagatgttatttttatttttatttttagtatgataaatactaaatttcaaaatgcaatgattgaaaataattaaacttttaattttattagctcataattaaacttaaaaatatttaatataaaaaatgttaatgattagataatgttttttttttaatatgtgaaaaaatcccaaacatcaatctattataaaaatatggaataatacttttatttaatctatttttttagtagtcaacatcaaaagattattacaaatgaccaatgttgataattttaacttataaatatagtattaaataatgaatagtgaattgttttctttttggcgggtgaaaccttatttccaagcttcatactctagtcttcgagagtcatgcttagtaattgacattttttgttgccatcatttcttataaagcttaccctaagcttgcaagaatatttaccgagtagtttggaatcttggtgttgtaaatcatgcactatttgttttactacgcagttccaatcttctcgtggggaccaaagtttttcaaccttgtatacaacaaaatcaacaagggattaggtacaccaaattggtttttacgaaaacagtaaaatgctatcaaaatagagactagtcgttttggtgatagaattcagaccaagacaataatggttttacttgtcaataatactcagaaatgaacataagctgcgcttgtcaatagtactcagttttgagatagatacgttttgtattgccctagctatggctcggttttttccgattcggttggtttggttcacaccctaaatggaatccggttcgtctgttcttctataaataccatagaaagctttagctcctatataaacctcttc

SEQ ID NO: 25384 - DNA, 1133 bp, Arabidopsis thaliana landsberg
  unsure (1)..(1133): unsure at all n locations
cctctcttcccggaataacaatctacagttctaccggtttaaatgtaccggttaagtaaaaaccggaaagataccttgttctcctaaaaaggttgagagaagcgagggattagcgtgtatcgacgagataatcatctagtcgtcggtgtcgccgcctttctccgccgtctgaaatcgtccttgttcgattttccgaagacgaagcaggagaagatatgtctgggaggttgctgaagaaggttctccaggaacatgaagattcgaaacttcagaaacatcacgaagaagaagaagaagaggacgaagaagaatcaggagcccgttcttcgattaagccnnnnnnnnnnnnnnnnnatggtgatgaacatcctgaggtcagtctctcagattttgacgattagattgttcggtagatttagtatctagaattttatcctcctccgtgttctaaaatagctaatgtgttgataagtttgaatgtagatagtttcaatggtttgatcttcagattcttatggttttttattctgatgtctagagctgattcatattttgttggtcgtaggagtaatgattacaaagtgtttctgtaacaattgggtttgattgcaggagattgatgatgagactatagctgagaagaagaacgaagatgcggatcatcagtcaagtgtcgctgatcatgtgcagccggtgtcaaagaataagtcgaagaaaaagaaaaagaagaagaacaaagagagtggctctaatgtgcctaaagctgaaatgactttggatgaaactttggaagcacttggtctcaatgctaactctaagcaagataaggttcaggagacaaaaccaaatgctgattcttccaaaaaggcttcttcacgatttgtgttggaaatagattccaagtatctgaatcttgagaacgagttgaggagaacgtatggttcaaaggctatgcgatcatttgagagtgagagtggctctcaaggtggtagtagctctagacgagggggaaggcgtggagtccatcatatcacaaagacggttctggtatctccaaaagagaattggtctcgatgggatagatctttctcaatggagtttctagagactaaagatggtaacaactacttcag

SEQ ID NO: 25385 - DNA, 1468 bp, Arabidopsis thaliana landsberg
cttaataaaaatgcttgaccaaacacgttttttggaataaattattttttacattttaattagaaaatcaaaactgggtttgaagataagttcactatgattaattaagggaagggaaatccatgagagaagcatacatttatgttggacaaggatgaagaatagtggccaatgaatctaattatggaaaagagaaaaaaaaaaaaaaaggtgtttgggttcaaggtttacacaatttgttaaactttgtttgataagaggctttcaatcaaatgcataaaaaagatttactaggatataatttagaatcaaactgttttgaaagtatagaaagaggagatcatacaagtagaatctaataagggagaaagttagggcaatgggagattagcattctcaagcgactttaggaacaattatccacgggcacctggaccacgtaccaccacacccatagtccattgctgttgaactttttgagtaggcttgatcattgtccttcctcctcgggtcctttgagaggattcatcacccatctcataactatatactcccatgtcaaaggcagcaaattaattgcttactaagacactgttctgcatagtctcatttgacaatgaacctgaatgaggaggagtagctaggacaattaccgaggctggagataactgtttatttctttatcttccattttgctatatatagtctatagaagataacatgaagaggttagacaaaaaagaaagaaaaaacgataacatgaagagaagccatcgggctaaaatccaaaacaattaaaacaaattaacaatgtttataggggaacatttgttccggttattaaagttttccaaactagaaagaaaaaagagagagagaagaagattctttgaagatcaccagttcaagtttctcgtaatgcattagaaatcgacatttcaccagtcacggttctaaaattttcagagtaagagtacaaatattactaattatatctataaacgaataaaaatcttggacaaatattcgcaaaattaattttaaaacattctttcagtaaaatgtaaacaattaaaaaagaaacatctctttcttttcttttattggtagtgaaacatctctttcgtaaaaaaagaaaattgttttcaggaatcttaaaattctatacgttaatacgttcgttacgtacatgtagctttggcgtggaatggtagctccccgacatctaattagatgataactcgctttcattgaagtcagggaacaatgtagactatgcacgtaagaaactagatcaacacacaaacgtacccagtttcggaatatttctggtgttggttatataaaataaaggtaatgcttggcctaacaaaactcataagtgattttatttcatctttactaaagactttgaactagttgattgatgtcacgtctcttactatatatgatataacatgtcaaaata

SEQ ID NO: 25386 - DNA, 3089 bp, Arabidopsis thaliana landsberg
agagatatgaagttccttgataaaccaccaacattctttccattttccagcagactccaaggaagtttattgagttttgctcccacttcacgacgtcttacatcaaacttgtttcaaagtagaggtaattcataagttcttttcattttttcttttcatttttttttgtccatttgtgatcactctgtgctttggtatttcaaaaatgagtagaactaactaccagagacagtagctttattacgtctgttgaaatgttgagtcgtttaggaagagagggtaaggaagatatgcaagtatgtgtgcaattatttcaatgtataaaccgaagacaaattcttgatagaaatcaaatcatttttcatgtaactttaattatctcgtcttctacgctcataaattttatgtgcctcgctctcttccagagttatgtcttcaaagataagaggacttatattgtttaaggaaccctcagaatttacatctcaaaatgtaagatggagattgtagtaacgtagataagaaaagtaaacctgtatagatttgttcttacaatctagaaacatgtcgaaaactgcaaatgtattgtgtaaggttatcctcaaacgaatgagatattggaaaacaaatggcatattcccccacaaattttattgttttggagtatttatacacataattttttggcgtgtgcttacaactacataaactcacaataaattttaatttcgtacaagaattaaacaattccggccgaaaccatcaaatcaccaaaggtggttattgttccgctaatgactaggataccacgtaatgcagtttgcgtttttaaccataaatggcagtcgttttattccaacaaaatcttaaaacaacataaaactaaaacacaagatcataccaaaagaaatggatctgaaacaaaacatcaaacttgaacaacatgcaataacattaaaataatatgataattgatccaaaaatacatcataatccgagtatacaagctacataatcagatatcacatatagaaaattagagatgaatagtttgcatctcgttggtgagctcatgtaaagtggatgcaaaattttcttatttttctcttctttaggcatctcgtaaagattgaaaaatatgaataataagttttacactttcaacccaaatggtaaaatttgagatgaatctatatttcattcaattcttttcttctgaaaatgcaatcatttttccacgtacttttctcttatcagacttgtgcctaagtgtgtaacacattgcatcttgttgtccttaagaaagtaaaacctggaatagttggtaaagaaatttgaatatagatgaattgaatgaaagagtactataggaaatttaatcaatattaattgctacttaacactctctacttgatgcaagaaagtaaatactttataaaaattggaaacttatgcaattagtttttccttctctagatcaacacctctattccgattgctttgatccagaaagtaaaaaaaaaaatacggtagccattaagcatatattatatagttttagttcaaatcaagagcatacataagcaatttccaaaccttcagacctcaaatcaaatctcaccaagactggttcctaactcattgcctatagctggttctcggatagtgaggagtgctgcattgtgaggaagtaatgttcataaaaccgtctaacatgggtcaagcaaaatcctttatatagatcatctattggattttttcctataaaacttctgacgatcattacactggttttgacagttggtaaggttatagacgtactctcatcaacccatggacatagctagagttttggtagcagatcagtttcttcaagtgacataccgtatatatatacttgatgtaaattcaggtggttcatccacaactagagctttatgtttaggttcatccactactagtgccggcttaagtacagggccgggtagtgcgaccgtcctacatccgaacaatttttcttcttttgtatatttaaaaggggtacaacttttttgtatatataaaagggatacaaaaaatattatatatgcaaaaggagtataaaatatatattttaaaaaaatttgccctaaaacacataatatgtatgagccggcactgtctactacacaagctttcgcgggactagttatggctgaaggaaaaacattttcagcttctttggtaaaaaaaattcacccgttcttttacgtacaaagtaattattattaaccactaagaagtaggaagtcttataatctgaaacatataaattaggactttaatttctcggtttggacttaggttagcaccgccctattttaattttatttttaccacggctttcgtctctttggtgagttttaatttttaaatagtcttaaaaactctgtctttttttttggtgaagaaaacaaaaaaaaattcatattttgattccttttattttcagttagggtctctttattttcatggtagctaggtttgtctagttcttaatataatacgttttaacatatctctctctttgtgttcgaccagcaaataaaacgatcatgatttcagattccatccccaatgaactcatcctcgagatattgttgagattacaaagtcaattgctaggtttcattgcgtgtcgaagcaatgggcatcaatgcttagtcgtccatatttcacagaattgttcctaaccaggtcctcaactcagccgcgtctcttattcgccatcgaaaataatggcttgtgaagcttcttctcgttgcctcagcatcttactccatatgagaagtcttcatcgtcgtctcttgtagaaaccgctgaatttcatatgaagttccctccagatggtatgcagatctatcctcgtaacgaccgacggttttcatgaggctatgcgtctggtatgatgtatttctatggtatgcggatcaaagaggatgattacgatggagtgcctgtgctatgtaaccctataacgggacattatgcgaccttgcctgctattgcaaggtttagactagcgtttagctttttcgggtatgatccga

SEQ ID NO: 25387 - DNA, 575 bp, Arabidopsis thaliana landsberg
tttggattttggatgatttttatctcatacttttttgtctcgcaatcaatttatgaagacatatgaaatgttggcaaatcatttgtgtatgaacatacgttacgtgatgttcaatctaataagagattgtatataaaaggcacaagagttatttgtcttgtcaaccattggaatgttctcagaagtttataataacataaggttgtgaactaattaatatattagttataccatttccagtaataacaatataaaatgcttaacaaaagtaataaaataaaatgttggtaaattaatacttacatcacacattcacctacaataattccaacactccaaaaactatatcacatttggtaagttttttttttctcaaaaaacattttgtggtctaggacacgatcgttacattaacaaatcatttgaagatgaaccggatctcgtgctctttggtctggtttttccatcgaaagtgtatatcaatcgttggctttgtgcatccatcttcttcagaagatcgaccagttgcttcgatgatatccatgggttgacgcgtaatatcatcgagtttagtg

SEQ ID NO: 25388 - DNA, 1316 bp, Arabidopsis thaliana landsberg
  unsure (1)..(1316): unsure at all n locations
aaattgcaggaatcaacacatgatacatccaaaaccgtgtctgatgcttgaaatcataactgaagaaagtccttatttattcacatgatacatccaaaacaatgtctgatacatccaaaaccttgtctgatgctatggttggcctaaggttcattcgcaaaatcgaccaaagtatatccaaaaacgagtttccttatttattcaacagcctgagcttctattcttaactaaacaaacgccagacacattactaaaccagaaagcttgacgtcttccatgaaaacagaaacataaaaattatccgtaaaaatgagtagcaagttccgcagaaacacgttttttttttttttattaagaccacgattttccttacttattcaacaacctaagctttactttagcatgttaacctcttcataaaagagcactaaaacgtagtcatcatcacaaaatacagccaaaaaaaaatggtttaatgcttgatatcattactagagaannnnnnnnnnnnnnnnnnnnnnnnnnataagtggccgagttaaggttcattgacaaaatcgatcaaagtattttcaaattgaattgggttcatgagaatagtatccaataacaagatcaataagcttactttgtgagtaatcagctcgcattgtgtacctttaccagaagcaggagctcctgatatcataattttcagaggctccgatttttcagccgccacaatctatattccttccacacacaataaaatccaaaattacaagctcgcaaatcgcattcaaaaatcggaggtcaaaacaatcattcacctgaaatttgggggcgataatcgacgaagatcttgatacacgtcggtgccggtaaagagagtgtacggcatcgccggataatgagaaggacgaccgtgacggagaggcacgataccagtataaagtcaccggcggcggagaaatagaattcacacagcccgtcatgtctctctcccactctctttctgactttctgtcaatgagcctgtggtggtgaatacagagggaccagaggactttactgttccgataatttagtggagggcccaaacctaaatggactcactttaattattttaagggtctatttgtttgatcatttggtatacttgaattgttttaagggcctattcgtttgcatttggtatttgcatccggagcatctgaatgatgtttgtttgatcatttgctaattcatctagatgatgtatttatataaatagtgttttatttgtttgatcatttggatggatcattgagattttcatatataaaaaccaacagcta

SEQ ID NO: 25389 - DNA, 1127 bp, Arabidopsis thaliana landsberg
atgaggtctaacaaagatgaacccatgccaaagtgtgagggaatctactttcgccactgagttgtaaaattgcctgaagaaacatttctaagaagaaaaaaacttaattattaatatagttaaacctatatatttgagataaatgttaattaacaaattaattaaagattaataataggtacgaacttacaatccaaagttgaaatgatgtttcagtccatgaactcaggtgtcgtcgagcaaatgttgtatctcttgttattctaaacctattcggatctttaaattttcataaaatattaattaacttatcgactaagaaataattgacattgcatgtaatttcgtagtagaaaaatacaaaaatcttaccgtttgctgctagatactccactgtttgggtctctttctcccacgaattccattttctcatctatatgtattacgtacacaaaaaactttgtatgtaaacaatagtaaaaaaccatgtcacaaattattgaagtctttattaaacaattgtaatgttataatatttgattgcatagtgtatatatgtagtaccttggccattccaaggagaagaatagcaagattgcagagaatatgcatgcatgccaatacaaagaagaagtaactcaactgagtcaacccttcttctgatattagtgaagtcttaccctgcaaattttattttattaaatcggattagttacttcgaaataaaatttactttagtaagcaaagaaaaagtcatactcttgatattttgttcataactcaacattttttttttttttttcttttttatttggacgtaattttcttgattagtggactctagctaacgacaatgtccaagactccaagtcaacgtcaaagtaaactagttgacatttttggattttgcggtcctctctccctccatcttggatttcaagaagatatcttaaaacttttggattcagaagtttcataagttaagcatataaaaatgtatatgattaaatctcttatttaaataatcatattatagaatagtaagcaataaaaggttatgaaaactggaaaatcatttaacgaaaattcataatcaaaaacttaattggtgattgataagaaaacaa

SEQ ID NO: 25390 - DNA, 3334 bp, Arabidopsis thaliana landsberg
ataaatcacaaactaaaatgacaagtggaagcaataaagtgaaaatttaataatattgaaaaaggcctactttcatttttatttagggatggaagagaagaacgcattgtcattttattttgtgatatatcatgtatattcaacgtgttgatgcgtactagatcttgatctacgaaatctatcatttgctattttacatattttcattcatggatagaagaaaatttcgtataacttcttctactttcaccttctgatttttttttcattttactttcactttattgtttaccttcttggaaaggtttagttgtatttgaaaagtggtcttggcccaaaatcgtacgaagaaatatgagtttataatgaaaactcagacttatgcaaagtttattcatcaggaccctaatttacaattttgtcgattaaatccaaattccaatggacagctggtctttagaaaacacgacatgtttatttgctctatgggtcggataaatttttttttattaaattaaccaaaacttgtccggtttgaaccgattgtttttttttcttttcggttcggtatatcgttaaaagtcaacaaattaatataatttacaacatgaattatctatttgtattccctatctatatcttgaacatattgatttctagatcaaaaggaaataaaattttgggttggttccatttgactaagtttatatgggttcgtccaagaaaatgtggaatacatcggttagtaggaagtggtggtttggttcatttccgttttgattcggttatttgttaaaacaggtgcaaatggatggaggtagaatgcttctacaagacatgtttccggtgaagctcacggtggctgtacgctcactcactcctcctatgcctccttagacggcgttctctataaccaactcttcctcgaaaaaggaaactatcccaaagtcttgattatctcttgctgtatgatcggggaaagaaaaatgattttcatttacaatgggttgtttccatatcagacatgattttctttcagttgaatataattttgtttagttttaccttaataaaaactacaagaaataaccaaacatcccacgaattggtttaataatttcaaacaaagaaatcaaaaacataccgaaagactctcgagacgattataccccacagaacaccaattagatgagataacctcccaaaagatgactaagccttgcggctaatgttctatgaggtgtatcattgtctcgaaactcttttcgaagggttttgatttctttgcttgaaattgttaaactaataagtgcgtggaatgtatacgtgaaggaatattaacatacttgtgagaaattatcagcatatatgtcaatataaatattatatgctatgagtctatgacaacgaatatatatatatatatacatggttaattaatatagaagataaatcagaaaatatgataattttctactttttagggtgtttagtatgcattcccacgtgttgaatatgcatgatcaattacaaaataacacgacaagtggaacaattatgtgaatttgaatatagtcatggaagattgtcatttattattgctaatttcttttgaaacatacaataaagcaaaacacctaagttcttttgctaatatttcactttttttctttcttttttcaatataatcaatatttcacttttttttatttattaatggaagattgtcatttattttgcgatttatcatgtaagttcaacatgtgtgaatgcatactaaatcccataaatatatgttttgctatgtttatacattttaattcatggatataagaaaaatgcaatcatatttattatttctgatttgattaaaacatgtgtcaatgtactttccataatatctagtggaaattggccaacaacaaaaataaatcttacttacaaaatagattcccacagatgttattttatttaaacaaaatctatgttttaatacatttttatataaaaatgtattaaaacatatgaaaatcattttccatattttccatatttctagttagtggaatatgaaaataaccatgataaaaatgtattaaaacaaaatctatcattttgttttgtttaaatacagtatttatcattttccatatttctagttagtggaatatgaaaataaccatgttatttaattattatcattaaattatttgataatatcattttaattgcttaataatttaaatatattgatttcccttaaatatatccaatcttttgtaagaaaagaaatttaccctgaagtttatcacctaaaatttagcatgcttgtcttttaagggttgtcgaaaacaagtttacatagatcttcaattattaattaaataacataaacttgtgtttgtaaactaaaatttagagctttaagtctctgttatttaattaatatttgaagatctatgtaaaaaaaaaaattttcctttagattttttgaaccttgttaaatcaaatcatttataatcattatttaatattgcaaaatataataaaaactagtttttatacttattatctgtaaaagctagaggaaacgaaggaagaagagaagaatcatgctgagattgtgagtgttatatgttgatttagtattttaatcatacatataaccaaatgttgtattataatataagaaaccaaggtttgaataatattttcgtggtcatgacagccagaagtggagaatgtactcacaattcatgcacttccaaattgcctacactattttcctccttaattttgtgcatatctgtggggatgtcattcgtatccggcctaagttcggtctactctacatcctttttattttaatcgaagtgctactaaaacatctttgtccatccgacaagattctttgcagctttgtcgaatttttaagccattttagtggagctatcactatcgggctggtgagctcatgttgtaatgtcttattttattgtgttggtataccttgggttttgtttgccttcatactctttgaatgtcttgttactgaagactgaagaacctaagacgcatacaggctcttcaagagggaaattttaaaccatttgcttgtgaatcgtgttacatatcttcgtttttagcatattttataagctttatagtttgtctttcttggactaccatggctttcctagtctattatatatctatgtgttatataaatctcatggtggattgataatattaaatgaataagctctttatttcatccaagccatttttcatatctatattgaaaggcttccaatcgctaaggtttatgaacgag

SEQ ID NO: 25391 - DNA, 748 bp, Arabidopsis thaliana landsberg
tggaagtcaaacaagatagaacgtttcttccaacaccacttatcattatcttcttctgcttcttcttctgagttagcgccctcttcatccaaatcagttctgcttctcttacttctcttatccagcggtctcccaaaatcattgcgaaagtcctttaatgtctctagaatatcaactccactttgaattctatttgtagttcgattctcaaccgtgttatcaaaccaagcttttcgacgtctataaggatgcccaggtcggagacgctttctattgcctaagtaaacatgtttccgactaaacttcaaccacctatgtggtgtatctttaccacagacattacatgcttgtttccctttgaccttacaaccagccagagtccctaaagccggatagtcactgatagtccaaagtaacattgctctaagtgtaaaagtctcttacataaaggagtcataaacttgaataccatcattccacagatcaagtaaatcatctaccaaaggttgtaagtagacgtcgatgttgttactgggggctgttggtccagggatgagcatggtcaacatgatgttctctgacttcatacacttggtaggagccatgttatagttaactaacataactagccatacactgtacttagtattctgcattgagaaagggttcatcccatctatagaaaggcataaacgaagggttctaagatcaccatcaaactcaggccatttcttcttcactttttccc

SEQ ID NO: 25392 - DNA, 2016 bp, Arabidopsis thaliana landsberg
  unsure (1)..(2016): unsure at all n locations
acggatatgtacgtgcatgtgacggtagccaatgaagcagacgaagagtctatacatgaaaagtgggtttgagcaagagaccgctgagccagcggggcaagctcgatacctcaataggccacaacggctcctcctctggctcgcccttcctacctccccaatcatgtccatgtaattgtaaattttccaatatatccaatatgtcaacctgttcttggcaatcaataaaagctttataactctccacaaaattaattcattagcttaaaggtaaattactaattacaaatatgtgatgtctacatataccaacattctattttactaattgcacagaaaacacttggtttagttagtcccttgtcgtgtataatcaaatcacccataaaaggaactttagttggataagatttgggatgttttctgtattttgtttttccttggtcgtggaaatacaaacgacgacgttttgagtggcctttgtttttcatcctctagaccaagtgtatataaaacagagacgaaaaacgttgcgaaaatacgaaaggcttagaaatggtggtgacgtctttctcttcagcgccgcctatcttcttcttacctggagctgatgctcagttttcttcttccaatggaaggtttgctattccttcctcttctctcgtgtaagtctttctctgaaactctgtttttcaaattacagttctctgttctcttattctggttgaagttttgaattttcggaatgaaaagcgtatgtagtgttctgcctcgtaatttttgtaattcgtgatctgggtttgtgatttttgttgttactcgccaccaaagtctctgtttttcctctgaacttctaaaatcagaatccattttgggtaattgagatttctccaattgtgactttgatttcttctctgttgattgggttaagatgctttctatgagtaatgtttgaaattcaaatcctttattcatcatcgtgtttaagatccaaatgtaatcagtgaactgtttatagtttggaagcggtttagttcctattggatctgtttcatttcacataatcacacttgtgttgtgaatatttgctcttgcgttttggataagtttacttattggtaccgaattgatagttattctatacatgagataagcattcctcttattctgcttctcttctcttacttacttacataccctgtgtttgttccattgccagctttatttcttcttttcttttatgacatttgttaatctaagttggtaataagatcatgaagaagaagcattggttttatccaatttaggagtcattgatcagttgttatcattacgtttgataaatagataacttctcattcattataaacatgtatttttcatcagaaagggactaagaagacaccaagatgcaaagttggtgggcaacagagccagagttggagtagtacgagtcctagcgaacccaaatgtataacattaacctttttttgcagttatagattttgctatcttagtagtgttttcgttcaggacaccaagtcatactcatgtcatgtttgatcttcttgttggttgatatgatatgaccattggtttaaacttactgacatgctgagtgttcttgtaggtatctcctcctcctcctccaggaaaagcaaaggtaaaaaaagaggtaatcatggtagaccctcttgaggctaagcggttagctagtaagcaaatggaagagattaaaggcagagaaaagcaacaggtgaggaaataaaccctctggacgaatgatgataaattgtatacaagatttgtggagatagcacagaagtttattctctcgtttgctttacagagaaggcgtgaaatagaggctattaacggagcatgggcaatcataggactcatgatagggctggtgatcgaagctcaaacggggaagggtattctggctcaggtatggtttacttatacttcctcagtgttgttgataatganaggcttttttactanatcgtgagg

SEQ ID NO: 25393 - DNA, 910 bp, Arabidopsis thaliana landsberg
ttgacggtattaataatatgatgtacgcaatctatatttgggtcagggaatcatgtttactcaatattcgattaaggtacaaatattttaactccaactagcgcatatatttcacaaatatttgaactttccgaaattacaagatatatgtaatgtatagtctagtcagtgcggatctccaatatgtgattacgcgataaatgagtttaaaatttggtgacggcaagaatgatcaaatacacgtgtgtacgtgtgcgtgtataatatacatatctcacatcattgattcaaaaaagaaaagagtgacgattacgacggtccaataataatcaccaaatgagtaaagctaagttggtttagaagaagaaccggtgatcaaaacataaaagaaagaaaccgggattggatttgagagaaccggaaaaattggcacgtatatatgatcgccatgtgtcgaatgtgacttttatgaagaacgtaaccgttctgacgcaaccaatggctcgtttgcgagtgcatatggtatacaagtaacgctcccatttcatttcttatgttattattacttgattaattatgaacagtgaaaactaattaattacattacttaggagattaacaaatagattagaagaaacggtaacagttgttgacagaggtcaccgtgccgtccggctcttgtccaatctttgtttgtactaacatgagacacgtgtcctcgtatcacgccctcttctgctcctttcctcaccgcttgcgtacgctaatgtacactgtttgtatttaatacattcactaggcctaatagtacaagagaaacagaagaaaaaaactattctttttgtcatatacgtacattttaggtgtaatcactactattaatcatttcgctataaagaaggatcgataa

SEQ ID NO: 25394 - DNA, 902 bp, Arabidopsis thaliana landsberg
ccctcttgtgatggcctcactgttttcataactttgatgactttttttggtaatggtccactcttgttacttattacatataaccaatttccacatgtcttgtgggggctgtttttgctcatttcatgttttgcctattgcccaattctgatttttgattgatatttaacaaattaaccagaaaattacaaagataaattagttttgattaatccatatgtgtgaagcctcgacaaataataacacatttttgggaaaagttgatgtctttaaactgttgtttgttgaccttgatccgtgattgataaattgctacaactgaaacgagtactattcatctcactgttgtacatgtgacatctcaatcaatccagattttttcttatgatctctttgataaacttataacatatctattggtggattcacgatatccagattgggacctctacaaaaacacacttttttctttatagttttctgatttataacattttaatgacaacaacaaaaaataatatggaaattctataaagaggagcatgaagaactgagaaaagattaaacgatctaaatgtttcaagaactgagaaaataaaaaaggagagattcgattacatggagatgagacgggccttgtacattacgatgtatgccatatgccaatcacctcctccagagagtttaatgatatcttctccccgctgaagactagtgttggcatcgtcgtattgaacccacttacctgtaaaacatgagttcccaagttttaaatgagacaaatgtgtggggttttagagctacaataagtcgtttggttggggttctaatggaactaaccactctcttgcttgacccatgcaacataatgacccagctgactctgccttggggtaacacag

SEQ ID NO: 25395 - DNA, 739 bp, Arabidopsis thaliana landsberg
aaatcttttacttcttagagtgtataacatcgtagatggcaagacatttctgtattgtgtagccaagtctcacaagaaacggtcttcgctccagtgctatctcacttagagattccggaattgacactcctcacataaccgttgatatctcaaaggcatgtgttatgtagcaatgtacacatctttttcatgttttaagcacaaaaaccatagtgtaaggcatgttttggtgcagatatggaacccatcaaatccgcaaggcggtgagagatttccatccggtatcattgcatccgaatcggacttgtacttgcgcagattatgggggaaccctgatgaggtttttcctcactcttttgatatgacatctttcatatgtgatcaatgaacattagcttcaattttcttttctctgtttcctcaggatttggtgaaacaaccgagatatctagcaacatttacagtgggttataatcagagacacaatatagatgcgtgtgttagcaaggttgattgatataattctctttgttttctttttttttgcttaatagtaaactcattatgatttgtctactcaagtacagttttcagagaactttactattgttctgtttcattacgatggggtaacaagtgcatggaatgatgagtttgagtggtcgaggaatgcaatacacataagtgtcaaaaagcagacaaaatggtatcagtatatttgctttaaccacttttttta

SEQ ID NO: 25396 - DNA, 827 bp, Arabidopsis thaliana landsberg
atgattcctcactgtctcgtgcgctttgtttatgcccgaatctccgtaacttgcttctactagcttgagagggagttaaatccatatcaatcgatctgccatacttggagcactgtaagctggatttctatggacaaggtaacaccttgctagtcctcacgagtcagagattagtgtcccttgatgttcaaggttgtagctggattcgtgtccctgaaaccaaattcttaaagaacctatccatctccagtgttactggtaatgagtcttgagttttaacttgtttcgttcttccattaccatctgcagatctcatttgtcttactttgtttctgatgggcttacagggagagtttacatggtagatttcaataatctttcatcgcttgaggccttgtcgattcgaggtgtacaatggtgttgggatgcaatatgcatgatactgcagcagagcaagagacgtgaagcatctctttatgaaggttgaattcgcaggcaatgaggctcttcaacctttccctgagattgattttgtcgagttcttcaataaccatccaaagcttcatacattcgacatccatggagcaatgttcgctgcactctgccagaaaaacagccttaagaaggtaaaaataatctcttcttcatcagaaaccttccttaccgatgaagtcaaagcctacttatcaataatgtaacctccattctctttgcagcttgagaccggatttacaataccgtgtttggaggaggttgttatcacagtgagatctccactgaacgcagaacagaagatgaacacgcttgaatcactagtgaaatacgcg

SEQ ID NO: 25397 - DNA, 1558 bp, Arabidopsis thaliana landsberg
ctaattttcttcttctttcttcgttttgatatttttgcacgtctatgattacattctttgctttgttaaatcaaacagtttaatataaggactatcagagtttttattaaaagataaaccgtataactaacttaatggttgttcaaacttgataaaaagaattaatgatttcatatatttcagggttcttttttcaatatctcactatattttggactgatagaatatttaatgaacgttgaacattttgtttttggctagatgctgagcaattcaatatacaaaagcgtagaacacagagtgatcgtgaaccctgaaaatgagaggttgtcattggcatttttctacaacccaaagggcaatgttcctatcgagccattgaaggagctagtgaccgtagattcacctgctctctactcctccaccacatacgatcgttaccgtcaattcattcgtacgcaaggcccacgtagcaaatgtcatattgacgaacttaaatcccctcgatagtgcgtacatttgatttgttaatagtgaactatgcgttcttgttgtataaataatgaacaatgcttctttttatctgttataagtactgtaatatttattgtgtttgttatgtgagcatgtttatattatgttttaggatatgggtttgatgcgtttttttcttttaatgtttacatgttcaagtattgtgtgttttgattacacctaatatatatatatatatttttcaaaatattactgatgttttatgtttatggcaaattttgttggatttgctgtcttttctctatagagaattagctaatatgtaaagaattctctgtttttggctggtgcatctcttgtagtcagaagctttaatttggtttaaggtcttgaatctataaagagcttttgggaaatgagttatctttccaagtgactttgattactttcattcttttcaattggttagtatctgcgaaattatttataattaaatatgtggtttatataaaatttatgtactcagcgttgaatgtttaatggcctccatatctgagatgatgattttttatttattcatttcggatcaactccaccttttcattaaattagttatacgatcagttttgacctcatgcaaatgcagccaacccattataacttttttcaatgcttcgtacgtaccaataatcaacacgtagaatccctggctactctactaccaaaaaaaaaactttatatcaaatcctgttgaatttagccatataaacttatatcaaacgttgacaaaaatacttatctcaaacgaatcgacgaaattttgtacgcatataaacaaaagctccatataggccaatggctaatcaagaagataaattaagtacaattcgaataaagctattaccaaagctaagattatggagagtaccaaataccatcgaagctatcaagacgcagttcctttcaaatgtttcttcagctcccctgctaccctcttcattgccttctcttgctgttccatcagtcagctctcgatctcccgttgttgttggtactgacatac

SEQ ID NO: 25398 - DNA, 1359 bp, Arabidopsis thaliana landsberg
tttaagatatgtggaaatgtgtcacagttttttggaaacagatgtacttctggctatattgagttcaatcttcaagttaatgcgagtccgatagagtgtcctcctgattatatatgtcttttttttctatatgagagtatccaaaaagttttagtagttcttaacattgcataattaatattcgttgaatcaaatgatttatttttgtatgaattgattggtctagtactactctaaacacatagtggttgaatagtactaaacacatagtggttgaatagtaacttgaagcacaaaatttcgtaatatgtgtaactcgcatgaaactgatgcaataattgacattctatctcgggttgttatgagctcatttttactgtgtacagtacgtcattaacgcgtttactataaataaatttgcaaaaatatagtactacttgaaaattggagaaaaattatacaacaaaaaagctggataatgcaccgaaatgggcttagactgttgcttgtatgttcaaatagttaatctcttgtaagcatactatattaaacaattttaatagtcaacctaatattaatttaactaaaacattgtaatttgtgccaaatggatcatatgtagtaacttgatggttatcggataatcttattacgtaatctttgtttctgtattttactatttttctatatagattgtgtttttgtcactatataccttgaaactgttggataatactcttatctgtagacataatttagcacaaacaaagtaattacatgatttgaattagctaaatttccttaattaagatgaaataatgagatatattcattttaaaatgaaagaaaaaagagagagagaggtgtgtgggttgcagagaagggcagtgcagagaacaaccgacaaggtcaagttggaagccaagccacatgccctgccacagtatgggcccccttctgtctatatatcagatccttcatcattatgtacaagcctctgctctctatacttaatgttccttcacaaaccctaattagtccaaacaccatacctgcttactgaggggtactattctttcatagatcactgtacccctgaatacttttcctttcaatatactatataaaactaccagatattattaaaacgattctacaagactaatacaacttgtatagtcgtaatcaagattaatagtactcaagaaagccatatactgtggaccatgacgtactagcataggaaatggtctcctattgaaagcttaatcacaggctctactgatatgatgtctcatcaggacctacatcaatatacgacgaatagtctaagtagcctcacaaaatatctatgcgtac

SEQ ID NO: 25399 - DNA, 1119 bp, Arabidopsis thaliana landsberg
ccaaaaccgctcgtaagatccacttaaggtcatcatcgacaactttattatttaacaagaaaggagctttggcggggaaaacgcctgtcttctccttcttcaaaagagcttcaaggcttgagcacttctgcctcaaatctttgagctcttcctcaatgttttgcatccgaatcttatcagcttcttccttcttcttttcaaacaactcatcaagttttttctgcaaccaatccagcttaaatcctacacttttcatgtaggccagagtagttttcgcatcacacagatcatccttggagatttccataggccattggtgcagagtctcggacaagcagagtaggacattcatgtacgctgtcttcaaagattggatctttatactgaactttgatgcaatgtctgggtgactctcaaacaaacggttcacagatttcacctgcgaagtacgacttaaattaaagatcgaatatcaactttaaagacttgcaaaccatatcttatgcagtgggtaaaagtaatcacgttttcatctttcttaaatttcttaattacctgtgaaggaagaactttaaaccctttgatatccatgctctcagacatctctggtgcatctaatgaaccaacaacttcaataacatctaccgcaacagcaaccatgacttcgtcgttcaccaggaatccaccatatttgtcagaaacatctttaaggtttagcattggtggaaaaccccatccaggagcgttctcatcaaaccacgcttgtgtttctagaaaaaccacaaaaaagatttcacctcataagtttaataaaccagtgcattgaacgtgaggttcacaacttgacaggacaaaacataaaccacccaaactggagtccagacaagcatagcacaacatacaatttgaatattaaactatcaaactttatttacatgcagctagaggaactagtaaccttgcacttgggagagtccttctgaaagttgattaactatagttagggaaaactttgcatgccttttccatccagaaggcaaagactcacaacaatcaggaacgcccagatacacagacatagacatgtaaccatcggcatcgttaaacttctggataggc

SEQ ID NO: 25400 - DNA, 607 bp, Arabidopsis thaliana landsberg
ggatccatttccgtttcacctaatatacatagtggcaaacaaaaaccaaatataagaagaaaagattcagtatcgagcattctagctatgtcggtaacgtgacaaagtcctttttttcgtttgtctgtttctttaaagttaatcaaatcggccaacgctgcctcaacaacgagcttcctttttctaacgtccctaatttgccacgtccattttctggactagtctcggtttaaaaaatcttcagagatgtattcgtggtcaacttcattaactctttctcttgagcccttcattagttatgatcttatttactttttaaaaatctaaccaagtactgtatattatatatgtggtagccaaaatattatgttaaattctaggctaatccgatatatcaagaaaaatcaatatataaaaatggagagctatttttcacgagttaagtgagagagatgagtaaagaaaggcacgggaaggtgaagagagtgtaggtttccagcttcttccccaagaaataaaatgtatttgactttgtctaagcaaatatgtcgtcactttaacgtcattcagtacctagaatgcaattaagatatggcttttacataag

SEQ ID NO: 25401 - DNA, 2973 bp, Arabidopsis thaliana landsberg
gtcacaaaagacatatcctagtttttcaaacagaagtatgtactcagtaataatataattatctataattataagagcatctccatcggttacaattttgagagtttatcttcactgaaataatataaacaattcataaaagaggagagagaataacataattaaaaaaacgtttctgtgcagagaaattttagaataatcattgagaaactatgtgcataggtggctgcttataattggacaactaaaaaaaagaaaaaataatttaattacaaaattaagtcattataaaatagtaatttttttctttttgataaactttgaaggtttgtcaccatgacaacaagtcatattcgactccaaatactaaccaacatttttctagattctcaaagctttcatagaaatggcctaaggttttgtgtgtggataagggtcacttattaaagtaagtaatgaattattaaagaagaaaaaggacaacattttcggaaacaaagttgagagttttgagagttgaaaaagggcaaatctttcttctccttcgtcactctaattgagttgactaaacacagttcgagttcgagagacaatggatcttgctaagtttctgtgttggattgttttgcaactgggaatctcactcgtagaatcaaggtacatggtctacaatacttcacataccattgttcctggaaaacttaatgtccatgtggttcctcattctcacgatgatgttggttggctcaagaccgttgaccagtactatgttggctccaacaactctatccaggtctttgccctctttctattgttcttgtagctgtttatggattagattttgtggtacttacttcgtttttgttttatttttgctcgtaggttgcttgtgttcaaaatgtactggattcaattgttcctgcgctgttggctgataagaatcgcaaattcatttatgttgaacaggtaaattttctttctttagtcctaattgattcgtgttgttggctaggcctgtattggaaggtttacgggagagatgaattgtacaactaatagtactctcgttgttagctaggtgtgaacaatctttcgagttgaatgacggttagtttttgatgaatgcaggcgttttttcagcggtggtggaatgaacaaagtgaggagattaagcgtattgtgaaagaacttatacactcaggccaactagagctcatgtatttgttttgtcagcttgctttatctgtatcgcatttgtccttgtgtctttccgttgagttatatttgactcttctgcagaaatggtggtatgtgtatgcatgatgaagcagcaccacactatatagatatgattgatcagacaaccctcgggcatcgattcattatcagagagttcaatgtgactccaagaatcggttggcagattgatccctttggacattctgcagtgcaggcttacttgctaggcgcagaagtaagctcctctctggcccttcattttggttttattttatttctggatccagaggtgtgaagatattgatttatgcaggttggcttcgactcagtcttttttggccggatagattaccaggacagggagaagcgttataaagagaagactcttgaagttatctggcggggctctaagagtctcggttcttcttcacaggttaaatacaaagcaaaataaatgtcatgaagcttatactatgaattccactagattttcaattccttgaaagcattgatctgacttgttacagatttttgccggtgctttccctacgaactacgaacctccacctggtggcttctactatgaaatcaccgatgattcccccgttgtccaagtattttccttggcagttgattacacttatcgttttatttatcctatgcctatgataagttattggcttttaatccgtgaaggatgatcctgacctgtttgattacaatgttcaagagcgagtgaatgcctttgtagctgcagctttggatcaggtacatttgtagaatgttcctttttggtagaattttttgttacatttttgtgacatgtttcttggtatctgcaggccaacattactcgaataaatcacatcatgtttaccatgggaacagatttcaggtaccaatatgcccacacctggtatcgacaaatggacaagcttattcattatgttaacctcgtaagtaattcatctaaagatcagtcttaattatctgttcctctttatgtctccagatatttgtctttgtggatttatagtaagctagatgattagaaccactagatatctctaattcgtggaccctggattattataggatgggcgtgtcaatgctttctactctaccccttccatatatacagatgcaaaacacgcggcaaatgaggcttggcccctgaaaacagaggactatttcccgtgagttgggtcttaattttttaactccttcatccagattttgcttatatattaaaccaatctttacttcagttatgcagaccgtataaatgcttattggactggatattttacaagtaggccagcacttaagcgttatgtcagagtgatgagtgcctactacttggtatatgttcttccaagtttaaaataatgcacttgaagttgtgttattattcatgtatttaacttaagagtttaggcggcaaggcaacttgagtttttcaaagggagaagtcagaagggtccgaatacagattcgttagcagatgcactagcaattgctcaacatcacgacgctgtttctggtacgtcgaaacagcatgtggctaatgattatgcaaaacgactagcaataggctatgtggaggtagagtgccaacttcccctgtgaattgtggttctctagtggcctgttttctctatttgcacctcagtaagatcttgtaactttccaggctgagagtgtggtggtacttctcttgctcatctgactaaa

SEQ ID NO: 25402 - DNA, 1609 bp, Arabidopsis thaliana landsberg
atcatgtccatggaaaatatggattacaccagtaagacttcattaccctatccacaaaaccaaccaagagatgttcctagccagaataaacaattacattagaaactgcacctttttcacagaagccaattgtgactgcaaacgtaagatatattcttgagcttcagaggatactctgcccaaaccttcttcatcaatcgtttcagaaaggttctgagttctgctatcccttttggatgaaacatgatcttcatcaggaaacgtcccttccatatcatattcagtgttttccgaagcgtggctgtccaagcctccaccactcatatcaaggtttttttcaagaaaaagccgatattcagcattcctcaatgtatacctgtagggtaccaaaacatcagaaagatgcactaatccagaagacatactactattaagtactaaaagctaatttagtagaaaagaacctatcgacaccaaatgaagaggagtataattacaacggctgactagtgaactaagccaactatgtgatatcataatagcagatacacaatttgattctacagagaccattctttgatataagcttcaggacagttgaattaaaagcttagattcagccccacaaaaaaaattgactttcatgagaatcataattcagtatgtttcattcaaatgatcaataaatttcaagtttcaacacggattatcaaaacgctctttgataaatctcccaactatcataatccaccaactctatgtaattcaagcttccagtttccactatacctaaaggctaaaactaagctagttcaacatcacagtgttcaaagagaaggtatcctaatgaataagtattgatgagagagcatacccagtcatcattgaagataccaaaagcttagacaaaggttcccaaagtgactcaatatgaacctgaaacctatcagatggaagaagacccaacatgcctgagattgttcttttcattgcatccaaagtagtcactggaacatccttctgaatcaaactcacatctaatggctcaatctcttgtataagatcagaaaggacacattttttaggtgatcgagaatcagaatggagagtgaaatcatcgagagagaagccatcatcgccacaattactactgaaattgtttgaagaagttgtagaagaagaagtgatagtgagacttcgaaatctccgattgaatcgaggaagaaggaagaggaaaggaagaggctttgtgggtttatggagaagttgaggaagagaaagagagaaggaagaaagagtcgttgtcgccattaaaggttgaagctttaatggcggaattgtacgaatttctcttcttcttctttctcttcctcttagtctcaaaacaaaccctaaatttttttttcttttgtgctctgttttatcgccagccacaaaacaaaccggaacgtgacaaaaacgatgaatacaacaacatcgtctacgaacacgggtaaatggtgctgaccggttattgtgggggggtatgagcccggttttgaaatttcatgttccgttaattgatccagcctttgtgcatgaaattaatttttataaatttttttttttt

SEQ ID NO: 25403 - DNA, 2645 bp, Arabidopsis thaliana landsberg
gtaacttagcataatggaatcatcaataaatacatgcatccacatgcaatttcgtttcaaattttttaacaccgcataatcgcctaatgacataagtcgcagaatgaaaactcgcaaatgaaataagcaactgtcacagctctagagaagattgagattcgtatatcctccaggaccgtttacttaagtcaacatgtgccgtcgataagaatgggacgtcatcaacatttctcttaatgatttgaagactagcctcagtttctttaattttctgcatttgactttggacatgattgagatccgtaaatcctctaggatttgctggttgttgcattggcaaattccaatatgttggtcattgctttggtaatttcggctcttcgtagccttgttgtatattggagggctactatttctaggaagactttcaaatagagtttgatttttgatttgttctccttagtatatatgcaaaacatttctaatttagagtaacaaaattgagaaaaatattgtagtccggaatggttgtgatggttaggacagacaaatccatttgtttgaagagattttcgtttaccattcataaactataatccgttactgttttagtccgctttgcccatatctaccattcaaagcgtacgtgtaatcctttgcattcctgtacagttctactatttaccataaaatctcttttcttaaagtcccatcatacgagcataacaagttaaacaacacacaacttatttctctcaatctattcattttattcttccaactaaatttttactcaacttgttcaccttattactctgcttcttaagggacaaccatttgcacatatccaacttgattttgtttctccaaaattgcaacatttttgcatcctaaaacttttgtaaccaattagagcaaactaggtaactcaaaacaacatatgggctttcaaagtaagtattctctcaaaatcggctgattcaacttcctgcttctttcaaaggattcataaacttaattgacaatgggtaaaattaaattatccaaacaaatccataaaagaaaaaaacaacatttccctaccaccctttatcttttcccttcaatccaaatctttccatctttcatactcagattataaatacgaacaaattctatcttttttttaaaaaaaattggggacaaacttgcctggctctgcaatggtgtgggggcttgagggtaccttcctgttctttcatttttgattataaaattgaatagttaagaaaaaaaaaaagctctttcgagaaatcatcatgctatcctccgcttcttcgcggtgttcaagcctgtagtcttgcagattgggcaaagattcttctgtttcagccattctttaatgcattggctatggaattcatgcccacattctagtgtccccatgtcttctccttcggtgtattcctcctgcaccaagttttcaccattcatactcggacgaaaaacaatcttataccttttaaatgctatttcagtaactagtatatttttacctgacaaacacagcatggctctgcatcttgtggagattttgtattgcttttgtattttcgttgctttaaccggtttgatatggtttcctcgtttacaccggtacaaacatctccaatccgctcttctagtgccaacaattcctacagtttatgaaccaaaaggagttagatttagtgatttaacgtgactcagacaaagatttatggttcactatggtttttaatttacctcatatgacatgttgtccacatcaagtcgcatgtctctataccggtcatgaccagtagccccatcaaacagtactgattgatttataagcataacgttctggaaaacaaccattcagattatttatgctccagttattatgctagttcatttagaaatcaacagagacggacacaagacaagttcgaatttagataacttcgctacaatcaggaaaaactaacctcaagccgcaagttgttattattagcatccctacgcatgacatccaagacattctgcatctgtcggaaagagaaacgtattgttagttctatttgagtgactgctgaagaacaaacaaatggtatttatgcgcaactgaatgagccaaagttaacaaattccatccacgttaaaggctacatgccaatagaatttgtatcgactgacctgggacaccataagtctgcttcttcctctgcttgcagctgccaaggcccgcaaaggatgaggaataccaaccacactatccccttgcctatcaaacaacggacctgctctcgagtaagcccgattatgcttctgactattatcaccaccaggctgaagcacaagcccatccgaagaggcaggaggggccaacgaacgaagtgttggatgatcaccagatctctggtttgtagcatctgctgctagggaagaaagcaagtacctacgtgcaagttcagacctttcagtccttcttctttgataatgtggtgaattctggtaagaagtccacgctagattagaagatggtggtggtggtggtggaacacttgttgttgagcctgtcctggacactgatgatgcactattcaggtttccatttgttacatttctgctactctgactacggg

SEQ ID NO: 25404 - DNA, 974 bp, Arabidopsis thaliana landsberg
ccattcagaaaaaaaaaataaagtggaaaaactcgagaagtgttctttatcaagagatgattagtagtgtcatggctgaagaaatttaaaagaagaaagtcatccaagaaaagctagatgatcctgattcattcactctgccatgctccctaggaccattgacattcaataggtgcctttgtgatttgggagcatttgttagccttatacctctctctacagctaaaaggctaggagtgatagagggattgtattcaagagtgatgaagctgaaagattaactttgggattttgaataaagagttaataagtatttaatgggaattgatctagagaagatggaaactacactagctatcaaagaggacaatgatttcacaacagaatggtttgcaccaaaagatcagaaaggagttcatttagaggaaagaagcttatagagtaagttgttgagtgaggaggaaatccctatttctgacttattctccatgagtgcttaaacagcccaataaaccctctactgaagaagaacacttgatttttgattatgttgctggagaacttttggagctcaggatatagtataaagctcaagagaatataattgggaagttaactcataagatggaagagttaaatagcaccattctggaacttaaagaaatggtcaaggactaccccaatttcgaatttgaggattggtcaaaggagtctggttcagaagaagaagactactctgctgattagaaagaagcttattttgaagaaaaatcaaatgagtactcatcctaccatatctcaagagaggatgcagagtatgattcaagcactgaaaattcaaccactgaagatgagaatttctctgttcctctcttcaacctcttttctgactaagctctgtaagagtcaagcttagtgacttaaaacaagctaacaaaagaggaagtcctatgtctatccatatatataacttt

SEQ ID NO: 25405 - DNA, 828 bp, Arabidopsis thaliana landsberg
gtggaaattgaatctaaattcgacattgtgttgttgcgtgaaaccataaagtttctctctttacgctcaatttgatctccattgatggggctgtgtcatgggaaacctatcgaacaacaatcgaagaatctcccaatctccaatgaaatcgaagagacacctaagaattcatctcagaaggcgaaatcttcaggctttccgttttatagtccaagccctttacctagtctcttcaaaacctcacctgctgtgtcatcctccagcgtgagctccacgccacttcgtatctttaagcgacctttcccacctccatcaccagctaagcatatacgagctctcctcgcgcgtcgtcacggttctgttaagcccaatgaagcttcgatccctgaaggtagtgaatgtgaggttggcttggacaagaaatttggtttctctaagcattttgcttcacactacgagattgacggtgaggtgggtcgagggcattttggttatacttgctctgctaaggggaaaaaaggtagcttgaaaggtcaagatgtggctgtcaaagttattcccaaatccaaggttcgtaatgactgtcaatctctctatgatctgttgattcctttgaagctattatgatatgtgatcatgccttaggttccacttgtcatttgccatgtgtagttcataggcttaggcttaggcttagctggaactttgactcgtgcattttgtttaggaactttgtttgatacatttttttcctggagtgttgtcagagacgcggtgcgtggttggtgtttgaattaaacacagcacaaatgtgtggtatcagctcat

SEQ ID NO: 25406 - DNA, 1080 bp, Arabidopsis thaliana landsberg
taaagtttttacatttgcgtggtttcctcggctcgaaagactcatgtcctcatctttgttatcacaagcaacccaaatttaaagttgtcctcaaacctcaagaaagagcacttaccgcttctctgaaaactaacacaaaaacagagcggctaaagtggactaaactcacactcgacggcacatgagcatctacgggcagccagaaaagccgcctccagccaccaattcattgcgagtaacagaacatcttccacaaaatagcgacgcgcttaatccaaacgccgcctcaattccccatggagaaccccaccaaggcaacacgtagtgaaaattttgttgcaaactgctataggctgatcctacaacaaaagaaaaaagcaacctaactgagccacaaaagagccacattgaagcttcaacggaagacgaagccaaacaaaaaacctccacacaaactattgccacatccacattgaacaaatatagtaaacctctctgagaactccgaccagctagccacaaccacaaagagcccgaggagagaagcaaatctaaaccaaacctgataaactgtccgagagaccaaatcgaaggcgagaatgagtcagatccggagccgtccttgagctccatcacctcctccgccgtcaatctctccaaaataagaacaattaggttagaatcacctccacgcgagctcaaacacaaccccgcaaaagaaacaacaccaccaagccgagcccaccaaactaatcgacactctttagggctatgtatttgaattatcatgctttagggctataattcagtaaagcaaaatacttgaatttgcaacataaataaatttataaggttttgattgattatatgtactgttgtattacaaaataactaagaataataagtatttgcactatttttcttacaactatattttattctcaatcaagtattgcatacaattttatgtatccgctaaaaatatgtatcgttttgtgataagctatgaaatattctaaaataaatcctgtttttaattttcataagaacaattcttgaagttgacatgtcatctagtta

SEQ ID NO: 25407 - DNA, 1267 bp, Arabidopsis thaliana landsberg
cgaggagaacactgatccagcactagctagatgtttcttcattacatcacaaatgtgtctctcatcttcaacagacccatctgttacgaagaagatcataggaatagagccacgagtatttgaaagcatttccacagcctgaaagtattgaacaaagttagccgaattaatgtcaggattcaatcagaggggatataatcaccaaaatgttaagctacaaatgagtggtggaaagaccttctctaggggagggagcatgtttgtaccatctgcgacgacaaagttcttgttcatccactcaatgcctctttcaacagcatcagaagtgactgactccattgatgtcgaaaatagagcagtatcattgctgaaagtgataatattgaaagaatctccaggatcaagcttagatagagctgtagatatcgcattttttacatcctcgagaggttttccagtcatacttttacttatgtcaacaacaaatactacctcccgcttgaatgcctaaagttgacaaaacaaaacttaagattaaaatgcaaatggatttattgctagagaaaagaaagagttaaaaatcaaaccttagttttttgctgctttcctggaaaaagatagaaagaaaatatgtccctctgatcaacatcgtgaacaggcgcagattgaaggaaaagtccaccaactatattacttgaggaggcctacgatttattagaaaacaaataaaagcataagcactctttacaactaaattcaatccaaattttttgcaagtgcatacgcgaagttggagcaccaccagttaaagccaataccgtataagaaaagctaaagtcagtgttcgaccacttcaaaacatctgcttcatatgcaaacctcaacttccctgcactccgcaatttctcctgtaataaaagaaaggaataagagttaaaatgatagagcaaaaaaattgaaatattatggagtgtactcagaaaaatttataaaatcaaacctttagttgatgactgcatcctttgcagagaacttctgttccagtaccagcattaacactcaagtaaatcttttctctttttgagattttctttaccgcaggagtcacatactcaggaaagttgaaaggaatatcaagaaaaaactgcccttggttatacgtcaacttctgagaccaagtcatcttgatagagagattggtacctccctcaaccctgaaaacaagaacaggaaaccgattacctaatccggaatgaagaaattaaga

SEQ ID NO: 25408 - DNA, 731 bp, Arabidopsis thaliana landsberg
gatcgggtgtatagtgtactccctatacattggagagtagaagggactgaaattggtgaatgcttaaatgcaacgtcttgacaatgtaagtggcactagtaaacaaatgtaaatacactaaaaaaagcttctatatccccattttgatgtgtattaatattatacatctatatagaataaagaagaaaaaagaaaaaccatgaacaagttggtgggggtgacacaaaccatacctcaaggtaggtgatatatccatatggagagatttttagctgttcttttaaagttaggaccacttcttcctcaaaacttcacaaaaatctctaactttgagataacactaaatccatcaactttaccttcttcatgattaagaaaaaaacatacatctctcagtctaggaccatagagaccaggaccgggaccaatcatgttgttgtgttggatgaaactcgggtttcgaggttaattctgtacagattttgctacatgactaggggtgtaatcatgtaacctttgcaaaggcactagattccatgatctaagaactcaatgttattacggtattaagacagctactagaaaactaaaagatgggaggattcttgtggttcttgggttggtcacgttactccgaaagaagagaaagggagagagagagccaaagtctttgtcatcaatgaagtttgggtttttgattgataaaattggtcccccactttggtataaat

SEQ ID NO: 25409 - DNA, 574 bp, Arabidopsis thaliana landsberg
gataatttgattgaaactgagtccgaggaagagcaatctgactcagaggaagagccagattctgcacaatgtggtacgaccaatcctcgttccttaaaccaaaagactagtggcggtatatgaaaacttcaatatgtatttcaaaaatctcacacaacttaagctacattttagaaattgttatataccgttaagtaaagttgtgaggttttcaggggaagaaggcgaatcagaaagcaagagtacagagtcatcgagcagcatcaggagaaacctgaggtcaggaagtagaagttaaagaaccattgtgtagatgcagagagagagcgaatgtctgttcaagttgctcaacatctcgagagctatcttataatttacgtctgttttggtcaccgcttttgtttctccctattatgcttagatattgaagaatcgacaatatttatgtctaatgtcctagccggtttagttatgacaatttgtagccaaaatatataagatctgaattagttttgtatcaaatttcctttttcttgtcagtttcactgacgaatatattagtggcctcatgggt

SEQ ID NO: 25410 - DNA, 1231 bp, Arabidopsis thaliana landsberg
tttttatataccagtacatttaatgagtgattatttggtaattaagaaagctggagagatagagacagagttcaagaagttgggaacagagaatgtgttaaaagagttcctcacatacaaaacccctggaccgctcaatctccccaaagacaaatatttcaaacgctcagaaaacgctgcgtctgcgttaccactgtggttaacacaagaagaccttgattattacgtcactaagtacgaaaacaaaggcttcaccggacccattaactactaccgcaacattgaccggtacgtttaatcaccacacggttcaatagtatcatcacataattttcatattttaaccaatcggttcgcagaaattgggagctgactgcaccatggaccggtgctaagatccgtgtaccggtgaagttcataatcggagatcaggatttgacgtacaattttccgggggctaaggaatacatcaacggtggcggtttcaagagagatgtaccattgttagacgaaaccgtcgtgctcaaaggattgggacatttcctacacgaagaaaaccctgacgtgatcaatcaacacattcacaacttctttcacaagttcctttaaaatcataaactaaggaatcgttaaataaaacaaaaataacattcgtgtgttttacaggttagtgaaaatcttatgtccaataaataccgggaaaatcggagtaaaccggatttaatcttgatcggaccgattaatatgaaattaagaattttcctccaaatttgggatttggatcatctcttcttcttctacgtcttcatcatcagtcatcactacgaatggatcatacgtttgatcatacttttgtgaaggttaatggaattagtatgtacgtcgccgagaaaagtacttccgtcgttggatgaaaaattgtgacaaaaaatgcaatgaaatatagttaagagacgtaactttaaatgaaaagatgcaactataaagatacaaccataaactaaaaaatgcaactgtaattgaacaatataaatgtttaaaaaataaccataaatattccatcaaaaagatgccctaaaaatacaaccagaaaaaataatcgtctatatttttacaaaaaattgcgataaaaaaataaccaaaaaaataacgatcagttttttaacggaaaattacgataaaatgaaataaagaaaaaaataaatcctcaatatataaatgaaaaaattgc

SEQ ID NO: 25411 - DNA, 723 bp, Arabidopsis thaliana landsberg
tttccgaccatagaagaaacttagcatttaatttatttattttggttatggcaattccagaaattattctctgttcgattaattaaaacttatgtctttacattggttgatacgcacgagcaaagaaacattcctaatctcagaactcagaagcattaaccaactgattacagtaagcaattaaaccatttaacttgtcgggtcgagcaataaggacccgtttcattgtcgggtcgaggaacaaaagaacagaaaaagcagaagaaccaaacgatgacgtgttaagccgtgactggtgaatgaccttttctcctcgtctctctctctcgatttgattcgtttcgtcgtcgatcagaaaaagcttctttctttctttttttttctgggtttttctgaagtcaaaagctttttttttcttcattgttcaaagattttattttgttgctcattgtttctaaccttgcttttctcgtgaacacagcaagcaacttggtttagttttactagaagattcctaaaaatgagatatttagcggtgacaaaaaagtttcatttttggtgctaatgtagctgtaaagtctaggccttccgatatataatctcttgaaataagtttcgagactgttggaaatagcaattttgttgttgttgtgtgatccagtgatagatctgtgaaatcaaaaagcagttttttgtgagaatcgggtcaatgtcggttcctcc

SEQ ID NO: 25412 - DNA, 1065 bp, Arabidopsis thaliana landsberg
aacagtgtggtatatgttgttagtgcataacgccatgtactcattcctctttccatcttcccaatgcttgtccaacgcggactctgtctccttgtttgacacagaatctgtaatctgaagaactgcttgaaccctcgggtgtgtttgcggttggtgcttgaaaaatgagcactacggttgatcccatgttgaatacacctacctgcatcgacccatacatgtgaccatttaccaatcatacgaacaaaagaactttgttacatttcttaaactggaatttttattctctcttttgaacctactcttacctctttccccttctcgagccttaagccaagaccttctggatcatacacccgctcctctggtggctctgtaggaaatagcttcttctttggcttgtttgttcttagctcaggttcaatgaaaagctataaaagcaatttttagcaagttccttaatgtctgaggcttatgagtttcgattttcattacacctacctcaatggatccaatgttggtcgcgcctacagcagcaattgccataaaaccttctttccatatcccttctagcacaacctgttgtattaacagctgatgatcaatgtctggagacaataaaatgccagacatatttggttggtacacctacaaggaatcacaaaaattaccctttcattctcgacatagagattccttatcgttcttgtagcacgctcgttcacaggaaacaaccggcctgaaattcgttttgtagagatactaaaggtccaatcacacatatgttccaaaaattgttgcaaaagcccaactacagaggctgctatatattaaatgagaggattgagaataaccaaacctgcaaagtgtcgacgaacagttgcattccagtcagccggagagtgtattcgatgataatcccctggttttaggtatattacacaataatagagccccttcattggactgcaacaaaaactcgatgaaataagttgctgttattttaacacttaagttgcattgtagatgttttattgacctggctgagacgttctcccgtaattt

SEQ ID NO: 25413 - DNA, 1149 bp, Arabidopsis thaliana landsberg
ggaatgagttatttctgggcctgacggggcccccccctccgccttcatcaacattctcaaactcttttacaaatctaggctcgaccagggtttaagcaatcaccggagctcttagtctattacgctgagagctaataaccgaccttatgctaagtttctttcaagtctccaatcaaacagccatgagagaaattgtgacgattcacgttggaaaatttcgacactttgttggctctcacttttggaacttccataatagagaagcaaaacctcctgttgaactctctgctccgattcttttaacaatggattctgggttttgtctgtctctgtttttcattacaaaagtgtttgtcttttttgctataaatcgattgggtttgctaaagttaagaacttttacttgaaatgtaggatgaattgctcggattggctagtgaccctgaaagcgatccaatctttagaaaccataatctcgacatggatgttctctaccgctccggtgagacccagcaggtgagagatgattgatatttcgttgactttgatcaatctcacttgtttttgcaaatctcaacatttgtgtggcggaaatttatacagggggttgctacatacactcctcgtttggtttcagtcaacttaaaaggtaataatcttagctttatctttcgattagaagattctggatttgatatataatggtggtttatatgtttacatctgaaactgtttcgtctttcaggggcactagggaccatgagctcacgcggtacactctacaacgaaggttcttcatcaagatcagattcttcagcaacctggtcagatttgctaagtttttatggtttttaggttaattcaatcttagtgcatataaaacttgattttagagtaatagcttgttcttcaattcaggtgatgtgaataatgtgatcttatctttaattttgtgtcttgtaggtttggagatgttgatactcagagatctgaacctcgaaagaggaacttgtttctgcaaagtttgtacgaggaagaacatgtagtggggaaagaaaaggcgaaagagattgaggacaaagatattgttggatgcttagatgaggaagttgaatgttggactgacttctctaaatcccattatcatcc

SEQ ID NO: 25414 - DNA, 1616 bp, Arabidopsis thaliana landsberg
ggctttacatgtttattctgtagattctagaccaagtcgtaaaaattgttgttttatgttgtaggtattgtgcttgactctggagatggtgtgagtcacacggtccctatctatgagggttacgctctcccgcatgcaatcctacgtcttgatcttgcaggtcgtgacctcacagatgctctgatgaagatcctcactgagcgtggttactctttcaccacaacagctgagcgtgaaattgtcagagacatcaaggagaagctttgctacattgctcttgactatgagcaggagcttgagacggctaaaaccagctcttctgtagagaagaactatgagttacctgatgggcaagtgatcaccattggatctgagcgtttccgttgccctgaggttctttaccagccatctatgatcggtatggagaatgctggtatccatgaaaccacctacaactccataatgaaatgtgatttcgacatcagaaaggactagtatgttaacattgtgctcagtggcggatcaaccatgtttccaggaattgctgatcggataaccaaagagatcacggtgttggcacctagcaccaggtggttgcaccacctgagaagaatattggaggatccatcttggcttctcttagcacattccaacaggtaccctaaactctttaaccgtgtgatgatgattcaagttattcacacaaagtactgatgtttggtgtggatatcaaaggcagattacgagggatcagggccagccatttttcacagaaaatgcttttagacaacctctttatgtagcttgttgattgatgaaattggcttaagattaatatttttagtctttagacgtggcttgttttaagttttgttcctttatgtttcttcatatgtttgaaaaaagcggagatgggtgtgtaactttatccaaatgttcgtcaagttcaagaacagtataattttgaagatttgatataatggttgaaaaggagacttgaagaacaaggtcaaatgtgttttggtaatggttatgttttatatgttttgatcctcagtatcctctctgatcgacacttcaaacattttgtacttattttatctctttgtttattttttatggatcgtcagctaatagagaaccaaagtttgaaaccaaaggtattagagaacaaaccaaaagccaaaaagagagcaaactagagataaatactaaatgtgtcgttattcttcaaaacaaagatggtttcacaagtcttgcagccatacctcattaaggctgacggtatccgaattgtgatggacatgctcgtattcaactaagatttgtgaaaaagtcagattacacaacagttttctaaaaagtgttggactccaccatagtataaccactgtgcaaatcaccatctaccgtcaacaatttcaatgtcttattcactctgaaacgagtagagtttatatagagtgagtgagagagaggtcaatgtagtgtcacttgaaaactgcaatttttactctcgtttttttaccggttttacttgtcttttttactttttatatattatcttctatttattacccattttgatgttgccttattcatggtcaaataatgcc

SEQ ID NO: 25415 - DNA, 1444 bp, Arabidopsis thaliana landsberg
agacggtttatttatagagaacagaaacttgaggtacttagaatgctgagaaataaaacctgtgtagagccagtgtcatgattctcgatgaatgttacagcacgagaaggccaccaaccaactacacctggaggcttcccttttgggtctgagagtctccaatattcacatttttgaagcgcctacacacagaaagctaccagatattatataccaaaaggaaatgttgtatcaaacgtaacaagatacgatattattagtaccgtatgaagaattcctttggtagtgacatcaaatgcaccagcagctccactagttgcattaatccagtcaactattctttgacgatgtgcgtcttgattgtagtccatttctccgtacgtgtaacttaacgaatcccaatattcaccaaccgcaaagtacggtttgctagcatccatatagtctttcacataacctccccagaaccctcttacaaagtcaagcctccatccatcatacccaacttcttccctgcaggtgaaatcaaaatagtgaacgaaatcagacaccaaactaatcagaagaagatattaaacaaataacaggggaactaacatcatccagcatagccattccttgatatccttcctaacaaagacttgcgagtgatctatgtttggagcatcatggaaattatctccactgctcttgtttcctctaccctgaatcaatgaattagttgattgtatcatcaagggtaatagagatcatatgcaccttatttctctcaaaaacactagtccaagttcataatacggcagcatataacagcaaaaagcacattctctatcaaaaaatttgcctcgctttcgttctatagctgtttattttaaatccaaagaaaggaaagtaatacctggaaatgagggtcatctgcaactactgccctatcgtcccagtttagacgtcctccaaatagattccatacaccattttgatttttgaagtgtgcacagcggtgattcagaacagcatcgcctaaaactttgatcccgaccttgtgaaatttcttcactgtatcttttagctcatcaattgttccatatctgaaagtttgcaacaaaaaatagggggaaacatgtacttcagatacatgatatcatgtaaatgcataagtattgttaatctcctaagagaattaacatttccactgctggctgatcatgcatttaaggcaacaaaaacaacattaaccagaattctactttatgattcaacaatccatgacgaagtttaagcaactaagctacaaaagacagtctgataaaaatgcggaactcacctggaattcaagttatacaggtctttaggcatgtaccccccacgctgacacagattctgtcggtggaggtaaccaaagaacagtgaatccaagtgaagctaactcatcggctttttcttg

SEQ ID NO: 25416 - DNA, 1254 bp, Arabidopsis thaliana landsberg
ttcccaaatggggttctttccatcttctttcctcgtaacgagaattttcgcgggaaagtgagaaccttgggattggaagaagagtctcgaatctcgtctaatcttatgctctggtaacgcgagagtggaatctccatgattggaagagaatggggtcaataagagattaggagcaaacagaggatccagatcatattgatcggaatcgcccgagaaagcaccgtggaaagatggatttgtttacttgatgctccgcaatgtctgaagcaaatgggttttgttgctgaaagaagaagaaggaaaagaagtgatttttgaaatagagagagaagagcatcacacagcatcgggagctccgctaatggcagttggaatttagactttgaggagagaagcaggtagttatgaaaactacgtcgtttttggcataagcagatctaatcacagtttaatttaagaaaattattgatttgcattgttgcagtaaacaggtttttatgacattaatcatagcaaaatacgtttgatggaaatagttttatttttattttgaagattgtttgatgtttatatttaacaatatctttgacgtttgaagaaaaaaaaaactacattgatgatcacatttgtttgttaagagatgagcaagaaacaattgtataatctacaaggaatcaaaactaggactgtttctttacttactacctcacaacatcaaacgctcgaagaaatcatgaagctaatgtggttggctcgcagctatctcgaacacaagccaagacatctctgtattctctaaagatagtgaaggagtcatgtacggcttcattgctgcttttcttgtattcgaagagaagagaggagtgatcaaaagccgtcaacttcacaaacccgtaatcatagtctttgaagatactccacttgggtttcagcgagctgaacgaagacaagtgacttcctgcaccaccaacaaccacgtgtatagctcctttgaaggctcctgagtagtgacttttctcattgtccatacattggttctggtaaatggggcatgttctttcatagttatgaacatgaccgtagaacgcgatgtctactttatacttctgccagagcttttgcaagctctctcttcccataggttcttccaagccaccttcccccgcagacccatcgtttgttcaacaaccaacaactcgatgagcaataaagatcaaccaaggctgagcccttctgtctacagagtgcaagtca

SEQ ID NO: 25417 - DNA, 1007 bp, Arabidopsis thaliana landsberg
gctacattaccattgttatgttgttttgcttacgttggggtgattagatttcattcaatattttttacaacatttttgataataggattcgtgtgggcacacaaagtaactaaattttactgatgctcaagggtgttcatctttgacattattattgatattgggttgagaaattaaacaacaaaccataaacccaactttaaacaaccaattcagaacagacattcaaaagtataataatcatttttttgtaagggaaaagaaaaaacttaaaccctatgttgttcaatcttcttcacgagctcatcaggtttggctccaacaaccctatcaatctcttctcctctcttcacaaaaacaaaagctggaagtgtaatagctctatatgtcccagccacatcctggaatacataccaattatagcttagtcttgaaaccataagatgattcttcttcaagtaataaaaaaaaagagtaattaccattagcctatccacatcaaccctagcaaacacagcttctgagtactttgaagcaatctccctaactctaggttccattgctttacaaggtccacaccatacagctgtgaaatcaattactagcttcaaaaccacaataattttttcagttagtttaagagaaaaaacatgtcatttacttgtgaacaaaattagaaaacacaaaatagtataagatttaaaacaaacattataagtttggttaaaaaaatttaatacgttttaggtagttttcgagtaatgtataccaatttgtgtgagcctttcatggaatcaaagagagatttccattgtcttcttgattcgatttccacaacaaatccataactggtaatttccattgatgaatgaacatcatgcacagatgaaacattggaacccattatattcggaatgtgtatgtatgaagaaatggtgttcaaaaatttgctagtgatatactgatatgcaaagaagagagacaaggaggagcattataaggtttta

SEQ ID NO: 25418 - DNA, 1521 bp, Arabidopsis thaliana landsberg
  unsure (1)..(1521): unsure at all n locations
aatgaataaaaatatggggtttaaacaaaaaagctttcaaactcgccaatttttacaattttaccttttatttgaaaaatataattaatcttataaagtctaaaataatatgcaatatgacccttatatgtatattgtaaacgttttcatggtcacaaacattagatttttatatttttgaaagtagatttgaattctttgtcattatggcttcgatttgacatatcatttatcaatattttacaaatttgaaaaaagcgaaaacattacattgcatattatatttgatttcgtataattaatttgtatttttagaaagtttaaggtaaaattgcaaaaatgtacaagttaaaagatattttttgcacaaaatcatttaaaaagataacaatgaagtgatttaaatatttttttaagaaaaaagaatgactttctgtcctatcattttttacacagctggctaatttactaaatgggggttaaaggttagattttttactagagtttggtttcgtatgacatcattggatgttacgttaaacgtctacataatgaaatgaaacatgttcatggaaaaaaaatccagtacttgatggcaataaaccataataacatataattattatttttcttgattacatcttcatttcttgaaatttacctaaattacttcacgaaagaaactcttgaaacgatttgggttagataaaacannnnnnnnnnnnnnnnnnnnnnnnnncaggcctaagctcataaaactaagaacagacatatatgatatgagggtgcacaaaaagtaggaatccaactttatcatatatagatacaacaagttaaggcccaatattaagtctacacaagctatacaaaattacaaatcatagagtagccaaggagaggatgcggctaactaaaccggataatgaaatttagacggaaatgttgtgaacaaagagttgagctcattgtacctcagaaagtcaaacccatgcctctccataagcttcttctgtttggtcttaaaccgctgtcgaaaaagtccttcgaatgatggttccgtcgatgtccgaagaaaaaagacgtaaccgaggatgaaatgaatggttgtgacaaagaagcagatgggttccattacgtcccagcttagttcccaaaaggtaagacgcataaagcctatagtttgcacagctaggaaaccgagaccacaatataactcggcctgaactatacgtcgtgcctctatgtcaatacacttctttgtagtctcaagctgaactaactcttctttccttggatcgtttggaagtactgatgtttgcttgatcattgcctccatagacttggctatctaaaataaaatagtaaaattctacgaatgagaaatgaaatgaaacgagacaatatactaaagtattttgaagaaaaaaacaatattgattaattatcaaatttaataaaaattaatataaaaaattggatgttaaatttgatattagtggagtctatcaacctaccaataca

SEQ ID NO: 25419 - DNA, 1383 bp, Arabidopsis thaliana landsberg
tttcgtcatgtttggtcaactgtagaacatatcatttgtatttacaattaaagtccaagaaatgaaatatttagactacacaataaaatatttgcaaaagacataaaaaacagggcaactgaaatttaaaatagtctaaattaaactaattacattttttaaggatcggtagaatgagacgggatgcttattctaattggtttctaacacattaaaatttaaatttttagattttttttaaacaaaaatattttgtataataattaaaaaaaaaaatgaaaaacattttctaacttgaacaaatccttttgaaatgaaaacattttgttttatcaaaaaatggtttttaaaaaatagtttacatagtaaaaatatttgcaaaaggccataaaattagtcaaagtgttaactttaatttcttttcttgttgatgggtcgggtccaataatatgtcaatcagcccaattctgtcaatttgaaacgtctaaaccagtacgtaaaccgggtctcgattgtgattttttcccgacctagtgatccaattttcgaccaattctgagccaagttcaacactaaatctgcccaaaatagtccttttttaccagcagaaatagtctcaccataacaacaagttatatacttatatgagtgctgttaaactttgaagacacaacctgtaggctatgggacgttagaaacctgttaaaatttgaagcccaactcgatgttcagaagcagcaccaggcctttatttataataaaaaattgtggcttgaagaatgtgattggggtcgatgtgggacaaaaacaacaactagtttcacgggctttaaatagttgaagcccaaataggtgacttaaatgtgctgtgaaacagtagtgatggttgggagaagttgagattgaaaggattttagagcagcatctaatactaaaagtagtagacataaagatggttaaggagattttgatagtcgagatttctatctttttctcaagacgaataaagcaattaaggaagtgtcatgtactcatgtgtgagtgagccacttaatgtagtgttaaagctttacgaaacattcctcaattacacctaaccttcttcttataacagaaaataaagagtcctttgattctatttctacaataaccttttcttttttctttaaaacgtgtcacatattataattgcattctaattcctaagaaaaacaacaactctttgatatttttcatcgagattcaacaatagtggtattacaattcaaattgggaactatgtgcaactgaaaaggcgcacgtaatagcgtccaaaattctgtacttattttaagatctcaaacattgatgaaaaaagaaacttgtacttaatagctgagtata

SEQ ID NO: 25420 - DNA, 2721 bp, Arabidopsis thaliana landsberg
  unsure (1)..(2721): unsure at all n locations
ggcggcttcttcttcttctggcagacggagatacgacgtttttcctttcttcagtggggttgatgttcgcaagacgtgcctcagccatcttctcaaggctctcgacggcaaatcaatcaatacattcatcgatcatggaatcgagagaagccgcacaatcgcccctgagcttatatcggcgattagagaagctaggatctcaatcgtcatcttctctaagaactatgcttcttcaacgtggtgcttaaatgaattggttgagatccacaagtgctttaatgatttaggtcaaatggtgattccagttttctacgacgttgatccttcggaagttagaaaacagaccggcgaatttggaaaggtctttgaaaagacatgcgaggtcagcaaggacaaacaaccaggggatcagaaacaaagatgggtgcaagctctcacagatatagcaaatatagccggagaggatcttctgaacgggtactttgtttttgatttcattatctctgagtgtgtttttaattatctctgaactatgctatctgcttcttctttttttggattgtgtgctttaggggtgcctctttattgacacaatttgactactgttattaggcctagtgaagcagctatggttgtaaagatagctaatgatgtttcgaataagcttatttcaccatcgaattcttttggcgatttcgtcggaattgaagctcatttagaggcaatgaattcaatattgtgcttggaatccaaggaagctagaatggttgggatttgggggccttcagggattggtaagagtaccataggaaaagctctatacagtcaactcttttgccaattccactttcacgctttcgtacctcacgtctatagcatgaagtctgaatgggaagaaatatttctgtcaaaaattcttggtaaggatataaagataggagggaagttaggtgtagtggagcaaatgttaaatcagaagaaagttcttatcgttcttgatgatgtggatgatccagagtttcttaagaccttggtgggggaaactaaatggtttggacctggaagcagaattattgtgatcactcaagatatgcaacttcttaaggctcatgatattgaccttttatatgaggtgaagttcccatctctagatcttgctcttaagatgttatgccgatctgcttttggggaaaactctccacctgatgattttaaggcactagcatttgaagttgcagtgcttgccggtaatcttcctttgggtctcagtgtccttggttcgtctttaaaacgaaggaccaaagaagagtggatggagatgatgcctaggttccgaaatggtttgaacggagatattatgaaaacattaagagtcagctacgatagattagatcaaaaagatcaagatatgttcctttacatcgcgtgtttattcaatggttttgaagtcagttacatcaaagatttacttgaagataatgttgggcttaaaatgttgggtgagaagtccctcatacgtattacaccagaaggatgtatagagatgcacaatttgctagagaaattaggtagagaaattgatcgtgcaaagtccaagggtaatcnnnnnnnnnnnnnnnnnntgacgaattttgaggatattcgagaagtattgaccgagaaaactgttagtttttcgcagctccgttttaatgcatgactttatattaatttaatcgtcatttggggattgatagacttaagcaattgttgcctcatgagtaattaaaacgtagctttgatgtgtcagaaaaataaaaaaggttgcgattgttaagattatattagttttcttcggatttttttttcaggggacagaaactcttcttggaatacgtttgccaaaaccgggatatcttacgacaaggtcgttcttaatagatgaagaatcgttcaaaggcatgcgtaatctccaatatctagaaattggttattggtcagatggggatctacctcagagcctcgtttatttgccccttaaactcaaaaggctatggtgggatgattgtccattgaagcgtttgccttctaattttaaggctgagtatctggttgaactcagaatggtgaatagtaagcttgagaagctgtgggatggaactcaggtactaatttttttagtgatcaatttctaaacataaaaactaaaaataaaaatgtttaaaatgttcattaacgtgtgtgctctcttttcccctattttgttttcagccccttggaagtctcaagaagatggatttgtataattcctacaaattgaaagaaattccagatctttctttagccataaacctcgaggaattaaatcttgaagaatgcgaatctttggagacacttccttcctcgattcagaatgccattaaactgagggagttaaattgttggggggggctattaatagatttaaaatcattagaaggcatgtgtaatctcgaatatctatcagttcctagttggtcaagtagggaatgcactcagggcatcgtttatttccctcgtaaactcaaaagtgtattgtggactaattgtccattgaagcgtttgccttctaattttaaggctgagtatctggttgaactcataatggagtacagtgagcttgagaacctgtgggatggtactcaggtactaattctattagtgataataaatatgttagaaaaactaaaaataagggtgttt

SEQ ID NO: 25421 - DNA, 776 bp, Arabidopsis thaliana landsberg
gatttgcgatttgcctttggggccaccacactgagtggagtctggggtcttcacattgaacaacgctggatgcgttactttctttgtgctgtgcatacttgaacatagttcttagtgattgatctcttctctgaaagcggttgaacaaaactagagaagacatttatccaaccctactattcccgccttgttcataggacatgttgtacgcagctttcatattcatatacataacgataccacaatcaaaaacaaatattacactcgtacacactaatctatgtacgatatatagttttttttttacaagtgctaaatgactaccaatatttatcaattataagctcagtcgagatattgtctcatttttggaaaagtaaaagattgtgttatctttaaaaaaaagtattgacgtgtgtgtgacgttacctcggaggtggcagtggagaggcaggaaccacacttggagccgtaggagtcaccccggcactggagcaagatgtagacggtattgggatcgtcaccatgataggcatagacaaaacctcttacaaaagtgtctttatacatgtcattggtgagaaagttgaggtttccttcgtacgggctcttggacttgtatttcccttcagcctcggagcatttgtggtatagatatgagttggtctcgttcatggacgaaacactgcgtataaagaagacttgtatggctaccatggccaagttaaggaccaaagcgatgcgttttggtatgaaggatgaagacaatggttttg

SEQ ID NO: 25422 - DNA, 1092 bp, Arabidopsis thaliana landsberg
cggcgctactgatccaaaataggtcaactttatacctaatcatccctcatgcttgagctctttgtacagcattaatgctctctttgaattttttgtgtgaagatacgtttcttgctagccgctacctttagttttgctccataattcccatttgcctcaaaagacttattataggtgagaacagagaaaagcaaccaaaaaagaaaaagaactcataaaagttcttaaagagtgatttgaatcttgtttgcttttgtttgcttctctgtgttgagtttcggattttttgttgagtgtgataacataaatgaagaactccatcttctgatttttttttttacataatgagtcttctaattgttacttgttatctcatattttttttcttgctttcatatatatttgatacctaagtttcatacccatatgaaacaaaaccaaacgacccaaaacaagaccaaaaacaaacaagcaagaataagataaagtgaacaagcattgatgaattctcttgtcttattaagacaatgttctgaccggagcttgaagtctgaaacctccgtgactgaggtcaccttacacatggttaatatataaccggaggtggtcttttccctccttttcctccacctcctccaccaccacctcctcctctcttgttatcaaacccaaattctatgtcccctccgtttcgaccagtgggtttgctcataggaccaggccgcttcatatcgaaaccaaactccacatcacctctttctcttggttcacgctccacaggtctaatctcacggctcttctttgacgatggtttctcatgcttcgaagctttgttgttgtttttgtctttgtgttgctttccaccgcggttgcatagtcttccaaacacacaagccagtgctgccagaacaagaattgcggctagaactatgaatgctgtaccaaacgagccacttgaaccggaggatgaaggcgagaaagaagatgaagtagaagaagaagtagatggatacacttgccgttgctgaaactcttgtggttgggctcccattttattttattttggtatttgatatagatttatgtgaggta

SEQ ID NO: 25423 - DNA, 1486 bp, Arabidopsis thaliana landsberg
ggcgctaacaacatttcctttttcggcttttggtattctatgtattgggctggtgaatttaattggcccatgaattctcagatagaccaacccagatgatatgaacattacacttgagcattttctcctcacctatcaggcgattagatttattgcgtttaagagattaaaatggttgacctaaagtttttgtgtgttttttttttttggttgaaaacactaacattttagtttatctcaagccatattgccgaattgataaacagacgtctaagtcaattaaaacttaaacagggatgaatcatgtatctccttttttttaattatttcttgaactggtgagttgcacaagttcaatcttttaaatcaatatctcatgctaaatataactatatgttaatagactctgattttaaaatataaaatgcaaattagaatataaatttttaaaatagtgtatatgttgaaaaggacgaaaatagtggacttggtggataattggcgctattttatattttgccaaaatgttacaccataattcgctatccttcttattattgtgtcaaaagcatatgctatttcgatttcaatatccataagaaaaagtccgtcgtccgtacacggcttatctaaaatacgtaactcataaatcatttatttgtattttctattcagaattaggaaagatccataaagcatattcgttaggaccagattaactaagcaacgtggccagatgacatggttcatgttctacatcttcgcacgttccatcagattacttgttttactctttctcgtctttatcacttgttcattgtttgacacatggccatcatttttgtggttaaataatctctccgttaattacgaaacacatgaaaatatctaattgtttttttgcagtcccagatataactagcgtaatatcgtgaaaataatgtgcacttgaattagtttatattgtttctcgatcaccagccactaccattaatatgttaattagagtaaccaggataagacaactcctacatactaaaataatccaataaataaacatgatttgatgaaattcgagcttcaattttttgttaagtatacaatttttggagacaattaaaaatgtctaagtctaataaaacagaaaaaaggtgcttgctcattcacatgaagttgaataattttagatatgggatggcaatgtggcatttcgtggatttccatcacatcaaggtttaaattaagtcgaccaaacaaccgaaaaaaaaaaacattatagtaaagtcttataggacaaggatttattgaatggtaccatagcactcgtatgtggtcatgatccttgctcaatgactcattggccgacgtcggaacttaaaaaattgagccctttcgtcctatttgtattctgtattattcaacgatttcttaaatttcctaattcattgatatattattaagtccataactaaaacacccttaaacg

SEQ ID NO: 25424 - DNA, 868 bp, Arabidopsis thaliana landsberg
tagctgaaagtgtatcttgtcaagaacagaacctcgtgccccaacgacttgtttgttaagagctttagaatagcttcccagcggttggtgaaatgttgagaaagaagcttccgtgtgagtgtagaccatacctctactgagtaagggcatgtgaagaacaagtggtcgcgcgtttccacgaggtggtgacagagcacacacgaagagtcagctcccacattccaacttaacatccgatctcccgtagttagacgattctttatcgctatccaagctaaaactgagtatttaggcgttgcatgtgaaaaccaaacacccttataccagttgactttcagttttggttccctagttgcagcccaggtctcctttgtgttaaaacacggtttaaaaatgtccccatttcccttccaacgaactgtatccttttcgaagtaagtccctggtggcgcacctcggcaatgacgtcttctattcgaagcagagtatcatgtcggtggcgtcttggtctatggttcacaaccgcttcagctacagaggcgtgaagagtgattcccatgtcaatgcaaccccgatgacctgttacatcaatcagccttcctatctttgaccagttatcaaaccaaaacgatgtattgctgccattgtgaatgtcgtgcttcacaaaacctgaagctaaagctctgtgtttaagaatcttcttccacatccatgatcctagagttgtgttcccactgatagaccaaaaggaaccctttcgcagcagatataatcgcagccattgaacccacaaagaagtagacgagagcatcctccaaatgagttttaacaaactgaccttgttcgcttccttaaagatctgatgcct

SEQ ID NO: 25425 - DNA, 1153 bp, Arabidopsis thaliana landsberg
aaaagatatgagtagagaaatcaaacaatcacccacaaaacagagttctaggggtaggatcgaccaagtgtcttggaagttataattggatcagatgatctggaacaggataatactctcagtggcttccaagaagcagagcccagaagcatcacacctcgagattctacaatattttatcaaattgcttcttactcattcaaaactatataataaaataagaacacaaacaattcaaaacttttgaatctgaatctaaatcttcttagttcacccaataaagtaagaaaacaaaaaaaagagactcaaggctctttcttttcatagttctcttatagtatagttgagcaaacccggaaaagaaaagtcacctcctcacaaagtgtccaatgcctcagctggatcgttctagggtttccacgaccaaactgatcctctctgtggccgtcgagggcgactactacggtggatcatcagccgccgttcccttcaaatgggaatctcagcccggaacgccaagacgactctccaaacgatcctcctcttccggtttcaattctgattctgatttcaattttccgggttcagcaccactaacacctcctgcttcttacttctacgcttctccatcctctacaaaacacgtaagccctaaaaaaaccaacactctctttagttccttgctttccaagaatcgtagtgtcccatcttctccggcttcttcttcttcgtcgtcctcgtcttcagttccatcttctccattgaggacatctgatttaagcaacagaagaagatcaatgtggtttgaatctggttcgagtttggactacggatcgaatagtgctaaatcttctggatgttacgcttcccttgtcaaggtgttgctcagatcatgttaaatgattctgccttttttcttatatttaactctctcctattttcttattaattttcacttctttttttttctttttttgtaatcttggaaataatttctaaaaactatgtttcatcgattcatatcatcatctctatgaatcaattgattggatcatatggcttctatttttgtctataaaagacgtgcttttgtataataagaaatttcgacaaaaacatactataacgagatcagatcttagttacatgttga

SEQ ID NO: 25426 - DNA, 1038 bp, Arabidopsis thaliana landsberg
tactaacgtttcattgaatgcataccatcaaaaacattggggtaaaatgtgttttaacttctaagtgagtgaattaagagttttttggtgtctaatggccatgcttattttctagatataaatttaaactctcggtatgattttcattggttaaaaagtttatgatttcagatatattatttctcatactcaatttcaaaaaaattatcattacacgatattttccgctaaagactaactgtgtattaaaacagtagtcgaacagttcatgtatctattagcgacgttgtgtatttctcacactcaatttcaagattttattattacatggtgttttttatcgctaaagaccaattgtgtaagaaaacagtggttgagtggattcatgattccaatagagaatttgacttatttttgtagcatgcgtcgttgttgtcgtcattgtcacaagcacaccacaatatatattaatctcgtgtatagttttagctacataactatatctaagattttcataagtttaaattctatatggtcgtctttgtttttgggtcattaggttgtggtcaattattaatataatttgatgctaatatattacttcaactgatagaaataaatcctagaaaaagtattggaaaatggttttctatttaaataaataattaaatttagtttaaaatgatcatggtatatttcagttttaatattaaaatttagttttttagtaaggttaagaaggaaaaaaaaatgagaggtgggaaaagaggacgtgtgtcaattgtctaggtgccagtaaattgagttttgaagagaaccttactttattatatttatttattgagtacacttcaagtttaattgttttacatgtcaacaaattattttgtattgaaaacctgatttagttccaaaatacaagaatttactacaaagatatgatatatagatcaaccatataatcttcatttgctttcgaattaagaaaaagagtataattttttttaataaaaagaagaatataatccaactgataat

SEQ ID NO: 25427 - DNA, 772 bp, Arabidopsis thaliana landsberg
gtttccagggatcccatacctaacttttggatcacctgtgtgtaagtagttcatggaataaaggtgatgatcttcaacatgctgtttcaaacaaagtaagggggtaaatagcagatggttagtacatagctcctagaaagcacacaaaaaatgcatcaattccataactttggtcccaaaggcatgacatcctttaagtaataaaattttgattcaataacaggttttaatagaactccatcagctttttttcagcaacatataatttccaggaaatatcaaaagattattcatgcgattcagtaattagcaagagtctaccctaagaaaatgaaacttacccaacaaaaagttgaaaagcacattccaacataaagccatggcacaatgactcctgagatatcgcagctctcaaaagctagaactgatccgggcagacgggacaaattatttaggttccaaccacattgagagtattgatctgcttcacttataggataccccggtttatactttgggaaaccacttccaaatttctttgtttccaagtcagctccatagtacacctgtcataggaccaaaaacaagagtagcaagttcgaagaacatcaaattcaaataaatgcaaaagaaaatggtgaaaccaagaaagacacaaatagttgatatgtcattatattgctgcatgtacatacctctacttcatcagttgcatgctccactatccgccaatattcaccttcaaggtccttaacctgaggtttagaattta

SEQ ID NO: 25428 - DNA, 753 bp, Arabidopsis thaliana landsberg
agctctttgttgctataagatcctgaaactacatgctctgttttgagtattgactaaaggtttcaactttttttgattcgatcatggattagattagttagggttttgaaacgcaggaagatttaaactttatgttagttttgagattagtagtttcatgtgatctaattttgttgatcttattgtgtgtgttgttgtatataggttcaagagctttatgagcattctgcagaatacgaagggaagcatgaacctaagaagctagaggagctagggagtgtgctaacgagtttagatccaggagattccattgttatcgctaaagctttctctcatatgcttaacttagccaatttggctgaggaagtgcagattgcttatcgccgtaggatcaagaagctgaagaaaggtgattttgttgatgagagctctgctactactgaatctgatcttgaagaaactttcaagaagcttgttggagatctgaacaagtctcctgaagagatctttgatgctctcaagaatcagactgtggatttggttttgactgctcatcctactcagtctgtgagaagatcattgcttcagaaacatgggaggttagtctttgaggcttcaccgggcttgctttggatcgatgttttgatgttaaagttatctactttgtgcggtttttcaggataagagactgtctggctcaactatatgctaaggatattactcctgatgacaagcaagagctcggtgaggctc

SEQ ID NO: 25429 - DNA, 3487 bp, Arabidopsis thaliana landsberg
actattttctctgcttactttgcgttatactccttttaataagttctattatattgaagttatctatctctcttgatctatttaaacttgaaactagaactattccataatcaaccaattttaaattttgaacaaagaggatacaggaggaaatggtctccacgaagcttacaattctcaaaggacaacgcttagcctcatggggcctttgcatattaagtgggcttaatcttttaattggcccaatttttcgtcttctttctttttcgtccatttcccagaggattttattaagaaaaaaaaaacagaaacaaataaaattatttagaattatagagattagcttacattcatgtgagcacttaagctaattccttaaaactaagataatgcacaaacaacataaaccttccctcttcaacaacaaagctcggttacaccagcaacgatctaagaatcagaaggaaggaaaaaaaacggacatgaaatctccagttcttgaaactttttacaatcttcttcttaaactgattttttgaatcagagtaaagagtctctttctctctctctctcaccttatcacttctcagactctcgtttaaagggtccaactggtacaaggcctgcaggctcgtgattgttctcgttatttacatcaatcccctgctcattgagaaacattcgaattgagaatacaaaaacaaagattgagaatatgttggatagagggattcatatacgttgttatttgatgatggctcatgtactctttgtggattagcatttagatcaatcatttcgtcatcaatcttcccattggcttcaccatttccatttgcagagactcatgaggctctgcaaaatgaccctcggattgttttctttaggcttatcccctggaaactacaagaaacgataaacacaagatgactattaaatctaagaaaatcgactccaaatgattgtgtgtctgcgtgagaaagaaacaattagttaattcaaacctcaattctctgtctcagtaatagaaaccgcctatgtgttctcttcccaccaacatgtaccaccatatcacattgtagacaaagggaactaccatctatctcacagtaaaagaatgctgttcatcgatcaacaacaaaacaaacatgtcaaaaactgaaacttccgcttcctcttatacacaaaagaaagaggaatcatatctataccgggtgcattttcgcatatgtcacagcttggtgcattactcggatcagctaagcctacacgaagatgccgactagccagcttgttgcacttatgaacctaaacacacaaagaaaaatgtttctttcttataacttatatctaaccacttcctcaatcaaagccattgcagataacaaaaattctcatagctcttccagcttcaatagagtgactgtaactgtaaataaagtgtgtcaccagagataatgctatatgcaaagttcaaattattatgacaagctaaaatcactagaatgtttctttaacaatcaaaacacaacttttggtactactttggccatgttcgagttataataacctcaaaatctataaatttagcacttcaaccagatattgtctcaaaatttcaaactttttgcatttgttgagataaaagtgttaatctaagaaaaatgagatttttttcaggtaaaggtggttactttttcgtcgcaggagcaacagagggcagcttcgtcggcggcgcaaaagacgatagcggcggcgctctcacaagcatcacacaaaattcgcatggttttttttactcaaacgactagtctcactttcaaagttagcatctttcgccaaacccaaattctgactgttgaagcggaagatggagagactaaagggtttaggattaatggataatacgagataaagtaagaagaggaaggagattttttgaatcaaactatctctgagaagaagaagaagaagaagaagaagaaagcagagagcagcagagaaatatgatggatagatgaatttgcagacgctgcgagtagcttgtatatgtatactcgctctatctcccctttatttgatttcccttctgatggccaaaattaaacatagataggatttttttttttttttttttttgtatttgactctttgtcaaatattttttaatctttttaaattttttcacatttttaggaatatgttctatatgaaattatgggttcgaatggtaggtgagtgtatacaccattttgattgttaatttgttattaattatttcaaaaggaaattgcagtgtcaaaaatggtctcaaaatttatcattaattgttattgtaattttttttgaactattctactatagtttttgtgtacttttgctaagctgaaaatcttaacacattctgaagtatcaattggagcatataatattgaaaattcaactatacatttttattagtaaagaaattgtattcatttttacataaacttaccatgcatgtacgattattacatgtatagccgtataggcaaggttaccaaatggtactcgttgattcagaagaaaatccaaagagaaagcctgatatttgattcaaatgcatgttgttacataactgaaaagtcatatctatagattggaatcgaacttaggttcagagtctagggacccaatggtaaagtagaaactatattagacaaatgactttgtaagtgatgtttccttccttttgtcaaagtttgtagaatgttcgagttcgtctaatctcgtccacggaaatgtttgtatttttggtaatttgtaatcaattccacgttatttatcattggtgtaacagaaatggtgtcttttacgataggctagttttagtaataatagtgacaaaatacaacaacaaggaaatataagagccacacgagaatggaaaacagaaatggtagggtcaaaactatcaacagccactgaaactggtggtcaagaagtaattatcgtttcctagtaggtttgttttcgttttttttctttcctactatgtcccaaatattcaattttggacaaaaatctcaattccagtattctgaaaatgtttctgcgtcggtccaatcaatgatctttagatatttatagagggttcaatagatttttttagaccttgattgaccatttgcatttattagttttggctctcttcttatcagttttttttctttgtttctatgtaaaaagtataagcaaccacatatctatatcgttttcctcctaattttgcaatattgttttcatcaataaataccactaaatgctagcaatttggtcagccaatcaatattttttagagttaggttttctaaaacatgtgtcactttgttagcacccagtagaaactatattcttatgattgggccgatataaccatacaacagaagttcgtttgatccatactcgtgctcaaaactgctagtatgcaagattttaagcccatggg

SEQ ID NO: 25430 - DNA, 1320 bp, Arabidopsis thaliana landsberg
ggaatgagaattcgagattgttcgacaaaaccttaagaaattaaatgcttacgttaggtatgagtttttttaccaaaagttcctttaggataatttgataaaaacaaatcactaaatgatggtcgtgtgcaataaaatagaaatgactcattagtcgtatgagagaatcacataaaatggtgaatataatgtcaaattaatcaagataaaaacacttaataggaataaagatgaatgaatgataacattactttttataaaccttacataatttttataaatatttttgattccacataattgtattattcgtaaacaaactttgtaatagcaaaaccattcattaaactatgtaatctatgtatacacacaactaccataacttggatcagcagtaacgacttgaccagtaccagtaaaattacacgcctcttcagtgcttccgtgattctggtagaaatcattcatcacaaatgatgcatgactaacaagagtatccggatcaaagcaagatccaccaggattgattgttgcacaatcaacttttccttcactacatgcccaatcaatattagcttgtaattgtgtacttgccgccgatacatttgccacacaccatgttttggccgagacatgaagagggtggattacaacgagagagaaaaggaatacaactgtcaattgcggaaacattgcggtgttttcgcctggtatttgataccacaaatgagagggcaatatatatatatatatatatatatatatatatatatatatatatatataatatgataaaattatggcgttttgcttatgaataataactcaaatgatattgcattatatataatatgataaaatttcttctgaaagtaatttattttccataatattttatgttacaaatatttgaccaatttataaaagtttgtggtgggatttaagactaactgactaataaattaaatgaaaatgatgaaatattaatatgttattcaacatataatattaatagtttataaactcttaccttagattataaattagcataattaaaatattatgagattttaagttagtaataataatgagagcaacaaaattaatagcgaagtaataagggacatggagtaaaagtaagaaaggagctcggctagtttacattaaaagctgaaacagagacacaatactaacgataaaagttcgtagtatctttatgcaaccatatatacatatacacaaggacagacatgtagtatcctaataattctacttagatgaggtatgaacaacagcaacagtagataccgttgtatccat

SEQ ID NO: 25431 - DNA, 965 bp, Arabidopsis thaliana landsberg
  unsure (1)..(965): unsure at all n locations
attcaatgatgatctaccaacttcttaattacaggtacctaacctactcatttagttagaaattattgatatcctcttatagtcttatactcatttgaattataattaggtaatatatataattaggtacactattcgtatatctataataagaaagacgacaattgtaagagttaaaactgagccaaaaagttatggtgggaatatcagtaacgctacacgagagataaaaccggtctgattcggaattaccataataagttgaataaaccaataattgaatccgaaccaaattcgaatctaaccccaaattttattgcttaagacgaattatttactatttatatgtatataaaaaagcttctataccacacagtcacacatgcacacacttctcacttcagacaatggagaactgtttatccacacttgtgtttctattgtcgattgctttggtcctatttcctaagacaggggtgagttttcttgcagctgaaggagcctcagacagtgacagcaaagtatgtaattagagaaaagaaggtatctatttgcgaaaatcgctaagagtttactgatatttctaaacttttccggtgttttttttggccaatttattaggtttatatagtgtatcttggggaaagggaacacgatgatccagaacttttcacagcttctcatcatcaaatgcttgaatcacttcttcaaaggtactttactttaatcatcttccaagataaaatctctatattaaacattaacctattaaacttttcatatatataatttatctccattatgtattcaagacatctgctagaattgataataatatattacatacgttttcttgggtgccaagaaaactggccgtcgccatactctgtttcttcacggaacttggaccttcctctgttnttatcttttgttntgttaggagcacttctcttacttgtgtctct

SEQ ID NO: 25432 - DNA, 1124 bp, Arabidopsis thaliana landsberg
  unsure (1)..(1124): unsure at all n locations
atgtcgactttcgaggagaataaaacactacttgctgaaaaccatcaagtgatccctgtgcttgcaaagtttatgaagcagaagtcagttgtgacaagaagaaacgcaacattgactttagtgtcacttttagacattgattctaacaagatcatcatagggaactcagtagcactcaaggctctgatagatcttatcggggagttggatgacttatcagctactcatgaagctctttgcgctgttatatacctctgttgtgatgaaatggatgcaacgtggaaaagtccgtttctattatgcatcaatatttttctcaactatgatgtgtctcctttggtttctcgaatattctgcaaagaatcttgagttgcttttgcaagtatactacttctctctatctttttttataaagaatgttttcttggcttcaggtatttattgatttatttaagagattatacgtttcgttgtttgtcgaccgttaaaagtgatgcagaggagttagttgaacattgggaccaaaagtagcataatcatgacacatggccatattaagacaccgacctgtaaatatgagtcgcacacaatggagactgcgtaaaaaccataggaaacagcaagtgatcatgtggatgttttctcttgtattcttccaaatgttctgctgttcgctgtcacattcacgaaacggcacacactttgatccctcccacccatttttattccctctcaagtctcaagccataactcatttgactttgacataactttatataagcctttttttcgtttgacatcatatttttagtgtagcttattttatcgtctaaatcgtgttcactaaagcttatattttggttgggataaacgaactaaacttcttcaaactttatagaccacactcatcagcaagctatacaaaaaaagaaggcattttctttcaatactcgcaaaaaggtaacatactccagcatgttgctcatttttcgtatactcaaactataaccacaagaaattcaaatcgtgtgatttacattacatctttaataaatatttagaagttgttatgaattntttttttttttagaagtatgatatgaaataaaggaataaagtataaa

SEQ ID NO: 25433 - DNA, 2929 bp, Arabidopsis thaliana landsberg
attaagtaacagtcaattttcttattatagctgtatccattatgtccacatatgcatccatatacattacactgttggtctcaagtgtagttagattacgaagactttcaagttccattttttggttaggagataaacataatttaatgataccgactttagcactctaggctcaaaacaagtacagaagagaatagttttatttcaaactcgttgcattgttgtatcaattaattgtgttagtctttgtatattcttacataacggtccaagtttgttgaaatagtttacttactaaacttttcctaatggggtcaaattttattttataggaaaaggagagattgcaacttgttccaaggacatgaactcggatcttttcttcgccgtgttaggaggtttgggtcaattcggcattataacaagagccagaattaaacttgaagtagctccgaaaagggtatgttaaatttgtaaattatgcaactacagaaaattctatgaaatttatgaatgaacatatatgcatttttggatttttgtaggccaagtggttaaggtttctatacatagatttctccgaattcacaagagatcaagaacgagtgatatcgaaaacggacggtgtagatttcttagaaggttccattatggtggaccatggcccaccggataactggagatccacgtattatccaccgtccgatcacttgaggatcgcctcaatggtcaaacgacatcgtgtcatctactgccttgaagtcgtcaagtattacgacgaaacttctcaatacacagtcaacgaggtccgtacatacatacaatcataaatcatacatgtataattgggagatctttatgcattattcaattatattaatttaatttagttatttaacttatgcaggaaatggaggagttaagcgatagtttaaaccatgtaagagggtttatgtacgagaaagatgtgacgcatatggatttcctaaaccgagttcgaaccggagagctaaacctgaaatccaaaggccaatgggatgttccacatccatggcttaatctcttcgtaccaaaaactcaaatctccaaatttgatgatggtgtttttaagggtattatcctaagaaataacatcactagcggccctgttcttgtttatcctatgaatcgcaacaagccagtttaactcgatattgcaaaatttactatctacattctcgtttgtgaatccgaaatattcttacaagctaattttatgcggcgtttttaggtggagatgatcggatgtctgccgctatacccgaggaagatgtattttatgcggtagggtttttaagatccgcgggttttgacaattgggaggcttttgatcaagaaaacatggaaatactgaagttttgtgaggatgctaatatgggggttatacaatatcttccttatcattcatcacaagaaggatgggttaaacattttggtccgaggtggaatattttcgtagagagaaaatataaatatgatcccaaaatgatattatcaccgggacaaaatatattccaaaaaataaactcgagttagacgataattaatcctattgttagtcgttctgaaccacttttgtaaatattcctttccatgttatatcaatttttgacagaaattaattttagtagtgtggagagtgtatataccacaatttccacgtgaattggagatttttggctataattaagaacacgaaattaaataataatgttattaagaaaatggaaattgataggaaagtaaaggacatgatcataagattcgaaagtaagtctaaatgtgaaaactatctttttgtgaagaaaatgttgacatatctataaatatataatacattcaattaaagaaatagggaataattatgtccaagaaatgtccccaaacctttttgttacagtctgcgggaaagaaggagacatccacacttcttgcctcctttctgtttttatttttggcttaatttttaatatatatttttatgtactttgaagatcttggtcgaacgcagtccacgtataattggttggattagaatcagatttctttttcaaaaactctgattttctagacatctgatattttgtggtaagattaataattatcgattttttttgtctcaattgttttgtgttaagattaagggattaatccacatttacataacttgtatattttaagaatatttttcattaatgtcaaaaatgaattcattagtgcatattcttgattaatttgactaatataacccgtataaactactacattaaataaagtaaaatcaagaaaacgacaaaaacgtcgtgaaaagtggaaaacatatgatgaaagttgcagccgctagctttgtgatccgaaggaatctccaacctaatttttaatagaaagtgtctaagtaccgaatatctaaatagtgtaatctaaactgtatattatgtgaaaaagttggaacaattattttataacgcaaaatctcattgtatcattactaaaaatataatcatgagattcctttgtatattcgtgtaaaataccatcccaaaatttatttgtatcattttatatttatttaatattaatataaattaaaattaaattaaatgtgaaaaatataacaaaaaaagctaattttgtttttgtgtggtgaaaaaccatttcaataagattttacttacttcgtttgtttaggaaagatgtttagagatgatgaaaaaaaaaaggaaagatgtttagaaatagatgtttcaatttttcatgtgatatcattttggaaatgttagttcataggcctctaatgttcagcccaaatattaatcgtcgaactctgggcctcatattacagtacgtgctgtttttctcaacacaaccgacacgctgttcgttatcagaa

SEQ ID NO: 25434 - DNA, 1636 bp, Arabidopsis thaliana landsberg
caaaagttcatatagtcggttctatatagaattcggaaggattaaccattcctcaatgctcaattagagaactacttaacacttaaacacatactttggtaactttaaaatacaatggtgcttttctaacgacattcacccataactaatttggtgtgtatatctgatggtttttagtgaagccatgacgtttctaaatatgaggtaagactaatcatatcattgggcagcagtgtaagatgggtcctgatcttgttcttatttttatagtagtgtggggtttgacagcttttaacttgcttacacaaagatagttagattccaactttctcttatgtaaaaaccataaccgaccccatttttttggctacttctacttaagtttttaaattttcgcagacccaaagaaagatatttaacaaatatgataaaattctcaatcttaatgtgacaacatttttataggaaaaaaatacttcacggacaagtaaacatcctaacttttggttttcttttagtaacaaatatattgattaagacttcacgacaaattaaatgccagctatattattgtcaataggttcatgtaatacttattagttgtctggttgtcaaaaaaaaaaaacattctcttaactttcgatctctcatttctcccttttccctgtgtaagcctttaagattcacataaaatagtatatttatgtataaaattctcaaactatgtagctttgatagtttcacactataacaatgtttaatcttatacttgtacaacaaggtatcgcccaaaacttgtgatacaccaaaattactaaccctagtttaaaaattccctaaagccgtctaagcgagatcaactctcgttgctttttcttgcattcccaccgaaaataacagagcagagtaagtgaaaagacttgcacaatctctgtgaagctacttcaatggtggacatgtcagagaaagagatctgcaaattgttacgcctcggatcttagatcattaaagaagaaaatattagatggcagaatggtagatcactcatcatccgatggcaaagtcgggctttttgagcagctctcgagcatgtgaagttccaacatccttttctctgggttacagaggcctgcaccagtaacattttcaatccaaattgtgatcaattgttgtagaaatgcttatgcagtgtgactttagatccattcttcaagacggtgacggagaaaaacgaacctgagcatttagggatgtcccaaacagcaacagaagaaggtgagcattctggttcgcaaaggatgtgatggttctcgtggttgacattcattgccagcatccacgcacctattgttacgtcctcgttgttaaacatcctgaaactgcagttacagacaaaatcttttatttctttactaagcaaaacagacactatgatcttttgtcaagttatacaacagagcatgcctgttattcttgagggcaaccaaactggctaccacatcagcagagagagcataaatcgggccataagcatgaagacagtactctcttcccagcagatgagacaatggttcatacctgcaaaatccctttttgatcccattcccatagtttcaagcatacataagtctcagtt

SEQ ID NO: 25435 - DNA, 1427 bp, Arabidopsis thaliana landsberg
cggtgttcatctacaaggattggttcagaaggtggtgttgcactagctgaagcacttgaacactgtagccacttgaagaaacttgatcttcgtgacaacatgtttggagtcgaaggtggaattgccctggcgaagactttatcagtcttgactcatttaaccgagatctatatgagttacctgaacttggaggatgagggaacagaggcactttctgaagctctacttaagtccgccccttctcttgaagttctagaattggctggtaacgacattactgtaaaatccactggaaatttggcagcttgcatcgcctccaaacagtctcttgcaaagctgaatttatctgagaatgaactcaaagacgaagggactatcttaattgcaaaggcagttgaaggtcatgatcagttagttgaaattgacctgagcaccaacatgatcagaagagctggggcaagggccttggcacaaactgttgtgaagaaaaatactttcaagcttctgaacatcaatggaaacttcatatctgaggaaggtattgacgaggtaaatgacatgtttaaggactgtctggacaagcttgttcctttggacgacaatgaccctgaaggagaagattttgaagatgaagacgaagaggaggaaggcgaagatggcaatgaattggaatcaaagcttggaagtctgaaaatcaagcaaggggaggaatgatgtgatgcttttgttgctatgtaggtaggttcagtgttatctctctttctggattcggtaaacatagttaagtaggtatctaaggatctaagattgtcttcagatttatttccttgaagcgaaattgttatcttcgtgtaaaccagaattgttgttggtcttttggttatgaatatttaaatgatcttttagctgaaatcatgttcatctcatatgaaccgtgggaaatgaaagagcacagtgtagcataagaagttacaaatgaagaacaaactttatggcgtatttgatcaagcggccactggagttttgagggcttcgagcatcttatcgtctaactcaaacttaatctctttcttgtctctgccaatcttcacatactcttcgaatctctccttgagatcttcaggcagattcgttttactctcccaccctaataagtccttagcggcccttggctctgtgtagaaatgctgcgaccatacaaagacaagtttgtaaagctactaatgaatgaagtaggagaagagcttctacagggtttcgtttaccatgtttctgaatggaaaagccttcttggcgtcaaccccattggctttagggtcataatgaacgatcttaacatttttgccagtagcggttgtacagaacttggccattaccgtcaagagtaacggctcttgcgctaacgcacttgaagatgttgccggaag

SEQ ID NO: 25436 - DNA, 821 bp, Arabidopsis thaliana landsberg
aacgaactgaataggcctacttgattaaattattggttgaaaccaatatgaggataagcaagatggcagtgaggcaaacggagttttgaatatttgccatactttttttaatctttcatacacttcaaagatataaaaccttttcttctttattgttctttgtcacacttttataatcaaaagacgaggttgtatttatatatgaattctagttgactttttgcctatccaataaactcctagccacgttaattatgcatgacgacatatgtctatccaaattatttgctaaaattaaattacgaagtccaaaagtttaatttcgctttgcaaatttaactacatattttaatctcgagaaatataaaaccattattattagcaggaaattagtggtaaaatatgtgtaatgttttgtacttttacgataaaatgtttttagcttaaacacgcaattgttgaagaaggtgaactagttacccgagatcatatttggaagaacttgatgaagtatgatcacgatcgagataactcaacatttatgactacgcttcagcaattgttaatgccagtaggcctcacgagtacatgagagaaagaactttttgactacgcttcagcaattgttaatctccatctattaatctaattcatcaacaaagtatataatgtgttgataaataattaagtatatttatcgttatatatataaccactatgtggccatcgttgttggaatgttgaaactatattcagatttattaatggaccaatgaagcccggttgttttattattaagtaaaaaaaaagacttaaatatc

SEQ ID NO: 25437 - DNA, 1401 bp, Arabidopsis thaliana landsberg
ctgactgcaaaatcttaatctttacaatattttggtaggtggtggacggaattagaccatacatcaaaccttccaccaaacttcagagagagaactgtagagacatggtttgcagcattgatgatgtacttcgagccacaattttcacttgggagaattatgtcggctaagttatacttagtaataacatttctagacgacgcttgcgatacttatggttcaatttctgaagttgaaagcctggccgattgtttggaaaggtaccttaactatatctattgcaatgattgaatcacactaaacaattaaatatgagtggagtgtttgataaccaatgttttgtgatatatgaacagatgggatccagattacatggaaaatcttcaaggtcacatgaagactgccttcaaatttgtgatgtatctttttaaagagtatgaagaaatactaaggtcacaaggaagatcttttgtgttggagaaaatgatagaagaggtgattacttaaaaaaattattattcatgggatggtaataacttgtaacatgtttaattttttttggtaagcagttcaagattattgctaggaaaaacctcgaacttgtcaaatgggcacgtggaggtcatgttcctagctttgatgagtatataagaatggtggagccaagaaaggtacatatgcaaccatagcatgttccatcatgggacttggagagattggtaagaaggaagcttttgagtggctaatatctagaccaaagctcgttcggattttaggtgcaaagacccgtctcatggatgacatagccgactttgaggtactagttttcagtatgtttggtttttttattgcttaaaatttgacattatatataagaatactataccaattaggccatgaaatttcaaacaatgtggcgcataaattttataaaatatatggactgttttagtcaatttcattattctcttcgcatagattatgttgaaagttttggtataaatcatcaggaggacatggaaaaaggttacactgcaaatgcactcaactattacatgaacgaacacggagttacaaaagaagaagccagtagagaacttgaaaagatgaatggagatatgaacaagatcgtaaacgaagaatgcttgaagataactaccatgccacgccgaattcttatgcaatccgtcaattatgcacgttcattggatgttctctatactgcggatgatgtttacaaccaccgggaaggaaaactcaaagagtatatgaggcttttgctcgtagatcctatacttctttaggacttgggatgcatcatgtttgttactttctaattttttatgtgattgtgttatgtgatttaccgttttcaatctcggacatacaaattgtgttatg

SEQ ID NO: 25438 - DNA, 1182 bp, Arabidopsis thaliana landsberg
tcaaatgccaggtgaagcctctcatcttccagttttctaattgccccaacaaaagatgaaacatcgaagtcacagtctgaaaggcatctttgtgctccaattctgcagaaaacaattagcttctcttctcagcttctttaattttcatttctagctcggagtcaagatcgtcttccatacacttgtacacgttcatactccgtatacaattttgctggtgccctccatagtcctgcgtataatactcgttaacaggttcataatgttcagctagtgaaacattagcggcgatatctgagctcgagtcaaaagttctgttaagggatccaccatagacatcttgaattgtgatcggttcgtggtttgaaccctttgacttgccatgagtctgagagagtctttcaatgacatttctagcaaccgaacgaggcgatccatgccgcaacccattatccacacaatcagcagaagagtaacgtaaatgggtgcctttagcttctctaaatgactgggactttcgtttctcatcgaaagtgtctgatggtgatgtagggactgtccattgaactcggggtggaagcctccttcgatttatactctcagaaacaccactgtgtgaagaattactcttttgcttactccgttctaaatgctcttctccatcaatgtaacgatccaagactttactcgagacattgctagaacaagatgatgaactcccagacgaatcatgctgaaacttgtctgctttacactgcctttctctaacttgtctttctggagtaaagcatctggtacacagtattcattacattgtttgtcagtggtttaatcaaatatagaaccaagatagcgaaaacattacagaaaatcatcaaaacaatctcataagaatgaagaaaggccaaaagcataccgagatgaatgattgcgccgcctatccttgcttttagtagcactagttgttagttcattcttggaagtttctccaaacttgtcaaaaaggaaacctgcagaggaccatgaaaggcttcgtctaagagctggaccaccagaaacttgaccatgtgacttaggactatcgaactcttgttcagcctgactactagcttgggttcacatcttactatccgattctttttcgcagttaacttgtttatcggttccatcaccaaaaggtct

SEQ ID NO: 25439 - DNA, 1123 bp, Arabidopsis thaliana landsberg
gctttactaggcgatcggctgccttattgcttgttctggttgaccattgaatgttttgaccattgccattattgcttgttttgaaaatattttatgaatttgaaaaaaaacagatcaaaaagaattttgagtcaaagagaggaaaataagaaaaaacaatcaatagctggaataataagatgaagaaacgttaatcatggaagcaaagagaataaacgtaacaagaggaagatgatgaaaaaaaaaattgtgatgatcaaaatagcattcgtttttccacatatactctataaaacaatcaagataatagttatgtgaattaacatttcgtttcattcagtgctgatttcgcgtaaacctaagcatcaaaataaaattcttcatattcttaatttattttgttctaataaatttgaaaacaaaagcaaagaataaatatgggtataataggaaatataaaactatttatgcatagaaatcaggaaaagatcaatctttttgaagcaaatttttttcctagaaaatcaaatattaaaaaacagagcgagtataaaatttttaaatttgttatgaaatcaagttaaatacaaaatagaaatgatatgttaaattctaattggataggctatgtcatactttccctttacatgatatactttccttttcatgatataaccgaacttaaaccgaaccaaagaacatgaaaaccggactaaaattaaccaaaaaagtagacgagcgtccggttctattataaccggatctatatcaagtgtctcaggttcgatgcaacgcaccgttaccagtttcaattaaaacgctacagtattatatagcttgaaagggcctcatagcttcttctccttcctcactcatcgatactcaaagctcgtaatctccttctactctccaggttcgtgatcttcgttgcatttgctcttattcatcaccaaattgcgattactctcttgatctctcttaaaccctaaatcgtttcaattcgaattcatcagatctgatcctatttcttctcattgtcacagatccgaggattctcttcgttacaggtatttcgatttcttaaatttcgattctggatactgatcgttacggtatggaattg

SEQ ID NO: 25440 - DNA, 1323 bp, Arabidopsis thaliana landsberg
cctgaaaaatgggatggcattagtcgtaattggcatactcgaagttatgtcaaaaaggtaaatttttgtcaatagattgccttttttgtgaacagtaacttatgatgttctggggatataggtcggccttgttattttggatgagattcacttgcttggagccgacagaggaccgattcttgaggtagaagcttaataactattatatcccattttctaagtacttacgctaagctccatctattggttagaagtttccagttatatcatgacacatgcaatgtatctatggtcttggtgaagagcttatatcttttcggctcaggttttttcaaagttatgtgttccaccagatttatttttgatctacatttggtttccaggttattgtatctaggatgagatatatatcatcacagacagagcgctccgtccggtttgttgggctttctacagctctggcaaatgcagggttcgtattttaacttctcagactctttgaatatgctcttttctatgtattatcattaaacacgcaactgaatgttcgagctggtagactgttattcgtgtcttttctgtgctgatgacattgtgcttatagtgtgatttgtgagtgaaagactttcaactttagtcttatttactagaaaatgttaatgtggaagatggcttaagatataccttactcccaatttttctggtagccagttttacttattctctcaagtctcccttttcagtgatttggctgactggttgggtgttggggaagatcggacttttcaattttaaaccaagcgtcaggcctgtaccaattgaagttcatattcaggtaaagtcaatatcttttctctagtttgcaaacaaattaatacctttcttaaacaaaacatttatgtatgtctcctacactgtacttgactacgctatttaatttccattttcggtgggtggattaaaggtattcaaggaaaccatacaagtatgaaatttccagacttaaccttgtttattgttttcagggttatcctggaaagtattactgcccaaggatgaatagcatgaacaagccagcatatgcagccatatgtactcattcacctacgaaacctgttcttatctttgtttcatcccgtaggcagacaaggcttactgcattggatcttattcaggcatgatttatcatcaaacaccgataccgaatcatcttttaactatataactctaatttgtatcatcctttgatcttcttttcctatgaaatgaagtttgctgcctccgacgaacatccgcggcaatttctgagtgtgtcagaggaag

SEQ ID NO: 25441 - DNA, 970 bp, Arabidopsis thaliana landsberg
gcccccccccgccccccgttgaacaccattgaagatcccttggaacacgacaccagctacttttgacatctgcgccaaaacaatcatttaaattatttagtctttgatgattcgaaattccaaacctttatccaaactagtttttaacaagtaagagaaaacaagtttagtaaaaatcgatctctagcttcaactaaagatcataagcaatgataaatatatcaaagttgtaagtgcaccaaagcaatgactctattcctaagaagttgacttgtcttatcatcgttgaccttttcttgtaagtgcaccaaagcaatcatcggaacgagaaaagccgagttcatcgcgatgaaagtggtgaaaggaaacttcctccacggctcttcaggcaaacatttggatgtgagatcatcgaaagagtccggtaacacatgcataaaagcggttgccaaaattacacccgaagttaaagtcttaatgatcccaaatataactcggtcgggtcctaaagcaggaatgtaacgagaaaggaactgtaaagaaacaccgatcatgctcgccactaagatagatgggattgcaatcattttaagctttttagcttctttgttgttgtgacatgatggatctccagattcagctctgcattcacttacatctacgttttcggcaagagaggcaaatgtgaagtatagaaggaggattgtaatggtggtgatgagtttataacaagctttagaataagccattgaaaaaagtgaaaggacgcttgctgaagttttgtttttcttttgaagacttgaggagaaaatgatttcgtctcaaatttatagaagattgtacacaaaggaaaacctcaagattgtggacagcttgtgtaaagttactttggaagcaccacgtggaaatattaaaaagtgtgaaaaattagtttcagtgaaacttttgatataattaaggtgtcatttag

SEQ ID NO: 25442 - DNA, 1157 bp, Arabidopsis thaliana landsberg
ttatggtcgaaacctaaataacggtggacagtaagatagcgacgtattgcttcggctagattgctgagccaagcgcactcttgataaagctaatgaggacggctagtcactacctagcctatagtagaacgaatgctgggtcatttctatcatgcatggctggtgtatgtgaattaggaccgaaatcattatttgaaacgtatttagatgtacgctatgagttaattattttcagaaaacggtagttacacttatgaaactaattaatgcacatcaaaagtagagacaatctgctaatatacgtacacaaggcaaaagattgtacagtagaggtatatatcgagctattttgttgcttgcgtatgtagtgaaacaaatgttaaaattgggtaagcgttataaatgttgacctgaccatcttatgcatgtgttgttgctaaaacttgtggtccaagctcctattcctttttttaacatacaaacaacaagttttgtgaaaaaccaaatgagtaaaaactagagaaatataacatgtcactgtttttaccatatttactctttttttttccttttgcttttaaacttaaagtcaatctcttatgcgttgtccaacttttttaccaattatctttctttacgcccacggaattgaaggaccatttgccagctacctttgtaaaatttagacagttggaacaaccttacaaatctttttttttctctttcacctatctaactgtcatagctagcttttacatctttctcatattcattttattcattcgtaaaatattaaaactttctttcatatataaatatagattaatacagttatatattttttggtcaatgaagtaagttagtaattagtataatggctaaatgtaaacgagtgaaaacaattgacaaaaacatttgttgatttatgcaagagtcggtatacgaaacatttcttcgatagatgtgttaatctataacttcatcaaagaagccctatggcgaatcaaacatttagtactaactagggactataacatttaactaatcaaaagtagttgtgaaataaacttttggtcgcaagatttgttggaagtggatatagtacagtaaagcttagttagatatagactaggacacacttcaaagttgatattgac

SEQ ID NO: 25443 - DNA, 1922 bp, Arabidopsis thaliana landsberg
  unsure (1)..(1922): unsure at all n locations
ggcattctcgtaattctgtgatgaaggtatatttcattttgacataaacgaagctagtacagagaattacaaaatagcaagaaaactaggtttacattgattattccttattaaaaagaaaacgacagtgaatgtaaaactgtgccaaaggtaggatatctctcaatatatgtgttttgattctggcacagtgctgttaactgtgcgagcttcggacccctccctaaaatctcgctgctgatgggtctgttggctcccttatggctgctgacctcgtgagtaggcaggctgtagtggcggcagaggtggaagctgtggccaagaaacttgcggctgactagccgaagcaacagaagctgcgggatgattactcacatattctggtatgtagggtgaatgacacgaagcagtgtgcaggacctgcttcggctgattctaccgagctttggcttcagcgatctccttttgcttcagaatagtgatttggcacattcttgtagtatggcccttgtcctcaccatagaataagcaatagattttcctgggctgatccccatatcttcctctgaagcccctggcgcctctgccacttggagctagcggcctgaaggagctttgctgctgtcccgaagactgtgaggtgtgatgtggcctctgaagctggcttcctttgtcatcattctgactggagctgttgattgatctgacatgcctagggtggatttttcctctgaagcccctagtaatttcagacaatctataagcttcttcccttctttggcagaagttgttgtccgccnnnnnnnnnnnnnnnnnnntctgaagcagcttctgcaaagtctgtggaggctttctagcaaaatactgggcagtaggtcctggatgaagccccttgatcatggcctcaatgacaatttcattgggcactgtaggcgcttgtgctctcagacgtaagaaccttcggacgtatgcctggagatactcctcatgatcttgcatgcattgaaacagagcttgagctgtgactggcttcgtcggaaagccctataaacttgtcactagcatatccttgagcttctgccatgaagtgatggtccctggtcgaagagaagaataccaggtctgagcaacactcctgacagccataacaaaagattttgccatgactgcagcattgccaccatacgaagacactgttgcttcgtagctcatcaagaactgcttcgggtctgaatggccgtcgaagatgggaagttggggtggcttataggacgggggccaaggtgtagcctgcagttcagcggacagaggagaagcatcggcaaaagtaaaggtaccatgattaaaatcatcataccatccatcattatcgaacaagtcttcttgatgaagctccctgtgttggggccttcgttcttgttcatcttgagcaagatggcatacttctttagtggcttcatcaatctgccttttaaggttggctagtcgagccatcttctccttcttcctttgtacttgttgatgaagcatctccatgtttctgatttcttggtccaactcgtcctcctggggtgttggattagtggccttctatgggggacagatatcccccgggtccactaaaagagtaaaagacctcacgaaatgccaagggcccaataaatcgtaaggtcattctttcgtgggcctggggaggtacaaatcaagttgacacgaagccggattggtgcaaacccggacggcccacaacgtcaagcgagcgaccacaacagagatccgactttcccgcgctggagcccctcatgcaacggagccgtgcgaggataaatcggcagaactacagggagataaactcaaacagttcactatcttttagctacacatagctatcatatccacaggggatcctctagagtcgacct

SEQ ID NO: 25444 - DNA, 1085 bp, Arabidopsis thaliana landsberg
  unsure (1)..(1085): unsure at all n locations
aacaccattttgcttctttgttcccccatcttccatagttattttttatttttgtaattttctcttctgcgtcattatgggcaggatggggaaactgaaaaagcggattcgtccttgtgatattacaatcaacattggtaaagaggcgcctattccagaatgccctatccctggtgaaaggtcttgtttttatatgcttccctttgaaaaagacacatgttttgtttttcctatgacctgattctaagagtgctgttctttttcagatggaaagaagttaagcatgacaatactgttacctggcttgctttttggagtgatcctatcaatccaaaagagttcaagtatgtattcttggcagctagcagttcgttgaagggacaaagcgacaaagagaagtatgagaaagcgaggaagctacatgtaatgagcttttgannnnnnnnnnnnnnnnnnnnnnnnccatcctgctttcccatttcttacctagcaacataccatctgtttgcagaaccatatagggagtattagagcagcatacaccaaagattttaataacaaggatgtaacaaagcggcaaatannnnnnnnnnnnnnnnnnnnngataagctagcccttagggctggaaatgagaaggtaagttaacaaagattcttctttaattaaagagatccttcgttctattcattttctcattggttttggcttataagagatcattactccataagacccgcttcttactcataatagaacatgtttctggaatttcaagcaattctctcacattttcctttcttatttttattgtataggatgacgatgaggcagatactgttggttgttgtacattgaaagtaggaaacgtggagtgtattcctccaaataagttaaaggtatacacttgatctcaacctaaacaaaattgactgcagaatgtatctgcgagagtactaaaatgcctggcttattgatttgttgaagaaggttattttttattgcatattatagtgacttatggtattcgctttggcattttcagtttgacttccttggtaaagactctattcagtatgtaaacaca

SEQ ID NO: 25445 - DNA, 1641 bp, Arabidopsis thaliana landsberg
tataaaagaataaccctccaccattaacatttgttaaaccccaaaatcaagacgtactatgaatagatcatgagacattttttaacaaactttattttatattttgtgtatgtgtatgtatagataatcatacagataaatgaagaagtgggtctaaagacgaagaagactgagtgaaactactccaaagatcaacattatcatcattattccaatgaagatcccatcgatgcatcatagtatcaccattttcttcttcttcatcaaaactcttacgatgacacggattatgatgaccattgttcaattgccaagctacgagccggtcaagactagcccagttgctgcaaaccggtctttcggttatcttctcttgaacgggagagaaatcgagtttgcttggagtcaggaaactttggtcgaccgggctctcggatttaggtgtctcaagacttgggagttgcatgaataagacatcatcttgatgttgagtcgttgtttggctctcgggcatgcaaatgttagaaccggtacggtccatgtagagaagaacatggtctaaaccggtaacgttttgagtgttgtgaaaggtgggcctcttctcttcctccgtgtcatcaggtaaagaagatagagtgattttaggacaatcgtcaatcttttgatagttcttcttcctgaacactcgacataccacccaaccttcttcgttatagctcattggatcttctgtaacaacatcagcatagccctgataatggaacacaaatcgatcttatgaaatgcaataagagatgattaaatcttgatgatgtaaaaatgcaacttttattttgaaacaaaaaaaaaaatcttttatgttggtttttcttttggatatgcaaccataactagttaactacgtattgtttgtagagccgtgttaaactattttaagccttgtgaaaaaatctttttatataaatgtatatatgatgtgttaatttcataagaaattatcttattgtaactcagagaatcatgttcgattactttaattgcagatgctaaaagaaggctctagtgcgtactaaatgaaccaaaaccttttatagcatgaaacgaatctagctaattctttgactataagtttgtaatttgtttattctaacctaaactgcaaattgatgattgctatatatacttacattagacattggagtatcgtcgaggcgatactcatgcatgatccagtcggatttctgaccgtgaggagctcttcctttgtagaacacgagtgtcttcctcagtccaattctccggacacaactgcagatgattttgtcacgtccggtagctttccagaatccagcgactgttgcccggttcgtcctggtcccggttggatacttcttgtccttgtggctgaagaagtaccagtcgttttgtggcgttgaaccgattctacattcctctgcatttgcataccaaaatggttcaaaaataaagaacaaagaaatagagagttcgtagaaatgaaagagttttttttcatatttagggtttaaccttgaatatcccaaggctcaagcttgtttagatcaacttcacgaatgacatcaagatcgatcttttgagagttaactttcttacggagatagt

SEQ ID NO: 25446 - DNA, 1107 bp, Arabidopsis thaliana landsberg
gtaattgctacaatgggagcttgtatctcccacgtgagagagtctctgtaacaaaaacaaaaaaaaatagcacaatttttgtcgaaataaaagagacgatcagatcccattttgtcgttggcaaaagaaccaatccacccacaagtgttggaattagaaatgagcgagctttgtacgaatcctaagaaacccaaactcaaagaagaagatgaagaagaagaagctaatgtctcttgcagagaagagcaagaagaagttcttgttgctttagtagagcaccgttctaatgaaattgagcgtctcaacaatcacatatctaattaccaaaccaaggtctctctctctctcttcaaagttttgatttttctctgtttctattttgcttttcttgatttattcaaagtgcaatgatttgaatgattggtgggtttttttcagcttattgaagcatagagaagtttgcagaattcaaaagctaagctagctcaacttcgtggagttgcagttccatctatcagtggtgcaaagaaagatcataaaccattgaagactttgagaaatgtgaatgtgagtgaagactatgcatctccatcacctagcaagactctaaggccctctgatagctctgatcatcctagaagtagttgtggtagtagtgtctccaaggctaagactgttgttgtgaagcaaaaatctgaaacatctcgtgatagtcctaatgttaaagatagagggatcaagaggaaatttggtaaccaattttgagcattagttttcttgtatgtattcgagaatcttattagttttgagttgttttgttgtgtattgttactgcagagcaaaaagagcataaagagttgattcggttgatagcgagaaactcttcaccaactacaatcaagtgtcatactagtaaccaaatctctagtcagcataagaggaaattaagaagcttgatattgtgtcctgtaaatgagcagttgtttgcaacaaggtactggactacaagactctttagtctgttgttgggttataaaatgggtaatggaatctaatatctgtctttgtgtttttcatgtatcattagttcttaaatggagaagcgtt

SEQ ID NO: 25447 - DNA, 746 bp, Arabidopsis thaliana landsberg
gaggagacgacaagcaaattgcattactcaaactcaaattacttttgagtctgtttcaaaccaatcggtgaaattataagaaattggtttcgtttctttggaattagggtttatattactgttaagattcgattatagagtgaattttgggaagatttttcagatttgatttgtgatgtgttgtgttgtgagaaattgcagagtgtagtttcgggattaaacagaggacttgtggcgagtgttgatgatttagaaagagctgaagtggctgctaaagaacttgaaactgctgggggaccggttgatttaaccgatgatcttgataagcttcaagggaaatggaggctgttgtatagtagtgcgttctcttctcggtctttaggtggtagccgtcctggtctacctactggacgtttgatccctgttactcttggccaggtaattcttgaatcattgctctgtttttacccgtcaagattcggtttttcgggtaagttgttgaggagtttatgtgcatggtctagtctatcatcaatagtcttgcttgagtttgaatggggctgagctaagaatctagctttctgaggttacaattttggtaatgtcatcttatactcgaaagcaaacttttttctatattgtcaagtttatgtgtacggtctggtccatcattggtagtctttgttgagctagaatggtgagaagcttagaatctagcaatgtcatctactccttaagcatttttt

SEQ ID NO: 25448 - DNA, 939 bp, Arabidopsis thaliana landsberg
aaacgcattatgcatgatgacctttatctaaaaggcaaattctacgtgtggccgcttccatcaactgtgccttcagaactctattcataaaatatagttatagattattctatagaatcatgagttaacaaatactaaaaacatgtaaataaagttggtttagatccgaacaaaacataacattttctaagaattttggttgctgcgtttaaatttagtcataaagaccacttcacattattttacctctataaaatactttaaattaaaacttctttttgtcccttaacaaaaatttaaaaataaaataagaaactactttttgtcagcgtttgcgatggcaaacttatgatgtagtatatgttttgatattttacatgcaaatgttacattacttggtacttgacgtcgtgcaaccaatcaaaataatttttataaactttattcatcggtccaaaacgattaactatttaatacataaaaaaatctttatagaccagagttctaaccaaccaagcgaacatactcatacgtacataatattgtttttgtcaaacataatcgtgactaatttacagattgaaatgcatatactatgattaaaattcatgtatagaaactgaacggttgactagataaatatattacccatttttaggcggcacctgaaaatttttagtcgattatatgcccccgacaaatttgaaacgtttggtctctcataatataagaaaccgatcgaatattttatttttctgcttggtacggatttgctatttttcgcatttctaacatggttattacaattcttaatcatcttcgttgaatgcttcgtaggatgttatagaacatttattataccggtatatataaataatcttaaagttggttatttttaaatagaatgcatttttttaaattcgaattacaaattagcaa

SEQ ID NO: 25449 - DNA, 4354 bp, Arabidopsis thaliana landsberg
ccatgtacaaaagttgatctcaaacactgagcatcaacaccaaaaagacttctcactagcaaacagaagacaaacctctttcttcaacaaaaacaccattcaaccaagaaagatgcccccacagctacatatataggattgagaccgagatgcatccgtaacactttgggcgatgaggtttgctcctctgtttgcagcagtgtacactgagcatcaacaccgtacgttttgttctatgcaattttttttttttttttgtattaatattagggtgtttattttgctttagattaaaatattcttgcaaagaaaatctacattatattgttttatataacagcttacaatattttattttgtctccgatcacactctaattttctcgttccattagaaaaagaaaatatcaaagaccaaatcaagaagacttttttacacatgtagtattttaaaacacaaaacgccgaaaacggtttgtatttcttatgatcatttagattatattaattaaaaccaaaccgatcgtcattctccacccaatttactcctcactctttatataaactaaaacaacagtttagtttcctcttaaaacttatcataaccaaacaagcatagacgttaataaccaaaataataacctatgaatgggtcaaatgagacggtggagagaagaatcgaactccgacgaccgttggtggacacggagaagaaacttccgttagaagtcgggctcgagagcgtgttaacggagagtagcttgccttaccggaggcgcgtgtacttaggcatgtgcatagagttaaaactacttctccggttagcacttccggctatacttgtctatttaatcaacggtggaatgggtatttccgctcgtatcttcgccggacatctaggcagtacacaactagccgcggcatccatcggaaacagcagcttcagcctcgtttatgccctcatggtacgtttaccttacatatgtatggagacttggggtactatgggatcaccaaaataattcataaaagtttttaaactaagactgtgattggttaacccaattaactatagtaaatgaatttggtggaaaaacgttttttttcctttttttttttgttctcaccaagtgaaatctatgcatggtaattagatttgcataaaaagaaaattcacaatttggagtgcgtaagagtatatacatataatctttcatttccattcatacatagcttgtaattttttttttaataaactataatttttttagtgtccgagaagtttttaaaaaaaaaaatgtaaaaacaatttcaacaaataaatatatttatatagtatatgcaaccatagtgtcccagaaattatagcatcatttacttttcttgtcttctgaaaattcttgtctgcttcggaaaagtacgtatagtcaaaaacttattattctctttctcagaataagtcaaagaaaacaaaaaattagctttttataatgtttatttcttccttttttagttgggcatgggtagtgcggtcgagacactatgtggacaagcgtatggtgcccaccggtacgagatgcttgggatctatctccaaagagcaaccattgtccttgctctagttggctttcccatgacaatactatacactttttcgtacccgattcttctcctcttaggcgagcctaaaacggtatcatacatgggatctttatacatcgccggactcatccctcaaatcttcgcttacgccgtctacttcacggcccaaaagttcctccaggcccaaagcgtagtggccccgagtgcgtacatctcagccgccgccctcgtcctccagatatcgctgacgtggatcaccgtttacgcaatgggccaaggcctcatgggtatagcttatgttcttactatctcttggtggttcatagttggagcccaaacgttttacgttataactagcgtaaggtttaaagacacttggactggttttagctggaaatcgttacatggtctttggagcttctttaaactgtctgctggctctgcggtcatgatctgtttggaactgtggtatacacagattctggttcttctcgctggtttgcttaaagatcctgcactctctctagattctctatctatctggtaagttcattaactaattacattttcatatactttttcagtgtttggatacacttgtatttaaacaaagattgaaacaagtattgttcttcgatgtatcatttgtttattttgtttggcagtatgtcaatttcagcattatcattcatggtctccgttggctttaatgctgctgtaaggttagtatttatttcttaatcaataccagattattaattaaacgtacgtttactgaaaattggaaaataaaataaaataaaacgtgacagtgtacgtacaagtaatgagcttggagcaggaaatccgaaatcggcgttattctctacatggacagcgacttttgtatccttcgtgatctccgtcgtagaggcacttgtcgtgattgcgtcacgtgacaacgtcagctacattttcacgtcggatgctgacgtggctaaggccgtctctgacctatgtccttttctcgccgtcaccattattcttaacggaatccaacctgtcttgtccggtatacatgcaaataatttagctaaaaccggataaaccggagtatattaacggaaccggatgtgacaaatttcggtatgtttttgtttgtaggagtggcagtgggatgtggatggcagacatacgtggcatatgtgaatattggttgttactatatagttggtattccaattggatgtattctcggcttcactttcaattttcaagcaaaggttcgcttccaaatattttctgtatgatatatgctttattactatctacagtatttaataagaagacttgtatgtgaatttggttacaggggatatggaccgggatgattggaggcaccctcatgcaaacactaatcttactttacgtcacgtatcaagcagattgggataaagaggtaatgttacatgaaattaagtcacatcatattaaaatttttacaatcctctatcaaaagttaaaaatagtttcaaaattattaagatgattaccatatgatgattcaggttgaaaaagcgagaaagcgattggatatgtgggacgacaaagagcctctccagaattaataattttgttatgaagtaaatttgtttttgaaagaaagatccttttttcaaaagtttttttttttgtaatagttagttcacagaaccaactattcactagattccttgggagaaaatatttaggctaaatctgatggataagtctcaatctagtaaaacctgttttcaaatggatctattcttgttttcgaagtaagcatttaataatttatcatgcatgttaatgtaacaattaactagcaaatcaatgtggcttggttctgcagtttctttaactaagtttaatgaataattttggtttggtttggtttgattcaaattcagttcactaaaatttagcttggttacttggagttaaagacaagttgtgagtgcttctattaaagatttaagaatataataagagtgaacgtcagaaacctaattaatgatcggacaaactaaataagtttacaatgtaaaacttgtaaagaagctataatagtcaacgatccctaagcaaacaaagatgaaattagtcaaccggtggaattaaaatgcttcgtaaagtagtactaaagcatccaccgaccttgattaattttgtagaaatgttcaatggactgatggactgaggccatgttcacaatcgcacaatttttgttttggggggtcaacacaatcgtacaccttattccactatttcacactaccattttgcctttctcacaagtcccaaacttatgtataaccacattaaaagtacatcaaatgtaaatgtgccgaacataaacaaaagaacacatgtctcaaaacgagcaaaaaggtcctccctatcttttaggagaacttcaaaaaaaaaaaaaatatgaacaaaaagatccattttttagttaatgtgtgactgatgagatgtgaatccagatccttagttgagactcttaagaaaaaaatgatattacaccattgttagattgaggatcgagtatttattcaatatatgatatggtatgataagaaaaacaaaataactccttttctaagaaatgttcaaacatgaagagcgaagagaggaggaagattggagtcatttcgaggagaggaacagaagaaataacgtctaaaaggatttgagaacacgtggggattaagatcacccattttttg

SEQ ID NO: 25450 - DNA, 600 bp, Arabidopsis thaliana landsberg
agttttccatctccgggcaaaccaaaacgcacccagttaacggcatccaggcattgcacgccgttctgtcaaacaaggtactttctacagtagctatgccatttttctctcctgttttctgcaacaccgctttggaaggcttgccccatttgcgcgattcataggtaaagctgatggtatcgcttactgttacaccattctcatgggccaccacaacagcagtatatttcccggcatacaaaggtgtttcccatcgcaggcccgctgcgggaaaatcctggctgtttctttttttcatgcccaggctctttccatttacaaacaactccgcctcattgcagttggaatatactttgatcatcttggtttcaccttctgttccccatcgtacgggcatggtatgtccgtaaatatgcgccatgggccgggttgcccagtacgactggaacacatagtacgattctttcttcgtcatatccctttccagcaaccctttctggttcacataaggaacaggattgtccgaacgaaaagccgttgcaaaatccttgaatatccattgtgcggcgcctgtgagccagggcatggtttcctgttctt

SEQ ID NO: 25451 - DNA, 2353 bp, Arabidopsis thaliana landsberg
ccgaattcaatcgaaacaattcttaaagggatgtgtttttgtttgtctttacaaaatcaaaatcattagccatggggttaaagcaatcaagaacaaattcaatcgaataaaaaaaaccagagcatatcccattaccaccatctcgacctgcaatcaaaaattcgattcttctagaatcattgctaagctcatttttctttcccatgacataagtttcatcaacgatctgatcttgtttaagatattcttacgtttgttgagaccgccgtcgtttgtgtggggcgaagacgccatcggagatacggaggttgttgaagaagaagacgagtgaagaagctccaatgagcttttgtaattttgatatcaaatttatcacaattgttgtgattgtttgaagaatcgggtgaagaagaagatgataccggtttagaatcaaacttaatggtttatatattcggtttactttgggtttaaagcacaaaccgatataacccagatttagggacattaagctatagaactttcaattcagagggaaataagaagacaactttgatttcatggatatatagaccggagttaaagaatgggttctatctagtatgatgtgatagttctcgtgtggaaatagaccgttttttataaagttatcctcatacttggattgggttgtattaggattttagtcattcttaatcgatatatatatctctcttgatgcaaaaatttataataatgttaaatttttaaaggttccaatatatatttgacataagcacattgcctataaattatacatattttacacgttctttataatattattattataaattttttatatcaaccacacaaatattattttatactattattttaatttaaatacattgttttgctttaggaatttcaaatagtgttcatttgcatatttttacatctctcttcagcatgttttcttatacttattttctaattttccttaaataaataattcacatgacattgttattaaactactttacaatttttttttagtaattaaataatactcatgacattatgtacataaaaaatttagttatatttataaggtatatacaaaaaaacatttaattggtaaatttctttcataacgatgcatcatttatcattattttaaataattatcattttttataattttaatttagtttctcggagaaaaaaaaaatttcgttgattgttaaagtagttataagctatgttttgctcccctcactctatgggtccatttgacctttatttttttttacaaacttaaattgtactaaaattcaaaaaaaaaacacaaatttaatatcatgtaataaaatgcagactttctattttttcatattcatttttgttctcaaacatacgtcacaaatttcctatttgatcttctctttaatccaaataactttatgttctttaattaaattttttttttttaacatacctcacaacttttaaaaaaaaaaattataactaaagaaaataaaaacggatattaatatatttggatttttattttttaacactgttaaaaggaggattgccatgtcagcttcatagagcctctttcatcacttttcacaaagtctcatgtccaatgctttacaagacttgctcttactagagacttcagcgtaagggatatcttcccctttgttatagcctctatcttcttccatagacttagaacacatcctctcttcaccgtcaatattgcttggtcccgaacttgaactataaccacatggttgtgttctcatttgaaccgacctgagtagagcggttctcctcaagtcacccgaatggcagatatcactgggcgatgatggaaaccttccttctgtgtctgatcctctttggcgagactgtggtgtagtagtagttgctgcattggagatcatggaggcaggacatgtatgtgaatggtgtaagattgttggtgacggttgtggtgagtttgttgaagtaagaggtctttggtatcggtatggtgaaactggactagttgggcggctctcgggttgcgatgagctagtgcttgctgttgctgttgggtcctcacagaatctcgcttcgtccgagtcttctgacatgggagagtattgtaatgataaatcatccctgtgttaagtacgacacatgaataaagctcatcagatagtcattttgaaacttgacaaccatatgcaacaacaaatgcttcacaaccatatgcaacaacaaacctgtgataaagaaagctctcagaccgtgctggagactctaacatgttgacaggacagtgagtctcctactgttagtccgtttaaactacaag

SEQ ID NO: 25452 - DNA, 1045 bp, Arabidopsis thaliana landsberg
cgagtaaacaggtaaaaactcatcaagctctcacatttttgttttccgaaatatagaacatcatacattttggggtatgtttattgaaatggcagatcgcatttctgcatagtctaggatgcacagtggtcccaacatcactgtttccatgcgtcccgtttgattgaacagtacaaatcactctgagattgtatgtgtttatatatgtagactcatacgttcatatgtattaaacaaaggagcctggaaatgatctcgatttcctaatcttaaatataaaagattaaacaatggcaattgtaatagtgtattttgtgaaagaaatgatggaaactgttttggtgttgacgtgaaatacactcaaatggccattcatgtatatttggatccaaatgatgtttcgaccattgctcaatcattcataacgttgaattgtcaaaactcataaatcaaaagaaaacccgaaattgttgagaacttcccaaattgtattaccagtactgtagtatcaaattgaaattgatttggacaaagccttaaatcatataagcataggatgcatcataaccattggttacataacaaagacaagaaacaaatgtgatctacagattattgtatttttcatgagacaactcacttctttttatgtgcttgagggaagactgacttagtttcttagccatagcatcggattggatccttgcaacctttctcagctgattgtcttaaacccatgcgacccccttttgccagagaattgctggtggtaattttctgctcggtagaattttatagcgggaagtatctctgttacaatcttattgttcaagatcttctgttgtttctcaacggttttaactagcggctatccgctcgttctctcgtctgtgtatgccttatcgatactacgttcccacatcattcccttactcaatcaacaacaacaaaaaataaagtaagtatgatgtaaagaaacacaacaacaacaatagattcatcctgaaatgtaagtcaggatatagtaacatgataagaagtactc

SEQ ID NO: 25453 - DNA, 1152 bp, Arabidopsis thaliana landsberg
  unsure (1)..(1152): unsure at all n locations
ttggataatttggaataagatatagaattaacatacataaagtgtgtgttttgaaacaacttttgttagtaagactagagaatgttatgcacacgataataaatatgttcatgagtgtctttttttttggtgtaatgctatgagcttttacatgtgaacatatagcgtttctgaaatcaaacttttacctccttataaattgatctttatatgtattctcttagaaattagattgcagtttgtatgcatggttttataaaaaatagtattatttaatcaattttataaataacagtatttataaatctcttaatagtttaaagttaatttggttctgtttatgtaatatgttgggctattagagtaactccattacacaaataaattgagtgtttttttacatttaaaatataatatgttaaaataatattattttatttttgttgatgtcgtaaagatacgttgtcttaaatgtctaagtagagaaatattttatattaaaaaaaaacaaattctattattattatttatttaaaagaactgaaaaaaggaaacaatatattgacggtaataagacgaagccggacggacatggaaaggtgacacgtgtatacttacaattggctcagataagacgacagatatatatatatttgcggtaacaccacgcatcgtcacttcatcaccactactcccttggcctataaatatttctctgcttttaatttccaatttctctgattcattcagaaataacaatcatctcttcgtttttgtttttcttttggatccaaagctctcttaaatctgtaaatcaacaatggccgccaccaccgagaatctccctcaactcaaatccgccgtcgatggccttactgagatgaggttcgcgtactctgattagtctcgtttcttcctaaatctggtggatcttcatgattctagatctgatttttcattcttatttcgactgatctgttttttttttttttttttcgtttcagtgagagtgagaagagcggattcatcagcctggtttcacgttacctgaggttcgtctttctctttatcgcttccgattgtgtttttgtgtggatgcttacttccgatatatcaatcgattggttgntgatctctcatgaatttgtgatg

SEQ ID NO: 25454 - DNA, 1630 bp, Arabidopsis thaliana landsberg
gctttacttttttgattgtgtcctattacttaaagatgcttttattatataacttttgttttacaattattaagtgagtgccgacattcgacacaagctaagtaaagtataagaattttatatgagaaactaatttgacttttgttgtacgtagcacacaagaccatgatgcaccaagaaaaagaaaaaaaaaaacagagtgaaacttgaatcgttatccatcaatattagttatttgtttcaactaatggaggatctaaaggcacataatacgtcataccacttgaaatttagtggagactgaaaacttaagcattacgtttccatctatgttctatgatcacagcgtgaaacacgagtattgaatctcttggctcactataaattgcataacaaaaaaaaagaagcgttccaccatctttttgaccatattagtggaacctttatgtgacaattctccgacttttaaaattctgacccagaaagaaagtctatatcattagaatgagacagggagcttatctaagccatgcatacaaatgttatcggctaacataatttataactttaggcagagaaagaatagaaactaaagattattaggaaatagaactttctcctttgcttttagggaagcatgacatccacacgaaataacaatctcatccatagctaatgtcttactcacatatcatccaaacaagtaaaaatttcagcagattagatgtcaacatttttcaaaagttttagcgtggtctagttatcacgactcaagtacggattaatacgaacaaataacacaggtaaacttacatttagttgatgcactataggaacaatgagtcaatgactcttcatcagctcggtcttatccaaatgaaaagacatgttgatccaacaaagatgatattgtatctcacgccagaaagctcttcatggttgtgccatgcctagaatatcttgaaccataagacagtgggaaaattttctcaagttagaggagaatctaaactttcacttaaaaccaagattgaggcagaaacagattaaagtcaaatttagcactcaaagtaattgaatgattcacttactattaatgggaaaacactcaataaatacgattctgttagagtggcgctcatcaatactaaacttaaccaagctaataagagaaatatagaattagagagggctataatattgttatgcaaaacaaacagagtaaaacaacaacatggacaatcttcactaaaaacatctacagttttttttttagcttaggctgcaccggtaacgcatatccatttactgacagaggtaaaatgtaagatacaatagttgagaagttgaacaaaaatggcataccaaacatgattgtagttaattgattgtacgaagataaatgcatgtagcattacccattactccgatccgtctctcaataattaatgtagaatagagaaatctctcttcatcatacaatgtcattaaagatatcccacacattaacaaagaagttcttactaaatccctaaatcaaatcaatataatgcattcttgctcatcaaaatgcaaccctcaagaattcaacatctttacggtacaatagggaagacaatgtctaaagact

SEQ ID NO: 25455 - DNA, 688 bp, Arabidopsis thaliana landsberg
tgtgcataagacacgacaccaatcctaaacatgtcaatgccattcagcgtaggaacagactacagactgttttcagtagcggaaaacgtcacgcattctcttaatgttccggtttactttctcaacattaccaaactctccgaataccggaaagatgctcacacttcggttcacacaatccgacaaggcaaaatgctgacgccggagcaacaagccgatcccaacacttacgccgattgtatccattggtgtcttcccggtttacctgacacgtggaatgagttcctttacacacgtatcatttcccgttcgtgacctacaaaatatttgaaatatctctttttcaatattttttcccactttgctccatccaatggaagagccttgaaattttattattttgatgtcctaatgttcataatttttcttgaattgtaattgtgaaatgtttctttctttttctttaatggttattagagtgcctagtaggctattttaactgtttttgtactcttaaaactttgaaatgaggtggataacaaaggatgccaaatgttttttttttgttcaatgaagtgggtaaaacttgctcacattcgactgtttcttttaacggtcgatttttttgttaaccgggaaaataaatataaaggtcattatgtttcaatctcttgctattttgttggac

SEQ ID NO: 25456 - DNA, 1009 bp, Arabidopsis thaliana landsberg
gccttcaccactaattgagtatggtttagactctgagggcagtagaatctcgtctctactatgagccgcccctacttccacattctatcaagtactataccactagaacgatttgttattcattgctatactgataaacaacatgtcttttggaaaactgagtataatatctaagtgcttcgtaggccgtaatgattagaagatacccccactcgaatattccaatttaaccctactcaacagtggtccatttttgtagacaaattaataataccaaaatcttgtatatacaggctagagattcacgtagtattcgattgcaccagtcacagttaatgttgaaaaaaaaaaaaggtcatagctaacgaaccctcacatgcttctaactatgtaacacactaacacatatattaatatcttgactatcgtaataatttttattttacttttgacatataaataacacacgaagataaaacaataaacaactatttcaacctgtttcggttgtgatattcggttaattataatacaaaaaaatggattgtaaattcttttactaattgatttagctagggaaaaagagtgtataattagacttgtttctacgttgagaaattatatttaatcttgttggtcagtgaaaagttaattttatgataaggtcggccattggtcaaaacattttacaacttgagagaaaaactcaaaaggctacataaacccatgtgccgtgctcgtgcgggttaacatgaatatcatactttatataggtctgatgatagttactcgtcttctacttttatttcagtacagtgcaactttcttatttcctagacacacactatattatatatatttctaaattatcataaagtacttaaaaattgaattcgaatatcaatatgcaatacagattatcaccttttatataaaaagaaataccattgacaggtttatccaccaaaattgtattaaagctggtcaggtctattcatgtctagggtac

SEQ ID NO: 25457 - DNA, 794 bp, Arabidopsis thaliana landsberg
ttttttgaatattccaacgaaactattatatttcctttatatagatgtagctatatattaaaatctatgtttactttaaaatgaagcacacgttagtacagtcttaaggacggctgatttcatatgcgcatgtgatgaggcattgtccaatcccttaagagacgccaaactttgcgtactcctcaatttcatttcgtttagttctttactttaacccatttgtatgaatcatcgcactaatcacgcaattaccacactcaaaccccgcttttacgaatacatacgaattaagtctattttaatgagaacacctattctacttttactgtttgttggtcggtaaaagttgatttccttgtaaaaaagtaaatacgacttgaccaaatcagacaccccctagtatctatcattcagagttatgaaattgaggaagttcagtaaaagaagtccataactcacttcaattgtattggaccgacctaagcaatcaaatcatgaaatggttttcaaagtgatttgattagtttggttggaacttggaacaatgaacatggtgatctctatgacttactgtatgattactaatttcatacttatactagacatgataatgtaattgagactacgaaccttgaatttttggcgttagacaaccatataataagattatgatatcccaaaaggataaaagatctctgatttgtcacaactaagagttgaatatacatcactaagatatccaaggagagttttggtggtagtgaatacagttctacgcctacatttgcgacaag

SEQ ID NO: 25458 - DNA, 1123 bp, Arabidopsis thaliana landsberg
tacacttaaaaacccttatctctttaccgtcaataaacctccctatataaacacttgggcacacaaaccattcctctcacacacaatatcttcagccgattcattctctagggttcatagtttagtcctcgaatccatatatctctgttgatgcgttcttcaattgctttagtattagcttgttcttagtgttagggttattagaatggcttcatcagatagtcgatgtggatttgtccgttcccatatgattcgttcccttgaagcaatagtaatcgtgttgctctcgttctctaaattgctctctaatcatcaaagtaatcttacggttaattctagtatgataccgattagtgagcataacttgagcagctacataatcttctcttacgagggttttgttttgtcttaattcttggtttgttggggaagaacagtgatgagtcagtttacagacctgtaatgactgcggtaatgatcgcattattatgaacatctaagggactgagttcttctatccatctgtgttttagttttttttttgtcttggtggcttttacatgatagaaagattcaggctttgaatatattttatatgtgaagcttgttgtcaagtgtaattgcctacattgaatttagtttccctcgctatcatgttcttcaaattttaatgatgttacttaggacgtgggggaagttatttaaagtttggtgaacaaggtagttgtagtacagtggtaagtattcccgcttatataccaaaaaaaaagtagcatccaaaaggaaatatatgctttacgtagttaaatggctttgttagagtcctctctattagtttaattacaaaatttgcaatccttataaattttcataggtatttaattagcattataaaagcactatatcatagaaaatatacactattaactttcgataagtgactttatgaaccacgtcattagatcacaagtcaggttaatacaattgtcctaaaattataattaatgtagataatgtgttactaaaattataattactaatgctattattgacaagttcggttgataagcaagtccaaaatcaaatctcatcaatcagacttcttggggacaagagatacgac

SEQ ID NO: 25459 - DNA, 1306 bp, Arabidopsis thaliana landsberg
cttgttagattgtcaaaatttcctactttcagccattgtctattcttagaatccacctgcagaagtgtggcaataagaatctcattggtcaatttacaattatcagagagatatattattcctggaacagcagcgtgataaccaaatatacaagaactaggcttaccttttgtagagtatagtcctgcattctatcacacagaccgtccaacaaatcaaccaccctcaggtcgcttattctatttgaatgaaaaagaaagaaagaaaattagaggatcatccactgtgagaaacctgcctaaaaaaagcaacatagctactcctaagaactcattgtgaatcggttgttgtttcacagacactcttagcagtgtcaacctatcagattctttccctttcgtcattgctcctaactacggatacatgttaccctcgttaagaatcacattttcaaaactcgagtcacgctttcatgcaaatgcacaaaaaacttcagtccatttttatcatactgattttcaggatgtggatataaaaacaacgagtacacgaatcaaagcagacatggtctcgtttacagataatgcacaaagaggcaacaatgttgtacctgtaatcaatgacctttccttcacgctggcctttagaattgagccggtttctcatatcaagatggtttcgtggcttttcctgtttaagagtttataataccaagttactaaaaatgtgcttgtaaaattgaagcaatgtaacagaagcaggcaagctttgtcaatgttataatacaagatgacagatattaagatgttcttacctttaaaagctgtaactctaattcctcctgcacaacatcaaccacccttattagtattataaaggaaggattaaatcattctcaaaatcacgaaaacaagtcttcttttcataatgaccaaatgcatgaactgggggaaaagtaacattttgaaaaagaacatcttcatatattgaaacaaaaccaagttctagattgcaattcttacgagacaacctcagaaaccgaacaaatagctcaatagtaataataaagactcaaacttgaatctccagagtgctaattcaatcacgacagagataatatacagaaaaatgtgtccacggaaaattatcctgaactcctttcactataacagtttcaaaaagcagaaattaaccttagaaaaaccaatacaattagtacagaactaatggatttttgtcgtaaatcaagcatcaataaagcgtttatacgacaacatcagcttgaatttactttacttgccagaaa

SEQ ID NO: 25460 - DNA, 1340 bp, Arabidopsis thaliana landsberg
tatctattcgtatagtgaagagttatgatgccgtaagctgcgtgggaaccagaataccacagagtatttgtggacttatgcgtcgagcaaaagatgttagggaatcaacctggaacgcagcatatattgaaaccttttctacaaagaactggcgctaggttcaccagaaaccagcttaagaatcactgggatacaatgatcaagcagtggaagatttggtgtagacttgttcaatgcagtgatatgcattgggatcctcagactaacacttttggtgctaatgataagactgggccaactatttacatgtacaatttatcttctgtggtgattttggttggttcttgagtctataataaaactcatgattggatttgtgacaggtgaatcctgaggctgggcagtatcggttgaatcctccatcgttcctcgagaaacttgagcttatctttgattatagtaacttagatgatgaaggtacttcaggtagcaaaaggaagcgaatagccaagcatcgtgatgaagataatgatgatactggagatgaagaagacacgcaaagcgcttctaatttctcgagtcctcagtcgaaaggatactggtcaccgtcttcacatgagctgtttgttgatttgttgttccaagaggctttaaaaggaaacagacctgactcacattatccaaaggaaacttggaaaatgatccttgagactatcaatcagaataccggtaaaagcttcaccagaccgcaactcaagaatcattgggattgcaccaggaaatcgtggaagatctggtgtcaagtgattggtgctcctgtcatgaaatgggatgcaacttctcgaacatttggtgctactgatgaagactggaaaaactacttgaaggtataaacgctactcgactttttatattagttgattaagtttgcagcttaacattggttctttgattaacaggagaatcatagagcagcaccattcagaaggaaacaacttcctcacgcggataaactagcaaccatcttcaaaggacttatagaaccaggaaaagcctatttccgttcttatcgcaggagagtgcttgatcatcattccgaatcaccacagctacatgacccaactccattatcaacactttacacaaacgagccagtctcaggaagtgaaggtggagctgatgaagatgacaatgatgacgatgatgagcagcctactccgcagcaccggagatttaacagtgttggttttgcagagtctcggttacaagatgttgaaattgtaactccgggatgccacaggttaaaaactgagctgatgaaagagagtccagtgagtgca

SEQ ID NO: 25461 - DNA, 1296 bp, Arabidopsis thaliana landsberg
gggcccatttattttgtttcaaaaaaatcaaaaagctttttgattggccttacaaggcttccaaccaacaaatctggaaattttatacaatccataattaattaatagcacaaacatataatatcggcaccgacggaaaattaccactgtgaagaatagccaaaaagataagatgaagcatgtgttttaaaatgttttcactgtattgcagtattttgaaactggcgactaaaatagacaggcattgttgttaggatcgaattattgtgctatccacaagaaaaagttagtactaatttattgttaaacttttcccaatatattctaatttattgttagaatcgaattattgtgctatccagaggagtatttaatattcgctcttcgggattacatttaaataagccaaatcttgtgtatattattatgataggtcaatgactggtgtctttttctttcgtgttaaaactggttcaaaaaaaaacagaagagaactattttaactacttttcaattattttatctactgtgttatgtgtgtttcgcactcacaatctgtcggtagctactagctattttacgattagaaagtcttttttatttttggcgcttaacctctttccatgttgttatgttaagaaaaaagaaaaacctatgtttatcactgatagtctgatacagtaatcacatgtaacgactaatataggtacgcagttatttaattaaaattccaatgataaaagtgcctttaccgattaattataattagatcatccaatcataggagttaactaattaaggttaggcataaatcctaatgattgagccatcaaaagtcaaagttccaactagcgagacccaaacgaggttatagagttgtagtatgggttttagtcacttctttttgaactctattttaatttttaccacttttacgtacttttctttaattattcttggctcttgtttctcatttcagttgctattttctttttttgtttgctttcttttatttactcttgtttattatttactattttcattttcttaaaaacattgaaaatataaaatatatatgttaagttagtgccataaccagaaaaactagaatttcataggattaagtatgaaaatattggtaaattgtaagataagatatatagataccaatatatgtggaaaaaaaaaaaaaagataccaatatatgggctgttaggaaagtatagtgggccactaattatctgcaaggagatccatttaaaacgctttaaattaaagtttgaggcccaaaaaatt

SEQ ID NO: 25462 - DNA, 620 bp, Arabidopsis thaliana landsberg
tgacgcaagctgttttctctagaatacgcttttttagaaccctgtaaaatgtttagctgagtttcagtatgttatgttagagagccaagactgtatttttgtaatatgactcacctggaaaacgttacccagcttcctcaatcctctagctctagctcgaagaacatcctttgaaacacttggatctttaagcacctgagaacaaacaaaagagatgacaagatcgttactattacagtgagattatagtgaatgtaataaactaataatataggatcattaatgtctgacacaaatcatggtgtatcttaccgcttggcagacacgagataaggttgattcgatgtcaacaacatttatttgccaaagggattgaagcattgcatcctttttagcttcaatggctttctgaatattctcttctttgttctctccctgattcagcttgctcacttcatcctgcaacagaagtaagttgaccgcacctacgcgaaaagaaaaaaaaagatttccgtttgatcctccgttgttggaaatcaaaagcagaccccaaattcaacttaaacattgttttttctttagcttttaccagaagcagccatcacttgagattttacttg

SEQ ID NO: 25463 - DNA, 1489 bp, Arabidopsis thaliana landsberg
ttctatcatatgttaaatatattccaaagcatatctaaaacatagacacgttttttatttatttatgttctatcatttaaaaatatataaaagatgcacactttttcaagagagatatatatgtttttttatcatttagataaattgaaaagataacatcaaattagacacatttttgttttctattttctttgtcttcttcttacttaataaaagaataactgacttctaacaaatatatatatatatatacacttgactttcccattcatacaaataacatatatcaaaacattaactcatcttaattacatataaattcatttctatccatgttttaatatactaattctctgtgaccaattgtcgatcaatactgactaagattaataacactaattctctcactatgaataataacaccaattctctgtgaagatcttcttgtagcttgttgagaatcaagctattatgaccaatgtggaacggtttcgatcgacgacatctctatgatacaactatatgccaagtttgtaagggtggagaagaaacaatacttcatgtgcttagggattgtcctatgacgttgggtataatatatgacagcgtttaatcccgccaaataagcttgattctttcttgccaaagtcgctacttgagtggttgttttgtaacttaggtggaagtggtgagttacacataagatagtggtcgactttgcatgggacggctacgtggtgggggttgaaatggcgttgcaataatgtgtttggtgctccagggaaatgtagagatagagtgcggttcataaatgacatagccggggtattcactgacgcattcctagccatggatgaccgggataggcaagccccaaagacccgagcgaatcatcacaccttcataaatctgaaaagcttatccactgaatcttttcctcaaaagaatgattctacatcatatactatcaaattctagttaatgattaattaggcactccgcactcgtcatagttttatgttcatgtcgcttttgcttgccttaacgattgtcaaacggcgagcagtaaccatcacacacgaagtttggtctcttgttttgaataatgatttatcatcaactgaaatagtaaataaccaaccatggatagtactatagtagatactgactaagatacacgtcacgttttactttgccataccacgtcgtgtgccatagtatgtactttataatttactatatatattcagacaaaacaaagtactacttatctcagaagttagtacaaactgctttctcgtttttactttttcatatgttttgtctactattctccgtatacatatttgagatttacaatatgggccttttcgcgatttacaatatgggcctataacaaggaaataagcccacttatttagtggatttaagaaaatatcaaatatttactacaaaattcgtccatcataactacacaaaagtaatgtaa

SEQ ID NO: 25464 - DNA, 2271 bp, Arabidopsis thaliana landsberg
gaattcaaccgaataacggatcaaatcggatctaacgaatattttgcccagcgcaagagtaaacatcatatattcagcaattacaaatttaatgcgaagatctctctccctctctctctgtaatcaatgtcaacactaatatcttggaagacaagccatttcttagaaccttctagattttacctatgcagacattttcttccgccgccgctctcacctccatcctccgtcgtacaacgatctatcacggcggatttggaactggtctccgaatccgccgcagcttttattttctctcagcgatacgacaagagaaccctaatgtcactaaaaatccccacccgaacaagactattctcagatccttcttagctccggttctcccgttagacgaaaaacctaacctcgttgagcttcaagccatcggtacaatcgccaccgctcaagctgactacatgcgcgtcattgttcaagatgtacctgagagtgataatggagaggatgataagattggcgttgagttgctttgtgtggtgagaaagttactgaagaagattggtaggactgttcttgttggtgataaagttttagtggataaagttgattgggttgattggagagctaagattatcaatgtgtttcatcgagtctcggaggttttggatccaccggttgcgaatgttgatcacttagtgattctcttctctcttgatcaacctaagattgatccatttacacttactaggttcttggtggaagctgaatctactcgaattccattaacacttgctttgaataaatctgaactcattagtgaagaggtaaggaggatgaagaaattgtattttagatctctttgttggtttagggattgattagaatcataaacttgtttacaggaattgaaaacttggaagataaggttgcgtggatggaactatgaaccattgttttgtagtgtgggaactaaagatggacttgatgatattgcgtttgttctgagagatcagacttctgtgattgttggacctagtggtgttggaaagtcgagtttaatcaacgtattgaggagtaatcatggtggtggtgtggtggaagatgagaattggtttgagcctgtaaggttcttttgtgttatttcattttacagcttaagttttgtttgccagattcttatgagttgagcttttgtgatattcagatgttaggtaataagtggtttgatgatcagcgagtaggggaagtttcgagtagaagtggtagaggtaaacatacaacacgaaatgtatcgctactgccggtttctgaaggtggttacctcgctgatactcctggctttaaccagcctagtttgctgaaagtaacgaagcattcactagctcactgttttcctgaggtttgttctttgtacccttttgcttgtgccaatctcccttattggctgactgtgacgatgtgttactttttaattgtttcttttagatacggaacatgattgagagcgaaaaatgtggattcagagattgaatgcatattggggaaccaggatgtgttgtgaaaggtgactgggaaaggtatccttcttacttacaattgcttgatgagatcagaatcagggaagaatttcagcttaggacttttggaaccaaaagggaagatgatgttaggtattgttgggatttctcctgaaagaacagctttatttttagattgagattggtcgcagtcactaatgttgtttactttggaatgatacttgacacaggtacaaggtgggagacatgggtgtgaaacatgctgaaccacggttaatgcctaagaagcataggagagagtcaaggaagaaaacgaaacagacaatgatcagtgagctggatgagttcgaagatgaagacagtgatttgtacatagagaacgacccaatcgtccaagccattgagaatgagaataaaagacaatgagagaactcaagtttccactataactaagtcacatgatgtaaaagattgtacagatctttttaagttctcagctcttttgtttgtctgaattattggctaatcgaactatcgaactaaccaaaacttgcagaaccatgatcaatgatttcataagtcatagaacgaaaatttccaagataaatctatccattgtcttacaaaacgattcgagctaaagaaaaaagagaacaaaatctcgttcaagaacacaagggacatgaaaataaagaaagaaagcttaagctgctgatttcttggacttggcagccaa

SEQ ID NO: 25465 - DNA, 998 bp, Arabidopsis thaliana landsberg
ccatctctctctattctctatctctcttctccacgttactaccacctaacctctcatccaccttttcttttttaagcatatttcatttcatctccgaaaggaattgtatcgttcctcacacacgcctctcatctcttatccgtaagttttgtttctcttttctctattgatgtacccttttgcccatatttgtgctcgtggtttcgcatttgatcgtttatgctagatctggtttgggtttagtcgtttagatgctcgtcaagctccctttgaatcactagtgctcttagactcttatatttactgatttggagttttgtaattcaaaagtccgagtcttttgatgaacccccgtgccgaccacacgattgctttcaatttgggctattgaggattttcgcaagtttctgtgtgaatcgtagagcagaatgattcaaaagtgatttcttttgattcaattatatacgattgttaatgtctttgaggttctatgatctggaataagattttggtattatcttagtatatcaaagcttagatgatgtttctttagcatgtaactactattgtccatataaattgcataactcatttaactttcgagcattctctgcgtctcgattacttatatggttcctttgtttgtttttgttcagattcttgtccttttttcagctcaacaagaatggataattgtactggagaaaatcccatggcttctcagttgaacattctccgatgcccgttcttgaggaacatcaatgagcccactaacctctctttctcttcatccttgccttttcccatccctgtaagtaaccgtctgttggttcactccatattgacatttcttatagattctgatcttgtctcatcatatatataggcaagagctgggaaaggacctatatttgaagatggtcccaattttgataccgcgtttaagcttttccatggccaagatggagttgttcctctctctgacaccgctcgaactg

SEQ ID NO: 25466 - DNA, 1363 bp, Arabidopsis thaliana landsberg
ccggaatatgagaggtaatattaagtaaactaggtttgtttgattttactagtgaggatggttgggagatcttgcaatgaaagtttgtgatcatgggctcatgtttccagggaatgtacaagcaggagtggattgataagagattgatccattttgaaaattatacaagtcatttaacaaaagctacatatggaggagattaaaagactaattaatgataatgtaaaataactctgatatattctttattctcttctcttttcttgtaagttctacttatttcccatttgaatcctggtgcttcaactttcaagtaaagctctagtctttgcttctcttcatctctcatgatcaagtttggctcgagtccgttgcagaatcaagtttagctcagatctttcatgatgctgtagatgaagactaaacacccttctgagtcttatcatgtttccattttttgttgcagctctttttattgacttatgtttgatacctcaagcaccaagactcttcattcttcagaaaacagtgtattgaggatcaaagtaatgtgttatagcttcgttttgacttcaaataaactattataagcggttagacctcttctcaatgcataccacacagctgaatgcaaaacagaacggcttgttttcacagtcatttaagcaactcccacactcatggcaacgttctatgcagacaacgcaagctctgcaagatgacttagaataaggatattgacccttcaatggacatgtatctgctggacaatcaaataccagacttggtttctcacaccaggggcatatctcgaggtcagtaactcgatcatcctctaaatagaattctgatctacaagacgtatagaatctcttcttcctctcttgtaaacccactttagcatctcctcctagcaataagttgagctctttaaactgctcctttgtgaaatacaacgccccaccagtgattaggcttttgactccaagacggtttgaagattttaagtcccttaaagttgacactagtcctgctgtgcttagtctaagacaaccagatacactcagctgcaaaaaaacagacacacatgaacaaacaacacagaatcatataacaagattggttccatcattcgatcaaactaaccttagtaagatgtggattgctagcaagaacttgcttcaagccataatcagtgataccaacacatcctccaagattcaaacatcgaacaccgcctagagcacggcgtgttaacttcaaaagagactcatcagtaactctatattgaagaaatgagtcattaagatcaatacttgtccagaaaaaaggttcctttctaaccgaatcacgcaaagaccta

SEQ ID NO: 25467 - DNA, 2094 bp, Arabidopsis thaliana landsberg
gaatagggatcggagaatgggtgggtcatttggtctaagtaagaaattctggtcgcgtgataaagtaataagaatcgttgttagttttttttacaaggacgcaataaactttagttaagcatttttgtataaccactacatttctttactaatgatatttacattcttataaaaacaaaaaagtatcattgttagttttataagttataacagcattcgaaagtaagccttagctaaaatgggtagaagattaatgcattatggagatttttaccttggggttttaatcattctaccattttcctcccaaaatcccatctctagcaatttcacaaagtgtactagaggtaagtcacttttaccaatttctcattttctccaacatcttattattttaattgaacatgtctcatgacataattatattaaattaaaccaagtgtccgataagttaacaaaattagacagaatatagcataacataatcaaaatataagcaaaataagtagaagttatatggtcaattctgagcaaaacacttttgatggcaactaactacaccaattcacgaagtagtgcaacaatccgaatgacttaaaaataaaagaaaattataatagcgaatagacagaagcttggtttagtccaatcaaaaccataggtattaaatgacccggtattagatctctctttggttgcagtccaacatgtgtgattaaaaatggtttgtgtaaacgtaatctacaatcctcgtttacttacactttttattacggatagttggctcagagagcaattattggtttaagatgttcgcttgtataagtatataagatggtgcacttacataatcacttgcaatggtccactacacaaaccaaatttaaattgtccaatataagtcgaacatataaatcaaacacttgttatgtcttattcaactcaaattgtccacaaaacttttagatttgttttttataaaatatatctagacttagaaagtagaaacaatgacgttgtttcaacgatttgacatttaccaaagccgttttaatcacagaatatctctttagttctcttcccaaatcatcaaaagtaatatgattgataaaattagctataaacataaatctacgattttagcgattggtttctacaaaggtagaaaaacttgtgcttgacgaaatcaataaacaaaaaggcttcgtcagctagtctctcgatcatgccactcctggtaagctgagggaaaaacaaccaaccaccggtcagaaccacaaatcccaccgtgagcagttgtgaaaccatctgactcaccttccaccgccgcaccaacctcgtcctcttcgcagcaccttcagcggcagtgcaaactccatgtaatacaaagaacaaagtgacttcacctgtcagcgattcacgtgtaaaatagaagaaaatcagctcgtgaaccacaccggagacaaggaacgaggcaaaaactcccaagaacaaagcctgatcagagttcattttccgaccggccattcgtctcaccgggaggtagatggtcggccggagaatcgccgggaccatgaggttccaccggcgaccccaaaagtcttgaagagaggtggataagtatggttcattgaaatgcggctcgaggtcgcaccaaagaatgattgtaagcaaagcgttgacgatggttaaaagaacgtcaagcacaaggtatagatgcaatggatagagacatattagaagaattggaggcaacgaacttttatagttatggacgtttaacaacaccccaaaaattgcagctttacaaaagaaaacccatttaggtagatgattttgagagttagagtttttttgaatcttgatgggcaagcaagtaaagcatatgaatcggaagagattagcgggaagtggtaaaagaggacctttgtcgaaggcaaataagatgagcttaaaattagcaagtatagagaggcaaaacgcagtggtggaagagaaaatcgtaaagacgaagaacaaaggaagaacaagaaacagaacacagacaggaagaaccgagagtacccgatgaacaccgcttttgatgtgaatata

SEQ ID NO: 25468 - DNA, 1581 bp, Arabidopsis thaliana landsberg
  unsure (1)..(1581): unsure at all n locations
atgtatcttcttcttctaccttgaacaagacttgattttgccactagttatttcagaaaaattaatcttaatttcactnnnnnnnnnnnnnnnnnnnnnnnncatatccggtgaagtttttggaggatttggttgttatggagcatagggttttctcaaaaagaagattcttgagcttgaaattgaagtctttgaattcttaagggaattttatcgaacactttgtgggctaataacatgaaacaacaatggcagttcttgatcctctgtttgctcgtcttgtttctaacagtggactctcgtggcagacggctactcagcgacgacgttaacgacacagctctgctaacggcgtttaagcaaacctctatcaagtcggatcctaccaactttttaggtaactggagatacgggtcgggtcgtgacccatgtacttggcgaggcgtctcttgttctagcgatggtagagtcattggacttgatctacgaaacggtggtcttaccggaaccctaaatctcaataatctcacggcgttgtctaatctccggagtctttatttgcatggaaacaacttctcctccggagattcttcttcttcttcaggatgttctctcgaggttctggatttatcttcaaactcgcttacggactcttcaatagtggattacgttttctccacctgtttaaatctggtttctgtcaatttctcgcacaacaagctcgccgggaaattgaagtcttctccttcggcgagtaacaagagaatcacaaccgtggatctctcgaacaatcgcttgtgcgatgagattccggagactttcatcgccgattttccgaattctctgaaacacctggacttatccggcaacaatgtcaccggcgacttctctcgtctcagctttggtctctgtgagaacctcaccgtattcagcttatcacagaacagcatctccggcgacagatttccgggtagtctctcaaattgtaagctcctcgaaacgttaaacctctctcggaacagtctcatcggaaaaatgcccggagatgactattggggaaattttcagaacctggggcagctctctcttgcacacaacctttactccggtgagattccaccggagctttctctgctctgtcgaactctagaggttctcgatctctccggcaacagtctcaccggtcagcttccgcaatcattcacctcttgtggctcattacaaagcctaaatcttggaaacaacaagctctccggtgatttcttaagcaccgtcgtgagtaaactctctagaatcactaatctttacttaccattcaacaacatctcaggctctgttccgatttcgctcaccaactgtagtaatctgcgagttcttgatctgagctcaaacgagttcactggagaagtaccatctggtttctgctctcttcaaagctcttcggttttggaaaagttgcttattgccaacaattacctctcaggaactggccctgtagagcttggtaaatgtaagagcttgaagactatagatcttagcttcaatgctctcactggtctgattcctaaggagatatggaca

SEQ ID NO: 25469 - DNA, 1088 bp, Arabidopsis thaliana landsberg
ttcgattttatgcttctctgatcagacacaagagcacaaccaaagaaactcactatagcttggctgtagactctgatgctcgaattcttgctgttgatgatgatctgaattgatgatgatgatggtttgatgcagatgggttttcaaaaatctcatcctggttcgtaacaagtaatcatttttatccatctcaagtctctgttgaattttctatgatttttgtctctgattgtgaatctgggtaatgatcaaactgtagtattagttactaacatttccccaaatggattgatctctctgatgtgtttgtttggtcaatcaaaattgatttctgggttttctgttgtgatcatggtaaggtcaaaagttttgagtttccgtgtgcagaggagaaggagaagtcctttgcgtgtgacaaactgttttcttattatcttccgtatcagatccaatctttctttaagattcctttttcatctttatagaataatcattgttgattcctacacttctcttccaagttttcttctttcattcttggttgatttgatttgattgattcacagattctttctctgttcttcattagtcaaaaggtttcaccttttctagtttctgtttataacaattgattatgatttggaaccttacttagtttctgtttcttatgtagatcaaaaagcttagaacttgttgaacaatactagagactagagaatttgcaggtaagtttttggggatcttgttctgtttgttttctcatatttcaggctaatcagagtgtgactttcttgtcttaatttgtggttttgtagataatctgtttcaaaaatggatgctacgagtggaactccgagtttacagtatattaacttgccggagcaacctgtttcgactacttctcctcctgtgtcaccatttcagaggccaaaacgacattgctttggtgacacaacttcaggagagtttcctttagcagctaacccttccattgtcctacatgttctcactgaatgtaagatggatccttcgggcctcgctaatttcgaggtttgtttcaaaattgtcggaatgttttactgaaattt

SEQ ID NO: 25470 - DNA, 841 bp, Arabidopsis thaliana landsberg
agtctctaacaccaaatattattaaaaaaaaatctgtaacaccaaatattattgttattttttttacaatatgattacttagtcggaagaatgatgatcttgactataggacctcctatgatgatgggaaggcaagtgtttatgacgtttgcgagatcggtcttcttcagaacgttttgatcttttgctgccagaaacttcacccttgttgtcaccatatcgatcttccatacctcgtgctctctcttttctatcagaacgggactcttccctggaacactcctctctgtctttgctgcgtcttctatgagaactgtgtgtgtgtgcgctcgacctgtgactgtgatatgacctaaggctgcttcgctctttaaactcttcttcccgttctacagaactcttttcccgataatattcttcctctctatccgacacacttccttttctccttggaggtgatgggatctgcatccaacaagtaagttgtggtaccaagattttagtttacaaactatcagctttccactagacacattgaacaacccatttaatatattatttctagcagaagaacattaacaaatgacccaataagatagcaccagagacagaacaggggtaaagttcaaatgactatagagtggtggtgaagttcaagacatggtagacctgtgtgcgcgacatatatcttccctcaggcggaagctgaataccgagctttttcaaatcttcatgagggattggtcgtctgatattaacaaacagaaagaatgcccatttcatgaccactatgtttagctggtgttatctctggacatgctaaaggaagagtaaagcaaac

SEQ ID NO: 25471 - DNA, 964 bp, Arabidopsis thaliana landsberg
agcgcaaatccaagtagtcaccacctagcaccaacgaatcattttcttgtaaactgaattcatccttaaacttatgcatagcgttggtgttgacagtggcattatcaacagtgattgcgaagactttctttattccccactcatccatacagttaagaaatataccagagaacgattgagcagccataactccattttctgtaatagaagatttggggaaggagctgaattctctaaaacatttacacgatcatgaagttgctgaatcaacttatgaacttgatcagtactcatctcattaacatccatagtaccaacattaactgcaggaggaggcatataagacaagatggtcatatgatgacatttgcgagaaataatatagttttataaatataattatacaaataatcatactaggtttaacaaaatgaagtttaacaatgataataaagtgattacaaatttgaaatccaactaaaaccagaaaaatactaagattgtaggatagtgaatacgaagaactaaaaaagttataaaaataattgaataatgaatagtgaatacactaaaacttttataccaaaatttgattattgtcttcaacacatatcgatccagccggttcaaccggatcacatgttaatgatagtttgtttgtggggttttccggttttaaatatgtcggataattgtactaaacccaaactagagaagtgtttaagtcacggatcggaccagacggttgaggttggatataaaaatactaaaaacatgatatatttttatactgtaacatgacttcttaaaacaaaatttacaaagttattttgtaaaaaaaaattatatccatactagcacagattattatctaatatatatttgtttaaggacacatgtaactgtaataaaagaaaagaaactttataaaatgtaatgagagatgtaaaaataaaaatttgtt

SEQ ID NO: 25472 - DNA, 819 bp, Arabidopsis thaliana landsberg
  unsure (1)..(819): unsure at all n locations
gctattcacggcgcaccactgtgcccacaaggccacaagaggtccgaacgattttaatcctaaaccagtacaacgctattttgtattaagaaagtgacataattttaacagattagtttcgtcagtcgattatgattccaactttgttaatttttcatgtttttaatgggccttttcttatagtcatgccctacgaggatttttccagttccagcnnnnnnnnnnnnnnnnnnnnnnnnnnnnngagcagtttcgttgttataatatatatgacccccacgttgcctatcaatgccagactatattcgactatatacacgtatccacatcattttaaatacagaaaaatgtaaagatattcatgaaccatgaccagctaacattttcaagttgtttttgttgttgtgtaatctaactggtgaaccatgagtttgtatactatatacgatatatattgccctacaaatctcttatgatcttatcggatgtgggatacaattctatatatatatacattttgtcaaccttcttatagtattgttttgcatttcttaattataaacattatcgtaaaatgtagactaagttgttaaaaacaatggatcaacttcttttgcaagtcacgcatacatgtcgtcttaaatatctccttaaaatctttctatataatacctaaagggttagctctagcacaagcacacacagagagatagagaaaaatataacaaattataagccccgtccccgtcactattctcttatgttgtcctaataataatccttttcaccatcccatacattcaaagccagcccggtgct

SEQ ID NO: 25473 - DNA, 601 bp, Arabidopsis thaliana landsberg
tcatcataactaaacagatctccaaatcccaaacgaaaggaatctagaaatattaatttcccactatgttatcattacacaagcactacagcctgatttgtggatgaatctggaaatgttaactaatatataaacttacacagtctctattttaacaagacatgataacccaagcaacattcacagcttacaaaaaaacactttcataaaaaaaaaagcatatcatctagagagaaaaaaatggagagcaaaagagtgacaatgttggtggcagtaatgatagtgatggtgatagggaaccttctggctcagacagcggctcaaaaaatcccatttaaagaatgttatccagcttgtcttgtggagtgtaaagctggttcaaagtttccaaagtatcttaagtgtccatttacgtgtaccaaagaatgtcttcaacaaccttctccaccatctgtttcttcaaacaatatcgatgaatctgattatttctgcaaactcggatgtgcaacttatcattgggtttctctttcttccatccaaaatccgagtaagtttatacttcttctaaacaatttttacattgtaaatcttacccataacg

SEQ ID NO: 25474 - DNA, 1744 bp, Arabidopsis thaliana landsberg
cttagcgtctatgcatgtgacatacatacaaacatctaaatctatgagttgtcttctttcccaaactaatatgttgtctctgatttgcaacatcaaccacacaaaacaaaaatctaagagaaaatcaagaactctcggtatcatcgatgaagcagtagaacatactctagaaacaaatgttctcggtttaatgttacttatccggttagattatacaataaaactgattggcttataacaccggttagaccttaaaccctttcgtgacttattagttggactctgcgccgcgttctcttctctatcgattaagcaaaatcgaccctcttcgattttttttttccatctctgagcaaaatatcgtgctttcatcatcttcgtctgcttcttcttcttccaaggattgtcttcgatctcgaagtatactgattcaaagacctaatttttgtccccattcgattgtagaagcttcacatagattaataaaggaatcgactttgttctgttttagcgactatgtttacctaagctgtgtaaacttaagagaaacccttttgcggattgaatgtatgatttatgcatatctttctcttatgtttcaggccaaagtatggagctttctgatccaaacaatggcaagaccaacaaaccaaagcaacctccaaaacgtttcatcaagaaccaaatccctgattcaatcctcggtgatgcatccctcaacgctgctatctccatcttaccttcaatttaccattttgaagtccataaatgtgtgtggcgtatcaaaacatcaaacgctaaacgcatagctctgcagcttccagagggtcttcttatgtacgctcttacactctctgatatcttcacatcttttgctggagcttctcactgttttgtactcggtgatgttacttatggagcttgttgtgttgatgatttctctgcttgtgcgcttggtgctgacttgcttattcactatggacatagttgtcttgtccctatcgactctacaaaaatcccttgcctttatgtttttgttgagatccagatagatgtcaaatgcttgttgaacactatacatctgaatctcgcgagtgatgttacagaacatcattcttgcaggcactactcagttcacttgggcgattagagctgtgaaaccagagttggcgaagcacgcgttcaatgttttgagccatcagttaaagcctctatctgctggcgaagtcctgggctgtccagctcccaatgtgaagacggttgaggattgtaaagaccaagtactggtctttgtagctgatgggagatttcatctagaagcattcatgatagccaatccaaaaatcaaggcgtttaggtatgatccatatcttggcaagctgtttttagagaagtatgatcataagggaatgagggagacgagaatgagagcgattgcacgggccagggaggctaaaacttgggggatcgtgttggggacattgggaaggcaaggaaatcctaagattcttgagagattagagaagaaaatgatggagaaagggatagatagcacagttgttttaatgtcggaacttagtcccactagagtggcattgtttgaagactcggtggatgcttgggtccaaatagcatgcccaagactttctattgattggggtgaagcgtttcttaagccgcttctgacgacttttgaggctgagattgcatataggattcatccgcggctggtgggagaatgatt

SEQ ID NO: 25475 - DNA, 1411 bp, Arabidopsis thaliana landsberg
ccataaaacgataatgtatgtgtgtacggaattttcttttagccaaatgacaaaaaaaccccctaaaaaccaataatattcgtgaaaagaaagtaaactatataagagtaaattatacagactacgttattcttttgttgacaaagaaaaactacattcattacgatattttatatatgtggttcacaaaaaaaaaaaaaagcttatgactatgaaacattatgttttgaggcctctggcgatttattcgaaatgagctgtccatattgtaaggaagactgactagaccttaattcgtgatggatttcaattattagatgaccagagatttaaatgcaaaatatcataatggctggagtcagtagagtgggtgcattgttttgagaataagattcagtcgtactttgctcgtcgtatgaatatgtagcgagtgtcaattgatgttcaaaggtagataagttgtataatctctgaaactaggaatgtgttaagagttttagatccttaactgtaaactaagggaagaacattaaatgtatattcttcttataaacaataaatatattacggggttaaatgtgaattgtgattagacctaattgttatacattaacgacattgtgatccgataacttttgactagctcgtgcatttctctaaaggcaaggcatataacacttagtttcgtgattttttatagtcatgcagaagtttttaaacatgtatttcaaaacaaacccgaaagctccttggaatttgcattttatgtatttatttagcagttaaccataacgttagtttgcatgttcaatttaaattcaaagaaattaagatgagatatggacggtccgcaataccgtatgctctaacatgatattccaataatcgaagtgaataaatcaatctctaccgatgatgaatctttgaactgaaaggagacaagaaaacaatacatcaaatattttcaaccatcatgggaagctagtcggtcacacttcacaaagtggcctttatttttgggttgtttcgttgaagggtcccgaatcaatggtagggaatactttctccttatctctttctctctcactccaatatatataatatgatgaatcttcacttccatttaaacatcacacaatcatcacacaatcaccctgaatccctgataataaggaaaaacaaaaaagtttgttttataaacacactttaaacaatgagggagaagtacacaaaggaggaagcagtgaagtattgggagaagaagaagaacaagccttcttcaccaaaaggagttggagagtttctgaaaaagaagaaaggaaggttctacattattgggaaatgtattactatgcttctttgttcacacaagtgatagtcaacacacgttttttcatacaaatttatgtat

SEQ ID NO: 25476 - DNA, 2502 bp, Arabidopsis thaliana landsberg
  unsure (1)..(2502): unsure at all n locations
gaagtgaagttactttagttagtacatagtgtcactgtcaatgtgtatttatttgttctcgttcatttagtttattgatacaactttagattagatatttccgctaattcgattaacattagtacttttttccaaatataataaccggaccctgttaaaaatgtttttatagataatagatcctaaccaattagtactactgtttaaacgtgtaatactattgtttttcgtaagagagtgacgaatcaataggaaatgaaaagagttaattaaaattaaatgcatgctatgagggggactaaagttcaggtgtgggggtattttcttttcactgtatcatcctctttatttaccttacaagttcgaatttatttgtgtaaaaatcgacacaaaatatctaaatttttgactcagtttctttacttccacttttgtactcagtttagtgtatgtaatgaatcctctgtttaatccgctgtttgtgttacttatgctttgactcttttagtttctgtattgctcactgcctcactctttgcatctaattcttgtgtcttttttttgggttcaaattcttgtactatttgactatgctttatttacctgaaaaggttcttgtaagtgtctattaggaagaagatccaaacgtttgactaaatagtacttgtttacttttagcactgagtgaaatgatattataatgagcaatgctattataattgtatctcttttcaaagaccgatcatttaagccggcttcaaaatacgaaaaatagtgtggagattttttaagttagtttgtattacatgaataaataattaggagatgagaatgttgattaggttaaatgtattaccttgggagatcttaggtttctagaggaaatgaacaatttttctatatcataatgccaaagtttgagtctcaagttcttaactaaacgcattaagagtttgaatgatgaaatgcatttggtgtgtcgtgtacaaaataagtacacttgtcaaatctggagctcaaggtgttgctaaccatttgcaacatgaggagaagatgttggtttcaccagatgtggtgagcaaaggaggagagtgtgaagttctgggtcatcgtttcattgccgagaccacaaaatttcattacatacgtaatttctacggtaagataaaacactcttacaagaacttctctgatcttaaaaaagaattttaaaatttggaggtgggatcccctagcagtcgctcacccaaactgaagtgatcgtcaatttgacttgtctacaaaagggagagagaatacaaggggcaacaagactcaagaaggagaaaaagaagtgggaaagaaagaataagagaaatcaatcgaaatcgccggtgaaggaggaagtggcggagccagtgaaggaggagaaggagaaggaggagcaggggactgaaaatgaggaggaagaggaggaggcgacagagacgaagtaggagaggataagggtgaaaaggatttaaacgctattttgtctaatttgagactttgagtcatgtatcaatgttctagagcatggtttatgcaacatttcagcaacaagtcgcaaaacaatgtttcagaatctttgtttcttatgttacttctggaatttgagtttcagtttaactagttacactttttctcttcacttgtgttttgtctaatcatgcttaaggttcatgttttattagtttcacattctcaacaaggatcacaaattcagtaatgttttacacatagccaataacggcccaataactaagcagcccaacacacatcaaaaggagaaccaatttggaatcaaatagcccaacaatgaaaacgggtggcccaagatggagagtaatcaggtaaaccaatctaattacggattccatgaagctgagataacaagtcagatgaaacagagaagacgagaatggaacatgttgtttggtcccaatttataaacttcttttgctggaatcgagattgattagttaatttaaattataaaaccagattttgcgcaccctaaaactttgttcagacaaaaccaaaaccctttttgttctcccccatcaaatgatcaatttattgaaaacaaaattccgagattttattaagcgttttggaaaattggaagttagtgaaaattaaatatatagcaaaagacacgtggtttaatcgataccactggttgttagtagggactttggatcggtggttgagattttaatgaagtaaataacattagtagtaaagcagtgagggagggagggtaagcaatcgtgaccgttggatattggtagtggattaattgtagggccgatgtacgggtgtgtttctcgactcttttctctttaggcttttctaagataagcaaaatttgtaatccaaaaacttggcggacaaggcaatttcccctatattaattatgtaatggttttagggtttttaactttagctgaaaataaccattcttcnaattagggttttttt

SEQ ID NO: 25477 - DNA, 976 bp, Arabidopsis thaliana landsberg
aggttggtcgatagcatgtccatggccgccagaactccatactcaatagagatggggggatttccaacttccccatgggggaactccatccgcgtcctagccaaaatgtacttcacacccaggcacgattccggatatgggatccccctagcgttccccaaagccacattattcgcccaagactgagggacaggcggcggatcccctggtggtcggtcctttcctcctacgtccatcatcaccgcatcatgactcttcccacccaaacccctagaatcgccttccattactttcagaatccaaaactctcttatcacagtatgtttaattattatatactaatgtataagtaattagctactttttttttacagcaactaattagctaattaaatgattactaaacaaaaaatatatattaagacaatcaataacaacaaacccaataacctagtatattaacaatttggcagaacttttttgttatatggtttgtatataaaatacaccttcaaccctccgtttggcatcagactcttcaccaccaacaatctctctcattatcataggtcattgctctctgcccctctctatctccttgtgaagtcttgctttttattcgcagctatgtttttctcttcctaaaatcgtatctaaattattctcaacgtgataggcatacttttaaattaaacgttatccccacccaagaaacttgatctgccactgctctgtttttgcaaatggtctttctcaccttgtatctctaatgtatattatgttctatcctctgcttaaaatgttgttttttaaaaatagattcaaatcggttcgagatggcccaaaaattggatgttaaacggggaaggggaaataagtgggatgatggatccaaccatgatgaagtagcaaagatatatgtaagaggtggtcacaaaggcatacactatatatattttgattatgtcaagagtgg

SEQ ID NO: 25478 - DNA, 597 bp, Arabidopsis thaliana landsberg
agcccttgagccaatgtataacaaacttgccaagcatttacgaagtattgattctctcgtcataaccaagatggatggaacaaccaatgaacatcccaaggcaaaggtaataaacttatcaaatatacatctctagacatcgataacttctacttgaaaaatctcaagagttaattctttacaggctgaggggttccctaccattctcttcttccctgcgggcaacaagacttcagatccggtaagttctgcttcttcttgctgaaatggttttttctttgtagatttctataaaaccgaaaaatttgtcttcttttgttgtgtgtggagcagattactgtagatacagaccgcactgtggttgcattttacaagttcttaaggaaacacgcaacgatcccattcaaactggagaaacctgcatcaaccgaatcacctaaaactgcagagtccacaccaaaagtagaaactaccgagaccaaagaatcacccgatagcacgacaaagagtagccaaagtgactcgaaggacgaattgtgatcagaaaagggtataatatatattacatgtctccttaaagtgtatatgtatgatcag

SEQ ID NO: 25479 - DNA, 820 bp, Arabidopsis thaliana landsberg
catatatactccattttttcttcgtaaatttcatgcatccgggaaaatttcgttactgtgtggtcaaacgttatatatttgagatagaaataatttgactacgagttaagatcactcaaattagagatcgaaaatcaacattaaactgctgatagatttgtataggaaaaatcaattagttaaccacaaaattcacatgaacttttctaccaagagatttcggattaatagattgagaaaataagggttaatttggtttataagttgtctatagttggagtgaaaatatagtataaacttgtgtgtgttgatatatgccttggttaaaatgtataggtaacatctccatatgggaaggaactgtacaagatagcaaacgtgacacacggtcaggctgcgtttacaacgagcgagagtggaacattcttagcttgtttagcaatgcatcacgaccagtcacatcactcagtcaatagctctgttatcgtcagtcttgattggaagatgggtatcagagccaaagactgggattctgttgctaaaaaagaaaagatcgaggcaaggccttcatttccaattctaatatatgattataataatctaaaaaaacacatgtaattgaatatatggttccagggtgtggagcttgagattcgaagatctacagaatacgcatgtgctattagggccaacatactctatttgagaatcaggttatgaataactttcatatcaatcttacgtatatatggggaatacacacacaaggatttaattaagattctcttataaaaaaaaggtgcaggggagcatatatgag

SEQ ID NO: 25480 - DNA, 1666 bp, Arabidopsis thaliana landsberg
tttttttttgctcatgtatagatccaagatttaaatttagcgggactcataagcacatttaatctctacgaatgttgtagaaaatgaaacgggaccatcactcgcctcgaattttctcccattgggctttattgctctgtaaccattaagatattcggttctgcatattttttccacgatatagattttaataattctcaaaatcttgatgaatgagatggagtgaataaaaacttgagtctagtaaattgagcaacattacaaatttaggatcacgaaagatccttgtattagaatctcgagacgagaataaggaaacgtgtcatagttagcagcttaaccgacgtatcttccgcatcaaaccaagttcccaaacaaatatgttcacattttcattacaattaaaacccttttaacaaaaaaacaagtttttgattgttattcaaaactatgtgtcaaatctaaatcttaaatcattttttccagtcctctagtagacctaagatcaaaacctgaattttatggaaaggcgagtagaagtggagatgatcggcccactccagattttcaaactaatctttcacatctcgaaaccttaaaaatatgataacaaaataaagttggacaaagaaaagaaaaaagtgtttggcatttaataaaacgtctcattcattgcgaagagattagatagtagagaggtcaaattcaatgtcgcagccgacaatagataagaagagataaggtcttcgttatatttttttgtttgttttttaactgtcacgtgaaactgatatccacaaagagcgaatgagagacgtagaagagtcaaagattaaaaacccaacgaactttgactcatcctttgaaggtgttcgttaattatccattttttggtctgactcgtggcatgtggcaactaccgaccttagataagtctggtcctactctcgtattcgatcaccacgtgtcgatcggcttatccgacacctcgagtgggagttgtatgttagtaactagataacggtcataggtacgattatgacattgacatgaaatcatattccaactatcaacgttagtttccttgtttttatcccctgtaattcagtcaattaagccatcgtaccaggtgagtctttgatattgttgttgtctacgaaaaaccattagatgatctctaattgatatttgattcaacctatggtaaaattatcccaaaactcaaatattacttcaattgatatcatcccaaatattacctagagagcaccaagcttttgactcgtcaattttggttattcttaacgataaaaataaccttgtaagccaaaaataaaaagtcaaacggaattgtgagtcttttaataattatgttgcacaatgcacaaaagaaaaaaaactcatactccacatggcatagtgatagcacaataaatgtctaaccttttacaatcaaaaacaaaataatgtataaaaaattcagtgtaaccgtttttcttgtgttgtctaaaaaaatgccatgtttttggtaaatagccaacaaatttgtagtagagtagtaaagttaggtttcatcatccatctcgattaattaaaaagacaggccgatacattttgcttcccctttcctctcccaaatattttcacaattctctccatagcttct

SEQ ID NO: 25481 - DNA, 907 bp, Arabidopsis thaliana landsberg
ataggcaagattgcacatacgtccgtgaactggagttttgcaattgatgcaatccaaaaagtattggttaacgaaatcttataatgaatagaaagtgaggttgggtatgttggtatatcacatatattagtaaatgttgtatatctcgcaccagaatattaatacttcatatctggtattttcgaggaaataattgggctgatttcgtagcccacttaatcagcctttaaatatggaaaccctagcctagaaagtgaacaagaaaaacgtaaagatcaaaatggaagagatcaacggcaccaacagccactacctgccgcagccatcgtcatcccaactgccgccgccaccattgtattatcaatcaatgccgttgccgtcatattcactgtcgctgccgtactcaccgcagatgctgaattattggattgcgcagatgggaaacgcaactgatgttaagcatcatgcgtttccactaaccaggataaagaaaatcatgaagtccaacccggaagtgaacatggtcactgcagaggctccggtccttatatcgaaggcctgtgagatgctcattcttgatctcacaatgcgatcgtggcttcataccgtggagggcggtcgccaaactctcaagagatccgatacgctcacgagatccgatatctccgccgcaacgactcgtagtttcaaatttaccttccttggcgacgttgtcccaagagacccttccgtcgttaccgatgatcccgtgctacatctggacggtgaagtacttcctccgggaacggtgataggatatccggtgtttgattgtaatggtgtgtacgcgtcaccgccacagatgcaggagtggccggcggtgcctggtcacggagaggaggcagctggggaaattggaggaagcagc

SEQ ID NO: 25482 - DNA, 980 bp, Arabidopsis thaliana landsberg
aaacatttgagggatttccctctatatcaagcaaagaaaaaaacttactttctagacgccttttaagttggctaacaaacgcgggagatactgtggacgcaagtacaacagttgctccagatggtatagctgaaatatttgaaagaaaatataggaaagtcagctctaacctccagtgctaaaatctaggatatagagatataccttcaaccgctccaagatgtccatacaagacatcctcagcctgaacctcgtttgttaccataattacaagaacatctacatctgtaggagcagtcacaaattgttaacgtattatttctgggggaaatgactggacttaaggggaaaaggcagatattcatctcagaagagctgagagctacatgacacagctacactgtaatctatctgctttcaaggagtacctttcgtcacttcagctggagaatttgccgccaatcccccggcattctcaaatctgacaagtgttggcttgtatacctgcaattcaaatcaatttcaacattttatttaacaatgttgcatgtttactgcttaagagtgataaaacagcgtttctttttgatgttaagtcacctattagtaaatcctgcatttataataatctgacgagctaatgcgaatacatgagtaaattaacaattatatgaaacacaaagcataccattcaccgagctaacagccaaacgtagggaaatctatgaatgcactacagccaaaagtttagattgaggcaaaccatgtgcctctataaacacagtgttaatttactcatatacatgtatatatactaccgactcatatgaccaattaaaaccaactaacacaatcattctgaacatgtatatcatagactccctataccattcatagtggagatcggagagttaatcaaaggcttacgtcataaccacagacagaaaaattgatttcaacggtgtgctgccattgccaaa

SEQ ID NO: 25483 - DNA, 1300 bp, Arabidopsis thaliana landsberg
gttgtcgttgtcttcgaggttaatgttgttcttcttggagaaatggatcttgttgttgtgcatccaaaccttaagcactcttctcttcactccaatctcttcacaaaacctttgaacaacacaatcttcttgcctttgtattttccacccaactttctcagcaaaactaagcatcttctccttctgttccggcgtgaactttgtcctgaacctcttcttctggttgtatggcaggtttggtagcgatctagatgcggtggttacgccatcttcctccataaagtcctcggactcggagttgttatgcatgtaccggtagttagagactccaatgggcatgatcatttggtgtggcatagctgatctgatcttttggtggttgagcatgagttttcggtgtggagggtgttggtggtaaggggacatggcggtggctgcgagttcgccttccacttcttttctatggaagttcctgtggcaattgcaagctgagcaagtgagagcctcaatggagccatcttcaccacttggcataaactctccacacccatcagtagcattgcctcccatagctgctgcatggttcttgagacactccttgtactttatcataggcttcttgatgatagcgttgtacaccacacatgatgaggatcttgatgatgatgatgatcataattgttgccatgaccattaccatgtataggcattggaggtggttgagtagtattgttgttgttgtgagttggaggagcagaattagcagcatgatgatcatgatgatggatcatgtgaccatgactaccaccaccaccaaatgtagtgtttaatgggatgggcatatcatgatcttcttgacttgcaatttccatcttttttaattgggtcttcttcaaaaaccttttgctttctctttgcaaattgtttcttggtttggggacagaggagagactagctaagaagaaaacaagacaattggaggaaaatattagtaactaataccaaaatgattaaactattaaaggtgaatactttcttgattaaaatcttaagaagtttccacttttttagaaacaactcacggaaagcatttttcaaataattttactaaaagaaacaaccaaaatttacaaaacccaaaattataggacaaaacgaaagaatacaaaaaaatggtaattaaggaaaataaaactcttattgcaagcctgcgcgaacaaaagctgacaaaagcacttcgaaagaagtcttctacttcaattcaagtgggaaatttattatcatgaccagtaaggaaaaa

SEQ ID NO: 25484 - DNA, 1791 bp, Arabidopsis thaliana landsberg
cccattcgatataaattccattcaaagtcaaatgaaattccaaattgaaacgattttttaaaaattggaatatagaccaccgccagattctatacctataaaactctattttaccaagacctacatatacatcatacaaatatacattacttatccgctacgcaagaagaaactgtaacatacggatttaagtaggatgtttaggtcatccaccgggtatctccccaactgtaattagatccaacaaacgctatcttgtcatcattcattgaaaagctaattaagtcattttctcaaaatcatgcataatgacaaaccaaaaaaaaaaaattaccaaagcaactatcaaatggtggtaatctagtgatttcggtctatttaatatcataaatggaattttgaagggatttgactgtactatgacacttttagtttctagaattgttgtgttcttgtactggttaagaggctaattaaaaaaaaaacagaaaagcatagattaacaacccaacacctaacattttaacaaattccaaatccaagtgccaattctccaagttacatttgaaaagatcgaatggaaaaaatgtttatataatgttgcatcccatttgggcttctcttcaaacatctctcaacaacaacaacaaaacaaaacttgcacaatggtgaactttgttgaggtacaaaaaccattgttgtacggtctgatgaaaatggctggcgtcgttccttacactttagagatcgaaccagggacgaagatcaacttttgggtccctaaggaaaccctaaagaagaattccggtaccggaaaaccaacgaaacccgataaacctaaaaagcctgtcgtcttgttaatccatggtttcgctggcgaaggaatcgtgacgtggcagttccaagtcggtgcattatccaagaaatactcggtctacataccagacctcctctttttcggtggatcctacaccgacaactcggatcgatcaccagcgtttcaagcccactgtttagtcaagtctcttcgtatcctcggtatcgaaaagtttactcttgtagggtttagttacggtggcatggttgctttcaagatcgccgaggagtaccctgagatggttcaagccatggtggtttcaggtgattactatattttggatgactcaatattttgcgagtggttaaaacatgctacaatgttttgcgagttttggtgtgtcggttttcctaaaaccatggtcttggaaattactcccataccgcgagttcaagatcacatttaacactcctcttttcgtatatcaataatagtaattacaagataccgtaaattattctaaaagtctattttttttttatatttatacattgtaatttcattattaaaacttacatacaataagaacaattttttctttatcaggttcgatactcgcgatgactgatacgatcagtgagtctaatttgaaccagttagggtttaagtcgtcggcggatcttttgttaccaacttcggttaaagggctcaagactctcttcacccttgctgttcataaacccatgtggttcccgaaacggctcttcaaggatttcattgaggtatatacctactcaaactctgccactggctctctatagtataatttttcttaaaaacatatttagcaactttattaagtatccatatggtcaaatatggacacgaaattgatcccggagctcgataaagagcttgtcataactagattacaaattccagtaataataatttaaaaataaatagtaaatatg

SEQ ID NO: 25485 - DNA, 1282 bp, Arabidopsis thaliana landsberg
aaaattaaccgagtaataataatatttaatttttttctcgaagaaagatatcaggatagaattagtcaaaagcttaaacgacggttaaaaatttggttggtgacatgcaaaatcattgtttgatgctagctagttataattatactataataattcattatcgttgattggctttttgttactttcattctgttcattacacattatccgtttactccgaaaacaaaacaatggtctactttcatacgagatttgatcaaactagtcaaacctttacaaaactgaaaatttggcttgatcttgattcatgcctagctaacagccatgatcttataagaatgatattttatattattagtaataatttagtacaaatgtttaaggaaactaaaatacatataacgaagaaacgcaagtaaatcgactatcagaaatgaaaaagtgggtcaaaaaataataatttgagctttatttgactaaaagacagccaattatctaattgtattatttttgatcaaatgcacgcagaattgtagtagtagtaatgtatttcacactaaaaagggttgttgttgttgcacactagagagattgacatcacgagagtatgagagagggagaaggtatggtgaaaatgtgtctgcaagcaatacagtggggaaataacgccataaatagtccaaattcgaggtttctttcaaatacaactatatccccctttcattgtcaatactatataattaatacggctctttttcaattttactttcacactctaactgttcaagtggtaactagctagtattcatcatgtgaagtcgcccaacaaaatgtataattgctaggcaaaattgataatatatcggtgaaagttcaaattacagatttggctgaattatacaagtcatccaatacaaattacatgttcagtgtgatgatcattacctttttttgtgtctttaagaacaaattcagccactttgtatcttgcaacggcgttgctttgttctttactaacaatcgggttagcgactgatcatacaaaggaagtcaatggagctaacatggttagtaatctactaatcttctaccacttatttgacgtcaaaactaccactatttttttcgataaaatccacttattaatcgaccgcaccaaccacatatcattcaaaagctattctgaattcagaaaactttatagtaattcttcgtgtgggtcgataattaaattcgatgtctaataactacatatgggccaccggtaagtcaaattaaaaga

SEQ ID NO: 25486 - DNA, 1020 bp, Arabidopsis thaliana landsberg
  unsure (1)..(1020): unsure at all n locations
gttatccactctcgagaagcttggtgatgttgtaagtacaccaaagatttgtcgaaggttggcttttgttttttggaaaaccgcataaattaacttgattcatctttcaactcaagtatagtgactccctttttattgggtatatcaacatcttattatcggcaaaatgtttatcgaccactattcatacatcatataaatatagcgagaaaaaaacaacataatgtactcaagcacaagactcccacgagcagaagttcttttcaagaaggttgatggagtgatttggaatgcttgttgtgtgaaacaccttcaccctcgacacatgattatcctttctttgtggatcggacctcactatcacggcaatgtatgttactttattgctcnnnnnnnnnnnnnnnnnnnnnnnnnnnnnnnnntaggcattcatatatttcctttcatgtctaaaattaaatcagaaatcatgcaacaagaaaatgttttctatacagttcgctctttgatatcttgccaagtattgcttgcatatttttatatatataacaaaacggtaaaattaaacaattttcgatataatatacattttggaatatataaatttaaccagtaaaaccaacgtttcttataaaataaaataccatttaaaccccattgaaactgtaaaagctatttgtaatattattttttgaaggtatcttgtttctctctctttgttttttattggcatcatgtacagtgtattttgcttctctttcgaaaaaaaccccccataaattacaacaaaaatacattataagtaattaaattggtatctaatttagtggtttctatttaatattgttaatcggatttatatgctttcattaacaaaaaaaaaatagaaacaaatactatatgttttgacagctacatgaatacatgatcatgtcttgtcaacgaccaatgaagatatgagatattgtgaaggcaagcacgatctggtcgacaccttatcaataaatgtcaaaatgacat

SEQ ID NO: 25487 - DNA, 1076 bp, Arabidopsis thaliana landsberg
gccgacatacacatgtccagtatctttggtttattacagtttctgtctgaggttcaattctgataagaaaggccggcctaagacaaattcgacacaagccttaatacagtatttcataaaccaataatatcactgagatacctacaagtttttgaattaaacctacaagttacttaattaaacttaaaacaatcaataatcttctacgaaactctttcgatttagcaaagaaaatcctgattttgaagtttatatattgttatcaaactcatatatgaccaaaagaaaggaatgccaacgtgtagaacttttgttttttgggtaatgaaacaacatgaacaactaactcagtgatattacacaattggtatcagaaattgtaagaattaagttaaacaagtacctaggcaatgtaagcttctgacaaaaatataaggcattattcaagtggccttcaaatttgttcaccgacaacctttccttttcaatttgttgtttcaagactaaataatgcaaacgtttttttttccttcgaaaaactagtatttattaatattttcgttagtgggttttgaaatatatatgtcaaaccagttatatgataataaaaagacaaaatccaaattttaaatatgtcggaaacatagatgtaagttggacggttaatcacaacaaacatctaacccacaatatatatcgatgctaacaagaagaactcatttgcaacattgatgccgagatgaagctcttgatcagagccagcgtggatccaacctcaaacctaaatttacactaaaacatagcctctaacaattttgtaatgtccagatcgcttatacctacgaacacccacatatttttttttaagtatataggcttcattcctttctaaaggtcggttcgttacgtttaggaaggttgaagacttgtttaccgatctaacaaatcaccggtcgtagcgaaccgaccgtcggataggagaggactcacggaccgaaagagaacgtaaataatcactagtatgaatggtcgaggtgttacaagttactccagaaaatttgaatttgagacttttg

SEQ ID NO: 25488 - DNA, 1099 bp, Arabidopsis thaliana landsberg
aacacatatatagccataactttatattagtattgtctttgtatgactattaaaactcgatgttatagtggtaagtattaaaatgtatataataaaagaaaaaaccaaaacatatataattatctttcatctaaatagtaaccaaatatataaatatatagtataatgttttgtaagtttttaaattcctattattttgcacgataagactcaattatttaagaagagaatatactactaacgtaaaatctataatggcccaacaaaattaaatattctaaaaagtcacatttattgttgaccttcacaaaaaaaaaaaaaactctcaattttctgtttcttataacaacataacaaacaaaaaaaggcccaaagagtattttccttcgaattcgccgacgactaatcacgagatggcgccgccggtgacggagcggtggtgcttagctttgattcttctctttctctccttgttcgtccaatcttcaacggcaatttactgcggtgctgaagattgttatgctcttctcgggtttgttcatcagcttccgatcttcattttcaaattcagattttgatttcgttctcttaatcgttttgcattatcgatttcagagtcgctcaagatgcgaacgcatcggatatcaagagatcttattataagctctctcttcaacagtaaggatgattctggatttgtttagacattgttcagatttgattttgattagtgttttgctaatctttgtttctcaattttgatgattcgatttagtcatccagataagaatccggatcctgaatcgaggaaactgtttgttaaaatcgccactgcttatgaggtacttcaatatttttatgattctgaaactttggaatctggcttagtcaatcccattatatatctctgcgtataatttcttaggtatgatccagttttagcgaatcgagaatcattacattgggagatagatttgatagtgtatgttttttttgttatagctgaaaataattgaacatgaaagtttctcaaaaggattcgtcttgttgcagattttgaaagataatactactcgggcacaatatgattatgcaattg

SEQ ID NO: 25489 - DNA, 825 bp, Arabidopsis thaliana landsberg
tcaagctggggagattagcttcacttactgcggccatgggggtttctcttcgtcacatgtctccttcctctatctgggtttcgcgtcgtcctcgtgtttattctacaattctttcgtttcttgtccctcgccgtcgaatcctttgcaccaggttcacagcttttctcatcttatctgttcccttttctcatttttgttcatcgagaattagatttactcattcattagtcaattgctctgttttgtaaagttggttgatagttttatatagtgatgatgattcacgttttgaggttgttgaacaagcaggttaaaaatgtgtgtttgctcaattgctctgtttcgtaagtttgttgttagttatatagtgatgattcgcgttttaagtttgttgaagaagcaggttaaaaatgtgttttgctgcaatttggtttcagtttctcacttagtctaaattgttcctgtgttaaagttatttaggagtctgcttttgattaagcagaagaatgtattttagttgaggtttggttattattctgagtttgaaggtgtttttctttgtgttgatatcattttttggtggttatgatttgcaggaaagtagcaatcataaagggaaatgcgggatattcgactgctactgattgtggtggttctcatgcgtttcatcattcaggtcatcaaaggtcatcctctgttgagtttagtggagagtggaaacttaatttgggatctaagacggcgagaatggtttcgccaactgtgaaacaagcttgagctgtaagtgcttggagggaggaagtcaattataagttagaggaagaa

SEQ ID NO: 25490 - DNA, 1090 bp, Arabidopsis thaliana landsberg
tgtgagcaaaatgttatatataatattaatgatgaaaatagctttgttataatattggttgaggcttcggccaacatccgtctcttaggattctcctattttgtttttgtctcaccttgtgttatgtgaaatatctcatggaaagaatcacctacaacaatagatctcaacattagctaaatttgaatacctattgttaatatatttagtctatcatgcaccattccctaacttggcaatattttgatgcgcttcttgcgttttagataactaatacgctatatgaatcttggccaaatagcataaaccccaacgtataaaagaaatcatggcattggctaaaatatctgaataaaactatataaatcgatgtaaattttatcacatacagtttttcgattaaataatttgttttgatatggatgtaaagtgagaacatcaagaaaagcagaagaaagtcaatcttcgatatacatgtcaaacataatttgagacgttacgaaagaagaagaaatagtaccaattgtcagtcgacgtagctttttcattgtttgtcatggcactaatccgagcgttttcttggtagtttctccaaaagacaaacttttaacaatcatacatcataccaattagacaattattattttgttggtaattaatcagcaaaattgtaatgttgttagttatcacaattcagcttttacccattacaaattttcttcaactcataagtttcgttcgtgtatttaatgatttaaaccaaaataaattttcactttaagtttataatgaagccatgggtttccgtctcttaatatatacttctagagatgcatttcggaaagtataaattaagtctattttttatcatcaatatgttaaattgaactataatttcccaatcaatgatttaagtttcaccatatatactccagaacatttaatttatttaatttaaaagggtaaaaagacaaaaatagaaacaaattaaaagaagaatctaactgcatgcgaacgagacaatacccacgcctctctcgactttctcaatcgtatcattacaaataattacattaactttagttctgat

SEQ ID NO: 25491 - DNA, 783 bp, Arabidopsis thaliana landsberg
taaccttcacttggattaggttttgatttcgtttatacgacaatccccgtgactgaaaaagttaccaactttgatagatatcgttaccagattctactcatagttttgttattgtaatgcaagaagttgagttcttgtttacattaactttaataattcactgagagtgactttttgttctcctctgatccgtggaggattctctatatgtgttttgttttttgggggggttttctcctgtttttagggactctattgattcatgcatatatgatgttattctctgtttatgagtttatgcaaataatctaagcaaggtatgataacatatttaatctttttgtttgagcttataattgtgcttagaaatcttaaaataatgcttaagctgatgtgaacttgaggcctagcctctgaccacaaatcctagcctacttcgttgaccatacctttgtcttggcttaatattctaaatttctcttccaaatcctgtctcccaatgcattggttggtccaaaacaagatcatcatttcatagatcttgtaatctttctggtctgtaatttgcactaggatggtaaccttgtaccctatgtaacatgtcttgttagtataaattttgggtcatgttgtgttgatgactctttagcgcatttcttattgacaaaaggtatggaattctctagagacgctggaatgatgatggagaataagcggaatgtctgctctctcggagaaagcagtatcaaacgccacaagtctgatctctctgtcagttccaag

SEQ ID NO: 25492 - DNA, 2513 bp, Arabidopsis thaliana landsberg
  unsure (1)..(2513): unsure at all n locations
gagtataaagataggcatggttctttttgtcatgtgaggaatgagagctactagccatattagcctttcccttctccttgttgagatttgaggtcctttggcttgttaagttcttggttccattttggaaaccaagtccagccttaatagaggggtgtctacctatggtgtaggcatccctggtaaattttaatttttcatgttcactcttgcaaattttaagttgagcactaagattagcaatatcattattcaacttaagaatggtagaagcatgttcattgcaagcatcaatatcaaaatctttacacctattgcaaataacaacatgctccatggttgaactagcaacatttactttttctaacttagcatttaaatcaacatttaaattcttaagattagaaatagaatcattgcaagtagatagctcagaagacaatagttcattttttcttagtttctagagcaagagatttttgaactttaataaatttatcatgctcctcatataaaagatcctcttgtttttctagtaatctattcttgtcattcaaagcatcaatcaactcattaatcttattaattttagatctatcnnnnnnnnnnnnnnnnnnnnnnnnnnntatctcatcatcatcactagactcatcctcacttgaagaagcataagttctagtatcatgagtgcttactttcttctcccttgccatgaggcaagtgtgacgctcgttggggaagagggatgacttgttgaaggcggtggcggcgagtccttcattgtcggagtcggaggaggagcaatccgaatcccactcctttctgatatgtgcctcgcccttggccttcttgtaatgcttcttcttcacccttttgttccccttttcctggtcactttcattattgggacagttagcaatgaaatgaccaatcttaccacatttgaagcacgagcgcttctcctttgtcttggtcttgcttggctgtcccttgcgacctttaagtgccgtcttgaagcgcttaatgatgagggccatctcctcattatttagcccggccgcctcaatttgcgccaccttgctcggtagcgcctccttgctcctcgttgccttgagagcaatgggttgaggctcatgaataggaccgttcaacgcgtcgtccacgtatctcgcctccttgatcatcattcgcccgcttacaaacttcccaaggacttcttcgggtgacatcttggtgtacctgggattttcacgaatattgttcaccagatgtggatcaaggacagtaaaggaccttcgcattaggcggacgacgtcatggtccgttcatcgcgtgcttccgtagctccttattttgttgatgagggtcttgagccggttgtatgtttgggttggctcctcaccccttatcatcgcgaatcttccaagctcgccctccaccaactccatcttggtgagtaaggtgacgtcgttcccctcatgagagatcttgagggtgcccagatctgcttggcattgtccaagccgctcaccttatggtactcgtccctgcacaaagaggctaacaacacagtagtagcttgtgcatttttatgaatctgttcattaataaatataggactatctgagctatcaaagtgcattccactctctacaatctcccatatactaggatggagagagacaagtgactacgcattttgtgactccaaaatccgtagtcctctccatcaaaatgagatggtttaccaagtggaatagataataaatgagcatttgcactttgaggaatacgcgaataatcgaaagaaaagttcgagttaaccgtctttcgtttgtcgtagtcgtcgttgtccttgtgggaagaagtggactcatcactgtcgtcgtagtagacgatctccttaatgcaccttgtcttcttcttcttcccatctttttgtctatggcctgagcccgagtcggtaggctggtcatcctttggttcgttgacgaaaggttccttctctttatcgttgatcacgatactcttccccttaggatccatctcttcgggcggttagtccctttgtgaagagaacggctctgataccaattgagagcacctagagggggggtgaataggtgatcctgtaaaacttgaaacttagtgccacaaaaacttgattaggagttagcacaataaggccaagtggctagagaggagtcttagcaaaaacacaataaccacacagagatcaacacagagatggcacagtggtttatcccgtggttcggccaagtccaatacttgcctactccacgttgtggcatcccaacggacgagggttgcaatcaacccctctcaagcggtccaatgacccacttgaataccacggtgttttgctttgctttactatatcccgcttgcgaggaatctccacaacttggagcctctcgcccttacaaagatgttcacaaagaatcacggaagtaaggttgggatccccaacgcacacaagacacaaaatcaaa

SEQ ID NO: 25493 - DNA, 1093 bp, Arabidopsis thaliana landsberg
caggaatctcgctaatttggtataacatataatccctcatttaaatgaaatcctttggggtcacaactagctaaagcagttggtgaagtacaggttttcaatttccaaacatgagcattcggaaatatgtggctttctaactaaatgcggtaaactttgcatacatggaagttccaagaaattaatcactcaactctgttttcatagagtcagattcttaaatactagcaaagtcggttttcgaattgcaaaatcaggatcctttataaaacacaagtcccaaaattcatcggaggttgattgatcacatagctagattgcagtaacttagacaaaaaaaaagaagaagttctaatgcagcttgaacaatccaatgagaccagagatcctacataacaggagtagctttattttgagaatgcatgtagtcaaccacaaccacatccaatgatcctctgtggttggattacttatgaaatttaactaagagatgtacaacactgaacaagtgaagtcagtgactctatttattcggaaacttcttgttacatctcaagttttgagcagcttgagagaagtagaatttcgaatagcttcaacctattagagttccctgcagataagttataactacaacaacatatactgtatttaacgatgcaatatcctttgtgttctacgggtacaacactagcacgaaccattttccgaaatttggatgacaataacaaaaccatataagccgagaatgaaatcaacttgagttccacaaaatcaagtgggtaacataatgtaatcagttgtcgaattggcaaatatgtagctcaagagttcaaagtatattccaagaacaacaacagtgtcaagaaaccgattgctcccaaaattttccatcgactcattctcattttcctgaaacgcaaatcagtaaaagatcaaaagatgaaccatgaaatctaaaccacttacacgatcgaggtatttcaccatatttgctggttgaggaggctacaagaaaatagagaatatgattaaatcactatatcaaaaggagcttagctttattcgatattttcacgtaccgagtgagctt

SEQ ID NO: 25494 - DNA, 1203 bp, Arabidopsis thaliana landsberg
tactactgcgatcagaaattttaatgtcttttttacatagtgaatgagaatacaagaacatggtgcttgttttgttttttttctcctaccaaaacaacaaacaatctagtatatataaatgtcactaacttgagcctaataaataaagggacaatttatatggttcgaccaaacactcgaagttttttgaaaacaattttggtcaatttctacattcgttttttttttttgcattacgttcaatcatttttaaatggcttagcgaatcaagatgcttgcatttcgcattaggcaataaaataccaaataaagtgctcttatctccacttcctatggaatcggccttttgaactattcaatggtttgttttgaatactaattgctttgtaaaaatagaatatcaccacttctcattattgccacatgtttctgatttcagttttctatttaaagacctagaaacatatatacaacattagatactaagttatcagaaaatgaagaacatttcattgatgttcatcgccttggttgtactcttgacgtcactccccactccaacgctctcttattgcaaagagtcacttcatttatgcatgcaacatttgaagttgaacgatagacccacgtggttgaaatgttgtgatagactaataataccaggaccatgtatgtgtaagtatattaaagatcctgtacaatggaaagaagcttatcgtcttatggcttcttgtggaaagactgttcctctaaatcaaagtctcaagtcctatttcaagtgtggctaaaaatagtcaaccaacgaaagcaataagcggtcgtcaagccgaaccgtaccggagatacttaataagattagttaatcaagtctttccttgtcttttttttaatcgtataagttgttgctcgaattggccttcattatatttatgaaccatctctcccacattccacgttttttttgctttttggaattactatttcactctttcaaattcgatactttgtacttgcttttatttaaagaaataaaaaagtagtctacttctatttaaagaaacaaaaaagttgtctaaactagagaaaacggcatgtacccgttaattatgcatacatccttggcccttgggactattcttgtgatttcacttcataattaactgtcacacaaacatggccaagatggtttcaataagggaaaag

SEQ ID NO: 25495 - DNA, 533 bp, Arabidopsis thaliana landsberg
acacgattttacagcattttaagaagaagaaacaacttcaaagaagaaggaatcataatcgtgatactaaaggtgggtgagctccaaatcatcttaggaaccttttttttttgtgtgtgtgggtaatttcaagaaagacgacaataaaacataaaaagaaccattgcttttagatgtgtaagcactgtgactttttttttagcagcaagcaaatccatctttgtgtctgtcaagagtccacagctggagcttgcatgcagcagagccattttttctgaaaccaaagataaaaccccatttagtgtgacaatggatcaaggagataaagatgaagaagaggaaacttacaggctgaggtttactaggatctcctcctccagatttaacatgaccctcactggatttaccgggtgatcccggtttgccaccggtctttttctcatccctagctttgttgaatatcactgtaaaaccttctgctgatgctggatcattcacatcccattcaccaaatttggcaagggaggacctct

SEQ ID NO: 25496 - DNA, 787 bp, Arabidopsis thaliana landsberg
gatcagaccccatctaccagttacacccaatctctttgtcgaagattgataatgggaatccacaggatcagtttcattattaactgctgtctcatttggctgcctaatactacatcctggttctgggtcactttgatactgtacgtccatgttcatgtcaaaagcctctttcactataagtaccatccacatcttcattcaaaggtgaactctgaaaagtagcagcattttgccgctcctcattttcatcaagaacattatgtgacacagtatcgtttgagtagttcctaaagaaagccatctcgtctcatgaaatcagcaattaaagtaagcgctctccttgcagtcgacaacagccacaattcttctaacgtctcagtagaactaagaaaaagaagaagacgaatgagttaataacctgcatcaaaatgatactaaaaaaattcgataaaaaccacacttcacacttagttattgattaacaggaaaataagagaagcaaagcattgtttcaactgaaaattaagattattccagaattccaggagcacgtaacatgaattgatttctcctctccatcaatgccacaacaaagcagatctaacggatgctactctgctcttcaattgagcaaacaacaagacgaggataaaagtctaagcaatcaacaaactcaattcagtggaacgcaacgaataaacgaattgaaagcagatccacacgaaatcgaatcctaaagcactctaaatagagaaatttcccagagaaggagcacaaaggagttata

SEQ ID NO: 25497 - DNA, 920 bp, Arabidopsis thaliana landsberg
agccaaatgcacacatgaacccaactctcttctgctgcctctgtaacttaccttttacggaagcctgaattggttttagtacaaatattgtcaggatccagataaattgctgcaagagaaaacaataaaacctggagatcatgtgggaatgttgatacttgtccaagttatttataatccaagaacttaccttaaattgtttcttgttcacattgttccagcatgcaagttttcactatcttgatgtctccagattcttcgtattccgttccgttccgttggaagtatctaccaagatttgaacaccacagtctaaaatttcccagtatttaccagtgatcttgaactcaaattcaagctctctgaaattcacatccacagccgtatcaggtaagtttagagagatggaagatccaaagaaatacatagtagtgtacgtagcagaaacataagttcttgatcacctcgtcgtatcacatttttaggaacagggtaaaacaagaacaataataagacttttgttttagggaattgagattgtctctttacatagataccacaagcaaataatggagagttggttctacatgatataggttgaccgattctctccttgttacaactgaagcaaattgcagagtaaattaaaagattaacatacatataacataaatcactcattgcacatactttctttttggtggtttgatcaggtagtttcatgttcttggacgtggttcttcaactctatcaatttctttacttgttcaccaagggaatgattcatcgactccgtggacgaattcaccttttcttttatacttggttcataaacactagcagctattgctgctgctcttgctatttggtgcctccttatatagctcatcgtattttacagcatcttctgtttacattcc

SEQ ID NO: 25498 - DNA, 2874 bp, Arabidopsis thaliana landsberg
  unsure (1)..(2874): unsure at all n locations
attactgctcctgaattctgaatttctgatgatgatgatgattccttcgtgtgatcgtgtgttttaaatctgatactactagtttgggtaaacagacgacggatcaacgaagcggcgcgtgtgaatctcacgcgatagtgtttttttaattgtttgttttgtatctctgacgtggtttttgactttttgctattcggcggaccaacaattaaataaggatgatacaaatctttttttggttctgtttgggtttctgaaggtcaatgtttatcatcgattagtggtaattttaaactttatgtaatgattagaacaaataaagtcaaaaggctttttattcaaaaggaaaataattaacaaacatgaaagcttgcaacaacaattcaatgaaaaaagaacgtccaaacaacaaaagagtttcaaagcattaataagaatccgagatagcttgagagaaacgtaaacaagtttttagatcaacttgagacaagcctttctcgctttcttagcaatcttagctctttgcatctccatatgtaactctatctgcatcttctccatctctctttgagcttccaacattgcagctaactccgatgccgctgagccccttcctcctttattcccaccactctttgtgtttcccttgcacttcgcctcctctttttggctcttcttcttctgcttcttcttcctctaccgcgcaagaatgtaaatgcgtgccataatcacattccttgcaataatacgaccagagattatctggaacagtctcttggcaaacatcacagttaaagatcaaaccgttctggtaaggagaacggtagagcaatgtgagtggatgtgcgtgtccttcacgctccacggactcaggcatggacacacatccaacatgaacatcgtactggcagatagagcagttgtaagtgaatccggatccatactcaccgcacgcatcacacgtataagttgactcgtacggtggggaatacagcagtgtcaaagggtgatccgggtgagctttgtgacgagtctcacgtggaagctcaaaacatgacttgtgcaagaagtaatcgcattctgactttgtgcatttgaaagcttgtccggttagctcgagctcgcatccagagcaaacgacctcatcttcgtctcgagctttaaagacacgcagcggatggttgtgactcgcgtgcctcacggatgggcgattaacaggttttcttgaagccattgtgtataggattggttgtttcagtgtaagaaacgtttagaaaatatatatagcaaaatatgtggatgatttgtcatttccattttccgctaaacaattctcagtttggttttgattattcaccaagttgtagtttattatatggaagacggttgacattagagttgcataatcttggacacgtacgaaacaatcaccagagataagattaaaaaatctccaattttggtgattgttaggaaataccgaaatagtgacaaaactagaattcatcaataattgagcttcccatatataattcaagtgggtacgtaacgacttgatcaaagaatataaccattgactttcgaagtcgtcgactgaaaatgtagatctccaccgtcaacattcacacggtagaataaatgactaccacaaaacaaagtctgccaacaaagtaataatccaagccattaatttatattcatatataccaaattacaaatagaacttgcaaaatctctctaataaaccagtaatttgtgcagcaaaaacaaaaacaacacaatgggaaggccaaaaccggaggactcaactcgacatttcagtcatcctcatattttgttccacttatctgtcaatcctgaagaccaatctttttcatctttttgttgcgtggtttgcaagctaaaactcctaaatcttccttcatactcatgcaaaccttgcaaattctacatccacagaaaatgttccgagttacctcaaaaagtcagacaccctttcgacaaaaaccatctcctctctctaatctcttctcccaaataccaagaagggcgattccgctgcgacgcttgcgggaaagacggtgatggattcgcttaccactgtggagattgcggcatcgatcttcacacggtttgtgccaacatgcggagagtgtagtggatttgatgctcatttgtaatgtgctagaagaaaattagctacttcaacaaatttggtccatcatgttgaaaaccggaaccggaagcaaccacagtttgttggtacgacgccgtttgttaacgttccggttattaataatccgtatcctttggtgttgccgacgattacgagtcctatgactagaccgatgattaataatcttgtaaccaataggccacaaggcccacaacccacaagatccaagccaagtctctcagcttcatggattgctaggaccaggcagtggcggaccggttgatggatccgtcggttttcttcggtcttatacgtcggttttcacatcagcgttttttgttttcatcattcattttcgtactnnnnnnnnnnnnnnnnnntgccatacgataatactaaacaagtgacttttattaatttgatcgtcatagggttaaaaacaaattaacgatactactaaattaccgactttattaatgtaattcgtcaaaggtgtaaaccaaataaatgatacttctgaactagtgataaactgataatatagggatttgattgtttttatgaattcgagtgtgtttgcgtttaatagtcaagatatgttaactaattttgtttaatttaaataaatatataatggttggtcaagtatgccaacaaaaatatatattttcttacaacataaatcaaacaatttaact

SEQ ID NO: 25499 - DNA, 1055 bp, Arabidopsis thaliana landsberg
ttatcttatacaatataaattaattaaaacattatcttcttcatcaagccactcccattatactatctccattactcgacatcgcctcgaaccccgaggaggcacgtgagccacgtgccttctgttcattggacgatgacgatgtcgacgaagacggcctctgcaaattcagcgacagcggaaacatctccgttgtcgctggagtttttttcttgttaagattcaaatcagccatcttccgcgacggtggaatcggaataggaatcggaactggacggattagctccaatggagtctgtaactgattctcttcttttgatgatcctataaactgttgacatatcgaaccttatgtgttagtataatcttacagattcttgattttaattatagattttaaagaatgaaacgttaccgaatcgggagtgatatcgaagaggcttgatctacgacgacgacgattctgattagtccgccggagaaaatatttctgagcatgactcgctacctgagtaggtgttcgagttttaacaaagtttctagagattcctctccaatcaccttttccaactttatgcaatccagtaagaaacaatctatgttcttcctctgtccatggagttcataaattccaaatttgcaagagagtttcaaaaacaagaaacataaacagagatgagatttgggaaagagagaagaaaggttattttattaacctcgtttgcgttcacggtttctaccggaggcgtgaccgacgtcgtctgaagcgtaaccaccgtcatcggttgggttgggatcaggagtttgatcgaattgagagagattgttcatactaacactttttctaaaacaagatgatgaagcttccgtgacgcggacgccaaaaagcatgatggctttctccccgccgcctttgtcgttgttgtcaccggtggtagttatgtccgtcggacatgtgcgagagttgtggccgttgtttccacactgtgagcaactacgtgacatcttcttcccgagccagagaaagagagagagagagagagagaatttggaat

SEQ ID NO: 25500 - DNA, 918 bp, Arabidopsis thaliana landsberg
gttttaataatactactttaaaagatatataactcaaataaattaaaaaaaaaatctttcaaatagttatttaattgttataaaatctatacattataatattctaaatcggtcccaccatctaatccaattcggtaaaattaaacattatttttttaataatatttttattaaaatatttataattcaaatcaaataaaagttttaatttgaaatagttatttaattttatagatttcaaatattctatatattataaacgtttttcgttaaatattctaaacatttgataaactttaaataactataatatttatctttaataaagtataatattaataaagtcctaagatttttccattttaaaattaattagaattgatggagatatattagataaggaaatgctaataatcagaaatattaattaattgataataattaatgccaatggcattccttataaatatgttccaacttgaggatttatttcacaaaatggctaaaaatgtataagtcgaatttgtgttttagagtttagatgtgtttcatcaggcagcactacgtcgtatgtctctgcagtaaacgacgtcgtatttgtcttaatagagcagatagacggagcattagcatcttgataaatcatgataacctgtttagcgttatgagtcatatggtaagtcgtcgcagactttgtcatttacttggatgatcaacgaggacttgacgatttaccagtaatctgtgatgtccgagaaaaatcggctcaagttcgtcagttgggattctttcgacattgaccccgtaagatatggtccaacgtatgattgatattgtgacattagacggatcgtgcagaagtatttgagatgggtatcggcattcggcgaataactgtccagatgagcttgatccaga

SEQ ID NO: 25501 - DNA, 3480 bp, Arabidopsis thaliana landsberg
  unsure (1)..(3480): unsure at all n locations
tcgcgtcttgtgatcttcgtcgacggctgttatataacggttcgtatcgtcttccggtggtttactgagttgtgttttgcggggagagaggagtgctataatctgctgcttcgcgtccatagaaaagcccaatagtcagccaatccctacacctctttttgttcttcttacttttcttcattaactgccttaattaaagcgtgtgtattaatgtctttaatgacaagaagcaagatgaaagatttctcttaattacaaaattacgaagaaacatgttttatgagagtctttttccttaaatacgcataagatcaaggtgagatttcccattgagtttttgagtaaagaaggcatcaaagtactcttgtgtgctcatacttttgaacaaacattgcttctgcctatctacaaggcttttcgcaggacgaatgattgtctcctttccgggactatgaaacatcgcaaccgataacctctctttctctgaattcaccaccgctctatgctcgatgcttcgatatctcccgtttgttatgatctttacaatagcaaacaaaacactcacatcagaagaatgcagtagcaaaaacttcttcatagaaatgggaagaggtttctagtaatctctcttacctctaagatttcgccaacattaacaactaaagcatctcgaagaggttttacgacaacccacttgccgtctttcttgatctgaagtccttccacttgattcacctgtaagagtattgtgagacctgcagcgtctgaatgttgagtcaaacccataacttgatctggctgtggacatggcgggtagtaattaatcttgatagattgccaaacatcatcaaacaaatcttccatttcttcgtgtttgatctcaagaacactcgccattttcgcaaacagaatcttagctatgctcttcacttcagaggagtaagtctctaaagtttctctgaaaacaaaaacggatttttcagtttacagttgttagagactaattcgtaatcacacaactacaacaagactcgtacctgaaaggaggaggtaatttggagaacaagtgagatttacgtgatcgaattggttcagtggtgaggataaacatgtctccccaatcgagtttctgattctccgagacaatgttcacttgtccaaatccttcaaattcaccacttctctgccacaacttctgcttctctttcatagggagattgaaaaaatcttgaacttctgtctctagtttttccaagaaagacgagtctattccatggtttaccaactgtaaccagcaagagagcattttcaaaaacagaagtcacgttttacgagaaacacaaagattcaaggtgtgtaaagagactaacttgaaaaaatccccaatcttggcaagcgaaatccagcttcttgagctcggaatccatggcggaaacagaacacaaccgtgtcatgtcgatgactggaatctcagaactaagactagaatcatttaagatctcagttttttcttgatcaagccgaacatacctcggaggaatagttgtgaagttcttctctttcactatctctagaacagaaggtactatgagagaactccactgtttttctccttccgcctccattggacttgtagcaccagaacaaaagtacaaatctcgtaagctttgatccacccaacaaccaattttccggaagaaaaaaacgaacaaaaattgaaattgaaatcagagagaaaggtgaaagaaaatcgatttggagaagacgacttaaaacgtcttttatcctctgcgaccaagactagctgttcctaattgaaaaccccaaaactaccctccacaaatgttagaaattacatattagccttttcaacctcatcacttgattcacgatgaacaaaatatgattttcatgtttcgaattcacaaaattctttgaagaataacaagagaaatctcagacatagaaaaaaaaaaaaaatcttccaaagctttacaagacataacccgttttggttcatttgttcaacaaacttaactaaatggtcctgaaagatgttgaaattgagtaacacagtgaggacttcatgaactttcctttgctttcttttcagtcttcaagctgtttgggggcactgcgtctccaaattccagccaagacgctaccgaggattgagtgacagacgctagaaacagcgcacggtactgcagtgagtggatttccaaaatgctgtgtcgcaagaacaactccaagcaccgagttcttcaccaatacaaaatgaaaagaaaaaaagcctcagttgacattgagttttcaatagctctggttaccgtttcatttaagatactgtttagttacctgcatgccaacttcgatagagatagttctcgatgatgccacatcaattcgnagtattcttgaaaacagatacccaaagagaaatccagagatgtgaagaaggcatgaagccaagactacttgtttcccagacatgagtattgcagatgcgttctgaccgatagcatacccacacaggattgcaactgttccaaccgcaattggaggcatcacaggagagacgaatttcaccagctttttaaagtattggttaagaaatgcaccagccaacactgggagaagaaccacctgtgaccacacacaaacaggagccaagaagggtaaagtcaatgaacaaaaactcgctcgttctaccgaataagaaacagactgaaccaaccaaacctgtagtgttgacattagtaatccaagagcatcaactgtgatatactgcttggcaagcttcgccgtaagaagcggtgtcataatctagaaaacggaatggattaaatggggtgtctttatctacaagaagaatagaaaaaccaatgtcataatctagtaacttaccacagctgaaacagtgctagctgctgtcatcaacactgatagcgcaacatttccactgtacaatgaaaaaaaagaaactcagatcatccagttgtattatggaactcaaaagtcgtttctttttgtttggattacaaaccgcgcgatgtatgtgacaatattactagccgtgccttcaaacaacaaacggaaaagcatcagagcaccatacaagtgttaatataatgcaannnnnnnnnnnnnnnnnnnnnnnnnnnnnnnnnnnnnnnnnnnnntatgagaccggctgcgtaatgtggtggcaaatttaagagtttactcacaaaaaatgctgatagtggcatgacctgcaacactattcatcagcaagctatgaacttatccatgctctaatactactctttcaaaactataatttggtaagatcataaaacaggaatcatgagctcaagcattaactctaactactccacatgattatgttaccaaaccaaacaaacctattatcagatcatctataccggttccttcagatctatttttctcgatttcttttttaacttgtgcttattc

SEQ ID NO: 25502 - DNA, 1930 bp, Arabidopsis thaliana landsberg
gatgtactcattttgtcaatctgttgcgaataacgaaagagtaagatgtgttggagagagaagtttttgtactgagcaaaacggtttaaaacagagtaataaaaacagagtaactaactggaagtttctcttaataattcacaatcgtgagggatgaagcttagtagggagtacaggttcagttttatattaaatataaaagctactacttgaaattccattaaagctaattcatatacaaaaatgcaaatcatagttctgaaacaaagctaattatgtgtataataattgttacaccttaaagttgaagtggtagctttgtttaaaatgaagttaatatataaataaagttggcgaaatatgcaaaacaaactaatacataaaatcaagaataaaaatttagattcaaatattttgtctacaattgagaagaacgataagatgaacataaatgaaattggtacttctaaaagtattacttatgaaatgagtgcaatttcctgggacatgtaatagtaaatacatgtgttacaccactgtccctcgtactcattgaggttcttatggtccgcccaacactcaccggaatcttcgaactcccagcattttttgtatgtcccttggcgacgtggaccaacctcgttgatatggaacattagtttatttgcgaataagtcgacttcactaaatttgtagtaccttcggttgtactgaatataaaattcccacggaattgatccatcgcaactgtggagcatgatataaagtagaccagcatgtggaaaaacgtcttttatgacatccaatatagcaattgcttcctggagctcaaacatatgaaatgccagcactaaactctgaagatatagggcgtacgaattttctgcggtgaggcaattggtgtaaaacatgtgataactagacgattcttcagccatatgaataaaaaaaggggacttatctagtcgaacagaagaaagagttttacttgaaaaaacagcggcttttccatctggtccagattgaatccaagcctttaacatatctacaccgtcctcagaaactaagatgactattttagctgctacgtgatcaggcatgtggaaatcagggaacagaggaggctgagagaaaatgagtaccaacgttaacactaaattttggaggctatatacctattcaaaactaaattttgcaatttttggatcaatttcagtctataaaatgagtgtctcaattggattgagaatttttttgagtaaacattacatgtaggttaaaatgaaccaaaggttgacgaagaggctgcacggcaaattgatttcccctaacaggggcaagggcgcttgggggtcgccagtaatgtctagtaggggacattggtcgagggtgggtacattttcctttctcgcagacaatttttggcattttggcttatgaaataggatagtactaaaagtgatcaaataacgatctaagaaatttgaagaaacaccgataattaaagaggagcgaaccaggcagaagggaaacggatttgagatcgtgatgaaatgggaaccctaattctctggatcaatgaagagggtggggtgtggtggagctatgggttactgaatataattagtgggacctacaaatgttctaaaaaattgttcgtgaaaataagtatagtaaataagatatgtccatattatcacgtccaagaatatatatacgcatggtctataaaatattatatagacgtgctacagtgatttgttacagccaatttaaccggaactcatttatggggatttaggttctatttttatttttttttcgtaaatatgagaaaagattaggttttacattcatagaccaaagtcattaaagacaaaaaaatatagttaaaaggataagacttcacttatatagaaatgtagatgga

SEQ ID NO: 25503 - DNA, 699 bp, Arabidopsis thaliana landsberg
  unsure (1)..(699): unsure at all n locations
ttaaaatatatactaaaactaagtccctgcatagcaggggccatcatgctagtatattaatatgccagcaaacatgtaaaccatcatctattcatctacgtttcctctaagaagaaataaattggattcgaacagatttagaactctcaacgtcatcagaaattagtatatcaaagagagtggatttccaacgacatcattattttccaccatataacttaaacctcattaataaggctaattattttatttgccgtttaaaggcataatcatttgccgttttcctctataattctcttaaagttataatttaaaaccccaataaattagtaaatttgacaatgacataaccaaaatcctaattaattataaattttgatcaaaaatctattaaattttcaaattcgaagtctactcacctatttttaatcttactctaataaataaacttatctatctctatatatccatactatgcaatcgttgacttaaaaaggtatatattatacaatcgttgacattaaaaaccatataatatacaatgattgagaaactgcttatccactcaaccaatcaaaacaaagtgtaatcggaacacgtggattttgaaccacaagacttggtttatgcttgtgtcacatttatgatttcaacgaagataatatccacanatctagtaacttctgtatgcgactctac

SEQ ID NO: 25504 - DNA, 1340 bp, Arabidopsis thaliana landsberg
gattcctagattgtcttcttttaactgaaatacagttaccacatcactttatttttttctgtctgactaacaataacaccacctaaacttctattatatttaagaaaatgccatgtggaacaagaatcatgaaattttcttctttacaattaaatttataacaaagatattaaataataataaaataaaataattaaaaatataatagtcatattttttgaaagtaaaaattaaatttatatctcataaagataaatattaactataacaagtcattgaattttagttaaaaaactatataatttttttccatattataaataatctaagagtattaaaatttcagaaaattacttttaaaattgtatccttgacaaatggggactattgtctaactttttctgtaaatggagaactgtattaaagcaaatttcaatatagttaaatctttttttaatatagttaattttgttaagtggtgatttattgcatatgcataagttatgaataatgctaatgattttttaaaaataactacatatctaatagataaatgtaagtctcataggctcatagaccgttagccgtcattcctcaccacattataatattttaaataaataaaaaataaaattattttaggttgacattgtatataagatgaaaaacaacacataattttgtaacataaataaaataaattggaacatatctctctctctatatatatatataagcgtgtaggataattaagtgtccctctcgcaccatttaatttcattgcaccctgacaattctctctgtcattactctctcatctctcttcctccaagatttgcacctacctttcaaaccttttgctcgccaacaaaaccgcgcttcacaaaaccatcagcggttttccgagaaacaaatctcagaccagacaccgctctactcttctctctctctccctctagggtttcgtcgcttcttcctatatcccagtgtatgtctcgaaaacctcatcatttctgctgttttctttattttatccattaattcatgtacacaaatttatttgtttaaagtatcattggatccattacacttcagttttcttagcatctttataaaactctcactttcatgatgttttttttttataatttaatatatcctgtatgttgaattttcagttagtcatctatattttgtcttaaattttgccttctttagcattaattaattgatttcttgcctctaatatctttcattcctctcctaatttgctttctgactttctgatttaatggattcttctttaaaaaatcttatcaatttctgcatagtcagagatg

SEQ ID NO: 25505 - DNA, 1479 bp, Arabidopsis thaliana landsberg
gaaaaaggccgaggcggagcgcctaaaatcacttgagaatcaattctttttactgtccatttaagctatcttttataaacgtgtcttattttctatctcttttgcttaaactaagaaactatagtattttgtctaaaacaaaacatgaaagaacagattacatctcatctttagtctctttctccggtgcagtcagccaccgtcgggtaagtttcatctgtattttattaattaattacaattattagtgttcttattaccgttttggtaaaattagttaattaatgtcggtccaaacattctaaaccaattattctgaaaagggtgaacgccaatcagttatatacaatattcttacattaaagtagaatcggagatgttacatactaaccaaaagttacatatactagtatcattttctttaagatttgtttaggatttactcactttatagtgctcgcggttggggtcagggtaagtggggaacagatatgctctgcatgaaccacgtggaccaacatgcatatacacagttacatttattttttctagtaggttcatttgcaaattttccagtatcttgtatgttatcttcatggtgagttttttggtcgcatattcttggtgattcttcttctacgttttcactttcttcttcagagaccttattaatatgttaattgcatgaatttatgtaacattcaagaaaaagagatcgaatacaagaaaccggaaatttaatttcaactggaattctatgcatgtattggactttgccaatttaaaacgagattattttatggtccggagttctaaccaaatatagttgctctgtatatagaagttatacatctcgcttgtttaaactaaataactatttagtttgtcttggtagtccagtgactttctgcaaacgttgggatttataatatagtcaaaacgttgggatatgtagtattcattttcgttgtaaaaatcattatattttgcaaaggttgcaacgtaaaacgttgtattgaatttaggagaaagtagccatttacaatgaattttagtgacaaactgttgtatacagcctgtgccactaagtatgtctatatctaaatttggaatggatgataaccaggattggtcaataatggataattcggtatttagaattactaatttggtattttagtgacaaacttgtgtatggaatctaggagaacccgttcccaagctatatattatatgtatttcatttctttcatatgttatattatgaattggtataaaaaagaccaatgagcaccggataaggtttaatcattaatcgatccgaccaatcatatacaagttcctaacacattttttaacctactgagctcaaatagtagatggctattacaaaaaggtttttttctttttttcaaaaattaccaagccttaattgcctacctaacaaaaaattgcctaaattttttttttaaaaataaa

SEQ ID NO: 25506 - DNA, 1363 bp, Arabidopsis thaliana landsberg
aacagaaagataaatcctaaaatcactacagaccagatcgaagtcacgttccactaaggtatataaattttgtttaaaccaagcagagaagagcacaagaagcttaatcgaccaagagaagaaatcaagtaagaagaagaagaagaagaaggcgtacgtattcgcagagaagctgaagctcgtcttcggagagatgctgaccatctttaaccttggaaatccattgatccaaatccataactctctctctatatatatatacctctgactggtaaaatcttcaacactttcgttcgatttcaatagcgacttttctgggaaaaaagaggaatcgaatcgaatcgagatagatctaccagagaatcttcgacttcgttagggttacgtaagaggaggagatgaaagagagaatgagaggttcgagtttcacaaaatgacacatacggcaaaaagaaaaaaagatcccagatcgatctctgccgcttccaacgcaaatcaaacttttgcgtttgtcaaaacgcaatcgttgacgaaccagcgtctcataagaaatacgattgtgatccctcatacttctaaaaattatgagaattgccaaaaactttatgattgggttcttaacaaccctctttgaacaaataacaaaagacaaccataagatccaaatctccactacaaaggacaaggacgtcactttcttgaatcttcattctcctaaatgtacaatatccaacaatttacaaaggaataatgaatttgaatctataaaccaatccaaaccaaaaagaatcatcaatcagtaactatttttctctttcttgtataagagttaaaaggaccccaaaaatggttagcaacaacaacacttgtggaagtcgctatgaagaatggtggcagcaagaaaggacaaaagttgtcatgaaatggttgagctcagctgtatacagttctgggttactccggaaatggtctacatgaggtgaagatatgaagttgcaagcacggacctcatgttcctgctttcctctgctctacaatgaatgattcaacttgttccaccggtataactctgtctgcagagctgtaaatgtataactgtggacaacttggttgtgctgttgataatgtgtcaagaacatcggcaagtctcctgttaaaaatatgattgcacgcatttgttagtgtgaaatcataggatatgggtgacaagaatgagtgaagagatatgattgcccgcatttgttagtgtgaaatcataggatttgggtaaaagaatgagtgacgaaacgcggagttttattgtatgttacctgtttactttgggaagatttagaatcaccgcaaagaacttttcaagaaccaa

SEQ ID NO: 25507 - DNA, 1614 bp, Arabidopsis thaliana landsberg
  unsure (1)..(1614): unsure at all n locations
gatgaacgcagaacgatttcagcgtagaaatttattatttaagggcccgtggcattggatgataactcgatttgtatcctattacggggtttcagatgcatacactagattaaggtaatcattgagtgactaagaatggttttagtgtcttaaatttctgtcgcagtaactaaacgatgttttgtgagaacttgcagatatctttcttatgtcatggatgtcgcatcgcctaccaaggactgtcttgatctgatacatgattttctattccctattataatgacaagcaaccacaaggctgtattgagtcatcaagaggtgggttagctttgatcatcaaattgttatattttcagtattcaagtagcttacttcaccttttggtcctttggtcagaatcggttacttggggaaattgacgaacaaattcagcagattctcgcttcagcatttgagaattataaatcacttgatgaactgtctttctccgggatgaaagatgtttttgagtctgctacggggactccagcacctgctatagaatcagctgtcaagctttatggtcttctcaacgatgtattaacccccgaggcacagttgaaactctgcagatactttcaggtattaatcaaacttgtatctgtttcttatccatcttttctgaagttgtatatgtgattcatcacctacggaaaccacttcaggctgcttcaaagaagaggtcaagaagacatttattggacacaaacgatttacttaacaaccgtagtgaaggtgtaccagttgatcccatggtgcttgcagcttcgtatcaaaagatgaagtctctaatcttaagccttaaaaatgaaatatccactgacatagcgattcatgactgcaatgtgctcccaaggtttgtttaagactcaagtaaaaaatatgcagcacatatgttaactatcaaacagctttatcttttatcttttttaatgattttctcgccgtcaactatcaatcagctttatagaccttccaaannnnnnnnnnnnnnnnnnnagtgttgatgtctgcaataggctccgggaatttcttctcgtttggcctcctcctggaccatcacctgcggttgttgatttagttattacaactgctgactttcagagagatctctctagctggcacataaagtaagttcgctggtaattacttttaaacttccgttttttttatacattcctgttaccaataggcacctatatattgtcttgtcatgttgcagtcctattaaaggtggcgttaatgccaaggagcttttctattcatatatcacaacctggattgaagagaaaaggcgagttttatatgaactctgcaagctagagacggtactaatcctgcaactgacttcttccaagtttagttatatactgcagaacgtagaacaatttaaatcccttcttccatacaattgaattacattctatctgtttcgcttttcagtcaaaagcatgcgtcgagattccgggattgacttctccttttgtcgatgagatgtatgagagactcaatgggacacttgatgaatacgatatcatcattagggcggtggccagaatacgcaatatccttgga

SEQ ID NO: 25508 - DNA, 1159 bp, Arabidopsis thaliana landsberg
gaaatgtaggcaaggacaagcaattctggcacgcgatatgctacacttgtgtaaaggaaaataaacttggttttgggaggtcgtttcaatatattttgagtagatcatttattcttatcgagatttatgtctcgtgtgttgcccttgggcttataagggttaagccaccgctcaaaaagagtctggtgagcatcgggtgaccatcgttttagtgaatcacaagctttgagtaacctatcactaggttaatcaacacccgcaatttggttatttaggtgttaaaggtataataataaaagaaatcgatgttttgtggaaaatgagcacaactttcataaactcgtttcaaggaaacgtaactcataagtctttgtcatcttcatcaatcttatttgatatgatactcgtcatctccaaagtcctcaccaagccttggagggccacatcaacatcttggctcttcattagctcctccgcgacttgacccggtgtcacagcttgtccttcaatcaaacgcttgatgtccggatagagatggtgtggggcattattgtcatgagagaggcccaagtaggtagacgccaacattttgaaaccatcatatgtgcaatgtcccatgtgaatatatatagagatccatatggtcaggtctaaggagagcatcatcgatatcatccttgttatttgtagtgaagataatgatcctttcttctccactggatgactaaaattactatttttctcaaatcgtttttttcttaattgcgcaaacccatcatttttctcggagactcttatcttctattgtttctctcgaactcaaagaaaataaatatgaagattcctccttcgaagaaaatgtccaaatcatgcaccaaagtaatcgccttcagaaattgtggtcattttcttttagtttcactttggaaaacctttttcgtaaaagcgttctctcatagagattaacattgtattgtatttactttatgcaaatatatgatcatatcattattattaccataaacgaaaaaatatatatatgatataatataatatactgatatatgattttaaagaactacgatgcgtagatacttttcattcgtctctatcaaaagatgatgttgatacatgattaattacaagagatcagattgac

SEQ ID NO: 25509 - DNA, 1643 bp, Arabidopsis thaliana landsberg
ccaataacgtagagactgtcccgacccgatattcaatatatttctgaatgctcacatagtcacataatctttaataattgtaatcagtgggacattgattctctaaccacttcttcggcgatgaatttttcttagactaaacgagtaactagttaatagtaaaatttagagtaattggctgcactgcacccatggccatcatgagtcacctaaattacataaaattgaatgtatctctctttcttcatcttcttcaacgcttcattccacactcgtagattttcttgactcttgtatcaattcagattaagaaaaaggtacatttctttggtagatgttatgactgctcataaatttataaaaacgaacagaaatagtttaaaaaaaaaaaaagaaatattataatctaagtgaaaacatgatcgaacccaaatgatagtatgttacacaatttaacgaacatatattatctttttaaaacaaaccaaaaacttgcacagtagtttaatgaataatcactaataaattcatatactattattatatactccctttttatagaccacaaaaatgctatgattcatgattcattctagaacgtgattgtgatatgtgacaatgagcgagtcatactagtcaactactcgaaacttgtgtatcaaacatgaggacgagagatcgtctggtggagggaaaataactaaattattgacaatttggtcctctagggacactcacatcaaaacaataggtcaatatttttccacgtgtacaaccagtttaatgacaatttcataatatccatttgctttaaataacaatcattcctatataaacctaaatcttgaacacaagagagacaaagaaagagtaaagatgtgtagagggtttgagaaagaagaagagagaagaagcgacaatggaggatgccaaagactatgcacggagagtcacaaagctccggtaagttgtgagctttgcggcgagaacgccaccgtgtattgtgaggcagacgcagctttcctttgtaggaaatgcgatcgatgggtccattctgctaattttctagctcggagacatctccggcgcgtgatctgcacgacctgtcggaagctaactcgtcgatgtcttgtcggtgataattttaatgttgttttaccggagataaagatgatagcaaggattgaagaacatagtagtgatcacaaaattccctttgtgtttctctgattttatgttttgtttttcgcgtaattaagattaaatattggtagggttttttctctggaaatgttctaagaatgtatattttcattctaaagcttaaaagtaatatatgaacacctagaaaacatattgatttaatagtaaaataatgcggtcccaatagtaagctataagaaatcaagaacaaatcttcctatggcaaacataatctgcctttattctttggctttatttttcttaactaggaaaacaatacaacgttacaaattacaatcaagtgaaatggaaaggtggagagtggtccaaaacacaaagaagatatatttttctatgattaacatgtaattgagattaaggagctataagtaggaaagagtcaacgactcttgttttgtttttgggttctgattttgctg

SEQ ID NO: 25510 - DNA, 758 bp, Arabidopsis thaliana landsberg
tgttagaaagatatatgtaggacaaatgtgaaaatggtattgcattcctcaagtttgtttacgacaaggacactcggatagttattggagacgatcatggaaacaaaacaccacttgaagtcaaagaggtaattctaattatcaaacttgttcttacatttatctttgggaacatattagcttaatatttttgattatgcggcacagttggaccttgaatatccgggtgaatatgtcacagcggtggagggctcttacgataaaaggaattgggagtgacggcgaagctataaccatgcttaggttcaagactaacaaacgaacatctatatcctttggattcgaatctagctcaagctttctactcgagaaagaaggcttcaaaatcgtggggttccatggaaaagcaagtaacatgattcatcagcttggggttcatgtcatgcccatcacccactgatcatcttaatactatatctttaatctctcatgtaataagaatcatcatagttttttttttttttttctctttttatgtcaacaacatgcaaacgtaatttgctgcaagtccttgttaaacatcacataaaaattattttttaaaaaataactactcaattataaaatacattttgtctaattaaattgacaacattaaacattaatttcctgaattgtcaaacacccaataaacccagtattttcaatccaataaaaaagccaaaatggtttactccggtttaacgtttagcatcttt

SEQ ID NO: 25511 - DNA, 1814 bp, Arabidopsis thaliana landsberg
gatcaacaatgttatgacattctccgaatgaaccaaagaacatttgaagctttatgtaagatgcttctcgagatggtttgttaggataagaatgttcgagatatagctgcaagatatcagcgatcattggatacagtgaaaaaaaagattgaagatgttctgagtgctcttttaaagtttgcagcggatacattaaagccacaagaaggtgagtttacacgagtaaaccctgttttgatgaatgatgatcgatattggcattttttagagatttgtgttggagcacttgatggaattcatgtctcagttgatgtcggatttacacactcaagtatttatattatttgtgggttaaaactctcaaagacaaaagtacaagacaaatacgcattgttaaagtataagaaaatatgaaaaatatataaagaatttgtatagagaacgttgtattgtattcataatgtaaggatcttcattgaaaagggaagaaataatatttagtagggatgttgttgtgggaaaaaaacccagcccgacccaagcccaaattgagcatgtcaaccaaaaacatgaatccaataaacccgaatgggttttggatcttgaaaaaacccgatgagatccaagactacccttgggtacccaattttgtttttgttttctttctcaaatgtaaaatagagacctttagtccattttcaaatgtcaaacatagacctttagtccaaacctttagtcaagatttgttatatttacttattttcttaatttgtgtgaaacaaatcttaaaagatagaattcaccctaattccacttgtcataattacatttcgtacaatcctaccattccaactccatcgttcaccgtatgtacatgcaaaatattaatttttagtagaaattataaatgattagcgttttggatgtgaaataaattttaaaaaaggaggaagattgtgcggataaactttaaaaagaatgtcatgttcttattgcatagatttcttcttagaacggactatgactcactaagatctacatagctcatttggaaagaaacaaacccataatacacgctatcccaatcaagcccggcttagtttattattgggtccagttctcaatagtttgaaaaaaaaaatgatgtatataaacagaattcaaattttttgagctttttctaaatttttttaatacaaacgggcctaaatactgaaaaaatgtcaaaattatattgatatcatgttcatctgtcctagttgcacaacccaataaccgggcagtgatactaatgtagacaattataaatagtaaaaatgtcgaaaaaatcgtgaactttcaaatttggtacgaaaaaagcatgaactttcaaaatcccataaaaatcctaaactttactttgacattttgaaaaatgaccaactttcgttgaacaggccgttttgggcatgacgttaattttccgttaacggaacaataacagagttgacttttcgttaatagtcttcataaaaccaaacgacgtcattttgaattcactaaaaaaagaaagaaaactaagcactttagagatcgaacccgtgaccagatgatgaatttattgaagttgcaaccattgagctacaacatgaattacattatattagcaaagagaaatttatatatacaattacctaaaataacaaaactaaaaaaatatttatgtgaatatacaatatatacataaaaatattcattacgtataaatatacacaaaaaaatcttccttacaaatatacacataaaaatatttattgcttatatattattttatg

SEQ ID NO: 25512 - DNA, 818 bp, Arabidopsis thaliana landsberg
agaatttcactttcttaaaatttaaagcataattatttttttgaacaaaaaaggaataattattattgctctgtaattttctggtattagtaaaaatcttagttgtcatgttttcaaaaatttttacttatgttttacgaatttacctatgaaatcaattaaaaccctaactaagattttcgttaccgtcgctttctcctaagtaagatgaggtcagaaatcacaagagaaacaaagttgctcttcgatcttccacaggatgtgatagaagagatattctctaaggttccggtgacatgtctaagaagaatacgatctacttgcaaaagattgtacgctttactcaaagatcgtggattcatcagaaaacattttgctaaatcagcaaggcagtaccatgctcttatgctaaagaattttaggttttattcagtgagcttcaatcctaatggaactgagatggacgtggcttccttgtttaatggtgaacgtagcctaatcgacccctatagtagttcagaagctattatatctcaagcctttcactgtgatggtttattgctatgcaccaccaaggaaaaccgattagtggttttgaacccgttttcagggcaaaccaaatggttgcaaccacaaaatcgttgtaagatagatgaggcctaggttcttggatacgacaacagtgacttgtgccatagctacaaagtcttgagttttccggatctatacgaacaagaattggaaactatcaagaatgcagggagggatcttgatgtcactccccgaggcgacttagattgaaaaccgatgattttagc

SEQ ID NO: 25513 - DNA, 590 bp, Arabidopsis thaliana landsberg
  unsure (1)..(590): unsure at all n locations
gaggtttgcatggcacggaggctcatggcaaagccgctgtcgaggtatttcatatggtgccagtttccgtcgggcataaacagcgtatctccatgccggagagtaatatcatacccgctggctttttccagtgcgggaaactgctggtaatccaccttgcttttttcaggatcataataattgctgaaatcggcgaggctcaacacttcaaaaggcttgcggtacagccgggcctgttcttcgagtgggaaaagcaatacccttttcctgccgatgaactgtgtatgcaggatatggcttacatcaatatcaaaatgcatatgcgtgatggatgtctggccgccggtaaaaagcannnnnnnnnnnnnnnnnnnnnntttcatcaggtgctcgggccaggtaaaatcattgatcagttcgggcgcatggtcaaagatgttgaacaggaaaatacgccagcccgcgggtccctggctgatcatatcgatgtattcaccaaaggtcttataatcatctgcggtattaataggaagtataaggcatcgctattaataattggtggataatgccacttccttatcggctaccag

SEQ ID NO: 25514 - DNA, 1722 bp, Arabidopsis thaliana landsberg
atttaaattgtgtataatgtattttgaagcactcctgtggaatcatgtattacattggtgtaacagataaaacattaatacattattcaaaaactgtgtactttattgttccattctgaaaaatcagcaagggcatctctccaatccatggctactactctagtcgtaaatccttgattgatagccatgcaaacctgaacttacttgcgtacacgaagtggaaaagttttcatgaagtttaatttgactcaagtattggcttggagagctttgagacttggttcaaccagattcaaattcaatgaaccttgcactcttgtaaattttaaaggccataatccatggctgacttacttgtggaaaaaaactcgcatctcatgtatgtcaaaaaaaagagtcaatatagttatttatcaaaagttatgataaaagaaatgacgtgtaaaaaatgactgaacctatattttccttccaaagcaaatgaccatgaccaaaccaaaaactattgtatattgaattttttgaattttggttgaataaatcagacaaataccattggacactgaatgataagaatcgaagctccgactttggatttatgtctttcttttataaaaatttgttatttatatataaaaaatgatacaaagagaagaaacaagtatatatagaaaaaaatgactcagcctatatttttccctacataacaaagaaaacattgttgtatataattgttttggaattttgtttgaaataattcagaaaaaatactattctattgaataataagaataaaagagaaacaaagctccaactttcaaaattgacgtctttcatggcgacttgctcttcttcgtaagaggaggaggaggagaaagaatcttgccagcataaatcgctatatccgtcaacatcttcatgttccaattcgcataaaccataggcgtcggatggaaaaaactagtcctgcacatgaaaatattcacaagtgcaagagcttgatacgctctcatgaatctataatctcgtaaatacaaatagttcaacgcgttgtctaaatgagcatcacctatcttataagctttcctacaagcgtcaaactgtgctgtgtatagtttgtccttcactctcggaagaagagaatctttgatgtgatggagcgtttgtatcccgttgatccaagcttgaaatgcggttatcttcgcgattgttctgattcaagtttgtcgtcgacctactgagtatgggattgtgtggttgcagtacttgaaaccaatgggctgtttacaaattcggttgaatagactgtgtgttggtggatcagggacgacagtgattgaacattcgaaggtaatccaaatggtaagagtcaggagatgttgaacataacccggttgctcataaggtgcttgtcgttataatatgttcaacagagagcttaaagggttgtctcatgatggatcttgtatgatcgaaccatgccctggtcttctcagaatatcttcaatttgttccgtaacggatcggttcgttatcaggtatcgtagttcgtaagacgggtgcattctaacaatagtctttgttattgtagtgtcaggcactgtgcgggctatagatgtgtccggtatcgagataagcgtgagaggaagaatacgcaagatgatatgtatggttacttggatgcagaccaaaagggtattgcttataggtcacatatctcaa

SEQ ID NO: 25515 - DNA, 648 bp, Arabidopsis thaliana landsberg
cttcttctttagtttcataatcctcgagaggatatgatgagcgtggaagttcacttggaactcctgccaggttatagtatctgcattggtgtgtgccgctatgaaggcatcccaccaatcgtacgcggctacctcgagtcttcccgaggcatacaagaccttctcccggtcattgcactgggtgatatccaacttattcccgatgaccttgagctagtcatcggcatccgaagatcaaccgcatgagagaaagtaggcaggtgatggctcaaaaaaatcccgatgcttgtctctagccgggggtacattctgctgttgctgctggttctgttggttctgctggttttgctgaatctgctgcacagacgcagtgagtccctgcagaagctgtatttgagctgtgataaactgttccatattggggttcggtggtggtggtgatatctattgaccacgctggttcctgttgttgttgggtcctgaacgagcgttcaccatctggttggttagaaagtgagcctcttagaaaagtgaggagtaataaagattctagaggggaatagttttatgtttatgttttatttatattctcttttggtcatcattccataagaccattgcactcaaacaaaattccaactcaaacat

SEQ ID NO: 25516 - DNA, 797 bp, Arabidopsis thaliana landsberg
tgaagatctgcgatttgaagcttcagttctgctaactcggttggagccatgcggtatggtcattttgcgatgggtgctgttccagggatcagatctatgtagaactccacttctctttctggtggcattcctggtaattcttctggaaatacgtccatgaattcttctactactgatatactttccgttgctagattgaacttcattgggtcactggcgggtggctgtgcctgacaagagactgactttccctgccggtcggtgaggaggactgtcttgtctgcgcaactgatgatgcctttgtgcttagttagccaatccatccctaagatcacatcaattccttgggatggcaagacggttaagtctgccaggaatactaccccacttaaaaggattctgacttgggaacattttagctggcatagaaggtcggaccccggggttcgggtgaccaaaggaatctctaggggagtagagggaatgccatatttttccacaaagctagtggctatgaaagagtgggatgctcctgaatcaaaaagtacggtagcgggagtaaattcaacaaggaactcaccgagtactactcccggagcctgctgagcttcctgagcatcgacgtgatttacacgtgcccttccttgatacggagtcttgttctgctggctgaccgcggagggcgccttaggggcgggtgccgaggtattcttagggccattcatcgagttggagtatgcggctctctgtggctttagctgctgacaagtgctcttgaagtgacttggatcaccgca

SEQ ID NO: 25517 - DNA, 993 bp, Arabidopsis thaliana landsberg
gatcctgtgatttatatcgaatcaagcactgaaagaagaaaccacaagtatagtgttttgtgatcataagtgtttgttgatcttaccttggatagtagaaggcagtggaagaccatcaagctctttcaaagcagaagagcaatgtttcttgactttctcagcgcagcaaagtctgttaacgagccctctactcatctttgatggaagacaagaaatgggaacaccaaattcatttttcagatgcatcacagctttctccacctcttcagatactattatgtacttctttgtgcccttgagaagcttatgagccaagagaatgcggtaacaaaacacgcctactcttctttcttcatttgcaatgatcagttgcttcttcaaacatctgagaagaaaacaaaagttagaaacttaataaccatcaaagattgtatcataatggaagaagatagtttgattgaagttactctattttgctatttgttttcccacaggaaacacagttgaagcatccatcaatatcactactcggcgtatcctctttcagacccgatttctcactgtcgaaagcgcagtttaaatggcaagataagccacaagattcaccgtcgaattgagaatctgaattgcaggttaaccagagactaggatctttattgtcatcatacttaaagcagatgcggcaagagcgccttttgcaaagagtggcttcctctcttagtttattctggcaagccaagttctgtcaatgcgtttttcccttgcctgttcaaattatgctatgttcatgttaggatatagaaacgggagaatgctataaatggaggattgctactaaagaacatgtttcgttacctttagctttagctaatggagtcacgagatctcttttctgtctttttggtgatgggattatctcttcaaactcatgatctctagtgtttttactttgatgcaatgttgaaaagccttgtgatgatgtcatctttcgtc

SEQ ID NO: 25518 - DNA, 714 bp, Arabidopsis thaliana landsberg
caagatgggaaaggataagcacacaggagaggaaaagaaagggattccagcgaaggttttacggtattttccaatcaaggatagattcaggaggatgtttagatcaaagagaatttctgaggagttgcgttggcatttcagtaatgcaagtgtagacgggtcaatgagacatccagttgattcattgacttggtttcaggtgagggataaatatccagagttttcagctgaaccaaggaaccttcgtctcgggctttccacagatgggatgaatccattctcaatgcagaatacgaagtacagtacatggccggttatgttggtgaactataacatgtgtccgactaagtgtatgaaggctgagaacatcatgttaactatgctcattccaggacctatagcgccgagtaacaacatagacgtgtatcttgcacctcttatagatgatctaaatgatctttggaaagaaggaattgaggtttatgattcttatgctaaggagaattttagacttaaagctatattattgtggactatcagtgattatccggctttagggactctagctggctgtaaggttaatactctatgaattagcatactggaaggttagttcattcagaagaagtatagtgttttctctgtgaactagttttgttgtttgtcctaacttatttttcttatttttcaggatatgccagtccgtcacaacat

SEQ ID NO: 25519 - DNA, 625 bp, Arabidopsis thaliana landsberg
tctttttacttcgcagattcgttttgtgatttccgttttcacaaaaactttgtatagatcgatttgaagcaatttgagaaagtgatgaagtacatggggtcaggtatcgaaagcaatgctactcttgaatgtggtggtgatcagattggagacaaaggttacttcatccaacctactgtcttttctaatgttaaggtaaaaagaaaactcttctaagacatctttaatgttcttctattaccgattctccatggcattaatctcgaacgcttggttcaactacaggatgacatgcttatcgctcaagacgagattttcggtccagtccaatcgatcttgaagttcaggtatatagagctaccaataaaactgatccagtagacaaataagtcacaatttggtaaaaatggctgagttgttagagatttggtaaactgaaactaatttcgaaccaaccaaacctaaactttttttaaagataaatgtattcaattaaaaaacagaaaccatgatagatttggtttaacactggttatgatgttgggttcagtgatgtggatgaggtgataaagagggcgaacgagacgaagtacgggctagcggcaggggttttcacgaagaatct

SEQ ID NO: 25520 - DNA, 1067 bp, Arabidopsis thaliana landsberg
ttttaggatattagtaattaaacgagttaaagaaatataagatttaagatagaatgttgctagcattctattttgattttttgaagactgatttcagttagaattgtggcaacaaatatgaagattccagtacttaggtcatatggtaaaatcacgcgaattcttaagttttacaagatcgaattcggtggttctctttgtaacttggctttctttgcttagaagcgatccaaaccttttttagtagtaatgttgtatttatttttctgtagattatttttatatgtattttgtaatctttgtaattatgttaaaaattaaaattggtataaaatttaactttttaacaacaaaaaataaacaatctgaaaaaaaaagaagaagataaagtcgtcaaattggtataaaatttaactttttaacgaaacaagaatttgaaaaaaaagaagaagatagagtcgctcttgcaagtgtaatgatagactcgtgtagagaaattagcgggaacagaaatataaacgacgcataattagaaagtataaattaattaattttgtgtcacatatgggccttttataaattaatatgggcttgcccaatgaaagaccatctctctcactcacacaaccacactcgtaaagattggtgtgattaataatggcgctttctctcagccagactcgaccaccaagccttagccatagccatacccttagcgtcatcgttcctaagagaacgttcgtttcgatccgatgcggtccacgagacaaccgcggaccacttctcaaaggccgaatcctaagcaccgaagcaatccaatcaatccaatctctcaaacgagctcatcgaagcggtgtctccctctcccttaccctccgtcctctccgccgtctcataaaatccgatgtcatctccgtcctccgtgagcttctccgtcaagactattgcacactcgctgtccatgtactctccactctccgtacagagtatcctcctcttgaccttgttctatacgcagacattgttaatgctcttacgaggaataaagagttcgatgagatagatcg

SEQ ID NO: 25521 - DNA, 1172 bp, Arabidopsis thaliana landsberg
agaatacttttacttataagaagacatcggatgtacgtagacaaacaagtatcaaagtatgttcataaaggttttcaaagttcgcattcaacaaggtgggttaataccttcacgcatgcacaagtgatggaaagcaatacaaatactcagatcaacaaaatgacaactttttcagcaagcaatacaaatatacaatataaaaaatctggggtttcttggttgggcttgaatttgagaaaggcccagatccttccagatactctttatttgactaataaatatcacaaaaacaattttctcttaaagcttttcttgaagaacaagagaaatcagaagctctttcctttgttttttttttctttttcttccaccaatctacagatttcgaatcatcagaaaatggatttcgagcttagatcagcgaaagagaagcttgaaagagagcagagagagaggaagcaaagagcgaaactgaaactcgaacgcgagaagaaatcaaaggaagctgcgattaagcaacgcgaagccattgaagctgctcaaagagctagaagacttgacgccatcgaagctcaaaccaaggtatctatctctattcttactgggtttttggaatttgagaaatttgagtttcttctgtatggtaaatgctctcctaggtttttgaattcctgataaaattttaggttctgcaacagcttatcaatcgattccgttataatttctctgcaattgggattttgattttgtagaacagattcgtatctgtatcacaaatgggtattgttcatttgggaattattgtagatttcgatacataaaactaaaacctttgacattgatgatttgcttgttctcttgtatataggctgatcagcatatgcaagagagtttagtatctggagatgggatagtgtttgaacgagtcttccaagctgtttcttttcaaggaaatggagataagattaaattaccaccatcatgttttactgagttgtctgatcaaggagctttcgataaaggtcctttgtattttgagctctctgtagttggtcactctgataataaaaagacaacacaccctgccgcttcttgagtttactgctgaagaaagtaaaaatgggcttcctccacatgtgtggagcaacttgttttcaacgcgtgatccgatg

SEQ ID NO: 25522 - DNA, 1617 bp, Arabidopsis thaliana landsberg
agtttatgggtttggtttctctccctccaccaccatctgattgtgttaccatggtaaacgtgtatccgatccatcccttaatattccccaatgataatctctttgttcaaagtgttaagaaatcaacagtttaactttttgtgtgtataatacgtatacacagctacgtatcaatgacactaactcaagatggtaaaaatattatattactggttcacttgttaatattttggtgggtcagattccttataaatacataactaacgcaaacccacctctcaacttagacaccaccaacacatcaacacaacttctatatatttggaagaaaaaactctcttctctttttagtgtctctccttgttcttgtttctgtaacaaaatcaagaacaacgactaattaactaatgggtggtaaaaatagatctcacagtagcaagaggttttctctcttcagcttcttcaaaacacgaagatctcacagagtggaagcagacggctcatgggacgacttcggttacactcgcaaggcaatggctagtgatgaagacaaacgttattgggtcgctgaaccaggcatcgaccgtaaagcgtctgccttcattgccaagtttcatgcaactcgtgtctctgagtctgagcgtcagactctctctccttaccgatccgaaaaggcatgatgaatatgatgatcaagagctacctgatctgattctatgtaaattgtcttctctttttctatgtccttgtgataattcattgattgtgtcttaaatgtagttaataatcaatctttctccacaattatcattcttattgccctctcttcatcttctagctaatttaatcatatggggtgtttttttgttgttgagatgactgtgtcagttaataaattccaaatacaaaataaccagattcgactttgtatcatgttcttcgtaaaatcgtcataaaaaattatgaaagaatggaaaaaggaatactaaatcctctccaaaaaaaatgactatcttttaagagctttttggattaatccaaattaatcactagccattcgtcaatgttacatttttgccaccataatgacagaaaaaatctgtagtgaataatactcaaggcttaagagttgagacgataacttgaaacaaatatcatatatagatcatttagctccccgtttacattctgaacaaataagttcgatcgtttaacgagatccattcatagtacagcaactaaacaagcaaagatttgaagccagctatagaatcaagaagctttataagattgatattatttgcatggagggcaggtccttgattagttcgtcctctcacataatgctgcagttgttgtacgaaaaggacattcaccagtacttttattcgtctctttcaatcttcctctgcataagaggcttgttttggttcacaaactccacctttagctgccaattatgaccataagtattccctttaatttaattaaatggttgtatgtggagtgatctcctagtggtcccatgcatatactcatcatctgtgaatgtgtcggtctccaatatgtcttccccaccactataatgtaaatcgctggctatacctagaaaaaaca

SEQ ID NO: 25523 - DNA, 1090 bp, Arabidopsis thaliana landsberg
  unsure (1)..(1090): unsure at all n locations
taaagtctactttcacattcaacaacgttactcatctcaagaacgatacccgaaccaccaatatgaatgctttcaaagagagttaccaggtattacattgttattaggtttggaattgtaaaccattttatttatctcacaaattgacaaacacaacgcacattgcagaacgtaattagagtttgttctatagacaattaactcccccgatccctaaattcaatcccaaaacactccataccttaaacatttgaatattccctcatatatagcttaagttggtgactgatatactggtctggtagtagctacatctcatgggtttatttctattggttagaacatcttggaatgaatgaaacctgatgtatttatatcataattgataagtcaaactactatttttggtatatctttgtcggtgaactgtgatacttataagtagaatgtagcaggaggattccgtccactcaacttctaccaagggacaggaaacatctaagagcaacaatattcctgctgccattcactcgcataaaagttctaacgacttcctgtgtcttgcattgcacggaacatattggctattactagtaatagagccacaagattggtggcggtaacgaatgctgatctagagcagatggcacagaacagagataatgctatgcagcggtacaaggaaaagaagaaaacgcggaggtaatgatgttctccattttttcttttagtttcccttttgtaagttgattgtctttcgaaatcgctaatttgtaattgcttcagcagatatgataagaccataagatatgaaacgaggaaggcgagagccgagaccaggttgcgtgttaagggcagatttgtgaaagctacagatccttagatgtctctccacgttaggttttacatttgagatcctaagttaggaactttttttgttttttctactttcaactaccttgtaaatgtaaatgatcgatcttcagctgcataatgtgtggccagatttttgtaatttttacgtgnnaccttcaagaagcaaagtttcttaacccaatcaaaagaagacagactccacagaagttaaacc

SEQ ID NO: 25524 - DNA, 1089 bp, Arabidopsis thaliana landsberg
gggacttggtcgaaggctagaagaatatacctttagaatttatggctaaagcttttacgttgcggggtgagggtagaaatagaaggtacaagtttatacaaagaagtacgacggcagccaagagcgggatgtttatccacgatagagagtattgtatacgcgatgaaggagatcggtgaagatcctgaaggtttagataatatgttgaatgtttttgaatccatggttgaagatcaacgaagatgtaaagatgagaactttaacaagattatctgaaagacaaaattactctgctgttgtaacttgtaagctgaatgaattagattcttcaattttgataattatgccgaaagttggagtcgtttttggcaatttattaaaacaattgatgatataaatgttggggtgtgaacaagaaaaattcatagttctgggccaatatgtaaattaagaaatataagttttgttgagtaagacttttgttaattttgaactcagagtgtgttttcgttttccaatgctttcaattcgcagaagcttaactctagcaaaagagccaaaagatttgtttttgtttttgtgtaatctccgagctcgatgtgtatctacagatgactatgatccaccattttcgcctctctctaaacccactaaacctccaaaagagaagaagaagcagaagacgaagaagcaagaccagtcgtcggagctggtaaatgacctgaagattccagtgatttcagacctccctttcgattttaggtattcgtattcagaaactaacccggaaattgaaccgattggattccgtgaaccgaaacggttctctccatttggaccgggtcgattggaccggaaatggactgggactaccgcactggcgtcgccggagattgatcagagtcaatgggtggaggagagagcaagagttctcggcgagactttgacagaggatgaagttacagagcttattgaacggtatcggcatagtgactgtacacgacagattaatctcggtacaattttgaatcttttgcctaagttttttagctttgaaattagtttgcttgatcaaatcgaatcgtcttc

SEQ ID NO: 25525 - DNA, 1241 bp, Arabidopsis thaliana landsberg
atctcaccaatctgtgggtagtttgacagatgaagtggctatggactgtgaaatggttggtgtcagtcaaggaaccaaaagtgcccttggacgagttaccttggtacacattgcctttccaacttttgtgtttttcttttttaagtatcatgaggcgaaattttcagtttgtttcagttctgagcgcttgaataaagagttgatgtcatttcattatcgctttctctttatccatattttgaggtgtatatctgtctcttcttctacatgaaggtcactgattatttcaccatttattgacaggtaaataaatggggaaatgttctatatgatgagtttgtccgtccagtggaacatgttgttgactttcgtacttctattagcgggattcgacctcgagatttgagaaagggttggttttactttcaacattccgtaccttttttcttgaatctgtcaacattcttgctttttaggctgcaaaatgaattggatcatttactaaacagtttggaacttcgatcttaatttagctttcttttaaccacagccaaagatttccgcgttgctcaaaccaaagtagcagagttgataaagggaaagattctcgtgggacacgccttgcataatgatctcaaggtctgtaggtttcacgaatctaggatctggttacaatatcaattcagagttttaacagaaatacactttgtaacaggctttgctgctaactcacccgaaaaaaggacatacgggacacaggagaatatcagccctttctcaaagtattcacactctaacccctctctttctctatctgatacttgtcatactttcttttcccaaagtgacttcaaacctttgaatagagtcctaatgaaaatggtaatattccaaacaggggcaaaacaaaaaagtctctgaaacatctcgcatttgaaattgtaggggatgacattcaaaatggagagcactgccctgtaagtgtgtacatataaatataaaacaaacagcttcatgttttggagctgcaaatctataacaattcttcaatggcagattgataatgcaagagctgggatgatgctttaccaaaagaacagaaaagagtgggagaaaaatgtgaaagaccagagggggatgtggctgaaacaaaagaagagtaaccctacaaagaaagctaaatatgggaacaacgattaaaacaatgacaatgcaattgtttgaatcaatcagagagagcc

SEQ ID NO: 25526 - DNA, 702 bp, Arabidopsis thaliana landsberg
caaccgacaaaatagtgttaaattgaactaattgagtgtaaaccactaaaagagtacatagaaagtaacaattctttatttttgaaatctgaataacgagtaattaatatgttaataatcaagaacaattaaatacaaattgtcaacaacaaaagaaaaagttaaaacagatcgaagaaagtaaaagatccaacatcatttagtttccatgatcaaagaaatctaaagatttatagatctacggatctgccacattatttcgactttttcttcgtcattttcccggcgaatttccgactattttccgtcacactaaacagagaaagacagcaaaaagagcaaaaataatagagtaagaactcataaaccgatctgagccagaacctggtggtggagtatgatagtaaaacgggaaataagggacgatcggattcggcggaggcggcgtaggatagtttcctgaatacggcggaggatagtaataaccttgaccaccgccaccgtatggtggagggtatttactgcctccaccggactgagaaggaggagggtaatagtaagagctaccgccaccggagcttggaggagaaggagggggaggacatgcggttgtgggggttgacggtggtggaggagaaggtggcggaggagatgattggacaggactacatggattgtcgcatgaagaacacattgtacaag

SEQ ID NO: 25527 - DNA, 11179 bp, Arabidopsis thaliana landsberg
  unsure (1)..(11179): unsure at all n locations
acgttttaccaaaatgccaaacttcaaaaaagcaataattttctacacaaacaataccattaggcaaagaaagagaaaatctagcgggaacgataatttctctttgcaggtttcttgtcaaaacctggagcgnnnnnnnnnnnnnnnnnnnnnnnnagacccatcttgccaagaatatttacagggatagccggagggatgctaagtcccatactgcggctaaactcattagctaactccaccagtctggtcgtgtctctagcaatcttcttctgcgatttgtagtaacccaaccatgcctgatatgccgcctccttgttcgtcatttccacttggataagccctttctgcacctgattttaacatgttttcaacacccatcaatgctcactcgagttacatactcttaagaaaaatttggcttctaacgtaaaagaggttagtttcgtgagatgtgaaaatcttattcctttgcatacatattccaatacagtttatataacattctggttgttctggtttgctacttgctagcgaatagaatttacgaaaggcttgctaagttcaatagagtcacaaattcaggctaagtttacagtagtagtatttgaaaaatcttacctttttcacagcctcatggtctattggcggtaaagaagactttgtgatgggcaagtccttaacagaagatagaaagtactcttcccacggtgccaacaatagtacaccttctccttccttacctttccgcccagttctgccaagtctatgtatatattgttccctgtctgatggcaatcccatctgcaaaagcaacatacacacaacaacaacttcggtaaaaaaaaacaatcaactttgtagatactgttcaattccatgattgaaaactactacatgatttacctgtacgactatttacacatcagggtaatcaacaccacgagcagatacatcagatgtcacaaggataatactcttggacttgcggaactcatcagaaactctggttctgtaactctgcggttttctagaatggatctctctgacgttaaggcttagcttaccaagcagatcagccaccaatcttgtaaccatagcagttgtacagaaaataataacctgcaacagcaaggagatcatgttaatccagaattacagtggtgattaacaaaggcattggaggaacaatataccttatagcccacattatctgtgatgtgttttttcagaagaccatatagaagcgagaaatgtctatctaatgatgcaatcatgtacatttgtgaaacctgggagataaaacagacatgagaaaccattagcatccaatcatatggcaggccattggttcaaatgaacttaaaaagcaatcttttaccttttgatgcgtctccccagcaccctcttgaacacagttgacgaattcatgatcccgtttcagagcaacatggcatatttggcggaccttgatagcaaaaaaacacagttcaagattccaacccaaaagtgaaagcctttgtgcaagaaactgacacttacctcatcagatactgtggcggaaaataaaaatgtttgtctctgcttaggaacagcagcaattatcctctcaatttcccttcggaaacccatgtccaagagatgatcagcttcatcaagcacaaggactttcacacccatcaaccttgttgcaaatccagaagtgttgtcgatatggtctttgagccttccgggtgtagccacgagaatctgagagtgtgaaaatatgttattattcaaaaatatacagagacaaagatcaccatctctgcagccactttgactgcagggaagacaaataatgcaaaaaaatctaaatgcataatgaggcttagatcaaagaacatatcctgtgactgaaaaacaatcctaacttggacagggaaatccatttctttttaaaaaacaatctatcttaattcatattcttagaaattcaaatcatgagtccatattgttctagcgaaggataaccaactcagtttgaaaagaaatatatgcaactctattggtcagataacaagtttcatctgagaagtccagctcaatggaaatgcatgatttgctcagaaataagtttacatattaatacaaatggaaatttacctggcaaggactcttttgcaagcgcctttgctccgtaggaagcttagtgcctccaatcacaacttgaacaccaatagatgggtgatacttcagtaagatgtttgcttctgcagcagcttgacaagcaagttcccgagtaggacataccacaagcacaataattgggggttgcctactatcccggcttgcaggaggagatttgataacagcttcaattgctggaagcttgaaaaataaacatcaacgataagaagtaagaacatatcccaatcaaaggcccaatcaattcctatccaaccaacatatatccatgaacccagagagtacaatgtctcaccaaaaatgcaacggttttaccagtgcctgttttggccttggctaggacatctttacctggaaaaacagagcatggaagaaaccaaggagttaagaggaatttaaacaatcaatcaagctacaaaatggcagtcatggcaaatttgaggggatccggaagagaaatactcaagattcttaagttgtctttgaaatacctattggctattgccaacgtgatttgtaaaagcttgtgagatgtcgtcaattagaaattgtcactacatttctaaatcatggcattttttctttttgcatcgtaaacaaggctcatgaagaaaagttcaccttggagaatgataggaagagtagcctcctgcacaacagtcattgtctcaaatcccgcatccttgatggcttttagcgataagggagagagtgggaattgatcaaatctgtaaaccatgtaccataaagaatattatcaatcaaacagaactaaatggtcaaagtaagtcacatagtgaaaaataatgtaccttgtcttagacaagtaagaatctgaagttttgacatgttcaccagttggcttatcagtctgaacagccttagcagaagccgctttcttaataagaggctcatcattttcatcatcctcatcactactatcttcactaggcaaatcatcgatgtttcccaatccaaccctgttctcgtcatcgtcactactatcttcctcttccaggcttaagcctcttgtctgtttccccaagcccctgttgttttcggaacctggctctctcctaaaccctgattctacatttctatcattcctaccacgaaaagacgaccctgagtctacatttctatcattcctaccacgaaaagacgaccctgagtctacatttctatcactccttccacgaaaagacgaccctgagtctacatttctatcactccttccacgaaaagacgaccctgaatctacatttctatcattcctaccacgaaaagacgaccctgagtcaacatttttgtcactccttccacgaaaagacgaccctgaatctacatttctatcactccttccacgaaaagacgactcactactctttccttgaacacgaccgttccttgaaccttctcgatcacctaaccgcttgttcccgaacgaatcagcaggctcgccgctggttctcctcctgttcggactcccaaacctatccatttcaccttcctttccccttttcgcaccaccgaacctatcagattggccttcccttcctctccttggacccctactggtgtccctgtctacgtttctacgaaccacctctggatccgcgttatcttcgtcgctcgtgaacttcccgcgcaacgaactagtcctcaaatcgctcacccaatcactaagctctgcctcatcctcaatcaagctcttggacgcgcgaatctctcctccagctccacttcgccgcgcgaattcgggttgagatctctctggtcgggttgaaaagttgacccgggaacctaatccaatgtactttaacctaaaaggaaaggctttggatagaacaggaacggaacgaaatgaatagataagggcgccagaattcatggaagcgagacgagtacaaggaagagaatgagtgatgaagcgtacaccgagagggaacttcgaggacatttcttgttcctgtaactaccaagttcccgtcgtcggtgaccggtgagagatttacaggataagtaaaataagagtcgcaaaatgtcaagaggggttttacatgtaacaaaaaacacgataagggttttaaagggataggaaatgaaccaaacataattggtagtaaaagacgccgtttcgtgctacacataagaagcggtatgtagtttgctcccattgcttaaaatgtaaattgtaaacaaaacgacaagtgttttgaaaaaccttataattactgaattaccctttgtcgagtgttcaattttaaagctggataatattaacagagttacacaaaggccttataggctcaatacttagtgcagtcctaagtggcccataccaaagcccggagacaaaaagttttcaatttttcttagtggaagaaatggtgatgaacaaggatttgaagagctatgaaataaaacctttttaaatgtttcttttataaataagacaaaaaatacaaagaaaaatggtaccgttgggatcaaagttttgtgtctaaataagtttgagaatgcaaaatcattggtcctttactttgctctgacctctattggttttacttaccaccttttttcttgggtttttgtttctgatggctacgagggtgttcgtcattcggatttacttcctcaaacttgacaggtttaatgatcactccagctttcttcacaacctgcacacaaaatgattaagaaaatgcaacattttgcgaaatgggtatactactaatgatgagagttttaacaaagtaatgaaaagggtacctcaggtcggtttagaactccaacaatagttgtgggattaaactcaggtcctataggcatacacatactttgttcgaaaacttcctttgatgtgtaagggtaaggtagactctttgtctgaagtttctcagcctgtcaaaaatagattaatgtcagcatgagaatcgatcggatggttataaatgagcatattaagtgagacagaactgacctttttatcaactttttctgatatgataacatgtttgaaagaagcgtctttcctttttctgagagcttgctctctcgttttcttggcttcttcgtgttctctaacaatccttgatggtaaacctctcttgttttggttattggtccaatgtccccaaccagcaacttgaaccggtttctcgggttcaggaacttcctgatttagtacctcttgcttatccttctcaaagtcaccttcaacnnnnnnnnnnnnnnnnnnnnngcttacaagctctgcttgacaaggaatttcatacgtttcctttgaaccgcatgtcaaaatcccatcaaccatttgctctgcttcactctctgaatcatcactttctgaatcatcactttctgaatcactcgattccttaaatgattttaaagtgtaaatacacaaagcgagcaaagaaaaacacatgagtaggctaaaactggaacggggataaattaaggaagaaattagtagtatcattccattgtgattttaagaaatgaaacctttttatcttggccctttgagattggtacacgagtctttggagcttttttggattctgcattttgggagcctttcatctacacaacatagaaaaacaagttaatcaaagataaacataaacggaaaccaagtctgatttgaaaattgtcaaagcaaaccttcttccaagagcctgacgcaaataaggcaacatcaaatgttgtcttagaagctggattttcaacatcatcatcacacttctacaaacaaaaaaattgttatcagggagttgataaggagcaaagagagaaccattgtgattaattgaacaggaaaacccatgatacctcggtctctgttatggctctagtgtttctagcaggtgaagcagtatctccaacagccccaaggtcattattttctataccttccatatcattgtcactatcactgttgtcataaaaattgtccgagtcctttttagactcttttggaccttcgactttagaggtggcaccaaatactcttctaccactaacatcagcggactttttaggattatcttctccaccaaaattctccaattctttatactcctcaaatgcacgtttaacttcttcattagcttcctcgtttttctttttcatagcacgagcctaatcaaataaaaaacatcagacagagtctaaaggaaaaccaaagtaagataatcaaaaatacttttgagtaagtaaagcaagaattaccatgaaaggtaatgaaagaagaccagaattgggtacatcatcatcttccacaattttcagtgtcttctccctggcttttgctatcaatttagaaggagtatcctgatctgaaccacaactcaactcttcctcatcgtcgctctcatcactactacttccatcgttcgtggagttcatctttctggacaaagtagcattaatctgaagttgttcagatatagctgccctagttccatcgtatctctcagtcagtccacggcttaacatgcgtttggcccattttcctgtgtttttgtgcttcaaagtcatccgttccttcatgaccacaaagactatttattactcgacagtgtcttgatgagaaatttcgtgcaggtagaagaaattttagactcacctctactcgtctagtctcctgcttaattgcctcttctttagccatttctgggtccattaatgctcccatcgctgatttcttcaggtccttgcctttaaggcgatgatatgttttagacttaatcttcttgatacgtttacttttcagttcatggcggaatagcaggctccgcatcttggcaatgtggtcacggtacttgatgtggtcttccatcgacacctgccagatcaaaagttaatctaaactatcttcaatgcagacacatgccagcttattttacaagtcaaataagctgtatgcaggaaaaaactaaatcacagaacttacctcgttcaattcaagaagcttggcgccatcttctttgtgagcctccccaagctcgttatccttgagtacagaagccattttcttctcaaattcagtcctgggttgaaactctgatgctattgcaccgactgtagaatacccaacattgacaggatgattgaagtaaacagttggtgcctccctgttcctcttgaccagatggacccacttattaaaatccttctcaactagtcctttcacagctttccgctccagtctttctcgttctggcttaggcagaggtgcatgaacaacagactgagtatctttctgcatccggttgatcctcttgtttagatcgttaaacccaggttgtccttcaaggggcgccaaaaggtcctcaactgagatgaggcctttaccctccagaacatcacgggtaggattgaattcagactctggatacgcttcagtatagagtacaggtctcttcttactctctcctgtaaacaaaaaaaaaaaacttaaagaaatgcaatgaacagaaaagctaatagcaaaaatctgaggagaaagagtcagtctttaccttgaaaggcagcacttggcattccagtgagaccttgcaacatacgtgtgtgtctatcatcatcaccttcaccttcctcattctcgctgtttccaccatcttcatcatcatctgactccacattttcatcctatattgagatcatagacacttttatcaataagacatacatataacaaggacaaaacaattgccaagaccagatctaaagttgctatctcattaccaatcaatcaattaaaaactctcaattttggattcaccaatttgttataacgtaagaaacccgatagcaaaaaccctaattgagctaaaaccaaaatctgtatcgtatcttctgatcactaaagttcaaaacttgcaatttcacacagtggcggagaattagtgaagagaaagaattaaaacctcgaaatcctcgggaagctcgtagtcgtagttatcgacgcggtcatagcgattgtttttcttagactcttcctcaggcacaccttcttcatactcatacaaatcgacgttttcatcgtcggaatcgatctcatcgtcatcttcgtcagagttcaaaggacgtttctcattggcaatagtcttcaggattgaattaggcaaatgaggacctttcctcttcttgttcttagctagggttttcgaagtagatttcctcttttctcccatggctgcctctgcttttttttttttttgccgtttagtttctgattgagattttcgtagggtttcttctctttcgcttaaatactaataaaatcgagtttcagagaataagaatttctcaatcataccaactaaaccggataaaattgggtatggtttgcggtttagcgtaccaatatacgagtgaaccgtgcaaaatcagagatgaaggagtttgaaagaaatacaataaaacgctgatttttggataattagttgatgttcaaaagctaatatacataagttttagtgcttgtagttgaatttgacttggatcacataacgcatcttgatttgttccacattgtagactatatattcgttgtacaacaacatcccctgcaaaagttatataaagtcagtttatgaaatttgagagagttagattttgtgaatgtgtgttgaagcaagacaaaaacaaaaaccttggagcatgaacgttccactggtttgccaagtggaacaacaacaccgtcttctagtgtttgagcctctgatgggtttggtgctgttttccccacaccttttgtgctgcaaccatcaaataacaaatcaaggtacagtacaaaaatagtaaatcataattcattgcggtttgagataaggaacttgtgtgaaatatgaatgagattatcttcataccttagctttcccgggggtagattatccgcgttataatctgaatacagaagttcattcatgtctcccaaagcaacctagagaagtttttatcgttaggaaacataaggatagttatgttgaatggctatagaggtcctgttgttatacagtagttttgttgttttctatatgaatagagacaagaagcgagtatacctcgcagaggagcagaacgccatcattagcgccagtgttggcatagcaatagttcgcactcttggagaacatatccgcaaagtaaaccccttttccaaacatgtaaccagttacaggcgcttcaggaggagctattcgcagacctgcttggtgtctcatagttgttcattttactatgcaattgaaaatcccccaagaggagaagaaaaaaagtagttactaagaggaaaaagagtaacatgttaccttgagataaaataccagcccagttagtgagacgtgaaccgtgccagagtagcatcctgttcttcgaacttgaaaactgccaagaaaaattaaagtctcacaatgccaaaaacgagaaatcagaataatgcgtatggtacggacaagctcgaaataccataacctacctgttggaatcgatcagcttcaacagctctcgaagctctaaatagttgggcaatctcaaccgtatatcccgaatgcgtctttgcatgagtgttctccatgtaattagcaacctgattttggtttgaaggagtaaacaccaaaaggataaaaaaaacacagacatgtttgagatactcgagtattaaagatatttgtttgaagttcacaaaaccgaaaatttaccatagagaactcctctgaatcatttcctactggcgtcaaaccacaattaagttgctggtagtgataatataaaggatcatcctacagccattgcaaaaataatgtcatatccttagagaactatatgacggagtgatttcatgccttcaaaccacatagactgactgaattacctgcaatcccgggtcgacggacaacaactttgttgcgagttcaatttcacctaatgcttcaaccttacaaaaaaaaacgatatatttaaaactacatagcaacaaacaattgcttttctgaagaccaaaactagtcaagtaaggaaacagtaggaaaaattaccatttcaattttctgtttcaacttttgaggagtgtctataacaaactgacctgttacagctcggaattcagatgttagtgaatgtttggttatatatatcgtaaaccttagcacagatgaacttactcattttcttaaaaccaaaatcatgaggtatcactgtgtagaactctctgcatcaatgataaacaaagttagactagttcaaatctaatttctttatgggaaacagttacataatcaactaaatgcgaaaaattgtctagcaattaaccagatacatacccactcagttcctcaagcctcgttctatcataccggtcaatcacctccgatattctcttcagcacttcataaccctagacatgtggaagaggagattatatcatctgaaatcacaccaaactataatttacggaaatgagaccaaacagactgtttactatctttacctttgaaattgtggacttgcttatcttgccgagtggcaatttgttagcgttatatccttcaattccaaatgtagaagatgtatgaaaaatcagcaagaagtaaagaaaccagcaaaatggcaaacaaatggataggacaaaagataggaagtacaaacgcaggtaataggacaccaaaacaaagagataatgtatcgacatataaaaatcactgttaatctgccaatggatgctctcacttgaatgaagtgatcaaagttagactcaaacctatttccatcatatgctgtgccatcatgctgacattacatataagagagatgaacttggcaacccgagtatctagttttgattgttcaggtttaacttcggaagatgaactcggaatatcattattgacctgagaaaaaaacaatcgtgaactctgagtaaagtgcacatttgaacgaagagaaaaaaaatatataattgcaattaaacgggaaaaaggaa

SEQ ID NO: 25528 - DNA, 1420 bp, Arabidopsis thaliana landsberg
gaccaaaaaactataaaacacatataagaataataaaactaatttgtttatatgtgttagacaaaaaaaaatggatatatgcaatgattcatatatatatatgatacaacaaaacccaatctggttcaccaatcacaacaaaacacaacaatcgcacaatcaatccaaaacttacgattaatattcaaaggataacataactgagatccaatgttcataaaacaggggaatcatctagattcaccttgttagaaccaagttctttacagaggatgaatcaaaggtaaagtccaaagagttctagaaagggaaaatacaaaagttcacaaatgttcgataaaaaccaaatgaaagagaacgtctgctttctttaaacgccaagcatcttcgtgtgtcaatcttggccattccttcaactgtaaatctcagccctccacgtcacacctcacttcatattatcctctttcgataacaaaatatatatattccggagcggagcggatatccacttattaaaattatagtatttgtggcacaaaattaaggctttgttgtcttagaataaagtttctatgactatatatcccattattcatggttatgtggcagaaaatcttggtaaaactcaatcatgtttataatcttgtagtttagcggatgatcgattccatgaattgtggcagaaattaggggtcagttgtcttagaatcgagtttcattcatgataagggaacgttggtttgtccaaatttgaaaagcataatcattatttctttcttgatttcagcgaatgcatactaatgccctgatccaattgaaaccatcacaacatttcttctccataagacgtatatcagtaagcaggtaagaggttgtctcatttgtgacataaaggagactgaacttctttctcataaccacgcgttgggatacataaactgttcctttctttagaagtggtcagtattaattctttttcaaaatgaaaggacgccgttgaaaatcaaatgtaaagataatctcatgattatgggaaagtagtacaaatgtataaaaaatgatcaagactcaaactaaaactgaacccgaaaaaaaaaagtgaatggagatcataaatataatatatccaaaatattaattatattacatttaatataacccatctattaaaaattataataataaatccgtaatatcaatattaaaattgtcatttttgtcaaaatctatcttttttctttctttttttagttcatattctcttcatctatatatgtgtctaatgtcgtattgggccggttttgggccatgttctgaaatcactgattcaaattaatacttttagaagtcgaaaattaagttaattgttgcctttagtttgagcttcaattaatttattaattcaccttcccgacttctg

SEQ ID NO: 25529 - DNA, 656 bp, Arabidopsis thaliana landsberg
ccatccacttatttcagactctttatggttgtctttatcgcatacatagttcttggaagtaagaatccgatactaaacagagaataacagaataattatcaaaaaacagagttaaagggaagagaatgatcagatagagctaatacgtatgccatcatatcggcgatcaaaccaatagggaaacaaagttcaatcatcacttcattctcttctctttctatatctctaagacccgttaatcattatctaaaataaattaaaaagctcaagactttttcatgtaattggaaaaattgaagaagaagagagatcagatagagctaatacgtaagatgccatcataacggcgatcaaaccaatagggaaatctaattccatcatcatatctcttcaaaacaaacataaaaatcgatcctttttcagaaaacagagaatctaagaagaacacaataacgaaacgaacaaatttgcaacctttaaatcgggaaattatcaaatatgactgaaacagagacggcgagaggatgtgagatttgagatgtcaaggttgacttggaggaatctatatatatacacacaattacgaacgatataattagggttcttttgggttccttcgtgaaaagacgttaatacccaatttgtttttttcggtt

SEQ ID NO: 25530 - DNA, 1337 bp, Arabidopsis thaliana landsberg
atgggctatttctaacttggcaaagacagtggcagctgtagatgagttcaaatttggattcccatcaggcgggtcatcaactgggtcaaacaaatggtggggaagggcagagaaaggcggacgagaagatggtggaggagagaacactgaaaatggacatgtagcagcttctgatgagacgcaaaattctttggtagctattaggaaaagaatagcggaagaaggaagagaagcggttgaacttggtctgcatcaaggatttggttcaaaaagaccagacaagagagatcaagctttgctgtttcagatcttcaactctgcaatgccaaaggattgggttacccctgattcttcctaagttcgtttgtagatttagaacagagctccctcttaaaaattatgctctgttatatgtaatccgcaagttcattaactcctgcaactatgttattatgtctctaagtgaactggaaatacaacaggaagacttgcgatcttacgagtctacaaaatcatttctgttaattgcaaaaacatgggaacaaataatatagagacataagaactgtcctagagcctttggaggaaaattaacaaaaacagaggtgacgccgaaagagggatttttgctggtatacgtctcagaaattggaaccaaacgtacatgcctttggatgatctaggcttttcgtgctctactgtgcgagaaacaagacatgttttcatgtcaaatgcctgcaatgcgaggatacaagaaattatcatgaaagagcttcaatttgcttctcaaaagtttcgaacaatcagcataataagattcagatagcaagcagcagcagtaagtccatcaggcaaactaaagacttttctaactccaatccaatcaccttctggggaggcttaatatctaccctaactaaatgcacaagagaaggtaggataatgtttaagtaaatgatggacttatccttttgtgaaaacatatactacgaatcatgggaaaccgtgaaacttgtttcagagatgaagatgaggccaaacagcatattgtatcataacactcatcacttagaaacccgctaatgaaaccataagaccaagctagcaaaaagaactagataagtaccagaaattgttacaacaatagcaaaattagtgtcaaggaaaccttaacaagcttaaggtgtgcgcaaagagcatcatcaagtgttttacctctggaaaagctccgaaaagtagcgagtaccgttgtataaaacgaaccacatcaaaacaaccaccaaagaatctgaaaagagttgaggaaaggcacagaagatgcaagcaaagatcttaag

SEQ ID NO: 25531 - DNA, 1278 bp, Arabidopsis thaliana landsberg
ctcggaccttacacaaagccacgtggactgatcgatgaacataacagatgcggccttacgtctacttttctactgtttggacgacacatacatatattagtaaccgtagtcacgcatttcgaatacgtaagaacttgcgatgatggatttttgcgcacttcaatcacatgaactattagcaggggacattcccgactgattgccaaggaagaacataattcaagactgctgcactagtttctttgccctaagaaaagagtgcaccgatgcgttataggaggaacaggagtcgaagcgagacatgcctgcattatacatatgtaagaacggatgaaacaaggggggagggttaacaaagttccaatcctacattcctacttcgccggccgataattcgtggacgtggtcacgtggtggagaagattaaatcataaaaaatgaaattatgaaacggtgtcgttttattttttatttgggccgggctatttagatcagaccaggaaagtaagcaagtgttaaatagacaatattgccccttatttcggatgcttaatgtatcggactataatttagatccgatccggcccataagaatcaagatttaatctgactatattacccttcgtgtcgaagggctttaaaagtccccgagactcgacggttcgactctaaccctacaatagtcttctgctaaaatcgcgaaagagatatctccacaagtgcgaatttcgaacggagctacgattccatggcgaccaacggagagaaggtcacggctacggtggtgaatggcggagggctatctactggtgaaaaccctaagaaaatcgtagacctcaacactacggagttagatcgtactgacgacattctcgacggagaagtcaagggattttcagattctggtgaaaagaaggaagaaaccgactctaatggtattggatcgacggctggtgttgattctggggatatctctccggtcgatgatatccagaagaagattcgacgtgctgagaggtttggtgtttcggtgaaattgaccgaagaggagaagcgcaattctcgtgctgagaggtaaagactttaatatttattcgttagattccgtcgaatttaggggtttcgaaaattagggttacggaattttttatacttattgtcaaacctatgttgtaaggaatttcaccttcggtgcagaattggtactgtagctgcagcagtggtgaatggctcagagggaacgaagaaagcagaggaattgaagcgaaaagcaagagc

SEQ ID NO: 25532 - DNA, 987 bp, Arabidopsis thaliana landsberg
aacatctattcattttttaacttcccaacttttaaaaagtgtgaattggagatttataaccaaagttccacatctctctttctcaacatattatcacatcatttcttggaggagaatggacagacaactaagtttcacactcagctgctgtctgtttcaagtttatgtttttagctatacagcatcagatcggttaaagtaaatcggtttagggataagcacaggggtgaaccggccggtcacataaggtattttgcaacttgcaaaattgctattatccagaaccaataaagcaatagctattataaaacaaaatttaaggcccaactatatgatggttcatacttcataagctgctagggtttacaaagttcaaaatgagtggaccatattgaagctaagaagagataacgaagaatcgatcataacggctaagtatttaaaattaaaactgagacactaggcgtattaaccagtaaaagcgtgaaggccatcgttgtggtccttctctctctctctgtctcctctgcattcacttttctgaaaagacgagacgtgaattattactactattccatgtagacaaattcggatttgtattcatactattttaaagccaactctcactgtcgcaatttacatcccatagacaaatttagtgcttattgcttccatgagcattttcttttttttttctctctttaatcaaatgcattattcaattaagttggtaaagtcttttatacaaataatttcctaatacatccaaacacatatgcgtttgggtgggtctaaagactcttagccaaaaggagtttactatataacaataacaataacaatacggtaactagacgcagaaaagttacccatgtgataaacacatgagctacgcgacacgcggcctaagaaaagttagagtgcggtggaaaaaatgggtttaatgtctcgtttcttgtctggatgttacaaccttattggcttcac

SEQ ID NO: 25533 - DNA, 345 bp, Arabidopsis thaliana landsberg
tggccacaaagaagaaggagtacttcaaggaggagaagtcggcgacgggcttgaaggagaacgtggtggaggccgataagaaggagtcggcggcggacgtgaaggagaacgcagtatagaggagtagcgttaatgagttttagtttggtcttttggttttgatgttttctagctagtttgatcagtttgtggttttttttaatcgttgtttttaagttttaacatcggtagctataatgatgtttagagtcaaaacttgataataataactaatactttttctttatctcaacctaattcttatatttaagtttcttccagaattatctaccactagaatactga

SEQ ID NO: 25534 - DNA, 1712 bp, Arabidopsis thaliana landsberg
attaagtttcaataatcagtgaatttattgctaatcccaaagttcctaccaaacggatatctctagatgcctaaattacaagattagccttttgcagtcatgagcacggacgatgtgtgcggctgtgccacgtggaaattgtcattcgattgttgcttatggtaaatttcttacactaataagtagaagataccaatatctacgtatacatttttgcagccattttgtgaaataaattctaagttatgatttatttacaatggttgccacaagattttaatgtttgtttttgataattagaaagaaatttctctacattaacaaataattaaatatttgaccatttaaaaatcttcccaaaatctctccacattaactacacgattagttactaaaataaaaatttcaaaatatttaatatcatttaattactacaaaattatcatttttaatattgcttttctgtatgactataacaattcaattataatcatcaaaacccaaagatatttgatagtatttaattattacaaaattaaaaaatatttagacaatgattcataaacatatcataaataaaatcagtgagttttttttacgggacggattggcgggacgggtttgacaggacgttacttaataacaatcgtaaactataaaataaaaaaaatattttatagataaatataatttgcaaacttttatatataataactaataaattgtctccgcggtatatcgcgggttaaattctaatattttattataactagaacaatcacaatgattaaaaaagatgcatagactaattattgtatataacatatttatagtccctaaattaatcaaaattgatgtgaattcttatcaaccatatattttatgtgttggattacatacgtctgtgagagttatttgtaataatttaaaaacctaataaataatttgtcacacaaaaaaaagcgaatacctttgcaaaaaatatgttataagttatgccagaatatgattaaaaccgggaaagtaatttcgactgtactgtaataatcgcgtttgaaataatcattagaggatatttccgtttgcatgggaaataatgggacgtaaatcatttgaaaaaatgtgtttcgaatactaagcaatactttgcgttacaatattttatattatataaaagtatttcctcttttggctaagatggaccacaaaaattgaaaaagaaccaaggcactccaataaagtattacagtaaattaaagtgcacgtaattattagttcttctcttctcttcttttttttttttcttttttctttttacattgcatcacgggtaaccacacgaaaacatttttaagcaatcgctcctttttcaccttcttggctgaacataaaatagtatataacccaaaaaaaaattacatatatttttcattatctgcctctatagatgtaatgcgcgcttagatttgcgactctaattttagtaaattcataataattgtatcatttcaattttctaggttttttttcttaaatgttagtatattgcacaaaaataacttcatggtgagccctagttacaaaataatgtgatgtttgaattttataaaacacatggatatgtaggctgaaaccaagtggtgagaattgtcttggctgatcgagattttgcagtgatagggttgtagaagattttgtcatgtgatgttgct

SEQ ID NO: 25535 - DNA, 905 bp, Arabidopsis thaliana landsberg
agatcatctaatgatgtaagttttgtttttcttcccattttgggattctgcaacaaaagagtcgcagggttgccaattctggtgtgttctttagctttctctatggagttagttgtgtgttcttagtgattctgtgtgatttgtatgtttttgtttgaagatagttacttgtttagttcttagttgaattgctttctccatttcctttgattaagatgaggttaagtaacttcagggttgttgacaattgatgaattttacaaataacaattgaaattgtgtaactggaaatgtgttgattagatataactggcatacaagaattacgaagaaattttgagttcatggctaacaattttgaattgctttatgctgttgacttcattatggtttctagtatgtttcttcttcttcatgggtcttgtacagtggctactagttgttctagtactagtattagtgactaacttttggaattctcggatcatgagcaccttcatttcagatagcagttcagcttctctttgaagtaaattttgatgccacttgtgtaatttaggatttcattgaaattcagagtcggaagtccaatatctcgtggctgttttctccatcattaataatttgttgcatcatggatactgttttactgttaacattactggatcacactgtgctgactatattcttttctttttcttgtttcattaggcacaaggttttgtcaaaccggaagctcaaaattattcattaaccattcctagccctgtcaagatttaaactttcatcaaaaaattcaaggacgaaacttataggaatcacatgctatggtctctgaaaagcattctgctcgtttatatcattccctcccaatggagagttcagaacgatttaacacatactac

SEQ ID NO: 25536 - DNA, 1531 bp, Arabidopsis thaliana landsberg
caaatgaagctaggagaaccaataagttttaatctacaattaaaatgcaaaggactttggataacacttgtccccaggaaacaaattaaaaaaatgtcattcttgattgggtcagttaaatcattttcaattgagtcagttaagatgggttcattatttcttgtgatctccgcctcgttattcttttacttcggaatacgacaatcttttctacatagaagacgaatcactacgtctcagttcatgcaccattctctggtacccaaataacagtttaaattacatcggaagtatgaaataaacgaatctagccagtaaaattatttgataaagttattctttctcttttcatggaattccgagacattgtttaaaataagtggatacctattgactattggacaaaagatgaattattgtttacgagtaattttcggagaatgattaaaaactacatcaacaaaacttatgcatcttcgactaactaattatagaaaagtatacatgatttcacaatatcttagaaacaatccatactaaaataaacttttgttatacatatgttaaatttgttgtgagtttactatcaagttttgttcttgtttttattagggatattgttccacgttagaagttgagtagaatcttaagtattgttagagttgtggtggtgctgaacaacgttggccgtgatgggagcaacagaggaagctgcggcaaccgcataaatgatttgctttatggtttcgcagtcgttcatgaacttcaggaattgaaagatgagtgtttttgccttcaatttgatcaacggcggtcttgtactcctcagggagaccaacatgtattacttcaacttaatcttcataatcaagaggtttctcgagaatagctagctgatccatgcccaaatatatcaagattaatggcgagaaaaaccatcatctcgaatattagaaatattatcccacatttgaagttgagtaggatcttaaatagtatatataaaatattaatttttccactcattaccaattgattttgagttgaaagcccatagtgtaatatttttaactgaattgcttaacctttatatgatgtgtcaactagaaaccgcgaagatgaacacatacatgtatatacaagaaaaaaataaaaaaaaaaaaacaagaataaaaaaaacaacaagtacacttcacttctaatgtctcaaccgaaaaccttctatggaacgcactaagacatgtatacaacttcttacagacaacatcaacacatttacaattctaagttttaagttttattagcccatatcaaaggcccaacactaaagcccaataaactctttcccgcttcgacgcccattataataaactcagctcttattaatcttaaatcctgattactgtcaattactcacctggcttgtcttcgtttcttctcacggaccctaacatctctcccccacatctcatcttcttccccagaccctaaccctaatttccgaacctcacctttctcgacctcattcctc

SEQ ID NO: 25537 - DNA, 1076 bp, Arabidopsis thaliana landsberg
cgactgattacactttctgtaatatttctatctttttcatgttcataatactttataatataaccggggttggggaaataccgtgaaaactggatttataatcatgccgtattttttttcctccttagtttaaccattatgcaaactagtatttaattttctgacagagttgttcctcgattcagtagattttaacatattattggttacttcgtattactttagctattaggccacatatgctagctgcagaccaaaatgatgggttttggactcgtgatggtaataagaagaaaactagttacactagatgggcgtttcatgatttcaagaataaaaagctattgatggtttttcattatctagagagtccaaagttctcatggttcaatgaaaatgggatggagataaactctgatgcttcttgggcataagtcaaacaattcttatggagtgggaaccgtaagactaatgttgtaacgcctcagtcccttctttgtgaggcccacgtcttctccggattgtgagtccatccttatccgacaatccttatccgacagtccgtatactatgtctaaagattttaaggacttgtttatccatcctacaagttatcatataattttttcgtgattgtatagttccgacaatcatttcttagaatatcacctgtcttgaaattgctctagtataaatacgtttaactgtaaaattctttcgggatatttaaccaaagaaataaatgcattgtggtgacatatatgaccaaatcaaaaataaccaccataccatattaagatactttattatgatattcataacaaaatcgaccaatgtcttttactttgcttgtagccatgaaaacaaggccaaaatcctctgtttaatcttgatacgatatttgttattttctactctttttagattgtataaaagatggtatggttagtagacaaacgtatgtattaaatagcctaaattacttttcagaacttatagctcatgaacgctaaaattcaacagattacacggtttcaacccataaacataatggctttatttaagtgcacgtaatt

SEQ ID NO: 25538 - DNA, 1180 bp, Arabidopsis thaliana landsberg
gagaaattcatataagtatatacaaatatataatgcattttcattgatttatttcgatctaaccaagggattaattaagggtatacttgtaaacttacgctctgaaatcaaggaaccaaagcatgaaatcgaatgaatttaattgtgatacacaattcaagccaaattgaattcagaatttaacaacaacatgtaaattaagatttaaagaaccagtgtatgaatagatattaatgtgaaagcctcgagtgggtcatgaaaatgaaatgtcacggtggatggtgccctagccgaagttcaagatcaagctcatccactgatgttcctgtcgcttctttcatcgagccaatgctctcatcatctcctgtcgaatattcaataagccgaggaggaacttctactggagaattcaacattgaaaacggaaggttgctcggaggaaacgaagtcgtaccataaagattcaccatgtcaccagaattaccaaaaatgccactagggttttgcagttggtagaaatgggacaaaccttcaatgttactcgccgtggattgtattataagtgtcgttgtaggcaacggcggagcacaagaattgagtaacatccccccgtggccgcttctagccgcagccgcaacggtggaaccttgatgagccctagatgaggcgcggtcacggcggtggacattcatgtgaccgcctaaggcttgagcagaacggaactcacggcggcagaaattgcaagtgtaagatcttggaggccaagtggtaccagagatgttgcctttagtgtcttgctcaaaggctttgacttcccaagattcatcatcatcctccaattcttcaattttgttaggttccacatccatgcaccaccgttcattcaaggatgagttttttttgaaaaaaaaagagaaatctcagtagaagatgaagaataagaagaagatggggttggtggataatgatgtaaattcaataataaatataaagatggacccgaaatatatacatagataggtcacttatcttcaaaatatcattttcagtaaatgaaagaaattttaccataataaattttactgagtgtaagagcacacacattctgattagcactatgtataattcaacttgtgcttgtataatatactttctttctattacatccagtgcacactta

SEQ ID NO: 25539 - DNA, 715 bp, Arabidopsis thaliana landsberg
aaaaaaaccatatgatgtgaatgaattcatacatctccggttagagttatctctaaatcttatttgaaaccgattaaaagccgactgaggggccggtttgtattacctgccggggttcaatttttaagtctgaaaatgtagtttatgaacgttgctgtctccacaaattgatgaagatgtagaaagaaaaaatagcatttccccacgtaacgttatcacctattcatgtaacacttttataaaaacaaatcgaagatggctcactactagcagttgatgaaagattatatcaaaatttgatcacttgttaatgatatcattcatcattgtttgaggttgaagcaactttagccgcatacttgactaagacgccagttaatagagccttctccttcacctttaacctgtgaatcataattgtcgaaatcaatcaatttgagtagagattctacattgattagcaaaaattgctgtatgctctttacctctttgatgatccagggatttctatctttgtcccctttttggcttggcctttcacaagaatctttgacttcttctttttctccttcttctttccttcaactctagcgggttttgcttctggtttatcaaagccaactcctccacccaagagtttttctttaccgagaagcttttgctccagcctacggattctatctactctattttcttctgaggatgacaatgaact

SEQ ID NO: 25540 - DNA, 1239 bp, Arabidopsis thaliana landsberg
  unsure (1)..(1239): unsure at all n locations
atccataagaccactggcaattgtaagaaaacctgcaggaagagtctacacggtagttggattagtgagcattagtgtcatagtaaaagttaaaagaaacacagcaaactaccatgtatcaaatgacatatagtaatacctctacacgctcggttgtggcttccggtgctgacgttttgctttctacagatcctacacttgatagtttgctcaaataacttctggtcatcagaactactgtctcacggtaagacttatcaaaccctaatgttgctatcctagaaacagcatcaagaagctgcacaaattggcataaatgcaaaagtaaatatgtaagaaaaaaaacgtaaaaaagatatagatggtagcagtttctgtcattgccaacgttggagaaagtagcatatataagatactaattgatagtcagccaggtatcactgtagaaattgaaatcgtacttggagtcgcaaaaagctaggagtcgaagcatcaccctcttccaagctttcaataaaaagtggtaaaatcatgtcagctacttccggcttcttaacagcaacattgagatcagctagcagccgaatcacattaagctgtacagcaggtacttgcttctctctatcaacctggacaccaaatgatgagccttattggaaagatgaaattgcaattcaacacaagaaaggcaaattaaccagctaagggaagggtattattatttctccacctgttcttcataatcatttctttcacgaatacttgaagctaaccccataatgaagttgtccactggagctcggtccttggcccaggcagattcaataatctcacaactagtcttaaatatgctctcaagcatagccccttgatccggctgtaccaacagacattaaaaataaatagaaacttccttcagtaaagtaaaggtaaaatgtccagaagagttgtgacatgatgtgttcgattatacttctatggatcttcagacatgatcatcagtagtttagagtatgttgctcatatgagttaagacataacaaaattaccagtgcacagacagctagtaccagtggtttaagtcggatgagcaacacgcgaagaggctgccctcctcttgccactgcaatctttgcaatcccagaaagcagagagtcgaacagttcttcacaggccttcattntacgccacacagatgtcaagcaggcatctgcagcatctaaaagtaatgcaagcgtc

SEQ ID NO: 25541 - DNA, 1195 bp, Arabidopsis thaliana landsberg
gaaaatcatcagttcggctatagttgtgtatggctttcaaaatcatactagacaatggtgggaggttgaaaggagttatttcaaaactagtagggccagctcaatcaagctttattcccggaaggttgagcacagataacattgtggtggttcaagaggcagtccattcaatgcaacgaaagaagggcaggaagggatggatgcttcttaaacttgacctagagaaagcctatgacagaattcgttgggatttcttagaggatacgttattggcggctggtttatccggagattgggtgaattggattatgcagtgtgtgtctggtccttctatgagtttgctatggaatggtgagaagactgaatctttcacgccgttaagaggacttcgacaaggagatcctttatcaccgtatctctttgttttgtgcatggagagactatgtcacttgattgacaatgcggtgatggagaaaaaatggaagcagatcagcctgtctcaaggcggaccgaagctctctcacatttgctttgctgatgacctgattttgctagcagaggcgtcagtagctcaaatcaggattatccgaggggtgttggaaagattctgtttggcgtcaggccaaaaagtcagcttagagaaatcgaaaatcttcttttctaggaacgtgtctcgggatctagaaggttcgatatctacagagagtgggataaaatcgacacgggatctaggtaaatatcttgggatgccggtccttcagaaacggataaataaatacacgttcaaagaggtgcttgagagagtatcgtcgaagttggcaggttggaaaggtgggagtttaagcttcgcaggaagacttactcttactaaggcggtgctaaattcaattcccgttcattctatgagtacaattaagttggtgatgggagatctataagattctggacagataagtggttgtcgagtaaatctttgattgatgatgttgtgggtgcattaccgttgggttttgagcaactctctgtacgggatctgtggcgggaagaggcaggctgggatctgacaagaatagctctgtgggtttcagacgacaaaaggatggaactggcagcaatcgtctttgatcacttcacaggggcacgtgattgactctcatggggcgagagtgcacctgcctgcctcacagacgcttct

SEQ ID NO: 25542 - DNA, 1630 bp, Arabidopsis thaliana landsberg
  unsure (1)..(1630): unsure at all n locations
ttgattgatctcaccaaaaaaaaaaaaaaaagagacttctacgagaggcatttcctttaaatacttctcttcttcttatcacacaaattatgaatctgttttgatggaaacctaaacacatgggttaatgagctatttctataacaatgattgggttgctctactaattgtagtttgtttgacaaagatttttattccacttttattttttgttcgataattccttatccaaacttgatttaaaccccaatttnnnnnnnnnnnnnnnnnnnnnnnncaaacttagcgaacaggatgagacaaattttctgtctcgaaatggattaaatagttattaaaaacttattctttttatcaggattcttttgttctattcctttcacaactttgaattctttgaagcacttttgtataaaatcacaatcattttgttcagattttgggagctggaactgaagtgttgtttctaaaatcttatcaaagggatgcatgttgtattgcttttgtgtcgcttattaaactttcaatttgcacccaaacgagaaataagatcaaatcctcttgttttcatttagatttgtgttgacatttgtgttagtttcttagtgtaaaggaacaagtttgtgttgacatacattctttcttcgttttttcagtggcaattgacagttccttacttgctacttcctctaagattgtcacttacttgataagatgaacatcgatgatgtaagtttcttttttttttctaatgttatagaattgtatgattgagaattggatgttttttcctgaatttagaattggtcggacgaagagtgttgatattttcttcaactttgtactgctgaggaaaaagggaatagaagaaagacgagattaaatataactggaaaagagtccatcatgagatagtttgaagaaaaatttgggaagagatattcatgggataaacaattcaagaacaagtatgatgtgcgtagaagaacatacacaaaggttaaaaacttgcttcataacagaactgaaattacatatgattctgtgtaaagaataaatataatttttcttttcattacgtttacctaagtatttaagaaagcaagtaaacatacttttaatacctaaaggtcgctgaaaattctaaaaattgtaacgtgaattctcaaaactgtaaaaactgattctttttattgtacctatatgttaacgttaattctcataactctaaattcttatttttccatcaaaatcatgacgtcaatcaaactgttaaaaggcgagatacaaatataaatattgtactaatattgttaatctgaaatatctactattcaaacatatttgtttgaagtatatcatattacatgatacattttttggtgatgaatcaaattgatgaataaacatttcaatatgaaatttacttgtttttgaataattatgtaatacttttttttattagttatattttgtaaaaaaatataatattttattataaatcacatcaattgacacatattcattcatgacaatttttttatcaagcttgtgatcctcaaaatggttttatcattagttatatttaacattttaacattaaatcataataatataaaactcctggtgt

SEQ ID NO: 25543 - DNA, 1718 bp, Arabidopsis thaliana landsberg
aacgagtatcaatatgtattcatagagagattttaaaacttatggattcatttgttagtactagcgtttaagttttcataattaagaactacggatgtatacatagatatatgataattttattttcgtagtaattgttatgataatctttgttcttttgaagtcaacaacatatattatgcgaatttttaaactacattatatgtttagctcactattttattttgaatatctcataagtatgtatatatacttacacattgttatagtgagtgtaaaaaagagagagacagtttagtaatgattgagtatgcagctcgtgggcacattattaaattgaatggtatgatggatatgcgcagacactgtcttgtgtgaactcaagaatcgatacagaacgacggaattaaaaaaagaaaaaattcaatataagacgaaaatgatgatggaaaaaaattcttttatttttaccaacgaaatgtatgcgatatgaactagtagtatttaattcactgtgtgaattagtaggaatatttaagcatgtgaatatgtttggggtcgtattgtattgccacaacaaaacagcatgtcgcagcatggatttcattatcacctaaccggtaaatacgtcatggccctagacttaatgtattttagttttattgtattttataccttattttgatatgggtacggtcgacccctcacaaaattgaaatattacgactatgcattgaaaaactatacacaactacattgtcaaatactgataagatcttaacacagaaacacatattatcactaataatgtaacgtgacaacattacattgctttacacacattttttttaatctatttaagatgattggatgatattgtcatttttctctataaatctaagatttttattgtctttataatctaaactcacaattattacaacaaaaaattatcaaatctaaatttatttttaaaacccacgataattattcttattctatttcattggaaaaaccaaccaattattttaaaaaacagaaaacatattaattaaaaaaatcgaattcaaattctatttaccattctaaaaaaaaaaatatgcactgattctgaaaacgttgacaccgttaacgtagtcgtagatatgcactgattctgtaaacgttgacaccgttaatgtaatcacatcgaataaaagacatatgttgatcgtgtaaaggtataagataatctataacatcgtcgtcaaatttcatgttgcatatacattatattgctttacacatattttttatctatttaatcgtctgtgaactaatatgatgatttgatggtattattgttatctttataatataaattcgcaattattacaacaaaaaataaacagttttatcttaatatccacaataattattttcattctcgttgatttattggaaaagccagccaattatattaaaataaataaaaacaacatattaattcaaaaaaatttatcattctaaagaaactagatatgcactaattgcactgattttgtaaactttgaaactattaatgtaatcgtaacgaataaaagacacgtatcaatcgtgtaaggtataaaatactcgatttttaacggcgccgtcaaatttttcgttacatattaaaagaattactattcctactttacacgaggctttatattacaatgagcatgagttaatcgcgg

SEQ ID NO: 25544 - DNA, 1995 bp, Arabidopsis thaliana landsberg
tgcccttgcgaactggacattgaagttgcctctaggtgccataaactcttgcactatggatcttgtggccggactattccaaagaacgtggtcggattgaagaattcctctgttacggctgagattgatgaaataagatgtgtcaaaagtgtttccacttccggtgtcaagatcaacacgtgctgatccgtcgccgttttggggacaaagtctttgaagttgtggtacaaatgtttggtccattgttggatctgctgtgtttccgctcgagttgaatatcctgttcgtgataaacccacatgcagctgttccgatcgtgtgtcctcctcctattaattcatataggttcatcttcagtttgattaattatataattgaaatatatatatatgtaatatgtataccaaattaaaacttaattttctttgaaaaatacgaaaacgtttggtttaaacatgaacctgatcctagagttatccttattcttatgcaaattaagtacgagtgacaagataaaccatgcagtgcacaacactaactattaaagtgaagattcaaaatatgaaaaaaaaaacacgtgcgataggagtttccatccaaactaatgtattggatctacagtagaaactctataaattaataatgttgggaccataaaattttattaatttatagtagtattaatttatagaaatatttacgtaaaatacaatactaaattcttttaaaaatgttttttaatttagtttttcttatgttttgttgtttttatattcaattatgttaaaaaaaaattatttttttcttaactttttaatttattttcctacaagatattgtgtccgtatatttacgatgttaacatgaggcttaatccaatttttctttacacaaatcttagcaatgattaaaaaatgttacaaaaccaaatatgacggataaaatacgcaaagagttatgtgagtacgaaagagatcataccaactgtactctaagagagttgtaattgtgacttgaataaaagtttcatataaaattagtgtttgaatatatgcttaagatttatgattattaatttatgatatttttgggaccatatttttacatagggatttcaaaaaaattatcatcttattatcttatcgattttggttaatttttacattggcccgacttgggaccagcaaaatttattaatttatcgtgtttattaatttatcgagtattaatttatggagtttctactgtactctaccttgggtaataaatcaacaaatcaactccgaaaacaatatacgaagaagaaaaaaaaccctaaaaatatgttaatggaagaagagacttgcttggactgcaagagagcaaccacaatggtggttgatcacagtagcggtgacaccatctgttcggagtgtggccttgtctccgaagctcacatcatcgaatactctcaggaatggagaactttcgcatccgacgacaatcacggtgacagagacccaaaccgtgttggtgctgcgacaaacccttttctcaaatcaggcgatcttgtcaccatcatcgagaaacctaaagaaaccgcttcctctgttctgtccaaagatgacatctccactttgttccgtgcacataatcaagtcaagaaccatgaagaagacctaatcaagcaagccttcgaagaaatacagagaatgaccgatgcactagacctagatatcgtaatcaactctagggcttgtgagattgtctccaaatatgatggtcacgctaacaccaaattacgtagagggaagaagctaaacgctgtatgtgcagcctctgtttcaacggcttgtcgtgaactgcaactctcgaggacattgaaagagatcgctgaggttgccaatggtgtggacaagaaggatatccggaaagagagtctggggataaagcgtgttcttgagtcacatcaaacctgcgtgtctgcttctcaagcgattatcaacaccggagaac

SEQ ID NO: 25545 - DNA, 1253 bp, Arabidopsis thaliana landsberg
gatattttctttggtgttcccctgcttatctttatgaatcatataggcttctttctgtggttcttcctgattctcaaattcttattgtagttctccctctacagttgcttctgggacaactgagtttgtggagaaaggaacagataatgtagtctttagcacatgtgatgaagaaaaaagtagggttgtttttcagatgggaacttctgatgctgttagggctctaaaggcttctgagattgtgtaagtttagtcatcttttttttaactgaggttgaaaagagtcaacgttacttgtgttttacaaaatttgaaactgaatttctttgtgtcatcgattaggtgtaatgacgttgcaactattgatattaatatgggttgccccaaggcattctctatccaaggtggaatgggtgctgctttgttaagtaaacccgagctaattcatgatgtatgactctgtgaattcttagttatatgtttgtttcttactgatctattttaattgttcacctcatatggtatcttctccatcccagattttggcaacacttaagaggaacttagacgtaccggttacttgcaagattcgtctattaaaatcaccagcagatactgttgaattggctaggagaatcgagaaacttggtgtaccagctcttgctgtacatgggaggtaatatacaccactgttgttagtttgttctcattcctttaagctgttttaatcaaagttggtaattgattcctccttccttaaaatacaggaaaattgcagacaggccaagagatcctgctaaatgggatgagattgcagatgtggtggcagcattatccattcccgtcattgcaaatggcgatgttttagaatatgatgatttttctcgcattaaaaccgcaacaggtacacatgatacacttattgaattcagattcatgagacttgcaaatatagccctacaacattttttatctgccatgtgctaatgtttatacttgattcacctctgatttatataaccctttactgtttgctgttttttttggttcccataaaggcgctgcatcagttatggttgcaagaggagctatgtggaatgcttcaattttctctccaaaaggaaaatcacactgggaagatgtgaaaaagaaataccttagaaaggtaaaaacgaaaacccttttcaagagttaaaagataaattttcccttggaataagatttaaatttttcaaggttttggggggtatttg

SEQ ID NO: 25546 - DNA, 469 bp, Arabidopsis thaliana landsberg
aaaataaatggtgtactgattctcaagataaatcgtatttcaaagtgaagtgaaaggaatcaatttctggtgtatcttataccatccccaatggttaagaagtaattggttcttaaccaaacatcttaacaattatttatactaaaattttaaaacatgacatgtaactgtatttttcactcatgaaaacttcttagctaagaagcaaatcttagtttttaaatttattttgatttaattttcaaagtttaattttaagatattattctaagatacacctaagatataccattggaggtgctattactcccacactttctttatataagattttttgactaaaaacagattaataaactattattttgagcatcatgaaaactagttcaaccaatgaaaataaatactgcataattcttgttctaatgacagattttaaacatttctgtattcccaataaatacagatt

SEQ ID NO: 25547 - DNA, 1356 bp, Arabidopsis thaliana landsberg
taataaaagcagtaatgggtttaaccaatcttagtcaagaatcaggaatcaacgtatgaaccaatctaatatgatatataggcaagtccgtgctttaatggatatctgcatgtaagcaaagttcttcaagttaccaagtacatgagatgggttttattcaataactttgaggttaacagagaaccaattttagaatctctttctttctttcaggactcagttcagtagactgttttgatttgtacaaaaaaaaaagaaaacagactctcttgaatttgaccaatcaatctccattattctttggtttagaagggccctattctttcaagtccatgaagcccatccctctttaactttatattttggccctgtttatgcttatccaaggaattttctgtttcccttctgccaattagtcaatcaatatacggctatcaattttttggtagcgagaaacaatttgatcgaatatatgaattgtcttgaaagtgtggaaatatgatacatcgaatacattaaaaaaacaacaggtctcagttaaagaaggttgctgttttatagaccaaaatgacattataagctacacacttttgacccaaaaaaagaaaaacaaaagctacactgttacttgataaccaaacaaaaaatgatttaagaaaattatgaaattagcaaaaacttttttatatgttttgtcaacaatcatgttaatgtttatacataggaccgaaaataaaataaatgtattgttaatgtagctgtaactatatggtaactatattggaccctattttagaaggagaatataaaaatttatattattactacttttatacaaatacagtgggtagtataatctagtaaactcaaatatgaaaggagaatttcaaagagcttgttggtgaaataaacagactacagttttttttttgtcataaacagactacagtattttattttattttgtcaaacaaacagactacagtatttataatcgaaaaaataggtacattgatactgttaagttactcagcttatatatgtagatacaaaagaaaaccatatgtaacttcaaatttaatagaaaacaattaagaaaaaaaaaactactgttcttaagtactgtttaaaaatgaaaatagcatttcaaatttggggttcttttattttttttctttggaacaataattattaaagaaacggtgagtttccttccagccaacattgttacatcctgacacagccactgacattgacagtgatttttatgtttagtttcatcaatacccttaaacttctatacattttcattttgacacctcatgtttatatacttttcaacaaaacccaacacta

SEQ ID NO: 25548 - DNA, 882 bp, Arabidopsis thaliana landsberg
tctagaaactctctatatctctttgtgcgtgtgtgtatattttttggctaagcatttttgcgttgaatagaggattcacacaggttcttgtaaattttctggttcatggacatgattgcacatcttattatcttgtactcaattcttttcaaatgtttcagcatcttgatttttagctggcagaactacaagcttggtctaaatcagaattgagaaaagcatgcttgcttgatttcttatgatatagcattcatgatagacaacttcaatgtttgctgatttgatcatttggttctgcagcttatatatttgcgataaaacgagaaaaggacattgatgcggacgagaagaagaaagttaaaaagggcagcgaggccagacataaaggtgtgaaaaagggtgctgttaacaccgaaatcgagaagaaaggtgcagaagaaactgataaggctaaggaagcagaaactgcaatacaggagaaggaagaaaccaaaccaatccctgaactggatccactgtttgaatttacagatgcagctgatcaatccatgtttcaaactgtggcaactgaacatgtaaaggttgcaaggaaaccaattccagaagatgagcaaaaggagcttttcaagtggatattggaagagaaaaggaagatagaaccaaaagacagaaaagacaaaaaacacattcgtgaagagaaagctattctgaaaacagtcattccgtgccgagaggattccaaaacttctacctgatgatttccggtgattcttcccttccggattgggacaaatttttttccaggtgaaagaacccgaaaccttggggggaccttgttttttggttagtacaccaaagtgaaccattggttgggctttttta

SEQ ID NO: 25549 - DNA, 941 bp, Arabidopsis thaliana landsberg
  unsure (1)..(941): unsure at all n locations
tcataagaaaaaaaaaagaaaccaaatacttccactcaaggtctagtcacacgtgagatgcaccaaaattacaagtaacaacataattacttttttgaatcttcaaaccaatacatttataatttttgcctataaatttcttcacatatcttcttcatacttgaactatatcacatgttccaaatatagacgagaacaaaacaaaaaaaaaaagtcgtcgataagagagtcctttgaaatccccaaaatgcccttcaacataacctccgtgaaaacctcatctaacggagtatggcaaggcgacaatcctttaaacttcgcttttccgttactcatcgtccaaacggcgttaatcatcgccgtcagtcgcttcctcgccgtcttattcaaacctctccgtcaaccaaagtcatcgccgagattgtcgtacgtttaaaattacactctaaccccacacacactaactatttacaattttaccataataatcttcttaatttacaattctgccatcgtcttcttcttcagggagggattttgttaggaccatcggctttaggtagaaacatggcgtacatggaccgtatatttccgaaatgnnnnnnnnnnnnnnnnnnnnnngtcgcgagcataggacttctcttcttcctcttactcgtcggtctagaactcgatttatcatcgatccgacgaagcggcaaacgcgctttcggaatcgcagtcgctggaattacactaccgtttatcgccggcgtcggagtcgcgtttgtgatccgtaacactctctacaccgccgcggataaaccaggttacgccgagtttctcgttttatgggagtcgcactctcgatcacagcttttccggtacttgcgcgtattttagcagagctcaagcttttaacgactcagataggagaaaccgcgatggctgcagccgctttt

SEQ ID NO: 25550 - DNA, 2171 bp, Arabidopsis thaliana landsberg
  unsure (1)..(2171): unsure at all n locations
acccgatacatcatagacgataacaattccaatatgagattggagatcgatataaattaagataaatatttaccctctgcaacaagcgttggtggagnnnnnnnnnnnnnnnnnacggcaataggttccaggccattgaagagatagagcgaaataatcgaactccctctgagatcgattgagttcgatgacgtctccggcaaatgctccggcgatacacgcaacgagaaggagaagacataaacgtgacgccattgactttaattcgattgaaaccgtttttagctccgaattcagatcgggtcactgtatacattatgtggagggaagttaagggtattttagtctttccacgctaacgaatattcctctatgccttggatttggagaaaccccaatggatatttgttgcttctaatttttaaaacctttttggattatcaatggtcatgttaaaaaattttatctgcattatacatgctattttcaagtttttttataatgactactattgaattttgaatgttacttcacaaaaaaaaagctttataattaatgaatattcaaaagtatctcacataaaatgagaataattttttttataaattacaaaacaaaaaaagagacaaaacagcaaacgaccctaacaagatatacagcgttttgattaaatgattattcaaaagccattaagaattacgaaagcgatttcaaagttgaagaaaggacacaaaaaaaaaaaaaaaaagttgcacatataatatctcattttcacatcactatctctggcttcaagatgtttgatttgatctccttgtgtggcaaaacaactcctccattgctatagatctcatcgctcacatgaacatcctcaccgaggatcgtcatgttctcgatcctggcccattgaccaaccgttgagtgccacccgatgatactgctcgagatacacgcatgcttcttgatgcggactccacgcatgaccgtgcatcgggagagtctgactcctgactcaacaatgcagcctggaccaatggcaacgtctggtccaatcaaacatccttccccaattgtagcggtttcgtcaacaagaacattcccaactatgtgtggcccactggttaatttggcaggagatttcttcctaagggagtctaagtagagtctcaaacccgttatgtagtcacggggttgcccaatgtccatccaaaaccctggtagcaccatagcatagagcccttgcgctgctgcaatcttagggaaagtctctttttcgattgaagtccttctcagctcaatcctgtcaagaacagatgggctcaagaggtatatcccagcgttgatcttgttccccacaaaatgtttcggtttctcgacaaaactttcaactctcgctgtaccttcctctgtaaccaccacaccatacttagaaggatcatcaacctgttaatatcagaaaatgctattaacagatgaaagataaacttcacaaaatgcagaaaatgctcctgtttgactacctcggtcaccatgattgatgcttcagcacggttagtcttgtgaaactcgatcatctcaagcaatgggtattcacagataacatcgctgtttagtacaaaaaagggttggcctgattcatcgaccagcttatcccgagccagcgcgagaggccctgctgttccaagcggttcagtttcttgggaaaatgtaatcttaatctctagcttcttctcatattctttcacaaagttcaacatgacctgggtaataccaaacacacaaggagaaggaggatgacacggaagaatttcaattgttatcgtatcgttattaaggacaatgaatgtatgtacctctggttgttggtgattgatagctaatacaacttcagtcactccagcaccttttagagcttcaatctgcgaatgcatcataatgagaacaaaagaaactgtgaaaacttgagcaaatacaaaagaagaagaagaagctaacctacctgatgcaaaatcatgggtttgtttccaaaatcaacaagtggtttaggcatgctcaaggtaagtggcctcaatctggttccgaatcctccaactagaataagagccttcaattctgcataacatattaacccgatgatctactgtcatctatgggagaatcaacaagaattt

SEQ ID NO: 25551 - DNA, 1003 bp, Arabidopsis thaliana landsberg
tataatggaccaggcccaataaagctttttcgtcggcctaagtaaatattatgccagctttttagttaataagcctacgtgatgattttatttaaatttcaacggtgctgatcagttatagaaaaacgagtaaggcccttttacggcccaatatacacagctgtcttttcgtcttcccaagttccccactaaccagactccaacatggtgaccggagaagaatgtctcgatttcaaattttcttaaggaaaagtttcaaaatttaaggcggcagtttcgcgaaatcaatgggcttttctttttctattttcattatggaaaatttcgcgctaactcacttctagggtttgtaaaattcatcttccttatttctacgttttagccaattgatgcttcgctttcatattcttacttacatttctctttctatggtatgtctgatagcgattttgtatcagtgatgttgaatctaagtgtatgacattgctagtttttgattgattgttgaaatctctaggcttgtctttagtaattgatcgatttgagggttttaaggagaaaatggtttagggtttattgattctgtatttttgtgtaacgcagctcttatggatgaccatggtggttctgatttgagcctcgaggatctcatggatgagtattcttctcgacccgcacaaatagctgaatggttatggtgtattgaatatgtagccaaatttgtcaaggatctaagctgcttactcggtaactcccgaaactcctcttacggtttttgtgtattttgagagcaagtgttaatatgaagttccttgtttcagatttgatgaacattggttatcagtactctgatgactatgggaagaggattaatgaagtcctgtctcttagagtcttggagttcatgtttgatccaagcatgagcgatgctaacggtgttggtgttgcttctgctttagaggaaaaagtggagtttgatttatctttgagtaacgctgatgtt

SEQ ID NO: 25552 - DNA, 711 bp, Arabidopsis thaliana landsberg
tgggtggtgactaattaatcagatgcggggcttgaccatacactgtttctcgatggaataaccgccttaccacctcatgatttcctgtgcggagatgcacctcaatgtggtggacctgcagggacaccggtcacttccagtgccgtaatgccttcacttccattgactataaactggctaagagactgcgtacgccgaaacccttcactgaaactagaggtaaggcaaagctatattcattatccacttccaaagacaagaatgaaagtctgatttttgttttcagacattctggaatagaacagaacattaacctcttcggtaccggcttatgtttggtttctaatgatgctttgtgcaacaggttctggtcacaggatcgctacatcttgttggagatgtgctcaggttgctaaagagatgattttatttttcaccaacaaatcttcaaaaagactccttaagagtaatcttacagagcttcaattgttctttacttcactgtttttttctcatagttactatttgattctttggtccattttatctaacatgagaagtgagaaccctccacttaagctgtatttttctgctaaattttaatttatatttcctctcatttctcatcatatcccaaattacattttcttttctgtcaaatatgaaagaatcgtatgagctggacactggaaaaaaagataaaatatatga

SEQ ID NO: 25553 - DNA, 1939 bp, Arabidopsis thaliana landsberg
  unsure (1)..(1939): unsure at all n locations
tttattcaaaatataagtaatcttatcacctttcatttgctttataaccaaaatagatttgacatatgaatatattttaaataattaaaatttcataatcaattttaaaaaaaaaatagatgtaataatctaaaaaagtataagtcctagaggttctggaccatttccaacacattttcttattgagatagtagatgctaaaattggtaagtcagtggcccataagtcaaggagaataaacttttgttcagccgattagtactcctaaacccatttaatattttcacattaatttatttatttgtacaaatttttattttaaaaacagtctttgtcctcttatcttcttccccattttgtttcaaaattagggcttccagtttcgcagtactcaccttcttaggtatcaaaaatcttctgaatttgataattcagattgaaatttagtgccttccgagctaggattcatgattttatattggtttgatgtatctccggtgatggtttccttagcttcggaccttcggtctttccgattaattgcttccttgtctttgaattagctgagtggcgtttgattgaagttttactttcctttggggcctttttttatgtcttgagttagagaagtgttattttctttttgtatagtttcttacaggttatgatcaaaatttgtgttttttttgtccctttttaactttgtagtttgaaaatgcctcagtatgatgatagctatatacaatacaaaaaacatgtgcatacactctataactgcatacctttgattgtattgattttagcaaggcgaatcaagcaaatcacccgaccctctcattacatgctgcttggattgtccacctgtttagaaatgtttgctgtcatcttggctcgtgatggaaagatttgcagtcatttttttaaatgagtaggaaaggtataaatgatgtttgctagcttagtgagtcttgaagagggtggtgttagacatcctatatttataggaaaagagttcggctagggttataacctattagataaaaaagaatatgcttacgaataagtcttttgagtatatattatagtatattcctcgattgagagctaatgaatattcaccctgtttatggctttggttgtttttggtaactgaatgatcacataatttgaaatcaccgtaattattgggatatgattgttttgatagttttgaattctaataatcgaatttaatggttattgattcaatctttttaaatgattaaggaattttaaaggagtatgatagcgacatatggtgagtaaatcagcaacaaatttgactttctgacaatagtcgcgaatcatcatatctccgatctccatggtccgtagctcgttgtcaagctccacgagcttcctattgtttcgaaattggttctccacgtgaagccagatgtcacgagcagagccgcaagttttgaacacggagcgaaacaggggctgcgcaagggttccgtagatccagagtttgacgagaccgtctcgcttttgccacgccatgtcgtcctcaccggtgggaagaaggttgccctctatattaccagagacgtcaaacgtcatacagtgagtttggaacaactctctctaggcatcgtaattgtggtcttcaagatctagagtgagcgggatgtgatgtttgatgtttgtcacactaaaacatcgttcgttgagaatcttagcagcagccatgagaggatgaagcagagaatttagaagaagaaaagaagatgaagcagatcggatcagaggctgagcttgtacatgaaaaaagggttccacttgaaatatctaaattaaagaaaggtgctcttattgaaaatgatctatttatattgaatctcatataaatataaactatgcaaacattangcttgtacatgcatatgggtttcgattg

SEQ ID NO: 25554 - DNA, 919 bp, Arabidopsis thaliana landsberg
ggggacctgtgatggatgggttagaggagatccaggatgtgggaaccatggacttttttacatctatttgactcttgaacgtgcttgtgagagagggtatgaataacacttgtcccaccttttgtaaatgattacggtcaccggtggagaagctgtgcttatagagtgcacttctatgaccggaatgctcagcaagaagaagaaagatgaagatgatgaagacgccgaatatcaagagagcatacggaggtctgttaggtcttcagagaatctggactctgattctgactgatcaagcagttgacatcaaagatctgccattgctgctagtctctgttttccctttttgctcgtttgttatatgattattagaaaagaaaattgcgatatgaaatccaaacggtcaaagcaacattacattgtatcaaggtatatgtaatacaccaacttattgtcactgtttaataaacattgatctagttgcttaaaacgtttcatcaggttctgtgcaatggtgttttcatccacactccgcctctaaagccaacatcttcaatcgcgaaagactctagctctggacaccagtttgcggtcacggtcctcaggtacggcattgactgttgcagcacttcccagtccatgtctaggtccgacaatgaacttaacattaaaccttcaattctccagtgagtattctcgtttccccagaatggttcctgcattttcaccaaattacctgaacatattgacatgtacctcaacatcggaagcttgtgaggactcaaccacgatggactcgactttccaggatagaattgtagagaaagctcatggagctggtgtggaggagtaagggcgtctattttggttatgagatcatcgccgtagctatcatagcagttgatcgaaatgggacata

SEQ ID NO: 25555 - DNA, 1029 bp, Arabidopsis thaliana landsberg
tacgtgtatataagatgattgaaaaccacaaaaagaaaatgattaaccatttcgtagttctcctgtgaggaagattgtagattgaacgctgcaaagttgcaaaagcgtttttaccaaatggtgaacagcttcttcgctgtatataacatctgagcccaatactacaagtacatagcaaataaaaggtgcgagaatggtatgtacaaggcaaaaggagaaaaaatgaaaccgagatgattaccgtaatcagggaatggttcgatcaaatctggatcagggtcatctccccaaacaagttcctgcacaatagcagatccacgcgtgttcccacggtgcaaattggtttggatgttcttcttgagtagcctcagtctatctggaagatcagtgaggacagcattgcctcccaaaagtgctgctatacaactgaaagaagaaactaactaaatgttttacacgttaatagtaattctcagaagagaaatatcagcggtttttgctcacccaactaagccacagccagaacccaactcgacgatttttttgccttaagagaaagaaccttagagtcgacagaatgttctaagaacttccctagcaccgctccactgtcccacatcactgacccggttactccaggcgtgttcttcccagtacaaaaacaaacaaccatcagatagttctaacacgcttcatgttcaacccaagaagaatcaaagtttatcactttcttcaatgttaagctaaatccacttaacaaaagttgaatgtatcagtaaacatgttctaacaacatcccaatgtaggtttgatgatagccgcaagacacatatacacaaactcgttaaggatccgaaagacgcaaacttgattgcaataaaccctaaaagcgagaaatttgacactgaaacagagaagctaaggagttaccaatgaacatggcgactggagaatagagagtgagtggccacaagcgtcgagacgcagctcaagagaagattgagcaacgagtgtgtttggagcaaaaga

SEQ ID NO: 25556 - DNA, 1074 bp, Arabidopsis thaliana landsberg
cagcatatacagatcgtgtggtggaggaagttgaaaattcttatctcgttcatgatgttaaagagatggcacacatagttgacgacaggatgaacaagttctaccaggtaatgacacaatctgcttgcttggataactgataactaagctttcttgtttagttggaaactgatttgtttcatgcattggttaggcacaaggagcttatgagcaataccaaaacaacatggcacagatggaagatggtaatcacgacatggagagtgattcagtagtagatggtgataaatctgaaaaaaatatgcagcagctaaaccaatctccagacatagacggtgaattatcgaaggaggtggttggaatggaggtggacaataatggatttagcagtgagaatggaaaggctgatgagaagaattaggacaaaacaaactgggaatttcaaagttatcctttcgggagggtgataagtgagttgatgtttgaaacatggattttttttgctactgtaagataattttactgcatttgagtaaattctggtaagtgatacatgacatgaggaaaaaaatagcattgtctgaccttcctcaccgactttttgtaacttctatttgagtattcaagcttgtttatccttcttctttggtatctgatttcaaagtaatatgagacaatattatccatgaaagtagtaatgttaagtaacttgaaaggaagtcgagacagagctgggattcactccacacataggtctgtcttaaatcctccaaaacaggcttgagccagtcagagaggatagtcgttacacaaaagggtataccagtcttttacattcgcttagccgtttcacttcaaatacaagaataaagcaaagcagaggtgatgatcatctgtgtgagccggattttactcgtgtcttttttttttttttaacgaattttgaaaacaaaattaaacatagatttgctttgattcaaaaatgcaagaatcaagagaaatttgattattttttaaacaattcaaacctggagttggaatacaatgtattgattgattatacaattcacaagc

SEQ ID NO: 25557 - DNA, 2990 bp, Arabidopsis thaliana landsberg
tgcttcatatgaatgctgacgcggcgtcgtttagtatatccctgtatatattcgtaatttcttactaatataccaaaaaatatatatatgcaatgagactttaaatttatagcaaatcataggagccaaccaaattgttcaatatgtaccatgaaacattctttatatatagaccttatgattcagatcttatgtataagttatggagtaaaagtcggaaaagtctcttcatatcgtaatcattatcgaacgaaattcaactgattatgtaaactattgcctgccaacaataagaaaatatttaacggttaaatacgtcaaagtcagaactcagaatttcatggatagataacattataacacatagtcgtttacacgtattatatgatgtgttaccctcttttggaggtaagatcatgtgtgtcatttagatgaagttatattggatgatgctactacttgttactttttagtcatttgtagagtatatatgcaggcagcttgaccatgccaattttctgactcacaatattactaaacatatatgataaatcaaaaatattctcttattataaaaataaaaatatgatagtttcaaacctagcttattggataacaaataaaaaataaaaaaatatataaaacgtcttgataaatatcctaatgacaaatagtttaggactaattaaaaaggaacgactccttctaaagcttacctcttctctaatcttcatcctaatcctatcggctttggtaatttacataacattccattcagaagtcctaacaacacacgcttatgatgtcttctccatctaattcttattcggactaagtatttaagtcctactccgactattaattctataaccattttttgttgtttatccttaattcttactccaaacatcgaggggaaaaaagcaaaactcaatctgtaaaaaacgaaaaacaggaacagaaaaaaactgggttcttaccaaatattgccgtcggcgccggagaatgagagggaggaggagtatgtgtctttgaagaatctgattccgtcccgctatccagttgggactcaaacacctcagtttgagcataagcttaagtcttctaaacggcgttatgtcaaagttaaagagcctctatttgatccggagacttccgcccgtatatcttggcgcgaagtatccgttgatgacgaccaagaacaagaacacgatcgtgggtgtttctttttattgaagaaaagcattcgaagaacggtcgatatgttgtttggtcctctttttggatcagctaagttcgacgagtttcgttaatcgttattgtgcatgtgataatcatgattgaaagagttttctttttgtttgggagatagagattggaacataagataattatggctttcttgttagggacgaaattgaattgcgacactatttaaaattttatcatatagtttctatacgagtttgttaattttgttggggacgtctatgatttctgtgttgaacccattcttaatgcaagtccaaaccggactaacattttgacatttgtttcagtgtgtccttttgagttttgtctctcattacaaaattttggaaactcaagtaatgaatgtgttagcattgtgacattttgatcttattataatgttatcgaataagtattggctatgcctatattatttttatcctttttaggaaagccattcaaacactaataatctcaataataatatataacctcatcgtgttaattgttaaaaaaacataatcataataatgcaccaactaagcaacacgatcatcactaagaaacagaaaaatggagcatgactaaaaccaatttgaaaactccctaaacatataaaatcaatcagacaaccaaaaaatgaccaagctgtcatctcatcatctccatcgtgtatttctttaacgttttcatttcaatttactccgattagtaaaagtagtttttataaatggttccacatagacaagagtcctccttactcaatcagcaaaaagctatagagcaaaagtggaataattggagaaatgttgaaacaatgttttcttccattatacctagtgtagcaaattgtgctactagaagctacgttattcgttttacatacatgaatctgttaaagtaaatttcatcacatagacacagctcatggtggttacacggtggaagagagagtatgatggtgacagaaaacagcagagtatgtatgttgaaactctgaatcttcctggtggttagtgaatggaggagagagtatggtatgatggtgacagaaaacaacaaaggctatatccaaaaatggataaagaaactcttaagcgcgttggggaacttacgttggaagaagttgataataaaggaaaaagcagagcacagtggaatcaatctctcggctataaaaacagagcataggggttacaacacagaatcacaacaagcaaaacagaaagcaatttcaagcaattcgtcaagaaccgttgttaccttctcaaaagcgttgacaccacattgtattttctatagtgactctagactctagctagcacttctggaatagtataaaagtgattaagaaatgaacgataacattgaaatcaagaaaaagcaagaacattaattatggatattaatcaacaaaaaaacaagaacgtagaagtttagaaaagacaagaacgtatagaaattaagaaaaagcagacgcacttacatttatcataaccattgaaatcaagaaaagtcaaaactcctagagaaattaagcagactagtccgtgttttagtttcacatgtccatatatggcgaaagtgatcaagtttttggtattaatatcatgcaaatctttaacttgtgacacacgaaatctctgttctcttgtttgttgggtatgctaagtcttcatgattacacatgtacacataaataatcgttatacaagaaattttaacagatcacatagcta

SEQ ID NO: 25558 - DNA, 902 bp, Arabidopsis thaliana landsberg
ctatacatgttgtgggctatggaatatttcaatgaaaggatattcatttttctggcgagttatgcagaatccgggatacttgggacactcaacctgaaacaatccaaacacaacagtcacttcatggtttaccagctattttctttgtattcttttatacagctttacatcgactcacacgcataaattttatgttgggatagaactcagcagcagcttcctcaagcatccggtcaagatgttgtgtgtagttactcctgttttatagaagaagacgcacgtgattgaatatagtgtagtttgaaaggttttgggaaatgctaagttaccttatggtgaatgcgacaaccacaggatagccctggtgaaggagttggacaaactctctttctgatgtaaaatggagaacccgcgatggcccgagatccttagggtaaccgctgtaataccttcattttaacagaaagatcaacccattatcatgattggttttctacacagttatagaattaacgaaacgaactcattacttgcaagtggagcgaagctggagaagcattctatcgagaaatgttgaatctcccatctgagcatataccaaatgaatcagattcaagagaataccattgcttattaggtgaaaacagacaaaatactcaagaaggtaacttatcaattcttaatcactaataagagattttttgcattataagtcgatgtccaccagttaccaaagccaatgcaaagatgtaactcatcaatataagcttaaattgttctttcaggcagttcatcgaacaacatgagtgcagtcataataaacatcctctgctccccccaccagataagttaaaagcttaaaagatgaaccatgaacgtattcaaacttcaaatgaaacgca

SEQ ID NO: 25559 - DNA, 2752 bp, Arabidopsis thaliana landsberg
tctacatgtcgcagtatatctctatgcttcaagaaacactcaaatctttgagagttgtgtgtggagtggatggtacaggtgatggagttggctcaaagaaagatgcaagtgcagagaaaagggagagctctcgcaagatggatttgacttcaaatgaggaatggtccattgttcaaggagcacttcaaattcttactgtagctgattgtctcacgagcaggtcttctgtctttgaagcctctttgagagcaactctagctagactaaactccagcttgtctatttcattatttggcacaaatttggatcacaacctatcacatttgaaaagtgaacaaactgctggagatttgtctatggctggacgagcttccatggatgtggcagctattcggttggttgatgttccggagaaggctcacaaactattaaacctgttggagcaggtagtgaaaacctgtaggcttgatttacaaagtttctgaattaactatttgatatttcatgcgtatcgattcccttttccctttgattttttgcagtccaaagatccacgattccacgcactgcctttggcgtctcagagagttgctgcatttgccgacacagtcaatgaacttgtctatgacgtccttatatcaaaagtcaggcaacgtctaggggaagtatctcgcctaccaatctggtcttccgtcgaggaacaaactgcttttcctctaccaaatttcagctcatacccgcagtcttatgttacaagtgttggagaatatctccttactttgccgcagcagcttgagcctctagctgaaggcatctcaaccaacggcgattcaaacaacgaggatgcacaattctttgcaaccgaatggatgttcaaggtaagtctaatttaagcttttgtcaaaccgaatcgcaataagctaagaccttaaccactaagtgttttttttttaataaaacaacaggtagcagaaggagcaaccgctctgtacatggaccaattgagaggaatccaatacatttcagaccgaggagcacaacaactctctgtagatattgagtacttgagcaatgtgctttcggctctgtccatgccaattccgccagttcttgcaacttttcagacgtgtttggctacaccgagaggtgagctcaaagatgtgatgaaatcagaagctggtaatgaactcgactgccctacagctaaatctgtttgtaagatgcgtcgtatcagtttcgattagtctcaaatctacttgggtttcgataagaacttgctaacaaatcggctcgtccattgtcatattgtattacagcattgtctaatgttttagttacgtagttttttcgtgttttttattgtttagaaaatagtttgttacttaaataaaatgtactcgtgacaagccgttttagttaagaccaaatcatagatgaaatggcttccactaacattgcgtgagaggaagaggcaaaactggttccttggtccgaatcttctaacaatgtgtagctgtcataacaaagtcaagaaagacaaaaaaaaaaagatcggatagatggaggaagaactcaagaacttgatcaaggtttcggtttctgtaataatctccatatcttactgttactacgtaccaaccagaatcaaacctggtatctttagatttctctctgttcttccaatttgtgctctgtttcgtgttcttcctctgtttttcgcctctgttcacctctctggttacacagcgcttttcatctcatggctcgccaatttcaaactcatacttttctccttcgatcaaggcccactttttccacttccctcaaatctcacccgattcatctgcttcgcttgcttccccatcaagcttcaacaaaaccctaagcgccgagactatttcttccaatgggaataccccattgaagttttgtttagtaaccaattcgtgactaaagttgtaatcttgagtgtagtgttacatatgtataatcacatacaacatatatatcccattgtgctatttgttctctatccactccatctatacttggtacttgagattctcttaaagctcttcaacgctttcttctctatagctcttgattgcgaactcgagccacagctgaatgaaccatacttggcctattctcttcgagacttctggggtcactggtggacactcatgctcccgacgatcctccttccagacgtctacgctaggatgccgcgaatcaccgaagggaaaatgaactccgagagtgctctgtacttgggagtttttgtcatattccttgtctccggtgcacttcacgagtttctcttcttctatataactcgtgagccgcctactggagaggttactctgttcttcgtgttacatggggtttgcattgtggcgtacgacgccaggttgaagaagaagattgcgcggtggatagggtttgaattttacccgtgtttgatgttacaagtgatggttatggggtttgtcgttgtgactgctggttggttgtttttccctcctcttgtcaggaccggcaagattcagagattcgctaacgaagccttgctcttcattggtttcgtgcgcaacttgtttaacgaatccttgttcttcatgcgtaagttttttatcgaagccttgttcttcactggtttcgtcatgcgcaagttgtttaacgaaaccttgtttttcattggtttcgtcaagctcaagttgtttaacgaatcctccttgttcttcatcatgcg

SEQ ID NO: 25560 - DNA, 1047 bp, Arabidopsis thaliana landsberg
  unsure (1)..(1047): unsure at all n locations
acccttaacatgttcggcccttctactccttcagcatccattctctctaaatccttctcgaagttatatgcatttttcttcattacgtccaagcttctggtgaagctttgccagctgattaagtgctattccttccgtgtcagtacagttcacagctcttttgtaacacttgatggcctcttcaagcatgtaaagctgttcggtttgataacatttagccatggctatccacaaccgagaatcatttggaagaaagaatatggatttgcgaaaatagtgaagtgcatagaaaggcatccccatcatctcatatgcttgtcctaacccataccaagctcgataatcagtagggtttatatcaacagctcgtcgannnnnnnnnnnnnnnnnnnnnnnnnncttcatctcaacatattcatggcccataagagtccacgcagataaatacttcttgttcagtttcaaagctctccggaaatacataactgctttctcatgctggccttttaaactgtagtagttgccaatgatgcagcaagactcaggtctgtacttatcagtcaaaaacaccttatgtgcaaggtaactcagcgcagcacatgcttcttttgcatacagaacattagaatacaaatccatatcttctacccgatatggatcgtttctcagaagttcttcaaacatgatttcaacctggtcgaattccctaagactatactgagcttttgcagtttgagcttggatgtaattgctaaaactgaaaataccttgcaaatactcgtacttcgccaaagactcggtgtgcattctgagttcttgataagcattgccaagaaaaaaatctttcatccagtgattgtttaagttaaggctattcaagatttcgatcgaagtacacagagactgcagctctgaccaggcactccagttccaaggataactgttgacagactccacaaggctggcacgtgcaagactttcatttcccttttctttaagaaccacaccatacaagtataatccaaaagagtcaattgctcctgtcct

SEQ ID NO: 25561 - DNA, 1202 bp, Arabidopsis thaliana landsberg
taaccttttaacttttacgggtgaaatgtttaaattaaaataaatataatttttaacaacaaaaacatacaaatttaaagatcatgcaatgtttttttttttttttacatacatccaatgaccatctaagtgcaaaatttatattattataattaaatattaattttttaaacataactaataagaaaaacttttataaaaaaaaaaaactaataagaaaaaccataaataaagtactacacaattattaaaaaacaaataaatatcatagtgatatgtttattattacttgcatttggttcatcaccaaaaactacatcaagtaatatgacaaactacaaaaaaattgtgttttgaattcgtagatcttcaagatcgacaatatttttacaatacttatgttcatattttgtctttcttcagtttgaattgatactatgattttgatgatttttttatatagatatatatgatctaactacttgtcgcttatgtgattttcttttttcttgtgactagccgctatcgtttgcaaccgcaaacatttctagaaatgagattttgaaatttaacgatattgagtagtgcaaaataatttaaagtaaatttttaaatatgtttcaaatgctaacaatttcaatcgttcacaagtttgcgagttatagcggaaaaaccaatcaaaattcatgatatattatagcaacttcacataattcgtctattcaattaaattcgatcacctatttgtatataattttggttgattcagatttaccttttttaataatttcggttggttcagattttagttggttataatttaaaaaacttcatattttaagaaactttttgtatatgtttaacaagaaatgatatattttagtaatttcagttagttcgattaatcaaaaattaggctgcgtaaatccgatttatctaattggtttatatggtataggaatttctccaccggttaaattatttttgaaacttaattaaattttggtttagttcagttactgattagtttttttttttaataataaagtttatgtcgacaattgataaacaacacagcaacacactgcactgcaccgtcatcaacagcagatatttttatattccttttacagagccgaaactctcccccaagtcattgagtcatgactatttcacatttccaaccgcctcttgcgtgcttt

SEQ ID NO: 25562 - DNA, 850 bp, Arabidopsis thaliana landsberg
ttttaaagagaagaggcctacgacgaggaacaagactgaatctttcatcttcttcataatcaccatcaacgtcttttcacttctccggcgacttcttcctctatgtgtcttcgttgaaccaaaccaaagtcaagacacgaaaatggtttcatagatgtagtggagtcgtatcggtatctccaactccaatagtttaatttgataaaataataaatatgcttatgaatcatcacgttatcatatatactatcctatatactatcgttttcattaattacaatatttactcagtaatactactataagtagttaattagaccatcggccatttttaaacaaaaagaaaatttattataaatctgtcccatttagtttcacatacgaattgctcttgagttttaagcatttatttagattagatttagttaacgaacgtttttcacaaaatgtgactgactacatataaaaacgtttgagatttggtgatccaataatttttcagttgcaggtcaatgtttaaagttaataagtttaccacacactaatacaacacaatctaaacaaatagtgaaataaataaagagttcaacggctatagaagaagaagcctaagaaagtaaaaacgatagcaaaaacgatggctgtcatgcctaaacctaaaccagatttaggcttggtcaatggggtggaaggtctccacacagtgtctccaggaacatcctcgaggaagattcctttaaatgccaacagctctcgaatccgatcgcttctcctgaaatctttgctcttccgggccatattcctttcttcaatcctctgcaagacctcttcttctcccattcctgctctt

SEQ ID NO: 25563 - DNA, 1348 bp, Arabidopsis thaliana landsberg
tacatcagaagctgtttaattttctagggattaaaaacgacgtcgtcggaaacgggagagaagccgtcgatgtttattgttccggtggaaactatgatcttattcttatggacatggacatgcccatcatgaacggtattcaggtaactaaaaatttagattttactcattaacttcttcgttactttggacactaaaatttggttactacctacctagaagaagaatttctatggtgcaatatttttttcttttaacttttcaaaacatttttagaaaaaaagattaaaaaatcttaggcctttcaacaaaaaaaaaaagattaaaaagattgtctttatgtgaagttcgttttcatcttatttttatttgagaattcttccatcttaaactatttgtagccttgtatgtagtgaaaaaaattcactaaaggtataatttgatttgtcaaaatattttattagagtttatagaccctaatatatattacgtatatttttaagaaataaatatgctaaaaaccggtcctggattgttattttcagaacctatgaaacataaatagctgaagaaataaaagtttttatgtggcctatggaaactttatttttaaagagattattggttatatcaaaataattacattatggatccttttcttctcttttgattgaatattgaaatataggcaacaaagagactaagggagatgggaatagagagcaagatagcaggagtaacaacacgagctaacgaaggagagaagaaagagtttatggaagctggccttaatgattttcaagagaaacctcttaccatctctaagcttctctctattcttcataaacttaatttctacgtccaaacctaattcattctcaatgatttgttaaaattatttcactagtatgttgctataacatgtctttgtatttttatactttaaattgtaatggccaatacatactcatttcttgagattttagattattatgattcagaattaggtctggttcatgagtatttatcacgatatcacatttgccattttaaaaatgttaaccaatcagatgctagcgaaacgaaaaaacgcttcatggaaatcagcgatatgtgtcacactttcacgtgaaaatgtaacgtatggttaagtccgaagtaattggcttatgaaaaagtgacacttaaattataaaattatatgaaaaagtttttattggcgtttaggccaagatctggcattatccttttcgagtttttgggtatttaaaataacacgtgattgtaaaatcgatgtccttatacaattagatagatgggatattgtttacccttgggatgttggatg

SEQ ID NO: 25564 - DNA, 2721 bp, Arabidopsis thaliana landsberg
ccattgtgggagaacgagcaagcaacatcgtatatgttgggtgagtactctcataagtatcggactgttacaggaacttataatgctattctgcttggtatattctaattcattgtggatcacaaaatttccattgagtaagttaataaatagcaaagtttggtgtttcgaactccaaaagtatgctatattagcatcaaaagggtcaatcgttagcggtaaataatcgaaaggagtttcaataaaagtcggggagatctcagatactaattgccattctccactctttagcctccatacacataacttagcatctaaaccttcatcagagactatgttcatatacatgagaaatccttgactagttgtgcatgttcttatgaattcgcgatgcttttctaaatcagggaaatgagtaacccgacacttatcagaatttgtttcaaaagcgtaaaagtcgatggatataacaacttctgtatcctcactattgcgaacgagccaatgaagattttcgtttaagctaatgggatggtaaaaatcacgattgaacgaaaaagagaaaggaaaatggatagtgttgagactccacaaccgtgtctcttacgaatatatctgaaaacttattttcgttattatggatcttttttgcctttcatcaaacataacaactttgtaactcaaaacaacgccgtttttagtttgtgttactattcccaagggacatgagactttcttgagatcaccatgagaagggatctctacgcattcctgtgaaactggattagctacgtacaaggatcggttcttcacgcagatacagttttcactgatcaaaatcattccaacatcagtactgtaagaccatactttgtagttgtttctttgtgtttcaaacttcttggtaaggaaagacgagatgtagaagtggagagatcgttggagtccccaagtgttgcatccatagtgagctatgacttcttcatcacagcgagacaggatcgaccatgatgaataatgcgagttttgatgaatagatagaaacaggtcacggaaatatggagaatccaccatcgattcccattgcttgcaaacaattttgaaagttgtgaaaatctttattggtaatttgacgagtatcatcgccaatagatcctcaggtaaggaattcatattttcctatctctctgtttcaccgagattaggttttttttttctaagcgtgtgtgttagattagggttctcgggtcaatacaagtgctaccctaaacaaaggtaaaattattattgaaaacttgcaatatgtagaaagaagataaaactttaaaagtaaaatttttataaattaataatgttggaactatgatattttataattaatattggtattaacttatattaacatttataatttatgggtagacagatttgttttaattgttaagttttagaaaacaatatgagttaaaaataatttgatttaaataagcctaatgttttggatgttataaattttatactttttgggtttgaaaatttaatatttaagctgtagaaaaaacttttaagttgttgacacataatttagttaatagtgaattatcttatgcatcaactaataagtatagttcatctgtttatgcatgagggaggacattgaaaagtcacagaaaatttttaagttgttgaatcgttggtttatttccactatttcaatttggtttgctctaatgtattttctttacttctctgataatagactttgctgaatctagtgctgacattgtgtcggactttcaataggtgtatgaaacctacaagacgccgtaacaattttcttcattttttctctcttattagagcaaaccaaaatagtggaaataaaccaaacaactccttcatattgcgtaagaactaagagtgttacaaaataaaataaatacttgaaaacaagtgaagtcaaacagatataatgtctaaacaattctcaccgttttgggaattcgatgcagccattgagggagaacgaccgaacgaaaaaataaatcaaatgctatcttccgggttctttacggtgcagctatcttccaacttactcttgagcacaaacgttcaattgtgtaagcagtaagctaatagaaagcaaactttggtgcttcttgctccaaaattaaactgttttggcatgacaagggttaattcccaactgacaacactcaaatccagtattttcaataaaaggattatagtattcgccttttatagtaacggtaacgtataagactatcaatataaaaagtatgtatattcagaagtttaaaagttattaaatattttggttactgttattataaatatgttgacagtgctataagacataacatcgtttgataaataaaagctattgatgaattctaataataataccttttaaaaaataatgaaaagcatattttaatatattatatataaatttacataattataatttatgatatttaatgagattatatatctacatagaaatttaaaaacaaattgttattttatccttttcgtctcttttaaacacttcaacatgctttgtttcatatctccaaaatcttcatctttaagaacctttaataaaaatatcttcccatcgaaggcttccaccttgaaaaaaaagcaccactaaaaccaatagaagctcaatcgacccaaccattcttgaaacttact

SEQ ID NO: 25565 - DNA, 1893 bp, Arabidopsis thaliana landsberg
ggaaagagaaatgaaaagatagagaccaatgcgaaaaacaaaaatggaacaaatgcaaacaatgatttgaaattagagaggggtaaggaaatggggggctgaataaagggtaaaggcgatgaaactatcatcatgaagactatgaggtaatgctgctaatgaaagcaactcatggaagagagagaaagtggaactgaggtaaacgcatgatatatcacttgattaattagtcgtgttatgtatataagtatattagtccaccaaatatatgaatttttgtttattttgtggtttgtatatctactacatgaatcataaattttcaatcatatatatgaatatgatgggtttaatatgcgtaacctacttatcgccaattgcaatattgtccttccacttagaattagctgatagtgaatatatatatatatacacttgaaaaacatgattaggacaaaaacgggtttagttgtttaactatcataaaacgtaaaaacaaatgtcgtttaaacctatcagtgctatatataatgatttatagttacaatttagataagtgaaatgcgaaactatgtaatcctatattcaaccatattctgcttaaaatacaaaattctacatagaatctatgtaatctgtattgatgtgaaacgtttaacataaatacaacgacgagatgcaccggtttggtaagatgggttatcaaagtcatgcatgttgacaaaataaatgaattcagagatacacataagagaggatttcaaatttgcagctttatctctgtatgtattattcttcaaagcaaaatttgctttctgatttggtgaacaacctgttcttctattattaggtacttttttccttagacttatatactttcatttcttctccatcgtggggtcatgtcatatcctgtcacgtttactccatcattacttaccttttatttcaatttttggtatttctaaggacgagataatatagcacaacgcaagcataattactaaacacgacttaaaacttgatatgaaatttagagattatcattacttacctaagattcttgaagttaattggatcgaacaagtacacagtatgacttacttagcatttgttgacaacaaaaagagaaaataactttgcgtttgtattaatgggacaaaaaaatagattacttgtcaccgagtaagaatgctttttctcgattgtaatgcatatagccggcatacggattttcagtggggtcgagtgtaggcatgccggagggacccatttggaaatttagaaagattgcaaccgtatcatctgtgggtctcttctttaaattcgagattgaatggtcccaaatatatatattggtcaaattttatgattgcaaaattgcatttacttggttttcttggacggagtccctagaattgagaaataatgagttgatatttaatattttggaaaataattacacacgtatcggagttgtgatttagatataatatccaaaagtttcgcaagttttatggatcaaataacaacttttgtattcgatcatgtagtaagtttttttttgcttgttaatagtttccaactatatgtttattcaacaagactaccaattgtaagctaaccacattggtcatcatcgaactacttgtctcaaatttttaatgaaacgttatagatgttagttggtatttaaaaatagctgattttgtaaaaccataaattattcattttcatacgtagcatggaaaacgttaccaataccatatccaatatttagtatgtataattttcaaaatttcaaaccatatgactgatccatgatcgaatcctctctataattctttcctgggtacaagtagatgtttaatatctcatgttggagaatcctga

SEQ ID NO: 25566 - DNA, 985 bp, Arabidopsis thaliana landsberg
tcgatgaagaagaaaaaacatggagaagaagtcaaacataaggatccaaaacagtcacttcgcgtatatgaaagtgcttactctcataagcccaaatggattgttccttttttcaaatttctggcccatattgtgcctaattctgtaatagcccctacatataattgttggttaatcttacttttacatatttcaaactgctatttagtctatagatgagtttagattttgaagcatattagggtgtcacacccctggcatctatattcggttttaggctcagttctttccaagtgctagactgcgactactataatacatgtatcaaatctcttctattctgtgacccaagttcttgagaaataagatacttatatttaatgttacatagattaggattaactacaatttgcatagggtctaataaaacatatgacttgagtctgtatgttattcaaatggttggatagtaaaatcctagtatcaggatctcctcctccttccatcaccattagtttcttagaagctacggacatcattatcagtcgtgagagttaggccatagtggtcatcatcagaatatcatctagtaactgtgtttcagctttaggaggttcaattaaaaggaaaaagaaaaattgtcattcatagagttaattcgatcattcacccaaaattagttggaaacaagctttcacaaaatatttgatattgacaatatactgcttcacgaatgatatgtgccccaaacgatatctaaatttatttttgatatatatatatttttaatttacttgagatgtggtaggatttcagtcaattgtatatattgccattgttctttttctacgaggtgtcaatttcaagatcagttctttgagtttaacaaaatggctaatatatagttagtaagattgttaaagaaaatataatatgatttattctaatttagaataataataaaaatatatatataaagtattga

SEQ ID NO: 25567 - DNA, 2218 bp, Arabidopsis thaliana landsberg
ctagcaacgctcatttgagtatggttcaggaagccgatcactgatttaccatgtcgggtgaacatttcaccctcatgatttggggcatcaacaacctcgatttcagctgccattgcctttgcctcttcctctgtgtaggcaacacccaccaagtctcggtatgagatcagagacatcgaatggcaagacgcacaaacttgctgataaacttgatgaccacgacggatcctgctcataacaaatcaacagtcaataaagcagtctcaaatttctctaattttcaactttagtgttgcactttaactatgctgattgaattgtagcttgaacactcacgaagcatgatcatatgagctgagaataccctcatgtggccaagggtagttaggacactccagaccatgttcagcctcatcagcggatgcaacagtagaaaaactcaataatccggtaataccagcacccatgagagcaaatgctcttaaaccagcagacccagcatcttcattagctttcttcgaagacaaccatgacaataccggagttgcctgtggtgatagataacacagaacaacagtaagaaaacaaaaaaaatggccaaggcataagaaggtgtatgcttaacaaatcaaaagtctactttttctggaaaaaaaatcgaatatgaatcattcactcgaagcacaaatcaatttgtctaacttcttatatcccaaaatctccaacgccacaacaattcttcaaggacaatgtctcagagcaatgaacgtatagacagaaccaaaacaaatcatatgattatatctacaaacagatcctaagctaaaatctcagataacgcaaaataaatccaaagaagttgttataaggagaattctcacgactgattgggaatgaagtttccttctaagaagctgccggataactcctcctccaaccatttgatgaaacacttgtaccaataaatctcactgatacaaacagagaagattctcagccattacatatacacgaaacaatgagtaagccctagaaaactcgattctctatatagatccgaagttccaacaaataaacaaaattgaatgaagaaatggcagattcggatatgagatgtgtcgaatcgagaaaatactcacaggaaaatgaagcaacgagatcggcgattgacgaacagaggaggaggaagaagaagaagaagaagaagtagacagctaccagagaaaatggatgtctccagatgacgcgactggactgtcgacacacaacacaacaacacctttcagatttttaagtatcatgggcctaatttagtccattaaagcccatgaagggcctatccgtacagtcaacaaccaaaatggaccaaatcttgaaatttattgaagggagactttgtggaaatgatttatgtgttgttgtttttttttatagtgaagagttcattagtccagaatgttcaattacaaaaagattaacacaggctgagatcgagatcacattctggcttgtttagtaaatatgtcgatcgataaattattatggcttgcattaactcattttatagggtccaaagctaggctgctttgaatctaacatgcattattgtagttcaatatcgagaggcgcaaattcgaaaatacaacatatgtttcgtatgctctcgggatactacatcgactccacaatcccaatcttccttaaacttgaaaatgtgaaaaaattatacatagtacgggaaaatgtaaatgagaaattacatgttcgcttttgctaggtaagttcatatatttcccacaggtttgtgaatgttcatggtatgtttaatatctgttactcatcttgaatatctttgctgaatagaatatcttatacctaaaaacagaattttaattaagcaggagaaattctcatcatgactcaactcaagccgaatcattaggtttttgcaaccataagttgtggttcggaaaacgaatttggaatcatcagaaaattaatgaatgagacatcgtcctggaagcttttctacatattttcaagccacgaaacagtaactttcttaatatgttgattggtgagtcctttagtgtctcaagtggaagtagtttttcatttatgagagatgatttaatatgagtcggtttgaatgctatgcatttcctttcgtgtcttagagaaatgcctctattatgttttggctttgaggaataccctg

SEQ ID NO: 25568 - DNA, 1319 bp, Arabidopsis thaliana landsberg
gtctcccaagcggctaaggtaaacattggatccactaaaactcctgtctcctgtgcaattttctgacacatctgcacttctccttccaagaccttcccaaatctgcaagaacaaaatgaactagataattgatagatcaaaccactctaaagcttcaagcttggagtgaaaaagatcattttcagtgtatcttcaattgtgaaaagaagaatttgcatatgcacatacttcctcgggtgttgacgatctatccacttgatcatttgattcatatccaagccgctgcagaagactgagctagggaactgcctcgtaaattctgctatcaagcgatcttcatgtctcttgtaatttttgagtgtgtcagctagcatcgctgaattgatttcccatggaagcctgagaagaatgtatacgtaagctggtaaccaagatgcttaaagactcgaaaatcagataaaatgcatacacaaagagtattggtaaatcttgtgatcagagcctaaccctaaagacatagctgcaactcctaaacccacagcagttgttccagtaccagcatccactacaaatttaaccggcctcttcttcccgagtaaatgatcctgtgacaaatgctgcactaatcgaaacatacctgcgtaaacgataatcttggtcagttcttccacattgatttggttcactacctaaactgtatatccaaaatcaatctttaccaagtaatgcaagagcatctcctgagccttcattaacaatcaaaacctttctactagaagttttcatactcggaaaatcatccatttttgcaacattcatagactcaagtccctcaacaatgtctttagcccataagacagaaccatcttccccagcaacaagatccgcataagttctcagcatttcctctctattcgcatacctcgatcttggaacatactgaacatttccatacatagttgaaacaaggttataaccagtcaaaacatcaggctgttctccacgcagtagcaaatgtgatcttagacctctctcagcacaagaaacagctgcaagatatacaaataactgattcaaattgcaatcaaaagtcaataccatttcttctctaaagattcaaacttttaccaacagcagctgtatgtgcactttgacaacctccacatgtaacctatacacaagaaaaaagttctaaactttaagccatttccaaaaaaaaaccaattgagagatattgtaagtgagtgatcacattctcaccaaatcagtcactttatgatcttcaacaagaggtaacaaagcatcaagctttctagctt

SEQ ID NO: 25569 - DNA, 910 bp, Arabidopsis thaliana landsberg
cacgaaaagaagatgagtctctatgagtctctcttcccaatgctgcgagtgtgttgtaaattaagcttttctttaatccgaataatcaaattctctgccgactttttgagaatgggctctatgacgacttaacgatgcttaagattatactcaacacagaatgtcgacataaaaaagattatactcaacacataaactcaaagacattctcagctctctatacaatcaacacagaaacatccggaactagaaattgaaagtgtccaacaagaacaagtgttcatgtattgatcaagatatagagtgtcttctgcttttaggttgtttggtttgtccttgtttgaggccaaaagggttaataagcttttcgagtttttgagaaacagagtttataaatgactttctaggtaatcgaggcttagccaccgaagcagttgaaaccgaagaagaacaatccgaaccactcatgacttcaaaagctttctccttctccaactccttgaacttcattttcactttgagcaactcaagcttcaagtattggttttcccggtttagtttggagagttcattcttgtaggagctgagctcaggaggagaaagagtttcttctgccgttgctggtgctggagaatctgaattgcttaaattttcttggaaacgatcgttttgagctgcgtgagcatacacatctcgcgatagctttttacagtccattaagctacaaactttcttcttctccacttcacttatattcggatgtgtctgcaccaacaagattaaacaacattttctaagatctttaaacttttcaagatataggtcacaacattttgataatgttaaaagctctagtttattcatcaatatagttttagtgttatcaaataaatgtataccttgaggaaga

SEQ ID NO: 25570 - DNA, 1494 bp, Arabidopsis thaliana landsberg
aacgaacttgtgtgttttctagaggacaaaactgcatggagaacagatgaggaatttgctagagaaatgttggctggactaaaccctgttgttattcaacttcttaaggtgaaaaccgatgaactctctcgataacgaacattggttctcttaggttattctgctgtcttacaggttatggtacgttaacttgcaggagtttcctccaaagagtaagcttgacagtgaatcatacggtaaccagaacagtacaatcactaaaagccacatagaacacaatttggatggactcactgttgaagaggtaaaaacgacaataaacaagagcggtaatctgattccgagtcaatttgaaactaatcttgttttgctgttttaggctctggagaaggagaggttgtttatattagaccaccatgacacactgatgccatacttgggacgcgtaaacaccaccacgaccaagacttatgcaagcaggacacttctgttcttgaaagatgatgggaccttgaagccgttggtgatagagctgagcttgcctcatcctaatggagacaaatttggagcagtgagtgaagtatatacgcctggtgaaggtgtctacaacttgctatggcaagtggctaaggcttttgtcggtgtaaatgactccggaaatcatcagcttattagccactggtaatggatacttaatgcttaatctgggggaaaaaaattgatctatttacattatctgaagttaatgttttggtttttgcaggatgcaaacacacgcatcgattgaaccgtttgtgattgccacaaacagacagctgagtgttcttcacccggtctttaagctccttgaacctcacttccgtgatacgatgaatatcaatgcacttgctaggcaaatcttgatcaatggtggtggtatatttgaaatcactgtgtttccttctaaatacgccatggagatgtcatctttcatttacaaaaaccactggaccttccctgaccaagcattaccagcagaacttaaaaagaggtaatacatatttactcaaatctttcaatattctacttggcttgatgatgcaaatcagaagagaagaaaaagaggtaactataaactgttgttgcagagggatggccgttgaggatccagaagcaccacacggattacgtctgaggataaaagactatccttacgcagtggatgggcttgaggtttggtatgctattgaatcatgggtccgagactacattttcttgttctacaagacagaggaggatatccaaaccgacacagagctccaagcctggtggaaggaggtgcgcgaggaaggtcatggagacaaaaagtcagaaccatggtggcctaaaatgcaaacccgtgaagaacttgttgagtcttgcaccatcattatttgggtggcttctgctcttcatgcagctgttaacttcggacagtatccagttgctgggtacctcccaaacgctaaactaaga

SEQ ID NO: 25571 - DNA, 1219 bp, Arabidopsis thaliana landsberg
cctttacattttgacactatcgtagatagtaatcatgttcggttacttaaaccctaaaattccacatcttttgattaatgaaaagattggggaaaatcacgattgtgactgtttgcttgacctaattaaccgattcacgcctcatttttttattttggttttaagatttcgaaatttagttaaataataagttataatattatttttgaatagtctatttagatggttgattgtctaaaataatactatgtctgtaaaaaggaatatcgcattgaagcgagggtcagaaatgggtccaagtccaacggaagaagtccaagaaggaatattttctgtcaatttccttcccaagccttcttactttttgttccccatggaaaatatgaaaatgatcctcttttctgctctttgaaagtccaagacctttctatctttttgaataattatgtttgattttcgtccaaaaaaatgtttgaatatgtttaattttcctaatacaattgtttttctttttgtcaaatgaacgacttgattacaaaaacgtaaactagtaaactgttaagcatgaaatatgatagttgcatttttcactagtgattagtgagagtgagagtagtgtttgtcttgacaaagtaaaagaaaaaccttgttgatactaatacacggagctaccaaatattctatttaaaaggaaaatctctgtcttatgttgtacactgcaacttaattaaatggaattattgtcttaatcatgcgtaatacccctagcgtcactaaacataatttaaatcactataattgtgaatcctggacccacatatctgtacgaacattattcatgaagatcgcaaactttggcgttttcctctaaagaaaaatagagcttttctcgttgaaacgagagcgatcgttggggaaaatggagagtgaagataaaaagttcgtagaggaacacaagtctgagagtgaatcaaatgaagaatccatagtagctggtgttggtgcgggaagaaacgcagggaacaagagtgactcggatgaagaatccccagtcgtcggcgttggtgctggacgaaaggggaaaaacaaaaaatcctcttcttcttcttcttcatctaagaaaaacaagtcgcctgccaaagcataaacaaaggtttttgattatttctatgtttagctatgttgtagttaagtaaatgcatgtatacatatatcttcg

SEQ ID NO: 25572 - DNA, 2841 bp, Arabidopsis thaliana landsberg
atctagattaaagttaaggtcaactcttgtggcagcctggacgaagctagagcctgtaatggagccttcatgtaacaaactaatccaggcttctcggtcatgtcaatgtgttctcgaggtgtagaggatgtccatgagaaacaatgcaacaaactacctagtgctaatgtcatcatattgaggctgagttgagcggctggacacacccgtcttcccgacccaaacggaagaacccgaaagtcttgacctttaacgtccgtttcctccacaagaaacctctctggtctaaactcatctgggttactccagtttgcaggatctcgagcaatcgcctgcacgttgacataaaccgtggctcccttaggaactttgtacccacctacctgaactgattcgctggccttgtgtggaagcatcaatggtgttggagggtgaagccggagagcttctttgagtacgcattgcagaaacggcagttttgggatatctgcatcagacattaaccgtccggatccaaccacggaatcaagctcatcctgcaccttttctttcacggtcgggcatctgatcatctctgccattgcccattcaatagttatggcggttgtgtcagctcctgcagttaacatgttccagaccagtcccatcacagtctcctcggtcagctcatccttctctttcaactctaacagactctgaacaaaacacttttgatctcttcctccatatacttcatccattacagctcgtttaaaccaatttcttttccgagccatgtgcttcatgaacgccttgtcgctagtgaaccatgacgaaagacgtttaagccaaacggtgtaatcaagcatcttggttgcgccgggcaagcgagtctccctttctacaattgatctaaactctcttccatctttgggttcgaatgttttcccgataactaatcttgaaacaatgttcaaagcaacagaatctagatagttcctcaacaccactggtttctgatcatcgctcatgaagtcattgaaaatcgacttaaccatggaacttacttccatctctctcatcgacctgaaacactctatgcttttcaaagaaaagagctcgagtgtacagagttttctcattttcacataatgtgctccgcagtcagaccaaaatagatcgctgccgttctgagtcatccttgcggttctgtgtcggttacagagttggtagtctttgtctctcaacacttgtttggctaagtcagagctcgagaccacaacagctagctgtgatcctaaccacaccgatatgatggggccataagtctgtgaccactcggagaaagactgcgtccataatggtttcagttgatgaaggtttccgaccagaaatcgcgttggtggtcccggcggtatgttggatccccgacgtcgtagattttgcatgtaggcggcgattatgatagtggttaaggatatgagtaataaatccattttgcttagacaaagtgtggtaattgataaaatacaggtttgatgcttcttcatgaagtgtacttttttatacaccaaatattaaatgatttatgaattattatttttagtcacggttatggaataagctgtttagataacacgtaattttgcatgaaattgtcatgaattggttcactttttgcttttctcacactatttgcattttctaatttgattgaaaattttagttgaactttctttgttgtaagaaagacactttcatgtactacattcttttaactttttgaggtatcaatttgtgtatcttgcaaatgtatccaaagttcagagtttgacatctgttaacaaaattcatatggtaaacaagagatttattagtaggctgattggctttgagttcaatttctagtttggtttaggcgtttagcccggtttagaaattgtggtgacgcacaagctcggtttgattaaacttgatccgttattaattaataaaccaataaaccaagcttggtttagatttagaagtatactaacatcttcatttgttgccaaggacgatgatgttttgtcggaggcttttcctttttttttcatgtctgttagtcggagactacgtaaacgacagagctgcgatgattttgggtgtaagaaagaattggggtctcgccgtctcggggaatttttttgttgaattcgttcgttgttaacattgcaggtgcacaccaagcgttcgataaaatagccaagtgagcagtttcatgtttctacgggcacctactacttgtgcgacttattagtatgaagacttacatgctcccatactttgaaacttgttgtaagttaaacacaatctctgcccaatttttttttgtgtggtcttgactttggtagacaagagagtaattgatcttggtgcattatatacacttcatctcctcccatcaacactataaataaaaaccaaaagctcctaaaatttgtattatgaagttttagtctatgcgatgcttgtcatgatattgagctttcaccatgtaaatattgactcttttatttccatatataatagctacatgttattgtatgaaactatactcaaccatgtctcaaatcttgcaatgcctcttgggttttacatagctacatcttcgtgtccattatgagagtcttcatggtatatggattctgattatcttatcttatgcgtctgattggttatctattttaatctaaagggaaaggcattgctcttgcggcagctctcggcaaagctagagcctgcatggagtcctcatgttacaaagcatatcaggaatctcggttatgtcaaacctttttccaggaacaggggaacttcctg

SEQ ID NO: 25573 - DNA, 647 bp, Arabidopsis thaliana landsberg
atgaatttgggttctcgatttttcggtggaatccttagattttggggattttgagggcctttgattgaaatgactttggctttttccgacaatacagtatttgaatctgtcgtgttctgtcgaaattttggatcattccagatcttgtcgcattatgagtagatcaaattaacaatatgaaacttaagaacttaaaagcccaccattgaatctcaatccagaagcaagaaaaatcttagggtttacataaatattaggtggtggtgttaacgatgaagtacttataatcttgacaatcgtcttcttacttgctacacaagcataacaatgatttgaaatcacaactttttgttatgcagagatcgcttaagattctctcctacttcgtgtctccttgtttcttagcgatgagctcttataagatatggtggtatgcttcaggagcttctcagattcctttccttggtaatgttatcttgagtgatacagttgcttgtttgatggagctctgctcgtggttgtaccgtactaccgtgatctttctggtttgtgtcctcttccgtctcatctgccatctccagattcttaggctgcaagactttgcccaggttttccagatggattcagatgttggttctatcttgtct

SEQ ID NO: 25574 - DNA, 968 bp, Arabidopsis thaliana landsberg
ttttttttgtcacaaatcccataaaatgtaattgcaaaattctatctgaatatcttcaaatatgataatcagttttagttcaaattctggtagatcagtgatagatgctaatttttttatgtaactacaagttttatagtcacttttagagtgatacaaaattcattaagttctttatattctctgataaaaacaactaaacataactctcaagcctgaaggtatgctacctacttaattgagtttaatattcctacgagattacggaagaattgtccacactgaagtgacacgtcatcgttagagttacctttttcctcgtatataatatacacatcgttataatcgaaacacaccatcacctcaattctctcttcgttaacattacaaatttacaatctcttcatctttcttcattagatcacaaaacttcactataacctaacatggcaacgagtcatcctgatccaaccacctctcgccacgtggcagtaatcggagccggagccgctggactcgtagctgctcgtgagctacgtcgtgaaggccactcagtagtcgtcttagagcgcgggagccaaatcggaggcgtgtgggcttacacctctcaagtcgaaccagacccgcttagcctcgacccgacccgacccgtcgtccactcaagcctctacagatccctacgtaccaacatccctcgagaatgcatgggcttcaccgacttcccttttgcgacccgaccacacgacgggtcaagggatccgagaagacatccggctcatactgaggttcttgcttacctgcgagactttgctaaagaattcgatatcgaggaaatggttaggttcgagacggaggttgttaaggcggacgaggtggcggcagagggggaggagagagggaagtggagggttgaatcgagaagctccgatggtgttgtcgacgagatatacgacgccgttgtggtttgt

SEQ ID NO: 25575 - DNA, 1082 bp, Arabidopsis thaliana landsberg
cgtggtgaatggttcgataccgatgaatgactcattcgcttgttgagaaaaatcacaagaaaattaagttgtttcctcctgaaaatagatctccgtattccgataaaaccaaatacagagagcacgggactggtcgaaactgacacatggctggtgacaaatagaccgggacatcgaacctaatatctcaaaacctcaatctcaatctagctatagaagctactcaagagaagtaaaagaaagtacctttctatgagacaagaccatgactcgatttaacagcggaacctgatctaagaacctatctcaacttttgtgttaagatggagttacagatcgtagttgcagagcttgacggcgctcatgtttactctttttgttaaatgacgtcaggattagccgcttaggtttagatttatgaggtcggtaatgagtgacttgggtttataaagtcccatcgttttccctatttgaccttttttgttatgtaaagagtacaaagcctttttgggtcaaattggtatgtatacggcaatcttattaaagttggatatattttgtcaaattgtttaactctgttttttttttattggaaaagaatatattacttatagtcacgttgaaacttaactgggaaaataattttctttttgccaacataatcacgttgagacaaaactgaaatatattggaaacaaagttaattataactcttttcatataataaatttactggggaactatacactatccaatttgaaaatataagagatttatgataaaactaaccgatctcaaaatatactgtcaagtgttgattatgctaattgagatctaactttaacaatacttacctacataaaatagggttctagacaatcaatgtccaagatctctgttcaaacataaattttcacagattaaaattgcaatagaaacatgtgggtataatgaagtcaaatggtaaaacaataataacctgatctctgtgacaaaatccagtgtcacgaggaacagatgacaaacgatgacatagtgacttgactatgagacaatctgagcagatgaattgtataactaag

SEQ ID NO: 25576 - DNA, 867 bp, Arabidopsis thaliana landsberg
  unsure (1)..(867): unsure at all n locations
ggagacaccgggcagcttctaattttttctagttattctaaattcgccacgtcattaacaacgaggcattccatcgacacgtgtcaacacgagtctctctaattattaaaaatcgctactacaaaagtacaaactttctttaatcagcgaggaaacgcagaaaacaattgtgtagaaaagaaagctagatgatgatgcaatcccgattattagcgtttgcttcagcggcgcgttcacgtgttcgaccaatcgctcaaaggcgtttagcgtttggatcatccacnnnnnnnnnnnnnnnnnnnccagagatccatgccggtaacgatggagccgatccagctatctatccgagagaccctgaagtaataattgtttcttttctcttgttttcaattttagaccatgttgaaaataaagaaaaatgttctaaaatacacaaagaaatcaactttgtttaagtttttggtgattgcttgtgtttcacggtatggatgatgctgcaaaccctaaaacggcggcggaagaaatcgtagacgatactccccgaccgagtttagaagagcaaccgcttgtaccgccgaaatctccaccggccactgcgcacaagctagagagtactcccgttggtcacccgtcagaacctcatttccaacagaaacgaaaaaactccaccgcttctccgccgtcgcttgattccgtgagctgtgctggtttagacggttcaccatggccgagagacgaaggagaagtggaagagcaaaggcgaagagaagatgaaacagagagtgaccaagagttttacaaacaccacaaagcttctccgttatcggagattgaattcgccgatactcggaaacctattacgca

SEQ ID NO: 25577 - DNA, 742 bp, Arabidopsis thaliana landsberg
tttattagaattccattttcttgagacatgaatactttcttaataattaaactatagttaaacagagagggggaataacataaccaaagccaatgggtttttgcttgactttccggaaatttaaaagattatgtggttcgataatttacccccaaattattgatgagcaagtagtagtctttagaaaatggagatggacagacctttttcccatctttaaacttgtaattaataaagactttttagactattgcaatactataatgaatcgtgtagtgttgtgttgtgttgatctctgtgttggaacccaaatacaaaaaaatattgtgctaaaaagtgctgcattgatttataacaatcaaatactcaaccatatttcaagtgggttgaattttaataaggatgaatgattcaagcatcaatctataaacaccaacaacgaaaagcttctattcacaatcgaatgttgtaatcacatacatatatataaactgaaaacaatttttagttaaatatttttagttattaaaagtgggcaacttctacttaatgttatatatgttgcacctactattagacaatatccagttaaaacatagcaaaagaaagcttgtggccggtgagatatacaatgaagaatgtaaccccaaaatcattccaatttccactattttgcctttaataataagtaacattaataggggacgcatgataaaagtcgagattatgacatatgatattt

SEQ ID NO: 25578 - DNA, 1380 bp, Arabidopsis thaliana landsberg
tatgttgagagattctcagacatttcatcctttctttctcttgtcttctctccttttaaactcattagttcgttttggttacttggtaggtttaatgttattgactaaatcagctgtagatgattctgtttcactttttaacaagtccatcaacttatggtttgaaatagaggttcggagctctgaagaaagagcttatagacacgggtctgatgcataaagtgctcttggacgatatgctatgagagtcttttacagaagtcctcatatttctttgcctacatccctacttctaaaccggacaaaaatatacctttgttggttggccgtttcagacgttacactcaccatcaattctctctaacgtgtttgataaatatatgtgtaaaaagatttgatttcttcttgaagactatgcatattgatggatctgttaaggtgctttcaatattctgcagactatacataatcgtttctgaattttatcaccaaacgtcatcgatgcctgcttacgccatgtcctctttccagctggtgatcttctcggattttcagtagtaagcattacacaaacttcctcacgagtcttctgcctacaccaagcctgagccagtttcagagactcggaatcctgaaaccgagtcccaaatgggatctttacagctttggagcgatgctcctcgagcttttcacgagaaatatcgacgagtttgtgctaagaaaaggactgaaggttgaggacgaacactgtgtactgagaatggctgaaatgacaagacaagacaagtcccatactttaccaataatccccacacgaacaagacccatctctgaaatgatgaaacctttttgaatctctacatataatttctctcttcataactcttgacacgatcttgatccaactgtgacaatcaacacaaactctaaggttctttagaatccttatacttccaccaacatttctccacactgcgaaagctatggcgagtttttcgctatgttgatgcagagatctctcttttgcagtctcctccatgtcttgaaacacacagcttttgtcttctacatatcccaaatctttagacttcttaatcagctcttcgagattttcaagaatctgctcagagttgggatgcgaaaacaaatctccagccatgaatgtatgcgtctctttattgatttcaacccaactcattgctggattcttctttagtttcatatccttcattttgctcttcatctcaatcaccctgttccatttcccagtggatgcgtagagatttgacattagaatgagagttccttcatccccaggttctatctctaggatttttctcgttatccgctctgccatttctacctttctatgaaccttac

SEQ ID NO: 25579 - DNA, 1035 bp, Arabidopsis thaliana landsberg
acaaggcttgagagcttcccatttggtgccttcaatggctttgaagaccaaagtgttcttggcgacgatgagctttgtagtgtcggggagagttctccggaggtcttgaaactgcttgacggtgaggcctttgtagttgatggcggcgaggagatggcagttctccaagtgagacttgacggcttcgacagtctcttccttcttgttacgagacaccgcggatctgatgaccgggaggcgagggtaatttggggaattcgaggttttgggtgtgagagttgagattcgctggtgacagagaggagacaaggaagaagagaaggagagaagagccacttccatttttttgctcagaagatgaggagactgtgtttctagctgtgtggaggaagaagatagatgaacaacaacacaatcctccactaagcaattttatttttttattttttttaaaatggaaaataaaatttatggataaaaaaaagggatcaatagacggaattagtaactccgtctaatgacggaaaaaaaagtaactccgtctaatttaacggattttgtctttagtctctggttctgaactctgaacgcaatccattggtaaactaatcaataactagacccaaaataattctattttctttctcggaattatggtagatgtctcgtctcgtgtcaaacaaataattttgtaatttactactcaagttcataatttaaccattacaagaaaaaacagacaagaagggaagtaaagggagaaggaaaaaaaaattaggcaaaatattgttgctgtatggatttgtccctatggtttgtgttttgtgtgtggatgtgagttagagcagtgtcccaattagggatagtcgcagtagcttcattcaccatcttcacaagtgtcacctgcaccatcacacaatatgttattaaggacagtcattcaatattacggttctcactctcacacttgattgacccaaaaccgtaactcctgaagatattacaactacttctaacagacttatgcatatcatc

SEQ ID NO: 25580 - DNA, 1111 bp, Arabidopsis thaliana landsberg
ttaaagtagtggtgataaattcacaaaaatacaaactcttttatttttgacgtcaaaaacaaatacttctttgaacaggctattacaatatttttaagaaaaaagtaagcaaaatagtccacaaaccaaaatctgtaacatattaaacgattgatgtgtttttttttttttcttaactagagaacaattcgggctcttactaaggatgatgagtgtagttaccgaatagtgtattcatataatcttttaaggacctaaaaatatgatattatttcgactaatcagaataagagtaagttagataatttcgtaatagagcaactctttcgcaaataaaaccattgtaaacattaccaattagttttttttttttttggtcacaaccaattagtttgtttgttctattttatgaagtgcgtattaaagctaacgtgtttacagtaacgccacacaaataaaaataaaaataattatgtactttatggatttatagaaaaaacaagaatagtcaccaaaaattgattgtgtcatatatcttttgtcaactattttatcttatttttctatggatatgtatgtatgtatctatgtatgtccaaaatttcgttaggctgccgatatctctgtttccctttcaacgactatctatttaattaccgtcgtccacattgtttttaatatctttattcgaggttggtttagttttttttaccaaactcactttgctacgtttttgcctttttggtatggttgtatttgtaccaccgggaaaaaaaagataagaggtttggttggtcgagcttactgattaaaaaatatacacgtccaccaaatattaaaacaatatatcccatttttcctcctctcttttggtattacattaatattttattatttccccatttgctctgtatatataaacatatgtcaatagagtgcctctacagtcatgtttccatagacataatctctcaccattgtttttctctgcaaaactaaagaaacaaaaaaagaaaaatcggagaaaccaagaaaaaagaaatgggaagtgtagaagcaggagaaaagaaggctttaggatgggctgcaagaagacctttctggggttctc

SEQ ID NO: 25581 - DNA, 867 bp, Arabidopsis thaliana landsberg
gagctgacgaaatggaactaacattgttaataatcataagcaaagaaacaaattctatgcaagtttttgatgatgatgaatgcttacttttctaagagattcaataaatggttcatctcgaaaatttgtgttcattggagcttcaaattccttcaataaactaaaaacctggtattagtagggggaatataaatggatctccatctagagatatgacctgatcactacattgttatagtttcaaaaaccaacctgcagcatgagtgacttaccctcagaagattgttttcatgtttgatatcgattgcttcaccgcatttgcttgatgtctatcatgaagtaaaagatttgtgagttttttttctataatttgttaactaaatacctttcatggattctagttcttgtagaaggagttaacctgcatcacctttgagtctagagggcaaatcttaggtccataaacttgacaattggaatttgagctgcgagacgccttgaccttcatacccttcatggaaccaacggactttgacctgcacaagacatgaaagaacatgtttagaagtcttgattcaagtttgagtcaaatgcaagagaagaaggaaatcatgaatgggatttataaaagatttatggactaacgttaaggagtgtttagaatcatcggttggtgcaattttagcctgcaatgagaactgcatcactgtagcttgaaagatgaccagataaaaacaaacagcacaaacggtttgagacttacactggaagagcgttccctcgctctaagagatgtccttagatgaaatgcctgaaacaaaagaaagaatgtaaatgctggtaaaattatggtatgataaaagagtt

SEQ ID NO: 25582 - DNA, 1136 bp, Arabidopsis thaliana landsberg
aaaattaaccaaaccgaaatcatcaggtcaccttctttgttttgtcctcgttcaaatggtttttgtcgctttatttattattgattcatttcttatatgcactgttcacattgtgtttgggtgaaaaagttatatttccctaatggtgtcatatctatggtggttccatgaccttccaccactaatgtttaaattgggataaaacaaaaactattttaaggttttgactaaagactgacctcacctcataaactaattcaataagagagtatttataaatgagaagaaaccacaagatattttacttaacaaaaaaaaaagctcaaggtttttcattttagcaaaataaaaaaatcagctatacatcacgagaatcatcatcataagtccctgcatgcgtgctacacataactttaacctagttatagtagtgacggatccataaagtttttgtatcgaggtcaaacataacggaatagagatatggaaatgcaaaccttgaaatttaacggtggcataacagtttttcttttgctaaatgctaagatcaagatagatgtctcactgtctcagtctcacgatggtcgacccaacatttttttgatacataaaacctaataaaattttatagaaaaatttaaattcgtgattttttattattaaatgagacaccaattactaaactacaagatttttacacgaatttgatttgcttgaacctaaaatattggatgctttctaaaaagtttgttagactttaggacttgacaagccatatgtcgcacgattctcttgagaatataacagttataggaagaaccatgcaaactccacacaaacaatgacttgatggacttttcaacatcatcctattgagtatgatataaacactcgtttccatcttgattcactcgttatctttgcattgatcataaaatttagtttcttagggcattttttcggtgatatctttaaacaaaaactatctacaacattgtggactgccctttcgttccgtcctagtgtttttcgtcacctttttaccatcttttcctatttagttttctttccgactaaatcttgtgatttagtagatgaatagataaggcccgcctaaatagattggtataacatat

SEQ ID NO: 25583 - DNA, 1021 bp, Arabidopsis thaliana landsberg
gaaaacacaccatgtaaaaatggcagaccagttcaaaaaatggcatgtcggattcaaatttcttgttcagtggcattcgtgactgggactcacgacatcagagcatacccaatggttgagcctcttcaagggctcttccaaatttttaaataataaattttgagaaatttaaaattaagagtttttattggttccttgattttttttctttgtccaatggtaagcccttaagtgagtttttttaaattttaaaaaattattattcaaataaaaaattagaaatgtattagaaattttttatttcctaaaacttaataattattgcaaatactaaaattttaaagatatatgactgattacattttgataccaaatactaaatatttaggttagtgttgacttggtcaatcgaagaaaactgaaaaagctaaagagtgattacattttaatatcatatcagcgaacaaactagatagaattaggaagaaattctcaggagctcctcttgaacgaagaataatctcaaatactcatgttttaaaaagaattttctttttgattttcttttatccgtaaaagaagtaaatgacatagaaaacctttaacatattcactatttacgacccaaccagcctaaatggatcacaaaattacctaagcccattgtatttgggtcatatccaataaaaccaaacaaaaccctagtaaaaccctaaggtttttttctctctgcagtaaaatcgatccacgacctctgtcttttccgtttcttccttctttctttactgaaaatcaaaatccagtaaaacatatcatcgtcaattctctcgtcaacgatagatcgttgatcttggtatttctgtagaaaactaagaaattgggtaagtcaaaattggatccgagttatttcattttgggatttgtgattgaaattaattaaagagtaacacgaattggtaatccaaataaattaaattgtaggtttggaaaaatggctccaacaaagaacgcaggtgtgccg

SEQ ID NO: 25584 - DNA, 1127 bp, Arabidopsis thaliana landsberg
cagtaacctcctaccacacaactctttccaaatcttcaatctcatttaatctatgcatcactcagtgacacagatggggaggggaacttgttatataagcaaagcttgtcatttttagatgaggtcacaataaaaaaggattggtaaagagtaaaggagagaatttagttaattatctctagcaaattctctcatattggtaattaaaactaacctgaaaatgtcgacatagctgactgaatcagctaagttgtctgatagaccagcctttttgagacacatccaagcatcgatgtcaagcataaacatctggccaagcgtcttctcttcaggaatagctccatggaaaccataaaatttcaagcctctcaatatcagtttgtctcccatcattgccatgtctctctccatatggttctgttcaaatcaacacaatcagcttatacagtaaaactctataacaaaattacaggctttgaaataaaattcagatttacatggcagttattttgatccacagttttaaaaaaccaaagaatttggtgaaagttttcaactttacatacacaaaactgcaaaaatacttctaactcaaagatcgttcccgagtcacattacgtcatcaggatccgataaatttaggttttcaacatcacagtaatcaattcgaacgaatacaaattacggccaatgattaaactaagagaagactgaagaagcttacgagattgcgacagagacaaagcggcgcagagtaaaggaagaagataaagaatttatctgtagagagcacgacgcttttgatatttcatcgaccaacatttctaatgtcttgggcttgggccacttttaagcccaaaacaaataaaattttggatggtcccctataaaatataaataccttcctttggtaaaaccctagctaggtagatcattagttgtgaatcatcatcgtttatttaagagaaactataatttgttggtatagcagtaaattgaagagatggcgacagtagaagacctggtgaactgttactttcttttcatagcagctacgttctatatctacatatctgtcgatactttctcagtgtatcattggagagaagacggagaagtagatgatg

SEQ ID NO: 25585 - DNA, 3567 bp, Arabidopsis thaliana landsberg
tcagcaagtctcaataagctaaaggattttaaatcataagtgaaagggggaataatcgttctaagcttcaagggaagaaaatatgcgaaatattttgacactcactaaagtgacgaaaacttcagctggcataccgtgttatatgtaaccacatctggtttcagaccatcgcgcttcatctgatcaaacaatttgatgcagctgtcaagctttccattcttgaccagacaactaagaatggagttacatatatagacattgattttggtagactcgtctggaatgctttggtatatttctagagccttggagacatttttggccccaacaaactttatgcagctactgtaagttgaaacactaatctttccatgttgttgcatccattcaaagagctacaaaaagaaaaacactttgattgactatgcacatcttggaactcttgttcctcaggaaacaatgaaacatacaatagtttttatgaaaccatgttcaaagcaacagacctgtataagatcctgccatcttccagagattccaaaatcacgcaaaattacattcaaatcttgtaccttcaaaactgttgctaatctgcagaggggacagttacatcgtgagaaactacagtatccagatcctgaacactcttgacgacggagtataaagattacggcatgctcattaatcgaatcttggatacaagaattcttatgtatctctagtaatgatgtggtcaattaactttccccaatttgaatcaatttaacattctatagagtatagaccaattccattagcaggcactactacatctacttcagaactgagcattctagagattttatgttacttctgttaagaacaaaatacgtttttaaagacaaatttttgaaatgttgactgaagtaaaatgaatcacagaatttgaagataagtgataagtgatagatagtaagacctctgcagagaagagagaaaatccgaggagcgttgaacttcagaaatggcggattttctcgccaggtatgaattggaatggcgtttggaacgaggagcttctgctacgttcgccggtaattcaataacagcggaagatgtcgttgccgccgtcggcgtgaggattcgtaaggataaggcgggaatggagagagatgaagagggacgagagtgagtgttgaagagatgaggaggacaacgtagttcgagtcccacaagaagtggcgtctccattgttttttcgagctaaccgagccagagcctacgaaagtatccatccatctttgaacatgttcctgtttcttttaccaaagtatccccgcgtttttaattgtaatctagtgctagtttgagaagtgaagggtagtatagtaaattagaaaaaagttctaatcccaaatggccaaatctcatcctcaacaacgcaaggacaaacgccgttttatgatgggcttttcgggagagacaaatgggcttttaggcaaaccattaatttgaaaggattatctaacgggccatattgtttaaaaaagcgcaacaccaaagtttgtaatgttgtccatatccaaattggtgacgaaaattctgagaggaacagtaacaaaatctttgacaaacaaaaaaagaggtacagtaacaaaatagtttttctggacaaatattcccatgcgcacgcacttgtcacatcatgcactgttctttgtgcgtcctatgtattgctccatgcactttcatacaagaaaaataataacttgtcatcactgacatgtttttcaacaaaatggcgtttctattgaacctagtttctctaaattacatatgtattgtagaagaaagaattcaaaaacagaaaacagattctttgcatcggcttgtacggcaggagaccgacaaggaacaagcacagacccactccccttgtgttcatacgtttcgtgacacccacttcaccattttttttttgtttttttttgaattttataacacacttcaccatttcttctagcttaggtcaattttctttatggaattcttaacctacaaagttggtatttaaaaaaaaaagaagctattaactcatatattacgttttgatgtacccctattaactcatatatgtaacatgtaaaagaatactatttcatgctacgctaggactatctagaccagatttttgctaatcacacattcaaattatatgcgagtaacttattcttcttcttttttggtaacatatgcgagtagcttaccactatcacaatacttaacttacaccatcattggaatcgaatctcgtagtataatattagtcattggattatagaatacacatacaagcacaaggaaattcgatagtttccaatcgttaaattattttcatacggatttaaacacatattagttgaacagaagaaaagacaaagatttgaactccataataataataaccaataagcattgaagcagaagcaacaaaaataactagcaatatagtaagggtcctatcaatatcatttgtcttgttttgttgtgttgtcacgattcaccaagtccctatcacttggaatcgcgattaacaacatcgtccatatctcttttatatatatcttccgacgtcaacatcgttaatcgcatctaaatttagttagttaaaaaatcatcagcagaacaatattttagtggtcgggcttttttatttattcagcgatatctgaatctgatcctggacggtgtgcaacgtctttttccgatttaaaatcatttttttgcattagtgcgatttaattgtgtttctaaaacctatcacacaaaaatgcatacgttttactatttcatcaaaccaacaaaaaagtttgagaggagctcctcgaggttggtccgattcggatatataaacagaaggtgggtttccctcaagatttcgagaagttatcgttattgttcacatctttgtggagttaggattagtcaacgtcaataaatactttggtttatttgatagtatataggtgcgatgtaatagtcaacgtaagaattcgaagatgtaaatatgatcgatattggttgacctactttatcgaggaatacaatttctgcaatttttctgacatttgaaaataatttgttgaattttgacggaaacaaatttatggttgaactgacacaactttttaagaaattcaaatccaataactaattaactacacaatggcacacatattcaacgccaccacatactatatacaatatagtgtctgaagaaaatgcttttatctcgatggaataaagcttttattcgaccaagagccctggtgggttaatggccactgatcaaccacatgtgattcagtactcaaatatgaaagtttaataagtctcatttttgctaagattatgtaaagtgttaaggctacatgtgaaaatgtttccacacgatcgaagatgataatattgtattctatacatttttttgtatataacattaagtcattagctagaacagttcgcgtattttgtgaataccctttttttttgtaacatgagctagacgtgtgttatatgtggaatagt

SEQ ID NO: 25586 - DNA, 1072 bp, Arabidopsis thaliana landsberg
cctaacaacttatacacactgctgtttttcttttgttagatctgaccaaatcttcaatcagttattaaaattatttatgcatgtctctacttgagagtcgaggctacttataaacagattttgtaattgccctaatcctacctattgaatcccatatctactattttttagtgtcttgaaactttgaattcaatcctaatataaacacgtcattagcatttcaattaccaaagaaaagcaagaagaagatgaaagagcaaagctcagtattatacagatctgtagataatgaaaactctggccatcgaatgatatctttccaccaaagagaagaggttgtgtacataaaagacctttgaattaacctaaataagaagataagagaaaaataactcacattttatggtttatgaatttgatatcgaaagatctcttacaagccatgtaaaaacaagaattcccccataattttacagtcgtccaaatcatcaatatgtcatcatccttctcaatttagtgttgaaatcaaccacagcctctggcctcctatatcaaaactttgttcctgaaaagtagatataagtacagattattagtaccaatcagtgagaagatgataaactccatggttacttgactagcacaaaaggatcaccttccaatttttagcctaaacaagctttaacgaagaggagcaactataatttttgatcatctatcaaccatggattccccacctgaactcgatccaaacacacaaagtacactaaagcattcagtctctacaaagcattgacaggactaacattttcaaacaaagctttcagtcttctttcactggaaacatacatatcattttacatctcttcaacgttcccaaatagtaaggattagagaacaatgctaattcacttccctaacgtattcaaaacttttagtagacttcaagcttaaaacccatggttatttgatatcctacacaccaagcttaggtttttaatttcagggcaaactaaaatgatggttactgatctcctacacaccaaaacaagtcgcaatactactcaatttt

SEQ ID NO: 25587 - DNA, 1441 bp, Arabidopsis thaliana landsberg
ttggggaagacggataacggcttcaatgcttgatttttcttttgagtatctgaaacagcttcagctccgaggtcatgtctctaaagataccttatgtttatcattataaccaaaatcctaaaaccagtctatattctgacataagtctttttttgttctgatatttgcagatgttgactatgagaaatggaataaacttgcatcctttgtgtttacctggaactacattacacccattgcaactctctcagattcgaccccctgaagcaaccaatgagcctctgcttaatcataccaatcagtttgcttcgacttctaatgcaccggaaatgatcaatactgtggcttcttcatacgctttggaacctttctattcgcagtcactttggaccttttcctctcctttacttcacccgtggtgcgtagttgaattacacatttttcattctataaccataaagctagtttgcttactaatttttttttgttacttaaggagatgagtcgggaaggtgggttaactcatccaaggttgaacattggtcattccaacgcaaacataaccggtaaagtcttgttgttttggaatcctaaggaagttttaggacatttacaatgttaataacgttacgatatttggggatttgcaggggaacaagctctgtttgatggacaacctgacctaaaagatcgaattacttgaacagtgtcccaacttcgggatctctatgtgttcttgtttcttagaacgccagccataaagctgtctgacaatggagatgcatttaactgtctttatttcttctaaggttctatttaaaatcaattgttggtgacacgaattctagagtctaatcttttggatctaatagctatatataacaaggactgaaattttattgcaaagtaattggctaattgttaggttgctgtatgtttatggtggatgtaaatcttctagatcatcttcgtattgtatttgagagtttgacactcgatggctttggatatgtaaattaccccgataagcttctagagaagttttcgattctacaagatggattttttatctttaaggttgaccatgttcttttggtatctcttgttctcaaattgatcatttacaatacaatcttttaaaatcttttacccttcacatttttgtacttacatttggtatattactaatttcatttgttagtgtcttttaaaagttttgcatttataagtgttgttttaagaacttttatgataattaataaatgctttaatatcttattaacccttaattagtatacttatagctttagatctccaattaatctttactaactaaaagggacacatctagaactctatttaaaattggactgaaaatacatacatcttatatttttttcagaaactagtattgaacatacaatttatttattatatttta

SEQ ID NO: 25588 - DNA, 1230 bp, Arabidopsis thaliana landsberg
  unsure (1)..(1230): unsure at all n locations
gacttattattacatatgattgatacacagatccaagctcttttatctcacacttctgagtgatctcttaattgattttgcagatgatgatgaacagctacatggctttggatgtgtccttaaagacaatgtacagtggacagtggtcatnnnnnnnnnnnnnnnnnnnnnnnnnnnnnatccggtttgctaatttaagcttagatcagtagggagatggtgtaaacattattccccttatcttgaattttacttttctcaatcaaagtttatgtagcttagtggtacttttgtaaaaaagaattgaaagtattaagaattacagtgtgtttgtctttcatcattgaaaaataaaatttgtaaacggcccccaaacaaaaccataactaatccaacggagaggcaaattcgtgggttgggtcaaaacgaaaagggtataatcgactttgccacacgataagtcaataactagattcactnnnnnnnnnnnnnnnnnnnntgcatcctaagctaaagaagaatctgcctttgcgcgtcttcaggttttcttcatttttttttattttgtcgaatctctctctctctcttcaacccctcttctcaatctagggttagggtttcgattctgctagaggttttttttctcccaacttatacttctaagccctctcttcataagccttgttgactcttcttcttaatttgaagaacttcgtaggctaagcatgtcgtgattatcccaaatttctggtaaatttgatttctgctacttctactcgtcattttattctgaattcgtctttgcgttcgaattatttcaagcaattagcttcatcttcgtgtgaaatttcaatgttttaggatttgatttggtgtcataaagaacttatttttctcgtgattttgcatcttcttttaagtttttctgggctggtttcatggctcctttatcgtttcacgtgaatttcagtgtcgattcgattgggattttgagaatagttggggacgtttctgtattgcaaaagaatctgtgaatcttttttattcttctgatataattttccaaggagattaatcgttgtatcctactgctgtagcttatttgtttaagtttgatattatttcttcaaaacaatcttcacaaatttctcatgttcgttcttatgttaatttcaggtgtttattcaaactccattgttacaaagattttctttgataagtaaaagcatg

SEQ ID NO: 25589 - DNA, 2587 bp, Arabidopsis thaliana landsberg
caatgttacgtaacgtaagcaagttttcctttatagtacggattaatcaaagactcagactctcgtcaataaaaatgggaaataaatatcttattcataattattcgttactcgattgtactttgaacaagactaaaaacttattaattattgccaaaaagatatcttatgatgtcagcagtcatattagcgatatcatgagtggctttgttacgtcccgtcaacggtgaactcccagcgaattgcgcctcacaatgatcggctatcgacacaacactttccatatcagacttcgctagagaaaagaacccagctttaagatcatccaacgccgccggtaaaaacctacgagacgccgtgccatactcaacaatgcatgttttgtacttctttaagtcttcacggtctttgatgttcttagagacggagatgagatagtttaacattttgttgactttgtttgaagtcgcatcgatagagatcgacgcaagctctatcatgaaagaaaaaataaacaaatatacattttagtattttgacaatgactaaatttgcttaaacatttttttttctggtaacaacaacttcaccgattaaaatttgcgttaaacatgtcaaatagcaaagtcatttcgtcagttttccttttttcacgatttattgttcatgttttctgtttagtttttgaaattgttggtagattatccttctggaagaagaaaaaaaaaacgtaatctaagatttttttactcacctcgtaaatttgagttcttgcttctaggatcaagattgagagtagagacgcagaggcttggattaatgttaaatttgcagagttcttgtatgggcttaggttccgtagcataccgaattggttgagacgacaatgctacttggatttgcataaatacgacaaaaatagagaataatttcatcattgtttttatttgatattgttgggagtgccttgaaaggttaataagaaaaacttagtggatactggatatatatatcattacgaagccattgacctgttttggtcaaagatcattataaggcaatatattattttacgtttcgaattaggccattatcacttgtgcatactactagcttttattgtctttcttattgtagttgaatgtgtttgactagatgtaaaaagtatatgactatttatctttatatataagtacttgtcaaatttgatacatgtttattgttacacatttagcacaaccaatgcctatatattttatcttgtggtctttccctcaaaactattcccctcaccctaatttctaattggcaacaaattaatggttattcaaatcagagtaactgatcttttattcagagggatcatccccgcatttagagggtaataacttcaaactatgtagataattacaggctggacagttcaaagaaaacacattaaataggttacatgtatcgaagcaacaaaatgaaaagaaaacgttttggcataattttaattaagtcacaactacaaacacatataaatactcatagacatgctagtaattcatagcattatacatcttaatttaccaattagtactaataaattttataatttttgagagagaactgagaagatgattatggtaaagatgatgatgatgatgatggctatggtggtgggagttgcaatgggaaatattgtggatgagacatgcaaacagacacctgactacactctctgtctttctctcctccgctccgatccacgtagctcctccgccgacaccgtaagccttgctcttatcctcgtcgacaaaatcaaggttttcactctttttccgtagtctcaatatgaataagacaatatttttgagatcacggggttaatttactaaattttaaagttaaaatatattagatttatgtcccaaaaggtaaacttttatcatttatgttaaaatgtaaatgttttttttgtcttgttgggaatgtaggcgcttcgggccgaaacggtcgggcagatcaacgaggcctacaaaacaaaaccaatgctgaaaaagccattagacgagtgtaatatgagatacaaaacgatcgtagacgttgaccgtccacactgccattatagctatcaaaggaaaccctaagttcgctgaaggggctgttgttgacgccggcgtggaagcttccattttgcgaaggagggtttaccaaaggccaatctccgttgaccagtttgactcagagaatggaaaagatttgcgatgtggccagagccatcatccgattgttgctctaattaatttacattttatttaatataacctaaaataataataaagctcgtaaccaatatcgaccatgcctctttaatccgaatgaatgatgtggatcaaatttgtataacgttacattaaccgggactggctttaagaaccggttattgaacacgggcaaaaattcggcacgaagtttctagaaccgaatcacgggatatacaaaacattcacgagccagatatcgactgccgagagaaacagcccccacaatattaattaaattaagggtattttgaaattatttggtcgacgttgggtat

SEQ ID NO: 25590 - DNA, 1411 bp, Arabidopsis thaliana landsberg
aaaaacaaatcatgttctcattaagtatgtgtgtgtaatgaaactaaatatattaccgtttaacacattatagaaagtactcattttctttcttaactcgcttcaaacctctagaaacattggtggataggaactaggacactactagctatgcttttgcttaggttgtgtagttttgtggaagttatgacatataatattctagattggatcgttcgttaacaatgcatggttgtaccatcgcatggaaaccatccttacaaaatagaattacatatgttaaaagggatcactcagtgaaatggtaacagagtagttagtacaacgaaaggatggtccaaagaattttatttttttctttggtcttacaactcaaaaagtgcctttatatttactttgttcaaaaagtgcttagacaatcaataatatcacatttgacgttttctgttcgtcgtttttaaaagagataaatgagaaagatagtcgcacaataacaaatttcacatatccactcaaaacccttatcgctaaaagcttgttttggttatattcattttaaattttatacatctagatatagaaatttaggatattatttccattccactacggtggtactctgattctgaacactggatttatggaactaacagtgcaaatatcatttgattatttctacttggtaatgagaccgatttagaattagtactactagataaaggtaaggtcttcaatagcaaactttaaaacaagttatccattcgatcaacaaaattattgaagcttgaaatgttttccttttaagatcaaattacggctatatataagatcttatcacaatggactgatcatgtcctcttccaatgtatattcatcaatgaaaataattttaattatagagtaatgcactcatgcatgtttttgaattaatgaactcaaagagttttattcgtccactttcagctacttaatcccaaattaaacaaacaagaattctagatattaaagtcatgaaattctaataagattgaaattatatagttatgacatctatcaagaaaagacatatgattctatgtgtagtagacaaaagctatgatcttagatcttcatttgaatatattcttaaccatgtaatgaatggctactacatcctatgaaactaaaattaataattgattttgtaagatgaagaaataccttttaaaagaagaaaaaaaggtataaagtaaagaaaagaaagaaggtgagaactttcagaatgatgggtcaccatgctctatttaattagggctcatgaaagtgccctaacttgtgtcatctataaatgtccctaccacatgcgcccaacattattttcaaccatttccaatttcttacttagaatagatagtcccaccacaatagattt

SEQ ID NO: 25591 - DNA, 1380 bp, Arabidopsis thaliana landsberg
ctttcttaatatatctaacaaacactcctacctcttccaaaatatatacacatctttttgatcaatctctcattcaaaatctcattctctctagtaaacaagaacaaaaaaatggcggatacagctagaggaacccatcacgatatcatcggcagagaccagtacccgatgatgggccgagaccgagaccagtaccagatgtccggacgaggatctgactactccaagtctaggcagattgctaaagctgcaactgctgtcacagctggtggttccctccttgttctctccagccttacccttgttggaactgtcatagctttgactgttgcaacacctctgctcgttatcttcagcccaatccttgtcccggctctcatcacagttgcactcctcatcaccggttttctttcctctggagggtttggcattgccgctataaccgttttctcttggatttacaagtaagcacacatttatcatcttacttcataattttgtgcaatatgtgcatgcatgtgttgagccagtagctttggatcagtttttttggtcgaataacaaatgtaacaataagaaattgcaaattctagggaacatttgcttaactaaatacgaaatttgacctagctagcttgaatgtgtctgtgtatatcatctatataggtaaaatgcttggtatgatacctattgattgtgaataggtacgcaacgggagagcacccacagggatcagacaagttggacagtgcaaggatgaagttgggaagcaaagctcaggatctgaaagacagagctcagtactacggacaacaacatactggtggggagcatgaccgtgaccgtactcgtggtggccagcacactacttaagttaccccactgatgtcatcgtcatagtccaataactccaatgtcggggagttagtttatgaggaataaagtgtttagaatttgatcagggggagataataaaagccgagtttgaatctttttgttataagtaatgtttatgtgtgtttctatatgttgtcaaatggtaccatgttttttttcctctcttattgtaatttgcaagtgttatgtatgttgtactttatttggcttctttgtaagttggtaacggtggtctatatatggaaaaggtcttgttttgttaaactcatgtcggttaactggatttgtcttcaaccacaaaaagttttcaataagttacaaatttagacactcaagccgatgcagtcattagtacatatatttattgcaacccaaacttcaaaaacagtaggttgctccaattagtaccctgaattgcctcctgattctagttgataaaaatcaggggatataatacattggatttggaagtttgaaggatct

SEQ ID NO: 25592 - DNA, 1604 bp, Arabidopsis thaliana landsberg
  unsure (1)..(1604): unsure at all n locations
ttattagcctgcaagagtcagtaaaactaactgtgttacataaaaggacatctatcaacagttcaacaccaatgattcaattgtgatgtttttgtgttgtgttacaaaacctcatcagattcagcataagctactccaattactccaacgctaaagagagcacccaaaactgcaggtgccatggaaaagtatggagaatcgtttagggtgctgcaagatctcaagacttgatttacttttgaattactctgctcaaagtttcctgcaatatcaaagacccaaacttttaactaagagacaaagattctacttggacagagaagtagtatcatttcttcatcataagtacatgaccaaaaatcaaaattaagggatcataagacaaaacagcttcttgtgttctcaattccccgaaagttccaatttttaaactaattagcaattcttacaatcaaatggattcactcgaaatcaagggatcaccaaaaattatctacaaattgaattcgctagagtaccgtggtggaaacagcgacgaagctctcgtgcccgtggtgattgcgaaggaaccatggatttagaatgagagagtgatccgcgccatgctcgagatgctcgaaacaatttgtccagaatcgccattggagtggttttacacaattcctcgagcttcaagggtttatgaggttttttaaggatccgacagtataaaactggttagtaattcacagaaaaaaccaaccggttctgtcaaggagaaccggcttaagtgggcctaatctgattacgtatttttttttttttttgtctctaatcgtattaatacagtggtgacatccatcacatgaaaattgataatccctgttaaactttaacatattagactaaaacttagacttaaacccgattgaaaggactaaactctgtctttgtcaacattcttaatcctgcaagatgacaatgcatgagccaaaaaattccttcctttgttcctgttaaacataccaaaaacatcttgacagactatgtagagtgagttatcgcttctttgaaggcaactgaaaacctacctctttctcctttgtagcttgttttcgtttagaacattctccgatttcaaacttctttaggaaatgtgttcatgaatcttaacactctcattcgcaaaaagttgagcaagccattgaggatgccctcttgcaacatatgatnnnnnnnnnnnnnnnnnnnagacactgtttgctatctcaaaagcacctttattagcacttggttgttccatgataacaaaccaatttggcttgttctttgtaaaactcannnnnnnnnnnnnnnnnnnnnnnnnnnnnnnnnnnnnnattggtttgtttagagcttgaatgacttcaaaacaagaagccctctccaagttgtgccaattcataccatctgagtccattcccaacttttaagttttgcttcaaacacaaagtgtacctagagtataggctcttcgactatggagtaaactgaaccgtatgaatccctaaccacccaggcagctccagatagaggttttttccgaaaccatgcaaaacctatgttacattttagctctccaaatt

SEQ ID NO: 25593 - DNA, 829 bp, Arabidopsis thaliana landsberg
ctctttaattttcacttttttttttgttttgttttacacttcttggttaaaagtttgtttttacatttagttttatagttcctatcttcttctactgtatagcataagattatacatgtgttgacaatagatataatgatactgtacatgtaggaagaaagtgttaaaaaaatttaaaatgcaaactcataatagtcttgtttttgtactttttggaattacaggctatatattgaaaagaaaatagagaaaggaataagaaagagatgtctcttgaagggtgaaaacaaggagcgtcaactttactggtcactttcttgtttatcagtataacacctttgcaacatttggcaatatcggatctgacggctgacagagcagcagagagccaacaatcgaaccgttatgattacgacacgtggatgagtgagtgtttgtacgaaagatccaaagttgaaatgataatgtaatgatggtttaataatatatgcttttgacattctgtggacttcgtgctcttctgttcgtacgacagtaaataatatcgaccagtgtttcagtctttgcctcaaacgcagagaagaaagagagagagtgacagaagcaagctcaaaataagtttatactattacaatttacatatatgaaaaatgttttatttcttttagctttttaacaaaaaaatatatagctcatgtaactattacttcatgtcaagggaaaaaagagtttacttaaatatacataaatttggttatctctagctatcaaagggagatgatttcgatttttggcaacattgtactagtcattgagttgctaaatataa

SEQ ID NO: 25594 - DNA, 1027 bp, Arabidopsis thaliana landsberg
cttgtaaaagacaatgttccatactaatggataagaataaacaaccacccgtaccataaaatagacaataaaaatctatcaggaataaggcacgatccatcagaagttaacataatatatcgaatataaaaattaaaagaacaagaatatcacattcccatcttagctataaattactaaaaaaattttccgtcaactataaactactaattacaatttctaaatctggtatgtaatttgtccacgacaaaactatgtttttcacatgtgcatatcggcccaatgttttcgagttagacccgaattgcccggtccaactgattaacctgtgattcgaatacttttctagtttgggtttaatgttaaaatctgacaagttcaaaatttaaaaaacccacaaaaagtcaccattaacccgtgacccggtgaaccagttgaaccgaccagatgtgggttttaaaaagcttccttgactttagaataaaatataagatttaaacatttattcaatcattgaaaaagttttttcacttcttaaactcatttgatgttgtagattttggtgaagacttcacaatgccgctttaaacaatgaatcgaatggtgagagagacaaccaagattagttgtttaaattcacgatcttttcttagtttatttctgttattggtgatctcctaatatatttgttatcgtgttagacatttagttggatataaaaaaatgtaatcattttattataattgtttaattttatatatttatatatttttgatgtaaatgattttatattttattaaatatgatgtaattaatttgtttttatatttataaatttttttaaatctttattaatattaatcaattgatccgtggtccaatccggatgactcggtgatccaaagatagtccggtcactatccgggtcgggtttaaaaacatcggtggtagccctggtaatttcaagtctatttgaggtgatttaaaaaaagagattatttttctcgcaacgacaccgttttctagt

SEQ ID NO: 25595 - DNA, 1298 bp, Arabidopsis thaliana landsberg
ctctctctgggatgcacccaagaatgtgtttgatattcttacagcacaggcagacttgctatcccgcctattgaaatccgcaaagaaaaatctttcattatctgtatgtgcacttgtcctgagaaatgttgggcctggcctcaagatccttggtagtttgaggcattcaaatgctatattgaagaagacgataaacctcctgcttgaggtgctgctcctggttgtgggttttggttcagacaactcaaactcgagtgggatgggacatatggtgctagccaaagattttgcagaaatatctgatgctacaattggattattaccccttctctgcaacttcatggggaatcccgagtacttgactctctgcctgaccacagtagacttgattctcaggaattttttgacgccagagacatggttccctattatacagagtcaactccgcttgcagcatgttattctacagcttcaggataagaaatccacaacatccgtttcagcaatactaaaatttttcttaacgataactcaagttcatggcggtgctcagatgcttctaaattctggatttttctcgactttaagagctttattaatggagtatccggatggaatgtctactttggcatctgacagtgaaaagggctcgctgctagaaaagacagaaaaacctcagcatatctggggaatcggattggctgaggttactgccatggttcattctctaggatctgtttctgcaggggctgatattgtggagagtgtcatatcttactttttcttgagaaaggttacatgatctcatactatctcgctgcaccagatttcccttctgatgatcgtgacaaagtgaggccacgaagtcaacggacgtggacttcccttgcttatctgagagtaaccgagcatactctccttctgatgtgtgcattagctagccattggagatcatgggttaaaattatgaaggatatggattctccattaagagaaatgacaatacatctcttggcctttatcagcaaaggcgctcaacggcttagagagtctcagagccacacatctcatctgttatgccctccagtagcgaaagaagagtttgattcctgcaaaagaccgtctttcatcaataccaaacacggatggttttcgctagcacctttagtttgtgttgggaaacccaagatcactgcagtatctatctcgactgctctagttgttaggggagacacaacagaacatcctgggtctgttcctcaatcgcaattttcagactcagttgcgatacagatata

SEQ ID NO: 25596 - DNA, 980 bp, Arabidopsis thaliana landsberg
  unsure (1)..(980): unsure at all n locations
tttcgaatttttattactttaatttttggtaccaaggggttcttatgggcaatgataagattcccaaattaaaagacagaaggaaagcgaaaaaagttccccttttaagtcctactcctctttttgtaatatagaaagaaaaactatatatatacaaaataaagttatacgaagaaaattgtattatatttataagatctagataaaatggtccatcccacccaattaaatacccctaagataaaatcacaatagacaaaaaaaatttaaaaagaaaagaaaaaggaaattcaaccacaaccttcgtcttctcttgaaactctcctcatctctctcaagaaagattcaagttcgagtcttagctatgtctggaaactcagaaggactgttagagagctcaggcggcggcgtgggaggttccgtcgaggaggaaaaagatatgaagatggaggaaaccggtgaaggagccggcagcggaggaaaccggtggccaagaccagagactttagctctattgagaatacgttcagagatggataaagcttttcgtgactctactctcaaagctcccttatgggaagaaatttccaggtttgttatattttgttacatgcatatatatttataaagtagaaaatttaagcagaaattttatgatcatatattttcgtctcacatatttatgggatgtatatataatatgtgtagtcatatatttcggtaattcatttgaaatatatgactacaagcctatttatttgcttataggtatatgtattacatacaactagctaagaaaaagtttggataatatttgtttcttaattatgagtttattgattgatacatgaattaggaaaatgatggagcttggttacaagagaagttcaaagaaatgcaaggagaagttcgagaacgtgtacaagtaccacanacgtaccaaagaaggtcgtaccgggaaatccgaaggcaaaacttac

SEQ ID NO: 25597 - DNA, 1088 bp, Arabidopsis thaliana landsberg
ttgttgattaatttttctttttttaactcaacagagctttattaataagagtgggcatagtcatggactcatggtgtaatcaggatctaattttgattaattatctaacgcatgtgagcattattttcagggcatttaacaacaaagagtgacgtgtatagttatggcgtcgttttactcgagctcctaacgggaagaagagccacagaaaagtcacggccaaaaaaccagcaaaacatcatcgactggtcagagccttatctaacatgtggccggatattcgggtgcgttatggacccgaggctcgcgggacaagattcgtcaaggcggctaaagatacagctcttctagccttacaatgtgtgagcccaaaccctaaagaccggcccaaaatgcttgccgttgtggaagctctagagagtctcatacattataaggacatggcggtttcttctggtcattggccactgtctcctaaatctcagggcgggaaggtttcccgaaggttcgaggggatcatcggagtggtagaaaatcagctccgggttcgttaagatcgtgaacttagggttgaatgcccttataaccaaaaagagagaagataacatgtgtgatgtggtgtgtgtgtatgtgtgtatacggtcatacgtctaagagtgacatagtgagagacagatgactcacactaagaaaaaacaatgatatgaatatatacatattgtagattaggatcgtacatgttttcctataaaatatttaatccaattggctttgatatagtttcgcgattttcattgtgaatatcacatccgtagatcattcatggtgtatagtatcacttaattggatctagtaatatcatatcatctaacatatgtttgcgtaatagattgttttaaaaaaaaaaatacactctttgagttgaacagattctagaaactaaaaaaaaaagtttattgcaatattttggatatatgctaaataattaaaaatcaatgggccggggtacttgaccctaaacataagccaagcccatataaggcgtaacccataattcagaaaccctaggttttcgagaaagtataaat

SEQ ID NO: 25598 - DNA, 1187 bp, Arabidopsis thaliana landsberg
aataaactcctatcatattcatttccagaacttcttgtatctgagagataagaaagatatgtgacattaccatttctgcagtaaagtttatgtatctaacactctcttcaaacaacaaacctgccaatataatcaatgtgtcaactttagatgaatgcaatttcaatttcgagaaagagattagctgctttctaaaacaaaatccaatctaatacctagagaatgtttcagctttcaaagttaagatcatttcctcagtgcaagctaataacttgagaaagtttcagctttttgggtcctaagtcttaaccaacaacaacgaatgctaagaacaaaaacgatgtaaagccatgaaaaatgtgcaaaaccattaaaagtttcaaactttaatgcgagttcactcatcaggtccaagaaaccaaattttcacaagagaatgaaggagaaaatgcataaaaatgtaacagaggaaagcaaaaaaagttactcacaagcaagaaaacagcacagagagagagagagttgggctgcttctgtgggttgtgctaaggctatatttcagctgagcaggcaaatgtgactgaaaataaacaagttccgatcaataaaaaccctaaaacgaagaaaaaggaacacagactgagaaatttgagcagcaaacatgagagtgacgagagacgatacagagaggctctctgttcatgaatctatagaaagttaacgcctttttgagagataagagaaaaaaaaactctgacgaagaagaagaaccttaccgcaaaattgaaacgagaggagtcgatcacattcacagtcacatagatggtatgttttttaagttttaacttctccgagaagaagaagagcaaaaggtttcttgtttctcaaaacttaaaaaaaacaagaaaaaacccaatttttgttttacaattgaagctcatatttttgttattactctaattaacccaatttcatatacattatacaaattttatttcgtcttgtttaaaaacataataatttactcttccatctacactaaaatgaaagagatcgtttcgtttgtggttaatttcacaattaattttgtaagagaaatatgcattatttagaagtttgtggtcataactgtaaaaaattcaacactaaaagggttcttcatataattacgagaaacttgggtagga

SEQ ID NO: 25599 - DNA, 1004 bp, Arabidopsis thaliana landsberg
tcctttgcaacctcatcagagcatgtctctataacaatattctcaacaacaacttggttgcaggggttagaatcatcaattaagtcaaagcaggaagtagaagcatctttcttaataatttcaggaatttcaactaaagatgctgctggggtgctaccaatgttttctagcttagtagttagctcattattgtgtatgctaagaatttccattttctctagcaaattttcaatagcttcttgggagctagctaacttagccttaagtttttcattctttttaataaggctatcatcagtagcagtggatggagcactagattctaatagctcaagtttagttgatagctcactatttaagtttgcaaaagtttcaaatttttctagcaaacctttgtaatcattttgagagctaatcaacttatttttcaaagttttaagttgagctttttgtttagtgcaaacatcctggaaaaattcaacggcttccgcaagctcatctacggagggctttccctcaccttcatcatcactactactttcatcactagaggatggaatgcttttgttaccttttgccataaggcatttgtgtgatgaccgtgatgagcgtgatgaggaccggtggctgcgcgtccttggaggttcatcttcacttgaagagtcatcccaagttctaacacttgtcagcgccttgcctttgctcctctcctttttgggtttggccatagttggacagttgtcccagaagtggcccttctccccacatgcgaagcatcctctcttcctttgctttttcctgtcaatgttaaagagaagatccttgacctgcaggggcacacccattagattaatcttgtggatcatcctcattacctttccgatgcgtcggattgtttcttcgtcctcggaggatgatgtgcatggttgatcatcttcatcatcatcactttcttcttcttcctcttcttcacttgaggaactttggagtgggagccttctttt

SEQ ID NO: 25600 - DNA, 1206 bp, Arabidopsis thaliana landsberg
aaagtttttgacacccttaatgtttagataatgtatatatgttcttctttttgttgcaaatagtagttttttaccgtactgtaatttactcgtttaaagtttattgctttttctttttgccttttcttttcgatatgtaacttgatattttatagtggactccaaaacgttatagaaatattgtaaagataataatagttctaattttgatgcttcatacggcgataaattcaacggctggttagttgatagttttctaaactattaatttattatcccaaatatatatattttttttttggacagcgaaattgattgaattattgacaaaaagatatatgtataagaaattaaataacgaaaataccacctctaccctcattcatgatttgtctcatgctccaggtgtccgttgctcaacggttaattctggtactttgggcggtgattttgatgtattaaaaagaagtcgagaaccaacgacaaaagtttcaattattcttattattattatctttaagattctttagaagtaaaagttagcattaatacaaaactattattatcagcgttactgtaatattgttgaaaatcatcatttgaccaaaattaattaaacgcgttgttttcatcagagaataaaatttgaagattttaaaaatcaaaacttttcacaaaataggatacccaataccgaagattctttccttttccatattaaaaatgtctaaaaatagttattggttaattatacagaatcattaatttacaattaaacccatacacataaatatataaatgaaatattgcaaaacagctgtaacttgactgtttcggaaaatcccacttcacatgcttcatctctcaacaccttctttctgatattcactttatactctctttattttcttatttaatttagtatgctctaaaccctttttgctaactctataatgtcccctcacaaatccttaattcacctcgtccccttcgctctcgagtcaatcaatctctctactttaatgtctttgacttgtcttcctcgttttcttctacctttttatattttctctcttttcagttttctctagaatatacactagtaatcagtttgcgtttgataataattgatgtggcaaactcttgtggaacttgatgttcaacattcatgtctccggtgattagtgaatccttagatccgggttt

SEQ ID NO: 25601 - DNA, 1117 bp, Arabidopsis thaliana landsberg
gtgctattctgagattaattcgacaaggcatgatctaaatgagagtatatatctaagttctaacacgaaataattggaaataacttacttctttcttttgctgtggctccttctgatcttgtttagggttatgttttggggaaatcatctcagcatttctactaaatttcgtttgcactcttcgtaatatcttcaacggatcatcaaattttccagacacaacaactttattgtctcctatctctgtcttaatatgctcaccccctataagacaaataagataatagctacttatgagtcatgagtaagaagaaaaaaacggtaatcctattttttaattgatgctttaagaactagagattactattcgttatgtcattgtgggaattaatagacaacttctctagattacaggaaagaaaaataaaactgaaaccagactagataatgcttaagttaaattatagtacaatttcactcaatgataaatgattaaatatttgacattgattcttatgatcgagaccatatatatatgattccattaaagagggaaagtaatctaataatgtttcttttaatagagtattaccatcatagccccttaagccatgagaaacttgggatggacattctttaacagggatggtaaaccttaaaaccaattcctttacattgatttttcttatcagacttatcgactgatgaatctccatttttctggttcttcttttcagacttgttgtctgattctccattttgcttgttctttagaaccaaatccaaaacacaaaatataagttcacataatttacttaacaaattactggaattaccaaagacaggaatgcacatacctttcccatatcaatgtttactcctttgtacgacaagtgcaatgaaaaagttgaatagtgagactcgatatatataaggtcagagaggttttacgatcaattaattatttcatttgtaacatacataaaattatttacttctcaatctggatgatcctatttgtttacaatgaataataattctaatattcactaacaggattgatgacagagagacacataattttgtaacgatcattattaaattaaatgtcaatcgg

SEQ ID NO: 25602 - DNA, 959 bp, Arabidopsis thaliana landsberg
ctgcatacggcaaactggactcccaactcttgtcaaaggtcaacacacaagctctcaataaatccttgaggactttgttgactctttccgtctgaccatctgactgggggtgataggcgatgctgaagtctagccgggtgcccaaggcttgctgaagacttatctggaattttgaggtgaactgtgttcccctatctgatactatcttccgtggaatgccatggagactgactatttctttaagatatatccgggcaaggatggctcctccgaaggtagtttttactggaatgaagtgagctaccttggtaagacggtcgattattacccagatagaatcgttccctttttgggtccgaggcagtccgattacgaaatccatgcctatttcttcccacttccatttgggcactgggaggggttttagtagacttgcaggtttctgatgctcggctttcgttcgctggcaagtgtcacaccgggccacatactgtgttatctctttcttcatccctctccatcagtatctggttttgaggtttaggtacatcttggtggttcatgggtggatggagtaggctgagttgtgagcttcatagagcaggacttctcatgcctccccttttggaacacacagacggttcttgaaccaaaggactccttgttcatctgtcctaaggtctggaagttgttctttgcgagctttttccataagtcttgttgtctccgagtccagtcgttgagctttgcatatgaggtcttctagcattggcttgacttcaaggctgccgttgtttcccagacatgcattcagctgagttgattccttcttccaatcttttaaaaagctgacccccttcatcccgaaaggttttcggctgagggcgtctgctaccacgttggcctttctggggtgataattaatctcaaggtcataatctttgatcagttccagccat

SEQ ID NO: 25603 - DNA, 1386 bp, Arabidopsis thaliana landsberg
atatgttaataattcaatgcaatacattgaatgtaaaaatattatttatgagctctttaaaaaatattatttaattaacagaaattaatttccaattaatatataaattttttaacacatgacaaaccaaggttgtcttctacaagtatttgaatttctcaccattaaaaaagagttggcataataatttaatatgtattgtgtgtgtggtttaaaataaattattttggtacataaatttttctatgaaaaataagaataattggtaatgttatttttacaattgacatgtttaatttttttttattgtaacataatctaagtaaaatttgatgatatattttggtgttctctttcaccaaattattctttagatcttagaaatgttaagatatcttagtttaagcgagtatgagtgtatgttgataactttattaactcattttaagattcgaaaatagtattaatcagttcatatatagtcccataattatatgtataaaaaaggtaataattgaggttaaaataaacaagacgaaagggtagacttttttgggatatagttatgctaatgttacatctagaagaatataagcttttttgtgacattcttgtgagatgatgacacgtggaaacattaaggtgttttagataacgataaacggtaggcaactaaacttgttgggattacaggtggtggtggtgttcttgactctagacttagaccaatgaatctaatcctctcttttgtttagttttttttatatagtaaacagatttttagagtgagcgtagagtcaccagtggacggcggagagaagtcggagatatgcggcgaacgtacaaggaccgatggtaacatgtataaggtgttttgtttatggattttaatataagacaaatctaacatctagaatatgtgttgttgaataacgttataacgataccatgaatatttctagtggaaatggaaccttaccaactaaatgactatctcttatactcaacaagatgtgaggagttaatttatttattttttcactagtttcattgatagagagatggaatacaaatggtgaaatacatatgtcagcaaaaaaaacaatcattccaaaaactaagtcgacgagcaaacgatatctctcgaacaaagatagatccaattcaaaggaggaaaaatctaaaatcatataaaaagaaaaacattgatattgaacccaaatttcccatactcataactaaagattttaaaaataaaatataaagtctaaatccgaatgaaattgaaaaaataaaaacagatctgagactagagatctatctaaaggaaataaaaccaggctctccttaccacaacggcggtaagacatcaatcaacaccccgag

SEQ ID NO: 25604 - DNA, 1241 bp, Arabidopsis thaliana landsberg
tacctctctcaggtttgattaaaccaaaaggttgtccattaattagtactgaataagtcactgaagttacacatcccattatccaagatatccatatggaagagaaacccattgctcttaagatactacttagaaaggtccattctaacctatcataagccttggacatatctgtcttaagtaacatagaagatgctgaaaattcctgatgtgaattaaggctatgaacaacctcatgagctatcagaatattatccgaaatcatcctctctgaaacaaaagctgcctgagttggtgaaataatatgaggcagatgtcttttcaatctgttaacaaggattttagacactatcttatagagcacagagcaaagactaattggtctaaaatcagtcatccgatttggtgcctcaatcttaggaatcaaacacagatttgtatgattccagtccacagggaaaataccagaagtgaagaaaccttgtatctcatgaataacctgatgctttataaggtcccaatactttttgaagaagaaacctgtgagcccatcgggtccaggcgcactgtcactattaatagagaaggctgcatcacgaatttcatcctcagagataagtcgacataagtctgtattcattgcagtagaaattcgtggttcaaatgtgtcaaagaactctatatgttttgaaggatgcgaagatgtgaaaagtcttgtaaagaactcaacaggaacaccccccttttctatctctgaaaaatggtcaattccttgatcatcaacaagactatgtcccgtgtccttgacacgagtagagttcactgaagaatggaaaaattctgtgttcctatctccatcatgaagccattcttctctactcttttgacgccagaaaacctcttcctctcgaaatgcgacagcaagctgtcccttaagttgtctaattctagcaaaactcggacaagaagattcatcttgtaatcttaatgattccctcaatcttctaattcccttctctgaactagaccaaaatttcttcttccagtcttgtatcgcctattgacaatcttcaataccgtgagtaatggaagaagacacacctgaagaatctgcattccaagcagccgtaagcatatgcaaaaaggaaaggtcttcaacccatctcttatcaaacctgaactgtcctctgaaaaagtctttgtcctgagtaacatcaacaagaacaggtttgtgatcccat

SEQ ID NO: 25605 - DNA, 1970 bp, Arabidopsis thaliana landsberg
  unsure (1)..(1970): unsure at all n locations
tatgtattcaaatatacacattttagctttactgcttatttagtgtacattaaatgagtgtaagaataaaattgtgtatatttatgagatttacaaatcacattatgtagctattcctctctaaaaatcaaatataacatttctactaccattaggattatttgttattaaacatgtgattaagtacttgagaggcatctaaatagtgtttaatagtgaaaactgggtattttgctaattttgagtagtaaagtgactatttaagtttttaaaattgggtattttgcaagttatcccaagaaaagaaattttacttttgtatgattttggtctcgtgttgtgtataaaacttttggaaggatacgatgttattcggctggtgttatgaatttctaaacgttttcattagtcaaagtgtcttgtatctcacagagtctaaatcatttttactatagattatctttcttaaatgttgtggaagctacttaccttctctaccataatagtgatctttgaagagacataagtgttttttttatgtgatgttcagtttgaattaggcaaatgaataattcatctagatttccagtgatatccaacaattacgagcttttagaggaaattggccatagtttgcaccgatcatgatgtattatccctctctcaagatgacatgtatattgaaatttaattcatgttgttaataaaagcatgaaattaacgatgaaacaaaaattttgtgaaaacatcaggtatttattgatatgttcagacatgtagcgtctttatcaaaccactagtaacttttttgatgaccttgagacaatcaaactcaagatgtttggttctctcatgatatcagggccgaccatgaaaatttgggtccaccaacaaataattttgagggtttttacaaagatttagtaaattaaaggtttttaatgtataattaaataattaggggtcctattgcaaataagcttctgctgtagattttacaaaattttgggaggccctaaagccaataatgctcaagttcataagaattaagaaagacactattaatgctcaagtttaacaatgacaactatggacggaaaactcaaatgcctttgatcgtagctttttgttctcaatcgatcaactaaaatttctctgatacacttttaagtttctaacaaaatttcctttcaaaatagaataaaaaagtttaaacacacttatctcctctaacttcttcgaacgtgagcttcctttagcattgtctgccaaaggtctttgacacgatgacgaaactttttctgaaaccaaacttcaatctctgaataaagcacattcggattctgttcccaattctttctcaaactctccaaagtatcaatcttcttctctgtcaaaaccatcaccaaactcccaactctttctaaaccccaagcttctctttccaacaacgtttcaggtttcccagccaacaaagccctgaagcttttcaaacaagttaatacctctccttgaagcaaagcgcatccgaaagccgctgctcggtctctatcctctgttattgccacactgtgagccggaagttcccaattatgaggaccgaaactcggaacgacccagcacaaaactctatcctcctcacttgagtaatatggtttcgggtccttgagcggtgcagagaacacgcagagagactttgcgtgcttcaccagccattctggcctcacccgagtcgctccgtgcatgtatggtctgttggtgagtaggagctcgctgtagaccaataactccggagctgagtttatgagagacgaccaacggtgcaagaaaacaggttcttgaaccgcacatgcttggtattctgtcgctctggtctttctggctacacggnctgcccatcccgcacatatggcttctcctaacagttcttcttcgttctgtagaagaggggtttttgaggaagtcgatgt

SEQ ID NO: 25606 - DNA, 1331 bp, Arabidopsis thaliana landsberg
aatttctgaagttttatagtcttggtttcccttttctcgatcttgtgttgttggtgaaaaacctttgattcctttgagagaatttggtttggggattgattggtggtgagctgcactcttcggacgactgcatacacctagttgttgcatattttggtcgcgatttgagaaaaacttaggttgaactcgttctagaaaaccccaacaaaaccccaacaaatctgcgggtgattcacaagtcggattgagctcaaaatttggggagatcttggaaacgtatttgctcagatgtgtgtaaactttcatctcaatcggagttcgtttggtttagttttgaattcaaaaatagaattttgtattgctgaaaacaacacttgttgacgatactgtattggaccgttttggactttttggtgtccgatttgcgacccgtttgttttgctggtctcatgtgagtattagaaacattttgtaatcatgagatcactcgttcgctgatatgttcatggtttgagcacttgcttcatctcaattgaagtgaagtgttcattttcagtgtttggaagcaaaatatgattggctcccattcacccccctggtcgccttaccggtcctacaattgatatcagagacgattaaggatttatctaatcggtttgaaatccatgtaggaggcatggaacgaggtgttggcaaacctccattcttcgatgggaccaattacccgtactggaagattcgcaagtctgcatatctttagagcatcagttactgtgtttggaaaatttgcctcgatgcgaatttcgatgctacaagtgaccggatcactccaattcagatggagtaccatgattcgaataacaatgctcgaaatgctttgttcttgtgtctctcgctttgcagagtttaagcgagttggacattttggtatgtctcatgagatcaggtccaccctcgagaaatttcatgagggaaatgatcatgtaaaccccagattttttgagacgtgtcggcaagagtacgagaactttattcagttggctggagagatgatcgacacaatgttctctcgattccagtcgattgtggacatgatacgtgcaaacaaggcatagcttccctatgatgatcatgagaaagcattgaagttgctacatgctctagattagagggtttgggaggtgaaagtctcggtggtcattgagtcaccaaattatgagactctcactgtggatgagctgttcagcaagctcaagtccactgaggttgacaccaaacccaggccaagattgagaacttggtgcacccacaatggcctggtctctagaggc

SEQ ID NO: 25607 - DNA, 1329 bp, Arabidopsis thaliana landsberg
  unsure (1)..(1329): unsure at all n locations
tagttgaattttaaaggatttattggatcaaatggttggatgtattaagttagctttattgtatcagaacatgaaattgtgctagagttaaaactgtcttcatcggatatgatcatcaaaacttgtgagtggtcagaattgccaagggacaaataactattagcattctccaatagatacatgtacatatggagagatcgactttaataactaattgttttatatctcgatcattctcaattggtttaaccagttgtgtatatttttactggaaagcaaatctatacgtgttcctaggtaggtgtgacttatatatctggatgatgataatataaaccatcaatttattatgtttataagatatacaaataatcagtaatcgcataattatagtttaactagatcggaagtagagcattcaaatgcttggctatagacatttctaaaacatattgttacatatcttgttttgttttctttttgtctattgacacaatgatatacagcaaaagaaaaggtttaaacctgtctagaaatatatagaaaatcagtttctagatattttcaagatttttttgtacatattttttgttattgttgatcgctaaacaatcctcactctccagaatagtctagaatcgtcnnnnnnnnnnnnnnnnnnnnnnngaaacgatagatattttaaatgattaatgaagtacaaaaccaatgaaatgttatttttgccttcgtagataaaattgttggttcctttcacactcatacaaagttagtgggggcagattaagctaatcttaaccctttcttttactaattaattccttaaatctaatactatacagtatcatttagttagaggtattctggatcaaagtatactgtttctttttttatcaactaagataaacagccacataattgttaatgaagactttcagagtgggtagttatttggacggaccgacgtatgatcacgtttacgtgtgtgattctgatatacaattttgttcttattgtttaaaaaatgcaatactaattttaagataagaaggttcatgccgtttcatacatcagcagacatttttttattttattttgttcctttatatatgaactaaatacttaaaacttgtttcttatagatagcatacacacttaatatatatttttcgtacatcttacacaataaacaaatgttgttcctttgtcgctgtcatgaaaacaacagacaatttgattaagggcaaataaataaacagaagctttgcatatatgactatttgcacatttgttagttgttgattaatgaatagaaaagaaaaataatgt

SEQ ID NO: 25608 - DNA, 1620 bp, Arabidopsis thaliana landsberg
  unsure (1)..(1620): unsure at all n locations
actattgatatgatttataacttgaactcgaaacattcactatcaactacactttcactgaaacgtcgcacaaaaaaaatattacgtacgtacatgcctaggaaatcataatcaatccatagataattataatatataaaccataatttagtgaggccggtaacaatcacgatcgcctttctacaaaagagaaaataggtgaaccgatagaaaacctgactgaaaacgatcgttttagaatatgttttttttttataaagcatatttttgaaagtgttttaacctttgagcgaatcttattatatatatagctagggttagaacgagagtttatttggttaaagtagcgttaatccgatcaatccgatccaattcgatagaacggaacaaaaacaatcgatccaaaatccgaccacatctttttctgtgttttttttcaacaagctgaccacatctttcatctttgatcaatctaaatgtgtggttgaaagttttactctttttgtagtttttgattggtaggttgagttaatttcttctataatttttcttaaaaaacttaatggattcagaaaatcgatagtggtgagacgtaaaaagttactattttcattaacttttatattcatgtttaaattgtttgtgttcttcgatttcggttcttacttttctcgaatgtatatatgttccctagctattttgtttcgatgcggatttttagtggaaaattgaattgacgttaaaccaaaatggagacaattaaattgaataagttttattactctagactaaagacaactaatggcaaatgaatgaactgnncaaatcaaataagaagactanaggggnntattggccccgaaaccgggttttnttttccctccaaatttggggcatttgctgtcacaacgacagaaattcaataaaagtatctctgagaagtataatattatataccctgaatttaatatgttgatggggttaaacatccctgtctagaatgatcaataatgtagtattagttacaaagtgaaatatgtttttcttggctctagagactttttcctatgtgtgaccaaccctttccctttcaagttaacacagtcttatgtgtacgtaaaaggataagttaattttttttttttcatttaaccttttatactagattacgaattgtttaacactcaaaaaataatatgatcggggagaattgcggattctcatgtatggttgaattagttcatcggtaagaaatttcaaatgcttagaattactcaaatgtaactgatggtctcaaatttaccaccaagggattgataaagagataacatatacttttgacgcataattgattttaaaattttagtcttgtagaaaatttcgtgataattcgattctagtaatatgttttacgaaaaattgtttacaaaattgaattttattactgtattactgttgcaaacaatcaattaagttattatgtgcatttatttaaatttttatgtataagaagaataactaaatcagtgatacataaataaatttattattattcatgaaatatttaatgataaattaaattaataaataaaataatagagaataagtagatttattaca

SEQ ID NO: 25609 - DNA, 864 bp, Arabidopsis thaliana landsberg
ttatagttttgagggattataaaatttatcttcttatggtaaattctttttaacacatcaatcaattctttaaaacaatcatcatgagtaaaggtgaaaacgagagccagtaataaggaaacaagctacacgaaaaccagagaagcaagaagagaaagctaagaatagaaaagcagcaaagcctaagccaatggctacatctgactgcaagcaaaaggctttgttagccgtacacgtgtcaccacctctcatcgttctagccaatgctgctgcagccgatcccgccgatagcaataggtacgagaacacctgcccccattaccaatatttgaacattgcaatgggtttggttagttatttaattagggattaaactaaagatcagcttaacaataaaataattaactcaattcgtagaaaattagtagctaatcgttgagacatgttttcctttattcaatttaaaaatagtatacctggtcatggccaaaatcgaaccagacctgaaaagcttcaggccataaggtggtttctcttgaaaattcccaaacgcaagttcccatttcaaacaccgagtataacgccacgatcgcgtttgccacaaacacgaatctgcaaagcaaaccaaaacaaaaaaagttagattcggttcatgaatttcgaaattgaggaaaaagattgagagaggaatcgaacctgaaagcgtcgaaatcgtaccagtgaggagaagcggagccgcgggaattggtgagcataaagacggcggaagcgagagagaaggagaaagaagcgagacggaggaggaggattaaggagttgaatcgacggagtttctgagctgtgacggctgagtggaagtgagta

SEQ ID NO: 25610 - DNA, 680 bp, Arabidopsis thaliana landsberg
aaaaaaaacaaattttggcaacttcaataatcatggaaggtaatgctgggacaaaggatcctgtaagtggtggatttggtatgatgcaaaagatcatgtggaagattatgttacacaaagcctacctccatgaactcgaggagaagattaaggaagagaaggaaaaagccgagcttcatctttaagtgatacattgtagcatatattatttatgcatcaaataatgattatttaatgtaaaatcatatctaaaatgaatatttaaaatcttctgtcgagcatagctaatacctatatttcttattgatatttcttgtgatttaattgtgtgtatatttcgatgatcataaatgaaactttgaaatctagagagacctattgtacatataataaagcaaatttataaaaagattgataattttaaaatactagaagttcttgtttcctgttctaagtaaaataacattcctagatttagggtttagttgcctttggaaaatttatttatagagagctagatattgtgtttagttttgtttatctttgactcatgtaatttgacatttgattataaattatgtttgccttacatgcaaataatatctaaaacgcttgtatcacttttctcttactaccactaaaaactttgcgtataaaaaactcaaatctttaaattttgg

SEQ ID NO: 25611 - DNA, 1142 bp, Arabidopsis thaliana landsberg
atattctttgaaagaacatattgaatgaatgagcaatcgacacaggagcaaagtgttttttctttttagaaaatgtccaagctaactagaaaatgctaatccgtaattttgataatatcacaaccagttcttttggcccctagtcaaaatctgtaaacagagagaaaagtttgaagcttcgtacttgctttgcaagttacatgccaagagggttaaaacacatagagaagaatccacctacttgaattttaatgatctataatactgataaccaactagaactagagtggcaaacacaaaccgaaaagtgatgatctccttgaataaccctgcctccggatgcttcgaaaacaatccgcaactagatgtcctgattttgtaatcccgatgatcatgtcctgagtccaaacgaagtggtaccaaatcctcgagataaggagatataacagaaatatctgaggagagacagcaaatctcatttgtctcggtattatatttaaacaaccgcttgtgattgtcacaaaagacaagattccctagcttagaaaccgtcaacaccgtgaaccaactagactcccatgggtggttaataatgatactggctaaagttatggagtaagtcttgctccatatttctttgtctacatccatcaggctcagtatctctagctcccattctggcgcaccgtttgttttagttatggctagacggtcatcaaggttcaccatctgggcactcatggtgcaacacgtagatggaacggaaacattgtggaactctagtgtgtgaagatccaaggctaggattccgaaacgctaaacattttttaaccagtagattgacccattcacacacactgacttccttcccacgtcaatatcgttaggaggtggattcagttcactccattcaccagtttcaacatcaagaacctcgcatttttccacaggactaaaacacatcctcaccactttatagatagcgtgcataaatctcatgatagttaccaaaagacaaattcccggactggaataggaacttcttttgaagccattttcccgatatacttataccaatgcaatccaaaattgacctgcttctttaataaaccattaaacagatattacctctgaactgaaaa

SEQ ID NO: 25612 - DNA, 4299 bp, Arabidopsis thaliana landsberg
  unsure (1)..(4299): unsure at all n locations
ttcttgatttattatgtctcaaatcacatcggcttggttaatcaagtaatgaatgattaaagcctgtctctttaacttgctgtcaactctttaaaggtatagtagcctactgattcttctcgctaccctgttggctatgcaggttttgattgctggatttcttagatgcatatgcatgtgtcttccttttgtcgcatttcaagcatacggatactataacatttgccatggacatacgcttgatgaaatgaggccttggtgcaaaggaaggataccgttgctgtataatttcattcaaagtcattattggtaagtactttgaacacaaaccttttcttgttctcgtaaattttctttcttatatttgattttgagattcttgtttctgacaggggagtaggtttccttaaatactttcagtttaagcagctcccaaattttctgctcgcatccccaattctctctttagttgtgtgttcgattataagttacatgaagtctcggcctgagctcttcatatcgctggggtttcaagtcaccgagaaagaaaagagatctgctgccagactttattctctgaaggatgcagttgaaccaagtgttaaaacttcaacaaatgaaggtatcattttcttcgttgttatataatagttccaaaattaaacgttgatttattctctctgttttcctgaataggaaaccgtgacattaggcagcggaaacctagcagtaagaaggatgtgactgtgaccaaagtggctgcggaatccaactctccagaaaaatcaggatacctttcagctgatgttttcccatttatcgtacacttgagttttatggcaaccatggcgttcttcatcatgcatgtccaggttacaatcctcaatggcataaacagaatataatatacataattttagatgagattaaggttttagtgagactgtcctcacgtttgtgttgtggtaattacaggttgcaacaaggttcttgtcagcaagccctccactttactggtttgcatcgtctttgattggatctccaaaacatagtaaatggggatacttgatatgttcatattgtgcagcctatatccttcttggtactttgctcttgtcaaacttttatcccttcacttgattcatggttttctcagtatcattggagtaccaatacatggatataactttcctaaaggcaaaactatcggtttctttgtcatgagtgatgtaaatacagagaaccaactgttttttttttctttttcttttgttctctgctcagtgctcactgtgatctcgtttggcaagacattgatatgttctttgtggtctgtttgtaaaagatttgacattgaggtgactgtttcagtataagtactagttagatcaatgattgtttcagtataagtacttgttttgtttcttcgttatacaagtaacaactacgagacatttgattgggccctagatagagagcatccagcccatgtgtatagaggcacagaaactcatatgtaagagaccagcacgttgtttgataccagtaacttcgaacggcaggatgtttgtaagtgataataatcccacattgcttagcctagaaataatgactgggacacaggagtataaataaagaagtggctggaacgagcaaatcacttacctggacggggtctactcgtgatcaagatgacgagtggcctaggctagtgaccggcctgcactttgtctggggtgcttagcttaaggtcttcccttgaggaagagcctacgtcattatttgtggcagagggggtttgcgttcgcgcagcccctaccattattagtcttaatttttttttatgtaaactatttaattcctaatcttgttatctttcaacatttattatctaaatatcttctcgggaataaatgaatttttgagaacttgagtcgatttgttttaggtaacagagtcccacatcggaagtaagtatcaagttgatgggtattgtgtgactatataagaaagaggctttggttgaagctaaagtatctttgcgcttggggcaatgacatagctaatgaggttttaaacgagacgcgtctattgatggttgacaaccatttccacaaccccatcctaggcctaagcttgtctttggcctttgagaatttcgagaccaacactagagtacactttataacctctcaagttcctggttataaacttaaatttccaggatttgggacacttaagtaactcagtcacttcgcacataccattcaagcggatataatctggatttattggcttctcatagtcccaaccatgcatctctaactcaatccctgtctttttgatataggaaactaggcattgatatatggttagatacatggcaatacatgagtggagacagtagctgtgagacgtggcaagagaagattggtcgatgggagtgttagaggaagaatcgagatgcagagatatatagctaatgaggatcatttgcagaagaatatgaagattttggatttgttgtttatcgtttccttttggattctcagagagaatcgttcctcatcgttcgccggagtttcatgttgaactcttgtagatgagaagttgatatggtgttttatgaacattgtatcaatctgtcattttcattaatcgaagtattctatttcgttattctgttttccgttatcactccaacaacgccatgtcttttcaatctcttttcttgtcaaagtggagatttggcccgtgcggttccatctaccccaagaagcgaaagagaagttagtctccgatacttaagaagcatgtcaagggggataaagaatgcaaataaagtatcaacagaattaactctctccatagattctgaagtagtcatctaaaacaaaaaaggagcatgtcaaaggaagagaggcatagagattgtatcaacagaattaactgtccacagagagccagatatatgggatatcaggaaaacactcactaagagcgacgtgggacgtcaaatacgggttcttatacctaaggaatccatgaatgagcatattctgaaatacttcacagaagaacagatcaatttagttgaagacaaagacaattcatgggttaacaatcacggtgttcgacagcgaaaaaggaactacgcatgagttgtgtttcaagagatggaattcagctggaagctatgtattgaataagaattggggcagggattttgtggaaagaaggatgtaatgtgtgcatgtgatgggcttggtgccatgaaccgttggcctatgaattacagtgcatttgagtatatttgaaactatgtgatcagacggatgcatgcttattgttttcttttgattattttacacaaatggttgatcatttaagaaagatacatttactgttagtgtcataagtttgacaacgatgaaggaaactcaaatgccttgcccgtcgtatgccttccatctttctatcaccaccttgtactcttcatcccttctcctcaccttaaaaccataatttatagaagtcgaatcagtatcttttgatcttaattggtcaatcattatgtatattctcaaatgattattgttgagtctactgtatatacctcaaccatgggatttcttccgcgaagcaacatatcaacactcttttcagtctggacgagagtgaaaagaaagacaagttttgttagtatatatgatctttgatactgaatgagaatgactgcaggcagaggcaagaacagagttttgaaacaggatgcttacttgatgtgcaatccaataatctctttctctcatctcgatcaaaaaataaaaagtcggtggagcttttctctcgagaatactcttctgactccttctcgccctcgcttcttcatctccaagcgttacagtctcaataccaccaatctacaaccaacaatgagaacgtaaccaacatgagaaaaaactttgcaacggataccattaaattcagacaagcgatgaagagattattaccaagtctgaaagagtaggattctttatgatgttctgtagctgctctccatgagcagtgccaattagcatcactcctcttnnnnnnnnnnnnnnnnnnnnnnnnnnnnnngcttctgtgccaatctcatcaacgatgatcacttgaggcatatgattctcaactgcctcaatcatcactttatgctgcaaagatggcttaggtacttgcattctacgcgaacctccaatagctgagtgtggaatatcaccatctcctcctatttcgttgcttggatcaattatcacc

SEQ ID NO: 25613 - DNA, 1526 bp, Arabidopsis thaliana landsberg
  unsure (1)..(1526): unsure at all n locations
ttttttctcttttgctagtgctgctttggcacatttcctattaaaggaaaaacttaagaaaatgggagttctctgatgtgtgtcttgcattgttgggtctgttgttattgttatacacgcgcctaaggaacagactcctaattccgttgaggaaatatggaatctggctactcagccaggtacctctctctctctctttcttactcacacacgttgtgccttatcctatctgtagttttttttatctgaaaacacacatttttccttttcttatgtaacagcttttctaatctacgtagccataaccatgtcgattgtccttgctttaattctgcattttgaacccctgtgcggccaaacaaacattctggtttatattggaatctgttcgttaatgggtgctctcactgtaagttggttcatctcagcatactcgagcttttattcaattttatactgcacttgtaactctaatatatcttgttcttggtgtctttaaacaggttatgagcataaaagctattggaattgcgataaaattaacaatggagggagtaagccagatcgggtatccacagacatggctttttgtcatggttgcagtaacttgcgtcgttacacaattgatttacctaaataaggtaagctctctacaacagatttgtttggaaagccttatatatatatattctggagtcaatacgtcagtatgcaagtgtaagtagaacagttatatcgttaatgcccgcaaacaaatacccatcagtagatcattcctcagcttgacctatcccctagggactgaatcgctagatttttccggtcaaaagatatgaaccttaaccatttacacctgtagcattgaaggcctcttttttcccaccaaacatatgaactctagaactcacttggcattgttgactaaggcctaagattgctacttgttatgatttttttgcaggctttggacacatccaacgcagccattgtttctccagtatactatgttatgntcacaaccctcacaaatgttgctagngcaanaatgntcaagggaggttcaactagaaaacgtttagcttgatttacaaaagattagtaaaaagcaaacactgtaacattgaaactcggttttcacaggactggtctgggcaagacgcagccagcgtagcctctgagttatgcggattcatcactgtgctcacagggacaatgatactccatggcacaagagaagaggaacaacaacaagcttcttcaggtaaaaaaaaaaaactcttgcattttccatcatcgatcatatctgtttattcttctgctgccattattaagcataatactggtctgatctttgggttttcagaacatgtaagatggtacgactcgagaaagagcatgaacgaagaacatttggtaagcctgtacagtcctgaatactaggaagaagaagatgcaatatctctagactctcaatagattgaatgaaatttgccaaaaacacgcctcatgagtcttaaaactggatc

SEQ ID NO: 25614 - DNA, 1688 bp, Arabidopsis thaliana landsberg
  unsure (1)..(1688): unsure at all n locations
cttaaaaataatttctattatttcaactggaaaattattttttagtcattcagttttacaattagaagtatgggtgttttcacatgagaccttctggtaatatatatattttcagtacataagatatatatttttcctcacaaaatatcttcactagctatatgaatttaagctttcgtttaattatccttccgagaagaaatcatggtctttgaaatgacatgagaaatgacgatatcttgaactgctacttatgaaatttcttgattaattattagtagcatgggaattatattggtttactctatttctttggtttcctttgtatcttaattcgattatagtcaaaagtgggtacgaaccctaactaggttcacatttttgttgtcgatttgtcaaaccttctcgttacaagtgggataatcttctttacacaagaggatttgtctatttatcttcatgtctatttacctaagtgttgtttttatctcacattctcaccaataattagaatccaggaaaagatttcacaagacattcttaacattaaaaccaaagaaaaaagatttcacaagacacaactcattccacgaaaatatatctcatgttatgaagattaaaaacaggtcacctatattatatctaagaaagaagcaactcagtgagactttgaccgaaaaagacaattcaggtgaccgaatcttcagtttgtttttggtagccgagtttttaagacaaaatccccaaactaaacgtgtgtcgtttttgtnnnnnnnnnnnnnnnnnnnnnnnnnnnnnnaaacttttccatgatataaccctcttactataagcaaattcgtacacaatattggctgttcgctttcgagatagaggaaacttggggaagaataaaatagttggtagctagagagacatagacataactagttacaagatttacatctaccacgtatgttgttaaactacatgttgtttgtttaatccttaatactttggtcaaactataatcttcactggtttagtctaaatctaactcaaacatatggtgatgaaggcaaagagtatcaaattgatttaaggtaaatgagatcttacaatacttgagaaggatcagctccaaattttctaaattgtgacgaaattgaagaatacaacacaacaatgcatctttagatctaacacttacagatcttcatcgaatctatactcaaaacataactaaaaaccctgagaatccaggtttcgtttgttctctaggatcagaatcatcaaattcgagcttctcaaactcgtcctgcaacaacagaagcagcagcagaagtagcagcagaattaccaatgaacgagagtaaaccagcattagcaggctcttgttcatccaagaacaaatcatcaggaaccctaaacgcaccatgtaagcaaacaatcgcgattccaatcgttaacgccgatgttaacaaagatccaacactcgtcataaacacaaccacaatcgtagtcaaaacaagaccaagcaaagtctcacgatctgagaaactacgaccaaagagaaccaaaggctgatctgaagatcggaagaggtatagaaacatccaggagcctaagagagagaggaggacgagaagcgagaatggatgcgagaggagggagaaagcaaggactaacgacccgattgcgtaggaatt

SEQ ID NO: 25615 - DNA, 1628 bp, Arabidopsis thaliana landsberg
  unsure (1)..(1628): unsure at all n locations
aaaaacatccacaaaaccaggttagacaagcaaaaatgactagcaaagcatagacgaatgctatatgtccaccaaccatatgcaaaacgaaagaaaaaaacaatgaaatccatgaataaagatttataaaatgaaagatccacaaaagtatcaccacaagccacgtaactcccatatgcattaaaacatatcaaatttaatttcaaatagtaaccaaaaattttcattttgtaaccaaaaaaaacaaattaaaattttaaaagggaagggcaaaattgtcaacccacaaagccaaaggggaaagtggctgaaaaattcagtctcaattcagttgactcctaaacacacgaaatgggaaataatttctccgttgaatctccatctttggcgccgttcctgtgtgggaaacgcaagtatttatacaacctggagagaaatctagaggctttgcataaagtaatgcaagacctcaacgcaatgagaaacgatctgttgaagagggtgtcgaaagaagaggagataggtctacaagggctacaagaagtcaaagagtggatttcaatggtggaagagattgaacctaaannnnnnnnnnnnnnnnnnnnnnnngtctctgaaattcagagactatcaaggtacggctattgttctctgatccctgcgtcgacctatcgttacagtgaaaaggtacttacgactatggaaggagttgaaactctgagatctaagggagttttgaaagctgtcgttcacagagctcttccgcctcttgtgataaagatgcctccaattcaacttactgtttctcaagcaaagttgcttgatacggcatgggctcgtctaatggacataaatgttgggactttgggtatttatggtaggggtggagtaggcaaaaccacccttcttactaaactcagaaacaagttacttgtagatgcatttggtcttgtgatctttgttgttgtggggtttgaagaggtcgagagcatacaggatgaaattggtaaaagattaggcctccaatggagaagaaaaaccaaagagcgcaaggcagctgaaatattggcagtcttaaaggagaagagatttgtgttgttactggatggcatacagagggaattggatcttgaggaaattggagttccttttcccagccgagataatggatgcaaaatcgtattcaccactcaatctctggaagcatgtgacgaaagcaagtgggttgatgctaaggtagaagttacatgtttgagcccagaagaagcgtgggatttgtttcaagagacagtcggagagagcactctgagaagtcatcaagacatacctaagctcgcaagagtagttgctagtacatgtcgtggtttgccccttgctctcaatctcattggtgaggccatgtcacgcaagaggactgtaagcgaatggcgttacacaattaatgttttggcttcttccacagccgaatttccagatatggaagatggggctcttccaatcttaaagtctatctatgataatatgagtgatgagaagaacatcaggttatgcttccaatattgtgaaaagtttccagaaaattgtgatataagaaaagaagatctggtaaactactggatatgcgaggg

SEQ ID NO: 25616 - DNA, 2153 bp, Arabidopsis thaliana landsberg
tataaaaccaaaattatctatttttaactttacaatgacttactagaaaatattatattcgccaaaatcatttatttaaaacctttaatgcaacaagattacaatttatttaaatctaacagtctgaaaccgttttaatggggaaatgaaaaatattacgctttcaagccaattagccaaaaaataaacgcttttaagccaaattataaaatatctatttctctttaaataatatgtatcagtttaaaaagtaaagagttttcttaaacccaagaatataatttcaaaagtgaatttgagataaacgttaaaaaaaactttatctaaatttcacgcgttccgtgtacatattttcaattaaacgtaggcaatatggtgacaaaaatgaatagttttcaaatacgtaggctctaagacatctgtaatgtatatataacaccacacacacaaatgtccttaacgtttcatgttgtgtcattctcttttcttcaagtcggcaaaagtatcacaatgttaaacatcttaccgtttttcttgttctttcttccgtttctcatcggaaacaaccgcatttgcgtcgccgtaaagacaggctttgtcgggagaaacggcacgcagttcgtgttgaacggagaacaagtttacttaaacggcttcaatgcttattggatgatgaccaccgcggctgacacggcatctaaaggaagagctaccgtcacgacggcgctccggcaagcctccgcggtgggaatgaacgtcgctaggatttggggtttcaacgaaggagattacattgctgttcagatctctcctggctcctatagtgaagacgttttcaaggtaacacgcatgcatatacatacatacacatatatacttaatattttgagaactttggtggctcgttgcaaaacatgctgaaatcaccatttcgtatgtgtttatcaattatagcagcaacttaatatttttaatcatgaattgatcgttgctgactgagttgataaataatcattgtttatttacttaattattttgtattgattcactagtaacgggaattataaagaaaaatattgactgttattttttattgtcatgatcatatgtatattaatctttggatgaccgttgtttgttgaatctaaattgaaggattcaaatttcaaattatacttccgacataagaccttcaaacctttttgttttttttctcgtaaaaaaatcgtcgtctactccttttcatacgctaatataaagtggataatcgcaaaaaatgacaaaagcatagatagactttcacattgttaatcatatttatattaattagaagcataatttggtactagacacctttaatttttgttgacctaataaagagactctcacaattgattgatagaaaaactaacaacaaattgtaattgggttttatgagtactaatactgatacaaagttttgtgacagcaggggctagactttgtcgtctatgaagctggacgatttaatattaaattgataattagtttagtcaataatttcgaagactatggagggagaaaaaagtacgtggaatgggccggtttagatgaaccggatgaattctacacaaactcagctgtcaagcaattctacaagaatcacgtgaaggttagtaataatatgaaaattaaacccatgttaattacataaatatcagttaaatttaatatctagagatcatcatatgtaacacgacacgttaaaggcaaaatattcaggttatatttgtacacgttaacgcgagataaacgacggttttgaaatgtcaaaagttaggttttgatcaattaaaagtaatcaacaaacatgacaaatgtaccaatctaaaaatgtttgttaacttattattgaacaaatgtcccaaattaaatatctcgtaaaaggattagatcatatatagaattttgtatactagtaccgacttaaaaatcaaactaaaccgacggtttgacaaaaccatgaaacagaccgtgttgacgaggaaaaacacaatcactggtcgaatgtacaaagatgaccctaccatcttctcatgggaactcatcaacgaacctcgctgcaatgattccactgcttcgaatattcttcaggtatctatgtctctcctctg

SEQ ID NO: 25617 - DNA, 501 bp, Arabidopsis thaliana landsberg
aaaagaccctcaactctgttcccaattacacggtccccctcaccgattccttcagcactctatttgtactcatgatttcccctaactctctaactatcttgctaaatgtaacagctaagagaatctcatatcttgctagtcatatatgaaaagccttttcaagtcatatgtctatgagaaaattggggattggatcatatagtaatctatgagatggttcagatttgtttgtggtctgtgatcacaaggatttatagttatttaatcaaaagtattacatacatacctgcggaggggtatgaccaagaagttcccgcaaaggtctgctttcggccagcggatgttctgcaggaagttcatatacaatctgattgagaacctgaaaaatgaatcagaactcagaaaacaagataccaagctcaaaaccaatagagcatcaaaaagaaaatccagtcaagttagaaggtgaaacaaatgaaaggttagagcagcaatgaacaa

SEQ ID NO: 25618 - DNA, 6315 bp, Arabidopsis thaliana landsberg
  unsure (1)..(6315): unsure at all n locations
gatttgcatattcgacgatgtacgtacaataaaaaccaggtttagctatgcgtgtaccaagagcgaccgcgccatcccaattcttctacgagcacctgcgttttttaaatacctaattaattacactatttttcaatatccgaatcaagtggttttaatgtgatggaccaattgctaaagtcaaagactcaaaacatattaaatttggtgcttttctacaagttggatttatagcctgcctttagagataatatatagacagtcgttgaagtcgtcgtccccttaagaagtcaatttctcttctcatacatccacgatctgctaatatcatttggtagttaattggatactaatattacaaaataaaatttacagttgtaatcatgttggcattcaccagctaaccttagagacgccaaaattaattaatacgatactagttttttttttcttaattctctacggtctacatgctaacaaaatactagtttatattttagaatgcctccgataatcgtacttatcaatgtgtataaaggaatttggaactgcgtggagttctttcatatcaaactatgtcccgagagacgtcatttgcaagtttaacctaaagtgtctagttcatcatacaaaagaaaaaggtgatatgaagtgcaagttaattcacctgccactaaaaaaatatttacttgcaatttgcaattagtacaataaaaaaaatgactaattgattcatctgccagtttttttaaaaaatgaccctccttcatatcacttgtcttctttactatcaatcatagatgctgctctctctgatcgaaatgaatattcagaaaacgaattattgtaacttcatccataataacatatttgtaggtagaatatctacatgaaaggtagttaaacatgtggttcatctgaaatctctcgatcttgttcgtatgcgtttctggcacaagtggaagcgcgtggctttgagacgcggccaaaccacgtcacgagccgtaaggtgttgaaggagtcaatgtagactatgagagaagaaacggagacattcaaactttacagagagtaacacgaatcgtcaacgcctttatatattacacacacattttatgtgtatctctgtgtttcagaatcagacctaacccattgttgaagcctttcctcatttctccatttagatcaagaaatatggcagtaagttcgaaaactcttttctatctaacaaaattgtgttatatccccctctcgtttgttatcatcttaaatcttgttatcaaaccatgttttatgacgaaaccatcagagtgttggaattttnnnnnnnnnnnnnnnnnnnnnnnnntcatttcccaatgaatgtttaaattgtttgtttgatcatattagaacagagatatgagcctttgtttcatatcagctgactttcgtatatattcttcttctgaattcaatctgttccagtatgtgttgagaagctaaagatagttctcataggtctgattagggttcatatacatatcgctttcttgcatctcaagtttgatattgaagtcattaaagctcaaatcgcttttgaccattttctcaaaaacattttttattgttgaatgattgattgcagaaccgtccacacgttccgaagtttggggactggaacaaccaagaccaaccattcacggtcgtctttgacaacgcaaggacgaacaaacgacaagacttgtatgaatctatagagaaaccagagaccaaacctcaagagctagctcctcctcctcctcagcctgctcgtagaattcaaaaaccggaagcaccaaaaccggttaagcaagacacgccgagagcacctccaccaaccgaaaaaaacagagtcaaagctccaccggcagatcaactctacggaggcgggggcagtggaggcggaggcaggagtggaagtggaagcgcaggtggtctttatggaggttatggaggcggatcagtcggaaaccaacggcagccaccagctcctcgtcctacgcagcctagacaaaatctcagaggcggcaacaacggaagggtatgaaagacacaatatataaatgaacttggatctttgtttgcgatttgcattaacatgttattatgtgattgaagagtcacattataatctaagatatatatatgatatgaatgaaaaagtttgcttatagtcattatatgatctgtagggagggacaacgataccgccattcccaggatcagttggtgcagggggggacatgagttacacacaaattttcgagaaagtcaaagaagagagaaacgaaggtgtcatcagacccaacggaggaacagccggcaacactccttcccgccccatcaacagtcaacatgatcaatctaccaaccaaacctcttccaaggtagtttatttattaatatacaaatgtttaattacaaacacaactactttgtccatcgttagaatttgtgttttgatgtgaattgggatgtgcagggctgctgcttctcatggtgccgcaggggaagtaaatattgaagacaatgtacatatttatccctatttcgatatatctttttcttttgtaacaaaaaggagtgaagtttttgctgacaacgttggagcttctacaattttttttttaaattattttaatttgtttctcaagtatggatggtgtagtttatttgtgttgtgtatttgaattttgtaatgaaaaattgtttatttctgctaccgacaaaacattttgcgtatgaaaataaatgtgttcatcttaagacaaagcccatgggccttcgtcatatttgggaggagtagtaactaaactagtttgagtcgtgtgaccttggtcaaagtaaccaacgaagaaaacaagagtcttttgacgaaacgacgactgtaccatgtggcatgtaaatgagtatggaaagtacaagtgtaatggactaatcgtgggattgatacttgatagtggactcaaccactcaaaaagtgtaacggagtcaaaaaatctctcatatccaaagtagtgtaatccattgtaaccaggtttcatcagaaagcctttggattgtaataatcctttcgagtcctttcgtttctctcactccactctgcaatctacttcatcgtcgacatcttcttgcgcatttcaaaggtacaaactttgaatctctgcccttgttggctctctatgtctggatctgtcgattaaagttctctatttttttctctcctatttgttatttctacctgggtttccacttccactgttactggtgctagatcttccacaaagaagtaaactttaccgccttactggatttttccaagtttgaattattattatttttagttccgttaggctaattttgacaaaaatcttgaatttttttgcctgagttcttgtaattcatggggatgtcttctgaaatgtgacaaaatctttgatttttttgttgagaagttaatctttgtccttctttttttccgaagatgacctaaacttgagagtactctaattcagtagtgactttgtgactgtaaggttagcttaactctgttgaaagatggcttctcgggtggtgaggactagtatgagacttcgaaggagggatggtgtgactcaaaacgaacaccagggagatcaacaagtggctgaccaagctccaacggtgcctcagattgtggctactcctcctaggatcaatgtggttgctattgaagatgatgatgatgttgttgaatcaactgcttctgcttttgctcaggtctgctctcttcttttcctttgttttccccttttttaatttaagtcatggtttttatgtacaagtttatagatctgttttcattcttattccaggctaaaaacaaatcgagaagtgcacgcagaggatcacaagtagttgatgtggagtcaggtgaattaacatcttttactgttccttttttgcatagctaccagaatctgaacgatgcacttgtggtgcaatatcatgtcttatatagttgggattatacagttacgtgtttctttgttcacttttgttactgtgatggtatgtgtacagctggtgctaatagatccacaaggcgtcgctctgatcaaactagtgttgactcagttgagcttaacaagccggtaagagatgtgggtggggttttcttttcttttcttaaagttttgctgtttggagtttggctcaccaagtttcattttcttgttcagagaaagtccaaggctgtggctcctcctgtagaggaaccaaaatttagctgtccaatctgtctgtgtccatttactcaggaggtttcaacgaaatgtggtcatattttctgcaaaaagtgcataaagaatgcgttatccctccaagctaaatgcccgacatgtaggaaaaaaatcactgttaaggaccttatccgggtcttccttccaaccaccagatgaatgatacagaaacatcactagtagccatgtaagtctagctaatgagatttgtttttttctgctgaattctaaaaattgcgccgttcagatccttttctttctcttctcttgcagggatagtggtctagcgattctacctccaacgatgaagaaatgttgttcattagttgtagtttgttatgtcaatattgttctgttttgtaagagaaatatctaggaattatggaagacctgattttctaatggatatcgttcattggtgatcttcattatttgagtagttccttattgcttagtgattgttgagatattttaggagatattgttgaatcttaagaaaaagcattctacatcataactcataagcctctgtatgcatgttctctctcaagttcactagaaggcagtgatggcatctgcacatttttctgttggtccacagttacctcttatgaaaagattattcttttggtatcattcccatgaaatcattgctgtgcagatcaaagaacacatccaacagtcatggcccaatctatgttctgatagcaaaaacgaaaatactttttaacttccaggaactcaaaatcaatgattgctttaagggcttaaacccgatcgattcaagattctatgtttcctatttgttgttttcttcaatatgtctgcacaagagttaaaataaaattggttatacaagaatgagagatatcgaaatctaaacaaagatgtctctctttctatgaaggtggctctttctccggtctgtatcgaccttagaacgcccatcttggtgaagaactaacagctctaggtctaggtaccggtttgataatctgttgctctgaactattaatccttttcttcatgatagatgagaccgttgggctgtaatagtcattactcctctgtgacattgctccttgtgaatgcatcttcttcccatggacgaagcttctctgtttctccagcatttctcttctaccattcaaactcttctgaggagttccccatctgctggagctcacacagctttgactccttccaactctctcatgatgaaactcgctttttcttggaggagttgggtagtttcggctttctgctgtttctgcagaatacattgtctcttcctcgctgctgtatccatgattgttatatacatagtgagctgctgctggcggtgaacttgagatgacctcactgagagcaccatttactgaacctgtcgaagcaatctgcgcatctgatccttcagagacaatctcagcctcttccactatatggttactctgtagagagttgagctcaggatgaaaggttatagctttaggtatccgtggaggaaagttgatgtccaaaaggtgtacttgagctgtctcatttcttagaggaccagaagtcaactttggcgattcatatatctcaggggtagggataccctgcgcatgagtagtagttccgcagacttgtggattggtctttgaggtttcttcttctttttcttcctcagcagcgatagaagagctcggatgagtttgatctctagtgttagatgaagatggtgttccaacatcagcagagtcgtttggcttgaaaacacggcgcatggtgaatgaagtacaagaacgctcactcttctgaccagaagacattaatcgaatgagaggcaacttaggtttcgtcgtatgttcatccaaactaccttcccaatgctgattcagccagtcacatattactggtattggtataccaaactgcatcatcagtgtcttgttgttatctttcttcaaagaagaagaggaagatgaccaggctgaggttggtgatgcctatagtttcctcggatcacaaa

SEQ ID NO: 25619 - DNA, 1135 bp, Arabidopsis thaliana landsberg
aggctgcatcttggtcaatccattgcttcacttgagttctgccccagtgaaaggtatggggaagcaattgaaaggataatgataaatcaaaacccttatgtctccgcattgtttctaatgttgatctttatctaattggttctttctagggttatgctgacaacttctagcgaatggggagagatggtgaccaaactcactgtaccaaaggagtggaaaggtttgttgctaatctctttctctgaaaatatgaatggcacatatttggggtttatacatttgtttctcactattatctatttgtttgatgtgcagagtggcagatatatgcactgctgttttgcttgttcatggcatcagtgatagctgcatacgtattcttcgagaactcagattcgttttggaagttaccaatgggaaaagatcaaaaaagaccaaagattagtctatttggaggttcctcctccacgccttctgaggatcatagtaggtggaacttggacctatagaaagattatgtaactttcctctgctttttcttctttcttccttatcttgttgcagcgtttttttttgtttttttcctttcttctgattttgctctgacaaatacctgttgattaattgatttatttacagacaattactgttgctaattacttgtgctgaaaatattattaaaattgcagagaagatcttttgtaacaataagagacgtgatggcgtcatatgagtggtcccattagctcttgagaaatataaaaatagaacctctcactttttatcttcatgaagtaacctctaacaaaaataattagacagaataacccaattcaatattgacggtgctgatgtggcagcagatattagttttgtgaagagggtgtttttgttattgtggaaagttggagactttttctagtaatgtgttccactttacgtaacaaacaaaagtgattgcattcccggtgcagaccgtggggtcccaattgtatcgtcgtgagtcgcgtgaccgtcagagtcacactcacaaacatttttggacatgaattgaaaattattataattaccagattttttatctatcgtcgaacttgggactgagaaagtagcagcttcggggtacgagctcgaa

SEQ ID NO: 25620 - DNA, 1097 bp, Arabidopsis thaliana landsberg
  unsure (1)..(1097): unsure at all n locations
cttcatcttcaagctcggatattttccacactgtaacccggtaactatcttgaactctctcaacgaaaagcgaataggagtgccggcaaataaaacccatatctcattcggcttcgcaacttccaactgcctacccagaatgaaaattctaaagctcgcggaccacgcgagtagtttggggaattccaacaagcgactgaacaaagatcgagcaatgaactgccgctctccatcgtctagggcattgataacaccacataaggttttcattttctgatacacgttgaccctctcgtcgtgtggttcttcaccaaacgcaatcagtcggggagggagagggagaggcgccatcttcctacaaaagaaacaaacaaagccattagtcaacaaatgaaggactgatgacaaaaagaggggaaaaaatgaacttactataacgtttgtcaggaaaaatcccagatctgagagatgagctgatgatcgaaaataaaaactgccgaaaaagctaatttttgggaaagttgctctgatgatttcttccgcctccaaaccgtcattcatgatatataaacttgaaaagtagcgaccgttcgataacaagcataattnnnnaaaaaaacatcacacctccccaaaaaaatctagagagaatcaactcctacactctagcaataatatcgtctacgctctactcctctcgatatcgaaatcataggggtacatgcgtaatctttgagttaacagtagctggggaactgttaagaaaaatgcgacctaaataatgaatcctctgggcatacgcaatgatattatccatgattttattcaagttgcaaatgtattttagttggtgtaacgcccgtgaaccagaaaatcggttagggtttgtttttaaatcatccggtttaattggttgggttaattggaaaccctagagtgtgcctataaaagaaggaaactcgaaattagggctttagttagccacttttcgttttataaaggagaaatagagagaaaaggaagaggagcaaaatcgttaggggttgggagaaatcagtttcgtcatatcaaatcgtggtaaaagggtaacgaaaatt

SEQ ID NO: 25621 - DNA, 898 bp, Arabidopsis thaliana landsberg
ctcaatacttattacaagtaaagcaaagaaagatatatagaaatcgattatatgattttgagactaaattatattataaacgtttttctaaccattctcggtgatcatgatttcaggattgccgtatttgtccttgatatatttcaagaggctcctcaaaccctttgcgtagacttccactttagcaacatcaggctaaaaaaaagagaaagtattatttttatttttttgaaacatcaattttagtattttaatattatatttaaataataacaaaattagtaatagtatccctcgttggcaaaagcatcattttatttatccacataccttgctggaaaaaaaaggaataagtataaataaaattaacaagtgagaacattgaaaatagtctaactatataaattatatatgcatcgaaattaagaaaacagtaaaaaagaaacttacgttcccagtccacgagagaatcactctgccaacttggctgcgaaggatctgtctcttcgtcgtgcaatgcaaacactgatgtgtaatagttgattcctacaaaatcagctgaatttttcaacttctctttctgtgcctctgtgaatttcggcagtcgatgtccgatgtgatccttcattgattgtggataatctccatatgtggtcggatgcaaatgcctgtggaatcagaatagtatttgtcatatatttaaaactttgatactaaagggtaaaatagtaaatgatattttttaccatcccaatatgaagtcaatcaggccagttacaggagtttcgtgctcttcatccgagagctcatgagcctcaaaccaagctggactgtgagcaatcccaattttaccccctttgcactagaaacaattagaaataaatgtttataagtagta

SEQ ID NO: 25622 - DNA, 2044 bp, Arabidopsis thaliana landsberg
tatgctttggtatcccaggggaacaaaaataaccattaatctgaattggcctacctcaaattttatattttgtaacgaaaactaatcaaaacttcttggttgtttcccaaacaatcctacaaaaatacttgggaatggtctataaaattcctaaatcctaacctttctaaagaaaaaaaaaaaaaaaaaaccgatatataagtacctctaatacgagatgtctttgtcgaggccagaacagcaagtagtccaacattttacccatatccattcattaactaaggtcgacggatatggtgagttcacatgcaatggctgcaaaacctacggctttgggaagacctaccgttgcacccggtgtgactacaatcttcacgatcattgtgccacgtgcccccctaccctcgccacctttattcatccacagcaccagctccggctagtctttaagggaccagaacagacccaccaaaacagacgtatgtgtgatatctgcgacgaatcggccgagggactctattaccagtgtgagccttgtggcttcgacgttcacccactctgcacgcagctacctcagagcgtgagacacgtgcctcacccggcccatctcttagagttgagtctagggggagcgagcaactcgtgcatggtttgtagcggtgcaatcaagtcttggcggtacaagtgcggtcaatgcagggtagatgttcacatggaatgcgttgattcatctacctcggtagcagaaacgggaattcagcaaaggggttttggacagcaatttgagtttcctcaatatcaccagccttattacaatcacggatacaattacggatatataaatcaaggtcaggttcaagagtcgggtccgagtattgggagaaggatgtataaggttttgatggctctgacggttggggttgcttgcaatatcatcgctgggccggccgcccaggtcattatgggaggcttttgaaatggcacgtctccaacgtcacaccattatatatgtatttttctctaaataatgtttatgtttgctttctttccatggttcatacaataattaacaaaatgtatgtgttactatcttcaatatacacaaattactatgataactggcatccaaacttcgtagtaattaaataagcatcagggacatcaatgtctaatgtcttttctgaataaaatattgaaaacgtacgtaggagtaccactggagagagtttctatgagtaaatgtgcctctccgtaagaaacaagttgcattactaataaatctaggacaattatctgtcacatccaatgacaagtcgcatatctcacccgtctcagagttcttcaagattctcacaaggactcgtctcatgaacaaatgacatgcctctcaccaacctaccatttagcatttaaacacacatcttccattttagataacccgagcccatgagcaaaacaaacaatttcgacctacctgtgggcatgggtgcgacggcccgaagttttttttttccttctgaatatggaccaactgaaaaaaccgaaattcctttgatcctcctgtgtatatgagttctctttggaagatcactttgacccatttggagacctcagcgtagtgcaacttgtgcaggagttttacttaattccaaattgagtgcaactaacggtgagaaaaaataaaataatcgtaaatttcttaattactcggaaaaccttgaacctaatctttgatcattaaaaaatagaacagtggcttaaaaaagaagtcaactagcctatgtcaactaaactgctctaccacattgtagtagtttctgacgactgagttaaagttattattcgtaggagcgcaagtgaacaaatgtttatatttttgtaaccacaagtgaacaaaagtttatatttttgtaaccacaagtgaacaaaagttattattgatctgaaatggtctaacgacaatttctattttgtaccactagacactagtaatcaaaatgttcttacttatcttccaaacaatgctcgggaatggtctataaag

SEQ ID NO: 25623 - DNA, 924 bp, Arabidopsis thaliana landsberg
tctaaatcgatataatatattgaaccaataaaacaggagtcacatagaaatgatgaaaacatttaaggtgtggtcgtacaaagaaggagagcagccactggttcacgatggaccggtaaatgatatctacggaatcgagggacagttcattgacgagcttagtaacgtgatgggcggaccaagtggccggtttagagctagccggccagaagaagcccatgccttcttcttacccttctccgttgccaacattgttcactacgtctaccaacccattacctcgccagccgatttcaaccgggcccgtctccaccggatttttaacgattatgtagacgtagtggctcacaagcaccctttttggaaccaaagcaatggtgctgaccatttcatggtctcttgccacgattgggtaacgtatacataacttctataaatcatttcaacatatcatttggttaggttcggttttaattgggttttttttcttaccaatttggattggttacacctaacaatgcacggactaaatattttctacttaacttgatataattaggctcccgatgtgccagatagtaaaccagagtttttcaagaacttcatgagaggactatgcaacgccaacacatcggaaggtttcagacgaaacatcgatttctctataccggagattaacattcctaaaaggaagctaaagccaccatttatgggacaaaaccctgagaacaggacgatcttggctttcttcgcaggaagagctcacggatacattagggaagttttgttcagtcactggaagggtaaggataaagacgttcaagtttatgaccacctcacaaagggacaaaactatcatgaattgattggtcatagcaagttttgtctttgtcctagtggctacgaggtggctagtcctagaga

SEQ ID NO: 25624 - DNA, 816 bp, Arabidopsis thaliana landsberg
gggcagcgaataacacatgaacccataaaaaaaaaaatttgttttgcaggtgaacattgttaaaaagacatttcaatttatttgcttggcttaaatatcgtttttgaaattatatgaacgtgaccaattcgatttacatgccaatcgccaagtatccttacatttttacattagtgcatgtcatcgtaattattccatgcaaatgaaattgcgagtttcacttctatatatatatataatagtcagttttaaaaatccccataaaaaaagaatagtcagttttaaaaatataaaagtaaagtaaattgacaataaaatgatgaatatgtatgactgtatgagccgaggaagcctatttttgctgaaaatacttgtttaataagagttgattctttaaacaagttgcaaatatctaagttttatgtcctctgtttccagcttgtatgtatcaaatttctctctatattcaaatcaagcgaacatgaaacacgaccctcgagattgtcttccctagtccccccctttcgccgatgactttttcacacggccaaatcttatatcttattaaaagataaaagcctttttttttttctgatgccgacgaatccgatgagaaagtagtgtacgtcacataaaagttataaactatgaaatctggagataaaaacaatattagtattaaggcttttattagcgtaatataatatgttcacacttcaaaagcgtagcatacgaccaaaagaccaaggacagatcatactacgactaattatcccaatctaatatatctttttaactacataaattatcaaattg

SEQ ID NO: 25625 - DNA, 1147 bp, Arabidopsis thaliana landsberg
aaaacagatgcttcaaaagccaatatatataagaagtagccataaacgacaaagatgaaacaactattaaacactaccagtatatgcctcaaacaccaacattacagattaaacacagtaaaagatttgattaataaaacaaatgaatatgagaggaattaccattagcaggaagctttcttttgtcagaagccaccagtgggtgacttttattttcaggggatttccctttccccgcatccatatcagcacggctttcctccttagaaagcatttcaatttttgcactcttatcatcagatgtaattgactcggattgctttgtctccggctcatcctccatagactcatcaccagaacttctatctaaattcaacttttctgagtcgcctgcatcgataatattattttctttgatcatatctgcgtttgcagcattgctgtcatccccacctccaacagatgtcttctgctcaagtggctcctcgacatccattggatgcgattcgccaacgactgttgatggctcttggaacttattaacattttgttctaatttgacattatcagcaattttgttatcctttagttctattttttcattatttgacacagaatcagtagaaatacaatcagattttacctcaaaccctgtaacggggatgacctcagatacctggttgtacatagcagatttttcaagcactgcctctgatggttgagccttagaatccccaccatccaacccactaaatggttcattattctcagatttgtgctcactagacgccacttgcacaactgctgcatcacgtgcaaccactgaactatcaagaccagctatgtctctaacatcatcaactttctctttctcatcttcaccactagcgaatggcacagcgttaacctctggttctgaaaacaccggggctggtgttgtctcaacaccagctgaagcttcagttgttatcttggtctgagttggttctggggttttctcagctgtaacaggagttgtctcagtgctaaatgccgcttcaacaggagtaacaggagtggtttgattacgatcacctacagtaacaggaaacatctgaggctcttgattggctttttcagcagcagcaacagtagcactattgatcct

SEQ ID NO: 25626 - DNA, 1106 bp, Arabidopsis thaliana landsberg
acagaggaattttgggataaaaagcatatcactgagtaaaaaagatactaattatcaaaatatgttgggaacgatattatataccatgtcaccatcctcagttaggcgcagagcacattctattagtgcatccacaacttgtgaagttgtcttcaatcctacttaggaggataaaagaaaagtaaatccaaacgttgtatcaggtctaatcataacgtcagtactagtaccttcaaaggacctatcatcaacgcggtatcgcagagcatcgcatagattggccaaagcccatgatgctgttatacgcacctgaattgacaaaaataaatcccattgcagtagaacaataaaatataaaatgcatagatcatgagaacaaataaatgaaagtcagtaatgcaataccgaggtcaaggagtcccgggtattcgcttcaacagctaagataaatttttcatatatctccgcactgcatccacaaagttctttaagttcttgaccatgaatatcttgtcagggttgagttaggacaagcaacagacagtgacaaagggttaagttaccttaaagaagtttctggaaaacatgaaataacaccaatcgctcggcaagctgctgatctgactgaaggtgttttgtcatgcaatgcagcggttatctacaaaaactaaaagacattaggcacctactgtaaaactaaagtcgagatagtaataccaacaatcctaaaaaggcttcaatacttacaattgatgaagtaataaagtccttttcctgcttattgaaagcggaaaatatggaggatgtaataccagcaaagcaagtaactgtagtgctcctcaccttccaaacataggaagaaattcaggcccgcacttataatgcaaactacactactgccatcgatgactggacgactggtatgaccaaagaatgaacttgtgaagaatatagcggaccagtgcagaaagagagagtgccacccgaccaataggtttaccacatggccgagagcatcggtcacagcccgatcggaagatgggcccaagaggcagagcagctcacatacgagggagcacggggaaagattgaagacgctatagaaa

SEQ ID NO: 25627 - DNA, 1305 bp, Arabidopsis thaliana landsberg
  unsure (1)..(1305): unsure at all n locations
gttcatgtatcacttatgcgagtctaaagtcagtttttttataaaaatagttgactagaaaattaaaagacactgatgttattagtttttcattatagttgaggagatattatcgaagggagtgagtttgcatagcaatacgtgttatggtgatacttgatttccattaaagattttactagctaatcgtactttgattacaatgcagcctgcacctgccacgtacgatgatgtatttaaatcaatgtttgagtacattgaccatctttttactttagtgcgtccgaggaagattctttatttggctataggtgatcttgtgtttcctttttatcatctgtctgttttgctctgtgagatgtggttgattaaatatactgttgcagatggagttgcgccgagagcaaagatgaatcagcagcgttctcgacgtttcagagctgcaaaggacgcagcagaggctgtatgttctctttgtgtttctatttttacatttactcttggctttacatgggtcactgttgcttatactatttctggtttaataggaagctgaggaagagaggttgagaaaagattttgagatggagggccaaannnnnnnnnnnnnnnnnnnnnnnnnaacctgtgattcaaatgtcattactcctgggaccccttttatggctatactgtcagtcgctcttcagtattacatccaatctaggttaaacataaccctggctggagatatgttaaggtgtgatactgtttcatctaacttagcagctatttccaaactgtacaagacttttcgcattcttgcagtttctcttctttttttggtgttgtccctttacttttggttttaaaggtaatttgtctccctaagaagtcgtggattattatttgaaggtaattctttctgattcaaatgttccgggagaaggagaacacaagataatgtcatacattcgtctccaacgtaatcttcctggttttgatccaaatacacggcattgtctatatggtctggttagtgtcaacccataatgtacttgttttattttcttaaataaggtgttggtgcttcgtccaaaaatttgcacattacatttgccaactgtatattattatgcaggatgcagatttgataatgctctccttagctacacatgaagttcacttttccatcttaagagaggtagctgatttccacccctacgctctatattttctttgatattcagttgatcaaatgatgggtcatctttttgattccaggttatcacttaccctgggcagctcgcataaatgctcttgtgt

SEQ ID NO: 25628 - DNA, 713 bp, Arabidopsis thaliana landsberg
tttgtatacactgagatatgactcaaggtaaatacagtaaagtttatccccttatcgcaatgtgaggatcaagcaacttgctgaccatattactcatattatattgacggacaccaataattcgataatgttgagtacagtactatatatgatggaaaaaaattcacacttctttcaaagtatcaatattgtgaaattttagtgtatatgccagggtaaactaaagtgcttggtttgggttaaacaagtcattccaaagcatatatatctcatgaactttaatactgatatatcatcatttcgaagagtatttttataaactttatttttaattttcattttatgtatttgtttataatatagtaatattttatttcctcccaatacattctaaagatttaaatgaatggaacacgtgcgatatcataatgatcaatgcaatagagggcaattgtgtcgacaagccaaactggatagtcgcaaccaccacatttatatgtaaagctgtatcatttctctgtaaatctgcaaagtgttaatctcttgctgcaattattaacctactttcattattttgtgtgaattatttcaattattattattctttacttatataatgaatgtttttattgggatatggagaaccgaaaatcggtattgggatatggagaaccgaagatcgatcgagatcgacagtcgagatgaaaagatca

SEQ ID NO: 25629 - DNA, 772 bp, Arabidopsis thaliana landsberg
ccaaatccacatcgtcgaccatattctcagagagtaagtaactaacagcctcgaaaactgccatctcatgcagtgtggctttcccctaaaaccaatgaatttcagagagctcaatgacaccaaactcataaagtatcacggattatagacatgggacagctacagagcatcatctgttctcccttagaatgaatcatagacactaaaagagataacaaggtagagcttacaagacgggattctgcagctagagcatatgatctggctctaacagggttaaaagagctaaggtaatgagcagccaaaatgttggccaaaacacaatcattatcatagtttggcgcttctagaatcaccttcttctctcttccataaccaagaaccttcataagacggtgcaacaatgtcacgaaagataaaaatcataactttaagcatagcaaaccagaaaaacacaacttgaaagctacaaatatcatctttcagcaaaacaacttttttccaatcgacagaacaatcaatactcttcgataactacagaaggagactttacaaaacccaccacatcatcgaatcgtctaaagtatcaaaccatagaaactaaagacaaccctaatgtgaaaaagagagacgaacctggtcagaataagagttaatggaatcaatgcaatcatctgaagaggtgttgacctcataaccacagctaacaaatctgctttcttctttctgtttatcggagattacgaaacagagttcacgcgtgagtctgatc

SEQ ID NO: 25630 - DNA, 1556 bp, Arabidopsis thaliana landsberg
ataaataaagagatagatttatttagcagtcttctaatccaagatcttgaaaaattataaaacaagaaaagtgttaacctgaaaatgaaatctgtgtgtctaaaaaccggtggctttgtgttcctccgccgccggaaaactgagagaatccgcttcttgttatggaggttctcctccttcacatagtttaaaagccgccggagaattttgactgaaaggttttgagaaagagagagataaatgggtaggaggcggtaaaagagagattgatatttatgttctcaccgtgagagtgtggcgcgtggggtctaagaagagaggcgtgaaggtcaacatcttttgtctaaagttatctttcgaccaatggaatgctaacttagacaggtccaggtccaggcccatgatcagagacaaagaatccgttcggctgcggacgacacgtgtcctgcacgtgtctctcttctgtttcttgcagtgtcttctcacaggctcgacacgtgtgacttcggctacacaaatgtttttttacgtctaaaactagacatgattttctctcttttaagcatatataagataataagaacgtgaaatttggattagaagagcgaattaaagtgtgatctttttttacatattggttcatgatttgttttgtgaaattgacggattaatttgattgatcaatactgatttactttggtaaaaacatatttaggttagattcaagatgttatgaaagaaatagtcaaagtttgtaaacacttgtttgtcgttgagcttctagctggtgcacgcagccccgttagattttgaatagaattacgtttagtgagacaaaaacttattaaagaattaaaacaaatcaaagtcgagaaattatcctcttccttttttactttttttttcgaagatattttatttaactttgacaaaaaaaaaaaaacatgattccgaacttccattgggagtgcacgtggactattcactgcataaggactatcgaattttaaatgcttaatttatcaagtgtttctaatagccaaaaaactaaaaacaaaaataaaaaagattatccgacctgccggaatcgaaccagcgacctaaagattacagcaactactacagtcttccgctctaccaactgagctaaggtcggattgatgctaattagcctaatgcggttttatataaacttaactattaattatcatattggcctctttagttacttttttcctttgattgtttttagaccatgcaaacacaaacacaagtggcccataattcaattaatacacctaattttgttctgacacatctcacaattaatggctgtctaagcctaatattaaactagttgacattagcctaaaattgggtgatatacagaaacagctttttgagatgaatgctgagaatgttttacataggtaccagaactctttactaatcacccacaatatatatcagcaaccaagagaaacttgagattctcatgaatctctctgatcccggttcaaaaatatcattacaatgccatgttacaaaacccaaaa

SEQ ID NO: 25631 - DNA, 4491 bp, Arabidopsis thaliana landsberg
gtcgactctagaggatccccctcaattcctcagacttagcatcatcgtagaaattgttcaagaaggctatcttgatgcttctccaagtcttgagggaacctgctttaagttgtttcagccaagaatctgcttccccagcaagtgaataagggaagagcttgcacagtaggtagtcctctgagactccattaaacttgatgctcaaaacaagatcctcgaatcgctcgatatgatccattggctgctcatgagataagccatggaaaaggatgctggccaactaaagcaaagtagctcaggcttcagctcatagtcgttcctctagaatggtgggggtacaatcgctgatcgattagcatagaacaagtctagcctgttgaaatccccaagagtacgacgtggttccgctgctggaggaatagctgcaggaatctggtgttggtgtcgatcgacacctctgttgtgtcattcgacatcgattgcatccgcgttctgctcccgaaggtgtcgatcgacacccagttggtgtcgcttgacaccgagccctgctgcatctctagcagctaattgtgcattatggcgcgcttgatcctcattggcgtcctcaggtatgatgagtccatgatcatccaatctctgaccagcctcattgtaggcttgcccatcctcatctctcaaaactccttctacatcagctcagatgactctgtcagccattgttaatctctgagtttttcggttggtgcgtccaagatttcccaagttcaaaacagacaagttgatgagctccttatgttgtgtgctccttgtttgcctaggcatacacctgaaacacaaaaaagaagaaaacaagaaacgcgtgagtaacaaaataaaagtaaaaattagacgaaatctttaaagtaaactcaatggtgattcccaagaactctggcaatggcgccaaatttgataaggttcaaattaccctaagaactactctctcaaataagagatcaattgcagtatttaaggattgattttcacaaaattgttttgttaacacaatgaattcagtatcaagattaagctagcagggaatgattgaaagtaaaagaaaacaaagtaaaaagacagcagattgattggttgtaaacgatgaaataaagagttaggaacaagatattccctggaaactattggttagtagatctagtgaaagctaggcttttatcgaaccattcttaaactcgaactctaatcatggaataaccggtggtgttccgcgaaactccctatgcctatagctaagaataaccgcagaagccgagagatctttaacctaaacatgcattctaaacgagtttaattgttcaccttagtagataggccgatttttattacacacctataaaccaggctcatcaaataatagatccaactacagatacctttggtgggcatatctattgtctagattcaagatctagttaattactctagatctagcattaagatcaatcaaagatgaagaattctacagataacctaacaggggagcgatctactaaaccatatgaatccctgatgagaaaccctattcctaacaagcaaactacttagacatattgaatgaaacaagcaacataattgagtaagaaagcataaccacaacaaataagattagagtaagaagggatctcttcactgtattaagaactgaaggaatctctaaagaacaatggatgaatagcttatgtctctgaaaataggaattgcaaagaacttgataaaagacacttaggtctaaacaatgacctctaaaactatataaaaaccctataaacgcctagggactaataatgcaaataggaaagttttctggggcaaatttcctcttctgtaaaattgaaagcgtcatggactttgctgggccgaaactagtgtcgattgacactctcgctgaatctagaactgaaatcgttcttagcttccttttccttagtttttgctccaaaatgtctccttatctccattgttgtcccattgcatagaatacctgaaaagacactaaaaaaactcgagaaataacataaagactcaaaatcctaaccctaaatcaaagataaaatcagtaaaaatagggatatatcaactcccctatacttagcttttgcttgccttcaagcaaaacacaaaagccgaacccgtggaagaggttttgaaaacaaaggaactcccaacactctctaacatattgccatgatcatccaaactaagtccatatgcctaacaagtctaatcaaatcctaaccaacatgtactactctacaagcttacacaacattctagattccatacctaagctccataactaaatccatcaggctttcatcgttgggtctcatcaaccaagctaacattcaagattcttctagactcattcctgtactataccatgataaatcgatcattcttttttttttttttttttggtgttctttctctcccctaaacttattctttttgaagagtaaacaaaggggaattcgcatacttgatcgacaccctcggcatttttccaacctttgtaattgatcattcaaaataatgtataataatgggtcataggaaacattcctacccctatacactatttgaaaatcctgtcaatctctcattttctttttctttttataaggggagaggaacacattttctttatcacatgggtctcaatatcaggagagaacaaggagtcaagatctatgaatactaaccgtttgaagaggtaaaaggaagagcagtgagattagctccaaccttagtggttgagttggaaattaggatatcctcaagtttgttggtttgccatatagattttccaatagtcggattgactcgaacctgcagcactcatcaatcaggcaataatcaagagaaatatagatcatgattcctaactaaactaaacaagaacatttttcttattgtaagaataaaacatcacgccaatattaataagcgcctcccccagacttaaacgacactgtccccagtggcattcaaatccaaaaggagcgagaaaaataaatcaaaaaataaaagaaaagagaagaaaaagaaattcaaaccaatgggttgcctcccactaagcgcttgttttgagtctatagcttgacttgacggagttcaagatgtgaacagagtggtggaagacttctgctgcaaccttgccttccaaggcggtgtgtaaacggttccaggctgtgtagctgcaggtgtcgatcgacactgttggttgtgtcgatcgacactctcttcgttacctgcaagatcaacagaagaaacaagcttttgagggactcgaggctcgtttagtggtgaagcacactttgaagattcgaaagaagtaatcaaaggtataacaggagaagagatagaagagaacttctcgcaaaggtctgaaatgggcgtgggatgaagagggtttgcagaatcctctgtttgtgaaacccgagggtgttgatcggcaagaggatgtgtgtcgatccacactgatgctttaaagctctcgttggcgagctgcgctgaatgtagcgttgtggttggctctgtttggggattctgaacattctcaggggttgtgtttgtgctggaggccatactactgataggcttagtgacgtctgaaccattcatgccaaactccatctccaaatcacatattttgagagatatatctctcttcacatcaatcctagcaccagctgtagcaaggaaagctcttccaccgataagaagatccttggactccttatcataatccgagaccacaaagtcagcagggattaaacagttaccaaccttaacaggaacatccttaaggattccttcagggattcatttggaacgatccccgaagaggagagtgattctagtcagcatgtagttagtcatgcctaatatctcagcaacagacctcgacatgacgtttatactagatcccacatcacagaaggagttgttgaacctgctcgtggagatagagcaatcatgaacgaagctacctggatctgggagcttctcaatggtctgatcgggagtgatagtacggatgttctctgcattgtccactctctgtgccttctttttcttgatctgaggcaaaattatcgaacagatgtctcttatcagcagtttagtttccttagagctaatttcattgtcaacaaggcgcttgacatacctgttgagtggagcagaggatgtctcaggagtatccttaggaagtgaggtgaggatcttttccatggtagatgtgcacttagcaacatgaatctccttcttagagcgacgcttctgcagataaggaacatgaggagtgtagacagactcgggctgcatcaggattctcacctcatatggtgcaatccgaatcaagtgtcgatcgacaccaggtgtgtgtcggttgagaccattgtaagggattgtctctgaaaacagtattcc

SEQ ID NO: 25632 - DNA, 1325 bp, Arabidopsis thaliana landsberg
agtaatacatttaggttaccaaatcatatgaaaatataatagtttctctctaattattttctcaatattcttaatctgatttcgtatttatattaattgtccagactccagacaaaagggatgaatcatggctggatttagctgtcctacctgttaatatatctctactctctagtaacgccaaaacctgacagttagtgatatatattagactaattagttattccctaacccctgtttccaattatattactcacatatatacatgagtttgtgataattaaacttgatctacttaaacgtaggtgatagacaaatagcctaatgttttttgttctctcgcatcttttaccaaataccgtgtggtggattcaagttctccatagtacatttaaatgttgacaagacaagaatctattggattaaacatacaaatgggaaaatttatctattgaaatgttatttaagttagataaatgcatcaacaaattgacgtatatgtacttaactgatatatatatatatatatatgtcaatgtgtatatatatatatatactatgttaatgtatatagttatagttgcaaaagaaaaaagaaagtgttaaattttggaatgtgaaatgttggaggagaagatggagagagtgtgaggtgggtcagtgctgcttttggctcttttattacattaggcagattcccatatgacatgagactttcgctcttcctcagaaatagatcccttaatattgtattctagaagtatatttgacataacggaatcaaaagccaaattgaagagctatgtggacttttctacgtaattagtttaggtcttaatatacttagtatacactctcaaaatgctagtaattaatatagcaaatgacgaatatgtagattgatgatagttcaactagtcatgtaatgatgtgaagatacaaacataatatgcatttgaactcaaatcctatcaaccataagtaacatttgggtacccatatttataccaaaacgtaacagccaattaaaaaatctggtaaaatttcatagaaaacgacgtaatcgtgatacctttgtttactactaatcttgatactttatgatttacatccatgtgaaaataaaatcatgtagaccaaaaatttctcatacaaaaacattataaatagaaataatggttttgcaatattttgttaaaacaggtaatttttttaaaaaaatacacacgtatatattcatagtttatatactttataggcttatagcatagttcaatagaggaacagacaaactgaaaagaaatgaacctaactatctgtcttca

SEQ ID NO: 25633 - DNA, 750 bp, Arabidopsis thaliana landsberg
  unsure (1)..(750): unsure at all n locations
aaatatggtgataatattattgtagttttatatggagaaatagatgccaatgtatacatttgtacagatatataacaattgcatacgccaatacaatgtcttatgtctatggtcattgttgttcttccataatggaaccaattgatccaaatctaaggacatgacaatttattaacattgctaagcttaatagaaggtaccttgtgttcataacccgaatcagacagccttctcagaccaagtatacagttctggttagggtggtggttatgatgacggttattattgacatccttagcccacagtggataaagtttgaacctttttactgataagtccacannnnnnnnnnnnnnnnngtagatcaaaaatctcgaacctaaggttcgagttcttgtagacgtttgagcaatgctcataaactgggttcccatcttctggttctttgtgcgggtggaatccagtctctgagcagcctctcagtacctccattcctccagggtccgttagcttaaatatcccgtaactcctgccaaaaagatcagtttgagagtctatcaaggaaatatgttgactgtataattgactccatagctttggaagaacatacttagagctatcagttggagctacgacgattgcaaaagcctctggcaccattacctaagaatgacatgatgggaaactgagatcagaattgtctcaaacctagtatatatgcaatttggaaacagcagagatgtacctgat

SEQ ID NO: 25634 - DNA, 684 bp, Arabidopsis thaliana landsberg
aacacaacaacgaaaacatcatatgatattttaaatttaagatataattaaagaacaatttaagcatcatatgatatttttagaaaagtgtgccaaattatttaaccgatagcaatagttgaactagaagtccaagttcagcctcataaaaaaaagttgaactagaagtccattgtccccaaaaagttaaaaagttgaaccgatagcatcaaataattttaagtttaagatgtagttaataatcgtatgcaatgccatagaactcatgattcatatctatggcattgcatacttatttatttctatctcatgtaattttacacaaccgttaatttataatctctgattcattttgtaaaaagtattgatggtgtgggctctatttgacctatattaaaaaaaggtcatagagggccaatcatcttaatcaattgagcccatgttccacacctttaaaaaagcttgaatttttaaagttacatgaaaatgtgtgaaacgtcaaatgcgtgaattatacactcttttcttggaaccaaatttatatatagtcattaccatatagtcattaccgataacaaatacagtacgtatcaaaaccaaaagctttttttctttaatttatatatatcctaatggtgaatttttaggtccttctaaatggaggctgaacctggacttctagtt

SEQ ID NO: 25635 - DNA, 1025 bp, Arabidopsis thaliana landsberg
taccgagaacctcgtagtgacatcgtttctccgaacgagacgaagacgccatctctggtttttagggtttaggctatttctcttttgtcgattttaaacgcatacccagttcgagctgtccaagatttgaccttggagatgtatatataggaacaaaacaataaataaacttataattcaatctctcattctcttaatactttagttttagggatcaccaggcttatagcatcgatacttaaagattaagcacagtctcttattaataaggaatcagattggtgttcacagtcagctagaagagaaaacgaaacactgagccatttatagacaagtttgtgaatgctcctctcactctttatacttggagacaagaatctcgctagtcctcactaaccttcatgcactgaagtagaagatgtttttctctctatgctcaaatttgagacgacattgttattattattacttttctctctgaagttatctctaaggaactcaacggccatgaaggtgagtgccgaggccggaagataccacatgacccttgggacgcttcctcggaaaaacccttgtggaccttccttcctccatatctgtccaactgcatccaaccatcccttgtacctaaaactcaacgaggttaccaaagcttaatcgaaacaagttcttgaatctaattgcggatgatatttagttgatcatattaatctgttaacacacgaggcatacttgatcgttgatccttgcacttgcagtcttgtttttacaacatccagtggagttgtgagataagcacttagtcctgaggagacatacatgggtcaatatgttggataagctatttgaaacggattttttttataactgatctaattctaacgtaccaccagctaatcctcccaatacgagaccctctatcgaactgttgactccatactgtggaaactttttctttccttgatctgttagatcctttaattcttcataaaacacctcctgaatggaaaaaaccaaccgaacat

SEQ ID NO: 25636 - DNA, 1449 bp, Arabidopsis thaliana landsberg
  unsure (1)..(1449): unsure at all n locations
taacgtactgaaaagtaatacgcaaataaatcataacgtgaaaaagagcaaataaatcataacgattttaaactaagctgaaaaagagatttccccaaaggtgaattattcatttcctaatgaaaattataatacaaattgtctaaagagtatatatagaatcgtcggatcatacatatacacacacatgcctatggtaatatagatgagtgtatgtccttgtaagtaaaagtaggngncatgatcttagattgtagttcaagaaagcaaatcacggattcttagagctgtctctttctcggncaatattttcttctcgtcttctttcgtatgcctagaagaactctttgttctctttcgctagctctttccacactgcaaatttaatcaattctccaacccttatctttaatagattactattggaccatactaccatatatctatctataatatgggtacctgtggaagtgatgataggcttaatattagcatgcttgaacagagcatccatacactcttctttgcccatgttgaatactatacattcttctatcaaatgatgcacctgcaaccaatatatacacatgattatgatatgatcagcatcggttaagtgataaaatatcgatcaagatcagagattgatttgacaagaaacggaaaaaaaaaaagagtttgataaagtcgtaccaaatggatgtaagaagcttgcgagctattatgatcacccataaatacttattaaagagtagtttgtgttatacggagagaaattagagagagatatgatgatggatgggagaagaaaggcaggtgaaaatatatataaaacgctacaagacccgaaaaataggaagaggggtattanaatatttataagtaaaaaaatatctaaaagaaaaacacaaggaaattatatttttctttgaaggatgatagatgctatagtcacggaatgacctaaaatggacagggtttgttttatttgtgtagttgattacagaataattcaaataatcgaatcaatttacgaatgctactttttgctttttgttaaaattgacgtgtttctgtattcaaaggaattgcctaattgtgctaataccatgagaaatgatatttagaagtaagtagaataagaaaaagagcattaattttgtccaaaaagagagaaaaaaataatgtaagtgtatatttttttgagaaaaaataattaaatcaatatgataaatttataaatactttaataattaaaatatgttatctttaatctaaacggcgtgctactgctagtatcagttgctgacttgtacaatgggctcgtgatagggcccattatcccacgtgggcatatgcttatgattggctgagaggagattgcaatagaatttacgaaacgggaacgcattcttcaatgcttacgtgggggtgggtcgttatcacgtg

SEQ ID NO: 25637 - DNA, 1417 bp, Arabidopsis thaliana landsberg
ttcttccgcagtgaagccatatgggtttgtgtttgtttacaattggataaagaagccaagtttatcattttgtacaatccattttagacttgaggctctcacgttgagactcattttaatccaactattcgatgcttccagttccagctgtagttttgtttttttaacgcgctttagtttacgaagggccgagggctaataatttggctatattttcgattatacaaagacaaccactccttattcttctatttaattgataatatttagctgtaaatatcatactaatattatttgaataatgactattcaatataaggtaataaatgactagatcatgatcgttctcttgaatgagttagtgaataagacgtttggtgagaagtgttgacatacaaaatgaagataattttgttcgtgttttttcatgatgcattgtcattcatctaccattcatcgaatttattttatcacatatatatgaatcagaaaaagaaaataaatttttacaggtagatggaatgtccaatataaatttattgaatattagtattatatattgtaatagtgaaattttgtataatatttctgtgatcatataactttatataattattatatttttagaaataaatgataaaattataaagatagggtttgaaggctttcttgcacaaaacgtcaaaaacaatcgtatagaacttaaaaacttttaatgtttttttgttttttttttttaaattgcagatgcttctaggaccctagtttagataacgtaaatcttaacataaaagtcacgtatatcgagaagcttactaattgccaccggtataccgcacgtgtcagaaatatacgagctatacgtgagctatataagcagcaagtgtaaacctctcacgggcaagcatttagcaaaacgcataacaagatggaggatcagaaaaagccaccaacgaccgagcaagaagtgaaagaagttaaaaacgacgacctcgagtctatcaagaccccatacttggactatgataacttggagattacaagatgaaagggtacggattacaaggccaccaagagcctaaactcggtatgggaggtggagccaccgatgctcccactccttcaggcggtcttggacgcggtggaggcgctgcatcgacggatctttcttctaccgatgcgattaaccgtcagggcgttccgtgaaaaactttattataggatcgacaacaaacacaaagggtagcttagcttgtctaataactgatcaagtttcggttctttaacgtgtttcaaaaacataaaaaaaacacttgtcatgcaaagttttttttttttcgtgtaaagattaatgtttaacaatttttaaagtctgtaatgatttcatacctaaaaaataggaacagttttaggacct

SEQ ID NO: 25638 - DNA, 3591 bp, Arabidopsis thaliana landsberg
  unsure (1)..(3591): unsure at all n locations
ctaagaatgtactattattgtatacaaactctcttaattcgcatcaaaatttgtcaaacgatctttatattaaactgaagtgagtatcatacattggcgaatcattgatcctatcgtctaatagttatgtcatatttattgataactcttaattatagaagtcatttactgataagagaaagagtaccaatgatcccatcaatcattttgatgctaatatatgaatgagaagataagtcaaaaatttagaacacacataaaaatcaacaaattttcctcaacccaatgatggatatacaagaattaatgactaccatatannnnnnnnnnnnnnnnnnntagagaaaaaaggatcaacctctcgatcgatcggactcaacaacaaatggcaaaaccgtatattcaaataaaccggtttctcggaattgaatatgacctaaattagctaaaattagccttgctctggtaggtcttgccggcgctccagcttgccggagcagcattataagcgtaaatggtctgacgagtggtgtaagaggtgagccggaacgagagagactgaccgtagagagaagaaaaggcttggtacgaagctccccagttatggctcatgttgatccagcctgtgcggctacctttaactgccatggtcttgatgtcacctggaccaccgacgttcatcacgtacacaagtagccaatatccatttccttcaaatttgaaccttattcctccgatcttcttacatgccactctacatatatatatcgacataatcgtattttagcatttgcaaatggtgcattcaaacaagatatcatttaaatatttgaatataaaccatttctttacgttttgaatctacctctataaaacgttagttcatctatatacacatatcttccataaaaatagtataatagtaatgctctaatgaaatgtgaatattacctgcgatatgagacggggatgataccagccttccaattagcgatcttcatgaaagctggtttagccatatcgaaatgggttctaggaggattgcaccaaccaccagcgttggagtcttggtaccaattaggagggcaaagattggtggctgtgaccactgttgattttccagagtaacaatgcggtgatttcgaacatgttatctgaaaacattggccgcatccgtaaccatcattgaacaatgtcgtgcttagcgccgccgtggacagtccgtagccgctgttaaaaaggtttccgtacccacatgcaccacctacattatatatatatatatatatacataaagttattatatcattgatcttatgcgtgacatattgtgattcaggtacggttcaatgcacatgcaatgcaaatgaaaaattgctatggactacgtatccatggtaaaatattttggaaattttttcataaactttttttttttgttaatcgtgtggatatatatgtctggaaacgttggatcatcgacttcatatggtatatgcaagagaagtgaaatgaagttgtgtacgtacccatggtttcaccaccggtctcgtcaccgtagaaagtggcgtgagcatatctccatgggcctggtcgatagtatccagcgacgaactcgccggagatggcgaaaacaacgaaaactattgagaagaatttgttaaagctccaagaacttgagattggacccattctagcctctttttctttattcttagggtttgtttttggtttgttttttgatgaagtaatcgaatttgagacaatcttatatagaggggattttcaacgacagtagtggtggctacgtgaggatcactatcctttttttttttaattccttttttattggagacttttgtccgtaccgattgggatttgtttcatttcattgaatttttttaatagaaatactaataaaatttaggaaaaaaggtcaattgttgtttaagtgaggtttttgaatatagtataagttgacgtgcgagcaggttctatagacgatacgtgtaccgactctatccaatgtctatatatacgtgcgtttatgtattttcaatgattagttaaattgaacagcagacatttatttttatattgtcgtttgtcaactatttacgtttccaaagataaactaatatgtgaaatcatgttttaacagtattttcacaataacattagaaccaaaaggttattcataaacattatgattatattgccaattgtaatgttccgactaaattagtcatatgtgcaacgtgggagaattatttaaataatatgcgtcattaattcttcttctttgggagagaatgtcagggtacattcaaatattcattacactttctttttgaattattgattataataaacaatagcttgactagtttagctacctgatcaaaccgggcgctgtctcaatccaattgaaccggagaaagcaaaggccggttcgagaaaaacgccttcaagttagctaaagctatctgtgcaacattgtccaaagaccctggtgtagccacagcaaaatgaggagacaacacaacattatccaaaccaaacaactcctcaggaactgccggttcattctcaaacacatctaaaccagcaccaccaatcacaccttcaaccaaacacttgaccatctccttctcatcaatcaactttcctcgtcccacattgatcacaaccccatccttaccaagcgactccatcacttctctattcacaatatggtgcgtttcgtctgtcaaagagcagcagaggacgagtacatcgttgttctctgctaacgagagaatatcagagtagtaccggtatggactactctgtttctgacttcttgaattgtaagagatgacacagccaaatgattcaagtcttttagcaacaaatgatccaatgctccccaatccaactatcccaactctcttcccacttacctgtaacaataaatattatcactaccacaaagacttttactaacacatagctctgctttatctgtaaccccacactctaaagctattcccaaatttttctcagaatccaaaaaaaacgcttttaaagatcactaagcaaaacattgacctaaatttcccctttgtaatcatctaactaaagttatagatcagaattcgaaattgagagtttgtgatttcgagcaaaccttggaccctaattgaaaatccccaaatttcgcccaattaccagcccggacgtaacgatcggctgcaggaatacgacggagaacactaataagcaaaccgacggcacaatcagcaacgtcatcggaaaacgcgttgccagcgttggtgataacgatgccgcgacgcttgcatgcggcgagatcgatgtgatcgatgccgacgctagtgcagacgagaatctggagagaagggagatgagaaaggagttcatcggttaccggaagtctgccgctgataacgaaggctctggcggaggaggcgtgacgggggaagaagctcgggagtgattccgatgaggaagtgtcggtgatgagagtacggaattcacgagtcagaatctcgtccatgaaagttagagacggtggtcggtgaaggagagcaa

SEQ ID NO: 25639 - DNA, 1642 bp, Arabidopsis thaliana landsberg
  unsure (1)..(1642): unsure at all n locations
gaacaacagttgaatttgaattattcacgcttaatatatttccatttcgtcaaaaaaaaaaaaaaacatttatcatcataaatcataatcttccttttttaacgtagttagcatccatcgtacatctatggattgaaattactataattcattcctaaggttgaaaatgtcttcaggaaacaaacaaaaccaagagatgatgacgtgttgcctcaccaatcaaataatattttcgacaaaagaaaactaacaaattatgatggagttggagaaaaaaactcaaccaatagaagtcaattggaagcaagggttcttttcgtaatttccactcgaattcaatgcccggacaaaagggtgttttcgtcagaaccgagaaatacgaacaacgaagaaactagaggtccactgtccaagaaaaatgcttaattgtatttttaaatttttaaaaattaaaaaaccgaccgaccgattaaaaaaaaaaaaactttcttcgctttatcaaaatttcttcttcttcttctctgtttctttctaaattctgcttcgtgtcactatttgaatctgatttcgnctcgtttctttcaatcttcttccccgaatctgattctctctcacgttttttggatttcaaatctcaacggaaagcgatctcttctcatatccctccctttgaatctccctaaaatctcgagctctgtcgtgtagggacaattcggttttcgtagctccgattcaccgttttaaatcgattccggaagctacagattcgattccagattcaaatttctattccccctcacggattcgctggaaaatcgagttaaaaaatggcgaagcgtggttataagctacgtatccttatattgacgattttgagaaattttaacagtttctttatcactgaatcgcttggggtttatttcataaacaagctttggtttattagcttcttcgtcaatttggtcaaaatgtttctattattgtttgcttaattaaactgagagcaaattgatagaaaaagacactgcaattaatatggtttggttttctccaattttttttttctggatatgatttgaatttatttttgttgatatgttattctctgtggatttgttttataacttaacttggttttggagacttagaggagtttttggcacattctgcaaatgtgaattgtctaagtatcggaaagaagacatcgcggctctttataactggtggtgatgattacaaagtcaatctttgggcgattggcaagcctacttctttaatggtttgtttcacatttgctttcttcagtatgtctttgacagaaaatttgtgttttattatggatagaagaatgatgctatatcctttttattggcagagtctatgtggacatattagtgcagtggattcagtagcttttgactccgctgaagttttggtacttgctggagcttcttcgggtgtgataaagctgtgggatgtcgaagaagcaaagagttagtttattgattttctgctttcctttgttttagaatattagttgcttcttgtatgcggagctagtgttgtttaatgggaacatatttaatatcatttgagttatcggctatgtggattatgggtttggttatntgagcagtgtcca

SEQ ID NO: 25640 - DNA, 1380 bp, Arabidopsis thaliana landsberg
tatttatgattacattgtgtcatcgcattattattgctatgatgaagctgtaaattagtcttgatagtatcattagtatactaaaaactataaagtatctacacatttggcttttactttacagccgtcatctttttttgaaagatggatattggattcatttaaaattcgagaaaaacgccaagtggcaagccaaaaacttccaaatgaaaatactttagaaaacaccaaaatttgcatctacaattgaatgattcacgttcaaaagaaccattaaatgagtcctgaaattgaccgttaccgtattaatgtcaaaagaccagacgacaaaaatcaatacttagaaattaattagaatctttcatattattaaaaagaaatcgacgagaaaaagttaaacctaaatattaaagaacctttttttcaatctcctttgtttaagtattaaaatatacaaagttaaacctaaatatttgtaactactactaagcaactaataaaacatcaaattaaatcataaaataccctttttcaaatatgttaaaaaatcaaaacctccttgaatattcgcatccaaaccaaggattcaaattcaaaaatttctcgtatcaattatcattcgcatatatatccaaacaaacccccaaatatataggattagatcaaggctaataatttcaaccaaacatttttttttgtattttggtgtatataaaaagagaaaaacaatctctagacgacacgtaattaaaagtgtattgttttgagaaatattatacgaacttaacggatacgtaaaacaaaccattaaataataaacccaaaaacagaaaagagagtgagaaagcaaacaaaatataaaagagtgagaagaagaggacagagagaagaaaccattaccacacacacacagagaaacaaacccactccattaaaaaacaaagctttaagcttagattcaatcccaagtcagtaaaaatagggttaatcgaagaaccccaccggaattccactgaggaattgcatcagtcgcgttcttgttgcggcttgaggaagaaaaagaacacctacactaaccaaaacaagaacaaggacgaattgaaaccgaagatgacaacaacgaatgaagctactacacagcctcctcagcagatgatgagcttgagttttagtagtcatatgtcgagagaagacgaagagatgactcgttctgctctttcggcgtttagagctaaagaagatgagattgagaagaggaggatggaagttcgtgaacggatccaagctcaattgggtcgggtcgaacaagaaaccaaacgtctctctactattcgtgaggtttgaattttactctggttccttttcgaagttagagttttt

SEQ ID NO: 25641 - DNA, 1322 bp, Arabidopsis thaliana landsberg
  unsure (1)..(1322): unsure at all n locations
gggttttaaatctgtgaactcaatgtatggaaccgataataacattacttagggttccaattttaggggattatgagtaattcgacacaatgattttgcaattttataggttttcaatcacggattcacagaatcgcaatgtccaactcaatcaacctccgacgtcgtgaataaaattgtaaaagtacaagtcccatatttccgataaaagtacacttcttgattcacgagctataactttgagtctttgaccgagaaaatcttaagcgaaaattctcaaagtggccatactcaaacgtttcaactatataaaaccaaactgaatgttgtaagattctattatggatgaatatttgtttgtatttttgtgttcttttccgtcaattatgtattattttataagatctaaatataatcacaccaaaagaaaaaaaagataagaatatattaaaactctcgttactaaaatgcaataacttcgntaattattatttttatttttttgaaaagaggacgggcgttctaaatattttgttaaatgtacagtttcctccaatttgtaattgatgataatttttgctcaactcatatatatatatatatataccacatatgtatcttacgtgtctagggcgagagagataatagtgctttgaaaattgaaagacgggagacaggttgttgcttttttagaagacttgaagaatgaaattctgtctctcttcaaaaatcagtctcaaagacagtgacaccacctcaatttttatataatttctgttattatatatattgtaaatctaatttcacgtttctttattagtaacttttgctttcctttgtggttacgctctttgagttctgtagttctaggaagatcgagattcgagagagactaaacaaaaagattaaatatgactctttcctttatatgatactattccctacataaaagaaaatttcgtataattaagagataatgtcgttggatagctcatttaatttggttgagcataatattagtggaaaattttgatagttctctttctcaaatttaactttgtgatgactccttatattactaaactttaattaaaatattaaaaagaataaagacggattcaactgccgaatctcctcattatgagaaagcactatttccgttcctaatatttcatgtggtcacatagattgattgaacacatacaattatcaaatatatatatatagatgggggtaatcggcccgcatgtttttagtacacctaaatatctctactcatacatatatctattagtggtagatctgacagttgtattttagga

SEQ ID NO: 25642 - DNA, 768 bp, Arabidopsis thaliana landsberg
gggacacaattcgcgaagaagagagagtattcgtttggggaagtgactgggtaagattggttgaatctggagtttggaggaggagatagatctctgaatgtgaagagatgagtgacgtagtgcgaatctagaacgcagaatctagggttctgttggatctcgaggaggacctgcagaagagattcttcggagaggaggaagaatcccagacgcgatgcttctggattcggatctgaggaagtggacacgacggagacggaggagattgagaccccgacgcggcccgtgtgtgtgaatcctaatttctccaagaggatcatcggacgagcgtcatcggagatgacgagtgatttgatctccgccatagatacggcgaggaaagcggcggataagaggtaggaagacgacgacggagaggggcattttcgccattgttagttactccggggggaatgagagagagacgtgtaagaggaggattgaataactaaccgtcggggaagttatgtttgacgagtgtctatatactcactctactttaagttatgagaactgaatctatgcatttttatatcctctgattatcgtattttcacttcaaccagtaatacgtcattacaaatcaaaatcttgagtgctttaacgaactaagccattctcattacaccaacatctcgagccttagcaacccgtatgctattaatctcatttttttgttacataatgatatcagatacacgaattattttataaaaatttatagccaaa

SEQ ID NO: 25643 - DNA, 866 bp, Arabidopsis thaliana landsberg
cgacatttttggaagaagacagagactacatgtattattgacattttttcgtatttccatcttcggctaatcagacttgactaactaaattatataattctggtggaataatgaaactcgtggcctagttttggaccaccagaactaacttaattaaatgattataccaccagaaccaacttaatttaactaatagattcaattttgtggctcctacatactatataattggatacaaaagtgaaaagaagaaaacttaaatattaactagcgtgcgactaattaaatattatacacatcaaacttttgtaaattgcagcagccactcgttagcgagtttccatgatctcactaagtaatgtttacacataagtatattattgtttccgtttacaatatatataaatgatctcacttataatattgtcaacaatgaatttatgtaaaaatattagacgataagctaattttttttttcatgttgctgaatcaaataatctaatttgcatttgttagatttactcaaaactaaataaacttgaaagtttatcaaatcaatactttatgtaaaagtgactatctgaaaaaaaaaaaaaaaaaaagtgactatctggaaatgaagcgactttgtccaacttgatgttctgttcataaagccgagcaaaacaacaaataaataaaactaactgaaaataaaattatcattgattagtttagctaatccgtgacttaatgtagtgattagtactatgataatatcatgtgaggcaaatgagaatatatttgactgtatcttttgatcacgtatccacgtcgatacagacaagctgtatatgttgcgcgtacattatggtcaatgttcttac

SEQ ID NO: 25644 - DNA, 1545 bp, Arabidopsis thaliana landsberg
ccgatttcaaaaaggtcgaaacggtacaaagtaatactataaacaaaaatcgacgcctaaacggccgtctaacccgctttctttaatactgagtaatactataaacaaaaatctcttctaattttttctttgcaaaagacctatttgtgtggcagttttccaatttgtttattgatatttattctttactttttggctctttaactcaacttcatagtagtttttaggtcgtttgtataacaatgcttcaaattgtgttccaataataatagtatatatatggatccaccaccaacgagtggcattcaattttgttcatatcaccggaaaacataaatggaactcaactctactcagacattgtatttataaatcgaaacatgattagttgtcactagtaactgtgtatgggacgaaccaaataaatatgttttttagtgtttctagaaattaaagttaaacaaaattggaagtgctaaatgtatgtgatagagctggaaaaggggaagccacattgcgagataagtcccgctttcccagggacttctgtcaccaccgacacatttttagaccattttaaaacaaattattccaatataaaagtaagaattttgtccccaaaaaaatgtaattacatagccaaaacaaatgttattttgtactgccaaaaatctcaggaatgaaagtagatagtaaatattaggcatggtattaaaaacaaaatcgttttcttgaaccaaaccaaaccgagatttgaaggttttgggtttagaattggttaataggaaaggtaaaaaaggaagttgagaggttccacataatatccgaacccaagcacccgatccgaatccgatccgaaaaacctgatcggaatttgaatctgaaattttaaaatatccgaacaggtctatacttcaaaaccctaaaatccgaaaccgaatcagatccaaaccgatatccgaacgggtatccaaacatatctatagtttaaatgcatagtaataatatctataaatatttatatttgtaataatccaagtgtcaaaatatgtgaatttttgaatttttaaaatatttttaggtttttaatatactttttaagtaaatttgggtaaaaaatgttcgacgtttttagatacttttttattttcaagtagtttggatcgatttggttataaaaatttgatttttgagaacttcaagtaatccgaattcgaacccgaaatatctgatccgaatccgatctgaacccgaaatcaagaattacccgaatgggttctacctctaaatccgaaaaccccaaaatccgaaatacccgatccaaacccgaatgggtacccaaacgcctagtactttcatatattatgaactgtaatttttacaacatcttcaggctttgatattgacaagtcaaattcacagaacagaagaaacttcctactgtctgtgtaagttaatcctccgtaagtattgtttgctagatgaatattgtcactcaaaatcaagcagaggtttctggagcgagcagcaaatttctgttccttc

SEQ ID NO: 25645 - DNA, 1423 bp, Arabidopsis thaliana landsberg
  unsure (1)..(1423): unsure at all n locations
ttaattttgttgtaactattatattttacatttctatatattacggttagaaattttggatgcttttaatattaaaatgacatgttatatgcatgtgtatacatggaaccagaaacatattgtattaagttattacggtaaaaaaaaaacaaaagttatgacggtaataggaaaaagtttttacgttaattttattattattatatgttaatctttgattatatagaagtcatttcaatagattctgtttttatttaataagattaatggatagtgaggaattctaattacagttaatcattaaagtttttagccttttttcaacgacgaaaaagaaaagatacgtaagatcgtgaccaaaaaaaaaacaaagtgggatccattttgaaccattcattacagttattaatttatttacacatagtatcaaactaactacacttgtattacaatattacacaatattgaacttagtgctccagagaccgaagaggagattcttttgtactactattgggtcgcataaggaaatgcaatgagtaaaagtcattgtttgattagaatacaacaagactcgaatgcaaaataattcaagtgtatggatattttaatatatatcaactaatattaaaattcaataactggtagtggaaacaggaaaaggcaaaaacaaacaattggtcaagattaatttatgcttaatcagaagaaagttttaacctctaactctaatggggaaaacaagaaactgaaaaggaatcttcaataattttaaatcaacaacctacatagtttttatatcaatgttattaaaaacaacagtattacgtttaaattaacattaacctacattcaaaatagaaaggtacgtggcttccattggctactagtccaatttattcatttccaaagtttccacatttattaagaaaaaaaaaaacacatgttatgagaagtatgtacaagtattcatatatcgagctctctcacacccacaaattgagaaaagaagattcaaagacaaataaacctaaagccgccctatacaaaataaaggggtcattaaaaagtaattattaaacacagcattactagtatatttttatgattatgacttaataattatacagtccttgaagatcccaatcttgtgataacgaggcaggaatcatttggtaatcaccttctgaccattgcggtggataaggccataagtctgcggagtcagagaatataaactcgttacctagctgagtcaaaccatcatagctcgatcccaaacttgggagctctacaatctcccctagctcctcggagccggtcgcggaggaagacacgagagactctagcgaagaagaagactgtgaagatgaaaacgttaaagaagaagacggagaaaaagactgtgangtctccatgtgtg

SEQ ID NO: 25646 - DNA, 3059 bp, Arabidopsis thaliana landsberg
tgggtcatgtttatcaaatattcctcaaatggataatgctaaggttaagtcagatgtgtagctctatcaagttcatcttgtatgcacctgatgttatttagttgctttctctcctatgttgatttgtaatgcataatatgaaactaataacgcaatctcttggttttcttatttactacactatagtttggcttttttcacttaaactgattatatggttcttatggactattgcttctgttttataaggtacgggggtggtccaactctggcacggagagtcattagctcaggtctctctcaaacagaattggctgtagaggtttaccctttacgtcttcagctacttctgatgccaaaaagtgaccatagtgccataagaattagcaaaaaggttatcctcttttctgttctttttttttctttgttcattacttgaaaatctgaactcgtttagtctgctacttcattgaactatcaaactttcttgtgcaggaaactatcagagagctccatcgaagagcctgtgaaatttttgacctcgactcagagcatgtaaagatctgatattcctatgttattaaacagcccgtttcaataatacttttggtattcttttctttccctttctctttcttacatgagcattttctatcatgtaggtacgcatttgggattactacggccaccaaaagtattctttgatgaatgacttagataagacactggacgatgctaacctacaaatggatcaggatgtgagttcacttcttcttcttcttctttttgctttcaaagttattagctatttgaatataaattttttatgcttcagtccgattgtttagttagcctaagcttaaggttttatagctctctgacttttatcttttctggtgttcttactgactcgttaactttcccactgattttgtgtctgtcgtttaaaaacagattttggtggaggtgcttgacatcaatggtacattatcaagtgctcacattcaatctgctcaagagaacggattggtggatggagactctacttctattctcattgagccttctaaatcgagcttggctgccgcaggagggttctcttcaagcaggaatgcattcagaactggtagtgtagaagtttcacaatcttttgataacacatacagtagcactggcgtcaccactaggggatccacagctggcttgacagggctgctaaatcttgggaatacttgtttcatgaatagtgcgattcagtgtctggttcatacacctgagtttgctagttactttcaagaagattatcatcaagaaataaattggcaaaaccctcttggaatggtggtaagttcctcttgaagttctttgctactcataaatctgatggatacataagtgtgtgtgtaggtttaagtgtataggtatgcttagacatcattggttcacttgtgtttccctgttgcacgtaaaatcttttgcagtattgtatgtttggggttgtgctttcgtcccaaacattcttgataggcttaattttgcatataaatggaataacgttggaataaataagacatcttatatcatcagaagttacattagaagttgattagggtagtgttccttggcaggtaatcagtgttattttctcgcgtagatcacaagcattgtttctttctgagatattgagtagttgatttcagatcatttcttgactgtattgaaatcattttgcacagggggaattagctctcgcatttggtgacttgctcaggaagttatgggctcctgggcggacaccaattgcacctcgtccattcaaagctaaacttgctcgctttgctcctcaatttagtgggtacaatcaacatgattcgcaggtttgtgagactagccagatattttctttaacctgaatttacattgtagctcaaggaattcgagtttttcattttgcaggagcttttagcgtttctgctggatggtcttcacgaggacctaaatcgtgttaaacacaaaccatatataaattctcgagacgcagatgggcgccctgatgaagaagttgctgatgagttctggaaaaatcatattgctcgtaatgactcaataatagttgatgtttgtcaggtcagctgtatatcttttagaaaatccaacgcttctctgtttatcaactcatggcattgaaactgatactagtattgtggattaggcttgcatttggttataacgtctaggaatctgctgtatggtcactcaactaatagacacgagtaaccgacattccagtcccttttgctttttagtggctctgtagaaagttaattatatcagaagagttaaattggcctagtaaaaatactgtatacatttgcaattttcacagaaacacggtatttgaagagggtacataacttgtctctgttcctattgaatttagtcttgatatttatgttaatctcggttgtgtgagtgcatccatcatgtatcagctttatatgtagctgatttttagcttgtgattcagacccagggtatattgttattttttgttttggttttaatttttagtactgtggggaatctcattctcctactctgtttgtcaactcacagggccaatataagtcaacattggtgtgtccaatctgcaacaaggtttctgtaacgtttgatcccttcatgtacctgtctttgccgttgccatcaagtcgcactcgatcaatgactgttacagtgttttatggcgatggaagtcaccttccgatgccatacactgtaacagttcctaaagacggttcttgtagagatctcagtaatgcattaggcactgcttgctgcttggacaatgacgaaagccttttacttgcagaggtaatacttttagcgagtcctttcttaaatattttttgtccttcacatctaactaaactgtgatgttatcctcctaggtgtatgaccacaaggtctttaagtattatgaaaatccccgggagttgctgaatgggataaaagacaatgaacatattgtggcatatcggttcatgcagatgcacaaa

SEQ ID NO: 25647 - DNA, 1243 bp, Arabidopsis thaliana landsberg
aaagcattatactgagatcaaaacccttcgaaaaatttaaaaataaaaaccaacttttttttaaaaaataattcaacaataggaacagaaaacacacagcatgaaataagtataaaggaaccagcttggtctaatttccttatctgtctaaaactctcttaaacctctgtctcttctctctctttcttctcttacttatcttcttcttctcttctctcatttcttgagttctctctcaagactcttcttttcttcagtcttcaaacataagaaaggaagttccttttgtttcttctgttttagttctcttgtgggtttatctatttggggtggtggttaaaggagggagctttgggattagaagtttttcagtgaaatcagaaagctttcgagagaggtttttttcaatttcaaaacgtgggggtggggggttagggttagggtttacaagttatgcgaacaggtggttatacgattcaacagacactcactacagaggctgtttctgttttgaagcactctctcactttagctaggagaagaggccatgctcaggtttcttaacaaaaccttcaacattttgttaaagttttgatctttttgatctttcgatgttttattaatggaaaagtttttgtttttattgtttcaggtcactcctctccatgttgcagctacattactgtcatcaaggacaagtcttttgagaagggcgtgcattaaatctcaccctggtttttcaactaattaccagtttgccccttctcgtcttcaacatcatcatcaccataaccaaaaccatcctcttcaatgcagagctctcgagctttgtttcaatgtcgcactcaacaggcttcctactgttcctggtcctatgtttcatggtcagccttctctcgcaaacgctctcgtcgctgcactcaaaagagctcaggctcaccaaagacgcggctgtatcgagcaacaacaacaaacgcaaacgcaccctcaaacgcagcaaacgcagttattggcagtcaaagtagagcttgaacagttggttatatccattcttgatgacccgagtgtgagtcgggtcatgagagaagctggatttaacagcaccgccgtgaaaagctgtgtcgaagattgttccgtttcttccgtcttttacggtggctcagccgtcggagtcttctcttctccaaactctcccgatcaacaacaacaacatcacaacagcatcaaccgactttaccactac

SEQ ID NO: 25648 - DNA, 908 bp, Arabidopsis thaliana landsberg
tcatgtttatgtagcccgcaaagtaaaagtttatggtattccaaacaaaatagatgttgtgtgattatgtttaatagatggatgtttacaacttatgtaaaattcgtgacatttttattgaataaactgcactagatttattcatttttagttattgatagtgtagtttaatagatagcaattaatttagaagattagctattcgtactactaaaagtctaaaactatccccttttttgtatactacataacttgaataaaatctcaacacttaaactttatcatcctccttcagtagacttttttttttataatcattttatcagatggctaatcattttcatttcattttctagtaaagtattcttctaattctagctatgaacatatctattatgaatttatgatctagatattcttgaaaggatatcaacatgatgtatgtatctatgtatacattaataacatatgcatcacgttgaaacgtattcatgtgacatacaataaaatttcgaaacaaatagtcgggcttctttcctaatacctggtgaatccgacagataaatgttgatagacaacactaatatatcttcttcttcttgttttttttttctttttttttttgtcaaaaaacactaatatatcttacaaattaaatgatattatatatactatggaaatggagcaataaaaaatctgccaataagtaactagtagtactgcataatttctcgaggatacaaaatgagtgaaatctgacgaggaccatatacagatattgtgggtgattatcatatatgagataagacacagacatgagatgaggctgacctttaaccattcgcgattagtttcatgcatccctctcatcatgactaagtttaattggttttgggtgttttatttac

SEQ ID NO: 25649 - DNA, 723 bp, Arabidopsis thaliana landsberg
  unsure (1)..(723): unsure at all n locations
tccggttgaattcgaagatggtccagctttggctccatttcccattttcggctcagttaggcttggtggtggttatggtgtgttaggtcttgttcttggtctatgtgcttggttctgatttgnnnnnnnnnnnnnnnnnnnnnttttagaatgagctttttgtttcaaaaagctttatttcttatgattacatgttgtgttgttgttagctaagagatctttgtcctttggctccttgctactattttgttataaattcaatttattattatttctcagaactgccacaaattgactaaaaaataaaaatctacaaaaatctataaattagaaaagattatgaaatactacaaattttgccagtaacacaagaaatatgaaagatccaataaaatattaagccaaggttagtagaagaagcaattttgatgaaaacaaatcccatgatgttggtacaaaaagcttgtccttgtgaattttttaaactatagctgaaaacatcaatcacaagaaatatctatacaaaggtccttttaagattaaaccaaactctgtgacatctcagacttcttgaagctaaactgggaaaaagccagcttcttgaatctaagccacattcaaaaggatttacaatgttgaacaaaaagtcaatgatagagacactttcacaaatcttcttcctcttggctctctaaagatatctaggtttgatgagctcggctc

SEQ ID NO: 25650 - DNA, 960 bp, Arabidopsis thaliana landsberg
tcaacagcgacactcgtttgtttgttgtccagtgagctagtttcgcctgacgcaaaaccaactatccttctagctccagtaagactcgaactaaccttacctgcagcataactagtcgatccatgagcacttgatgaggtaacaacacaagtcccacggaatctacacgaatcatcagtgaactccagaggctccaatgatgtttttctatcaaactctgcaatggaagagcaaattccttcctcacttccactgttaagaccatctgaatcatgggaagtagcatacacaggcagactttgcgaaaggctacaacttggagtagacaaagcttcctgggattgttcacttgaagcagtctgtggcagacccataactaatgctcttatcaagtaaaagggtttatggtcacttctgagatgtgagtttccaaatccctaattatctaaaaactccctagaaactaccaaatccttgaaaataaacaatactgactaactctatctctaacagaacaataaataaaaatctagaattatgtatcagtcacaggcatccacaactcgtgcattgcttgcttactgacccgcatacaagaaaccaaacacttaacatttatccgacattggtttacggcagaacagtctgaagttacatgaaatgcaagggtgacagatacagagttcattgcagttaccctttcctgaaacaaataaaacggagaaagcgaatcaatgacacagtaagtaaatacaaccaaatttgttctgctagactgttaaccttaatcatcaatagaacacaaagtgcagaagttaatcaggaatggtcaaaagaagttatgactaattccagctacaagaataagaaacgatcaaacaaatcatgatccggaaacatacgccataaaacccaaattattaataacacgactaagcaagaagaagagttcctgagagc

SEQ ID NO: 25651 - DNA, 1407 bp, Arabidopsis thaliana landsberg
agactgcagctacaactgcatacttgattaacaggtcacctgcttctgcagttgatcataatgtgcgagaacagttgtggctcaacagagaacctggatacaaacacctaagaagattcggttctatagcttatgttcaccaagaacaaggcaagttaaagccgagagcactgaaaggagtgtttctcggatatcctcaaggcacaaaaggttacaaggtgtggttacttgatgaagaaaaatgtgttatcagcaggaatgtggtgtttaatgaagattcagtgtttaaggatctacagtcagaaagtaaagctgaaaacaaagagataacacaggaatctcagattgagattgaagtaccttcaaagtcagaacccgaaacacagattcaggttcaaggtggagctactcaagttcagcttagtgattctgaagatgaatattatgatgttgaaggagtggttacaggaagcaatctaaagaattaccagttggctagagatcgagtcagaagaacaataaaactgcctgaaaaacttactgattacactcagtttgcttttgctctagtcatggcatacaaagtatgatcagaggaaccagtgtgtttacatgatgttaaggaagacaaatactggaagaaatggcatggaggtatgatagaagaaatggattcgctgtggaaaaatgcaacctgggacatagtcgacaggcctaaaaatcagaaagtaataagctgtcgttggttgtacaagaaaaagcctggaattcctggtgttgagttaccaagatataaggcgaggttggtagcaagaggattctctcagaaagaaggaattgactaccaagaagtgttctcacctgttgtgaaacacacatcaatcagaatcttaatgtctctagtggttaaagaagacatggaattagagcagatggatgtaaaaacagcatttttacatggacaacttgatcaaccattgttcatggaacagcctaaaggttttgaggtaaatcctgaactagatcaagtatgtttgctaaagaaagctctttatggtctaaaacaggcacctagacagtggaataagcggttcaatgcattcatgatggatcagaaattcactagaagtgtgagtgactcatgcgtttatgttaaggaggtaagcaatggtgaatgcgtccctagtgcatttttataagtcgcagcacgtaagagtgcacatcagtttgaccagcttaaggagagtcttcagcatccattttaaactgatcaatatgccgcatccgaccaggagatagggaagaattttcataacgaataggagtgaagtcactcgatgtttggcttaggtgtagttccctgtcaagagtaattcagtaattcaccatggctctgcgatctggtag

SEQ ID NO: 25652 - DNA, 1239 bp, Arabidopsis thaliana landsberg
agagtatctaatggtaatgcagaagggtaaaaaaggaagagtgaaaaggtgagaaagattaccaaaaataaggggtttccaaaagatggttctgatgagaaacagagcccatccctctccttttccccttcccatgaaagaaatcggatggtcctccttcaatgtcctccacctactcttctcttctttctttttttctttcttattattaaccatttaattaatttccccttcaatttcagtttctagttctgtaaaaagaaaatacacatctcacttatagatatccatatctatttatatgcatgtatagagaataaaaaagtgtgagtttctaggtatgttgagtatgtgctgtttggacaattgttagatgatctgtccatttttttcttttttcttctgtgtataaatatatttgagcacaaagaaaaactaataaccttctgttttcagcaagtagggttcttataaccttcaaagaaatattccttcaattgaaaacccataaaccaaaatagatattacaaaaggaaagagagatattttcaagaacaacataattagaaaagcagaagcagcagttaagtggtactgagataaatgatatagtttctcttcaagaacagtttctcattacccaccttctcctttttgctgatctatcgtaatcttgagaactcaggtaaggttgtgaatattatgcaccattcattaaccctaaaaataagagatttaaaataaatgtttcttctttctctgattcttgtgtaaccaattcatgggtttgatatgtttcttggttattgcttatcaacaaagagatttgatcattataaagtagattaataactcttaaacacacaaagtttctttattttttagttacatccctaattctagaccagaacatggatttgatctatttcttggttatgtattcttgatcaggaaaagggatttgatcatcaagattagccttctctctctctctctagatatctttcttgaatttagaaatctttatttaattatttggtgatgtcatatataggatcaatggaggaaggtgggagtagtcacgacgcagagagtagcaagaaactagggagagggaaaatagagataaagaggatagagaacacaacaaatcgtcaagttactttctgcaaacgacgcaatggtcttctcaagaaagcttatgaactctctgtcttgtgtgatgccgaagttgccctc

SEQ ID NO: 25653 - DNA, 1596 bp, Arabidopsis thaliana landsberg
aatttttattccttataataaattgcaccaataaataataaatgatgtttttttattggatcaatatccgatgcattataatttgatttctaaagttattccgaagttattttgttcctcaaaaattgcgttagacattgttcacgggatggctaactaagaaaaaatcatgaaacagtgcatccgcatattaacctagtatatattaaataatttttgcttatgctgataacattagtgataatttttactatgattaaccaagattatcaaaaactgaaattttaataaaagctcttctcgaaatatcaagcttaagttttgtttttttcaaaaataccatcatttgtttaatgttcaaaaaatatcatttaagttttggtttttcataaataccacaaaaaaataaaattaaactttcaactttcaaaactaaaccataaaccttatctcctaaaaactataacgtaaatctaaaatagtcaattttaacttaagaatttaaattttttgatttttgtggttatggtacttttggaaaaccaaaactattggtggtatttatagaacactgatagtggtttttttggcaaaacaaaactcgaaagtgttgtattcggaagactttttcttttaataacagttatatttaaattggcattaccaaaaaaaaaatgttatttttttgaattggggacaaatgcattaattgttttaaaacatttgaagatagagcatatattctcaacttgggttttgtttcacgggtgtttagtgacatacatatatataaaatacttatttttcaagatatgaaaacatcgcactcaacaattctaattgtatttcttcataaaatgattttagaaattagaattgtatttcttcataaaactgattttcccttgttaaaacctacgttgaaaatcaattttagcatttataaaggccaaaacaaatatctaaatctaaatcttattaatttatatgtttctgaatttcaaaatatgtttagaaacctagaattctatgaaagttttcttggtatatagacattcatattaacctaaagtcagaatctaccatgcagccaagtggggcaaccatgactctaatcaagtacaaatattttagcggcagcttttatattaaaattcttcttagtccatatgagtagaaacttttgcctttaaggttacaatgaccagtttaaacctgcgtcagtgttttcctgttttttctagagaaattggtaaaaggagatttttgtttaaaaacgtccatctaatacattttctaaaaagatttggtgtactacgttttataaaactaaagaactcgattataccctgcattccataattcttgaacatagccaaaaacttcttattaataaagaatctttttttttataaacataaattatttaacaaaacttagaagaggcgttaccaactcctaccacatttttacaccttgttttacatagcccatacaactggtgctccagttgcagctccaatctttttcgctggtaggcttgtgtaaaacattatattccatgtcttggacttatgcaatcatactatgctcact

SEQ ID NO: 25654 - DNA, 2926 bp, Arabidopsis thaliana landsberg
ataagcgagaaacgttttccacttctcaaaaatagtcgccggcacgcaacgaaagtctgtccgtccgggaagatgaagcgacaaagttagatctaagaagatgaacagtcggctcgggaacccatccatgaaactcatcggctttccgtcaagacaatgagctggggggcaaactgttggggtcggattccacctaggtaaccgagccgaccctgattaacgcctcggagatcttgtcgaagaaccatcctgagccgggcctcaaaacacctcggggatcatgtcaaggaaccatcccgaggcgacatcaagaacgcctcggagcatcaccacaaaggattccccgacccggtcttgaagcgcctcagatggcaacccggaaagtcatcccgaggtgggtcttaagacgcctcgggagcgcatcattcgactaacaaggtccgagccgctcaaccacaacatgagggtcaactcaacccggctcggaggaacatcgggtcgggacagaaccttcaagaaatgacttaaccaatatgagatcgaacataccatttccgaaaaacccggaagagatattagagaatctccaaggatatcaccaaatataggagttcccagaatcttcggaaaataaagacaaatctccttcgccagctctaagataaggagaaatcttccgagaatatcgcaagaagcgatctgataaagccctatataaagaacttctgaggacaaagaaaaagacacgcacaaaaacgctcttaacttcaggctatcaaaaacgctctgattttgaaggcaaaacacttattttgatatttctaaacacttgtacgatcgaatcctcattatttcaataatataaccaagaacaccgtccgcggtaatcaacaattttgttgttctttgagaaactcacaaagatccgttctttaaagaaacctttagtacaatttctcttgtgcgagtttcgactctcacaatgcgtagagcaaggtcaaacgttttcttgtatgaagagtcatgattgtcatgtattcatgcaacgattattgccatttgtgttaagagagttgctaccggcaaatattcatgatgcaattgcaggtaataaatatatttatatattctatttctattctttaactcagttattaattgacgactattaacttacattaattcgatatatgataggcattagatcatttttcagggacctatgtacaagaacattgacaactgatgtcatagaacaattagacaagaatatcccagtgttactttgtaacttggagaaattattccctcctgccttttttgacgtgatagtacaatttcccgattcatcttctacatgaaactgctcttggtgggccaatgcaattccgatggatgtatccttttgaacgattcatgaaatctcttaaagataaggcaaaaaatcttgcgagagttgaggggtcgatagtcgcaggaagtttaacagaggaaacgtcccacttcacatcgtattactttagtccaaacgttagaaccaaaaagactcatcctcgacgatatgacgatggaggtgttgcacctacatttaacattcctgatgttccagatacctttgcccaaataggtagacttgcagagaagtcgaaagaagtttggtgggatgaccatgcaatttctagagcagctcacaattacatactccgaaatgttgattacattcaaaaatttgagaggtacaaagccagacaaattttattcataattttttatatttaataattagtgtgatactaattaaggactaattaaagaagctaagcatctacattttaatttgtaggttatttgattcacaaatccgtgaagcatgtcctgaattagaagaaaaagagtatgaaacttacaaagatcgtgattttgctggatggttaaaatactatgtaagtataataatatttcgaatattcgattacttatttactttaaaaaaatgataaacttaatattttctatgtgtaggttacgaacggatgtggaaacgaaccattacaacttttgttgcatgagctcgttcaagaaccaagatctaagatcacaacagcttcgatgtacttcactcgcggctatactttccatacatatccatatggaagtcgaagggcaactgcaaattatggaatccatgtcgaaggtgaaactgagttttatgggattatacagcaaaatctataagtcgaatatccgagacttttgaatttgaaatgcgtccttttcaagtgtgattggtttgatcatgtgatccgtcgaggggtacgagtaaataacttaggcgtggtcgaagtcaatgcaaacaagacttattcaaagtttgaaccatttatcctagcatcaccagcagggcaagtatgctttctatcttacctgcgtgtgaggcctaggcgtgaactgtggtaatcggttattaaagttaatcccagaggccgtatagtcggtcttgttgatgatgttgtgatgcaacaagaaagtgtcagagaagtttccataccagacataacaacagaagatgttatccatatttacctacaaaacagagaattagaagacatcactcattacggtttcaaagaagaagaacatcagacgaattcggcgattctcatgtagacgttgagtctgaaaatgatggtagcaattcagaaaatgaatcagaatgaatgttattattgtttaattatcaactttttacaaaatataataaaaatattactttcgatgtttttaccaaatataatataaatgaacaaaaaagatctgaaaatgtgattaaaaatttgaaagttataattttctaatttgaaagtttataattataattttgcatttataggaaattattttcataatattcctattttttttttca

SEQ ID NO: 25655 - DNA, 1190 bp, Arabidopsis thaliana landsberg
aacaaaacatcttttaagggaagaataatagatattacgtgggctcttgtcccgttggttctgtgaaaactggtggctgatttggcatttcattagtttataagaaagggacacaaactgtgtgctctcctacgtgcaattctcatgcgattagtgcattcttaatccctttaatggactgctttatctttgtcattgcttgcgtaacgaggccttgcgacaattatattttacaattaacatgatttttaattacaactactgacttctattctctaattattttttctcataaattaaacggtatggcttccaaagaatgtagaaacggaatagtcaaatgataaaaaaaaaagcgtaaattctttaacatgtttatcatttcaatgatgacagatatttacgttacgaaatacaaattcaccgtttagtataccaccaacgaaaaccattagccattaaaaagaaagctaggccattcacattagtttgctaaaaagactaaatttgtttcaatttaaggacaacaagttatgacactttaacggtcgatcccctcagtttatgttcagttcaatcaacaccatatttcaaaaatgttagtaagaaccatatgatttggagtttgggatgattctaactgatttacaaaaatctaaggcaactatataataagaaataacagtagttacacacaaaaaaattcataaaagaagcaaaacataacatattttaaggttgtatgttatgtttgcatatcaataacttggtaattatttttggtcatagtggtaggcaatctcccactgacaatacgaactagaatctcactgcatctcccattacttgggacaataaactcaaatagacacttattggtcagtatcatctcatggcttttacagaaacacaaccatgattcatgcgagaacttgaatcctctgtcgtgattcacaatcttcaaaggccacttctttccactttcatcacaaagctcaatatcttcctccaattcaatcccgttcgatctcagaaaagttaacggtaattcctagcaaacacatagaaattgatattatgtaaacaaccattattatgagttaatacagattaatattaaaaaaaagggttctttaagctcaccaatttctgaagtgaacctcttgtgatattcctaaaaaaatgcgatg

SEQ ID NO: 25656 - DNA, 2049 bp, Arabidopsis thaliana landsberg
taatagacacttgagaatattaatcaattaaggattacataatcttttatacaatagtagtattttcctattttggtcgccgtaataaggatataccgactctatctctacggctgtctaaattaacgattgttagagtgaggacaaacacaatctttacaatctcatttatttaataggattattaatcattttagattctagttggggtgttgaacaactcaccatgctgtataattagacatcacattattttaaaattgataacactgcgattgtttgccttcgaagcaatacagagtaatatgctaaatcattaaacttaggattatatataacctttgacagacaaaatttaacatgatttaattgttagtacgtcgctttggcggttgattattaatgtttaattaatcgttcgtacgtgcactagcttattcttgtttttgactacaagatcacgtattagttattgcaacaagttgatgtcttactcaattgatctaagaatagattaacggaacctattgaaatatgagagttttcataacaccgattcactggaaaaatcacgaagtagttattttctgaacctattgttcactaaaagataaaacatgcagatttttttatagagaaaattgagtgatgattatgaaaaaatgttgtaaaagataagaatttagctcgaaaaatcagaatcatattattttgttaatgagaaaagggtctttataaagtattcttgtccaatactactatactagtccgcaagatattgcaatctctagaaattataacgagtgattatgtagcatcctagtgatcatgtaagaaaacatgttttttacatctttatgagtggaggatcgtgttgatcaaagtcatatccacagatgttgtcttgagccactaataacctcacatttctacgttttgttggtaggctataaacccaaaccgacctaaatcaatcaaagatcacaatggtaaagacactgaagagtaaaacccaaggcattggcccatgaatgaatctatgtcgacaagctctgcacgtggcaccgaggtgtagaatttaaagctctaacaaccgttggatcatccaatctaacggtgtaaaacaactctttctcaaagccgttcataactctcaaagacctcatcggcacagccgtgtatcggaattaccaaaaaagccaactgtccccacgtgtcttgtgaacttcattcttctgtttgcaggggcttttttgtagtttaacctggaccccctcctgactacacctaaaagtcacggtccacatggctggtgacacagacatgcgaccaatacgcttttacttctaaaccgtcgatttaattacatccacctctagatctcgccacgtgtaacattgatttagaaaactcgtcacagtcccgtgactgaagaatcaccagataccaacagctacaagtttttaaaaaccttctctcatcctcttcctcaagcctccctcctcctctttaatctcaccagtcaccatgaaagtttagagattttttgaaagaacaaacagatatcgaattcgagttttgcaaaaatggtatcggtggaggaacctttatctcattccaattccactcgctttccgttaacaaccgatttctacggttcatcatcgccgtcggcggcgaggttacaccgtcaagctggccggtcgatgagaacagtgagatctaacttctatcaaagcggagatcaatcttgctcattcgtcggctcaatcggcgataaatcagagtatgcgtcggagtttctctcggattccgtcatcgacatgagactcggcgagcttgctttgaaaaacagtaattctctcaattcaaacgcttcctcaatgaaagaggaagcgtttctcgacatttctcaggcgtttagtgatttttccgcttgtagtagtgatatctccggcgagttcagcgtcttgcttgcttgcagtcgcggacgtgatagaaatgagacggcggagatacgaagcggacgatgatcagagttagagagag

SEQ ID NO: 25657 - DNA, 1566 bp, Arabidopsis thaliana landsberg
tgcatggttccttttagcactagtagccataggggccttccctttctccttggcgggaatgggagccttatggcttgttaagttcttagcttctctcttgaagccaagtccatccttaattgaggggtgtctaccaattgtgtaggcatcccttgcaaattttagcttatcgaaatcattcttgctagtcttaagttgagcattaagactagccagttcatcattaagcttggaaattgaaactaggtgttcactacaagcattaatgtcaaagtctttacacctagtacaaatttcaacatgttctacacaagaattggatttgtttgctacttctaatttagcatttaaatcattgttgacacctttcaaagtagaaatggtttcatgacaagtagatagttcaaaagaaagcatttcatttctcttaacttctaaagcataggatttttgtgcctcaacaaattcatcatgttcttcatacaacaaatcctcttgcttttctaacagtatattcctatcattcaaggcatcaatcaattcattaattttgtctaccttagttctatctaatcccttgaataagcatgagtaatctatctcatcatcatcactagactcatcctcacttgaagaagcataagtactagtattaggagtgcttactttcttctcccttgccatgaggcaagtgtgatgctcgttggggaagagggatgacttgttgaaggcagtggcggcgagtccctcattgtcggagtcggacgaggagcagtccgaatcccactccttgccaaggtgagcctcgccctttgccttcttatagttcttctttttctccctcttattcccttgatcctggtcactatcattatcgggacagttagcaataaaatgaccaagcttaccgcatttgaagcatgagcgcttctcctttgtcttggtcttgcttggccgtcccttgcggcctttaagtgccgtcttgaagcgtttgatgatgagagcatctcctcattatttagcccgaccgcttcaacttgtgccaccttgctaggtagcgcctccttgcttcgtgttgctttgagagcaagaggttgcggctcgttgatcggtccattcaaggcgtcgtccacgtacctcgcctccctgatcatcattcgcccgctgacgaattttcctaggacttcttcgggcgacattttggtgtacctgggattctcacgaatattattcaccaaatgaggatcaagaacagtaaaggaccttagcattagtcggacgacgtcgtggtccgtccatcgcgtgcttccgtagctccttattttgttaataagggtcttgagccggttgtaggtttgagttggctcctcgccccttatcatcgcgaaccgtccaagctcgccctccatcaactccattttggtgagcaaggtaacgtcatttccctcatgagaaatcttgagggtgtcccagatctgcttggcgttatccaagccgctcactttgttatattcatccctgcacaatgaagctagaagaacagtagtagcttgtgcattcttatgg

SEQ ID NO: 25658 - DNA, 1458 bp, Arabidopsis thaliana landsberg
cgttaagtataaaatcccctaaaattatttttcatataaaataagtgagaactagccgttggaatttgataatttattttagctaatcatatgtccaacatatcaaagtcctatgtataactgtttatataaagatatgcctctgataacttataatattaataggtatctgtatatccaaagtcggtagttgaattggggatatggacattccacctaatgtataattcaaactttgtcgttgccaataaaataaaaaataattataagctattatgaaaatttctctccccgtcggtcaactttgagttggtcaaacattctagcaagtgaaatttataagttaattaaaccgggggaaaaaaaagataactaaaccaattttgaaccgaaaaatcgatttggcattatctgaaatgttagtggggcatggaaataaggtcagggccgttagcgttttaaagatatttagatgagccagtgagtttggtaacgacccgacatttaagtcttgtcgttttgtaacagagcaacggtagaagattcctatattggctaacacctaaacctgaacccatgataacgccatacctttttcttcccagtgaatttaattgaattaacagtttacaacttcatatatagattagtccatgtccatctatatcacctcagagaatttaatttcaccactattcaacttttgttactacttcagttcatctattttttcagttaaacatacacatttaaaataatatttatagttataagaaaacaattttataataatattttttaaaagatagggttacgttcagcatgagagtttttgggagattgagttgaaacaagaactgagaaaaacatttaagaattgcaaaagagaatgaagagttactggtttttgatcgaactagagatatgagtcattttctatattcactccaaaatctaataaagaagcaaacacaattctggttttaattagctgagaaaggttcatgataagctatttctatgtttccttcaaaacatcataaagtttttgaaactgaagaaatctaaattctcaaaccaaccatatgttgatctaaagttatatatatgacttcttacaccactggacgacagaagataatctattcttagtaatggctgatagtacttcttgatagggttttagactgtttacctcattgctcaatgctaggattctgaatcagatagcgagcgttgtgtaagagggaagtagtctcctcgtttgatgcatcaagcaaacgcaactccttgatctcgtcctgccatttctcaacatgttccttgtgtatcctgtttcataaatgtgaacagtgttacacatgtgagtgtataaacatctcaatcatggtacatacagaaacattatagaatctcttcaaactcacatgatcaagcgttcttcgaattcgttactga

SEQ ID NO: 25659 - DNA, 674 bp, Arabidopsis thaliana landsberg
caaatacaataaaaatgttgttttgttacgagtcatttcgattgcagatacaatgtaacagtcttcacacattgaacaaaacaaaacctaagttaaacaaataactgtttctttaagtctttaaccatgaatctggcctttattagtaaatagtaatagtggttattgtaacatgagcaacatacgtcatactagccaaccaatgtctctcttcttaaactcatcgaactaaagagaggtcaaatcctcatacttactcggcctcgatgtgaattcacgttataataagaaacaaggaaaacacaaactaatcattttcttagtcctaggtgttcggttttaaaatttagtatcattcaagtattttgaaatcttgattttggtttggatccggttcttttgtttttaaaatttagtatcaatttggttatttttccttggatattttgattatttttgattattttcggatatttttttgttatttttgagtattttactttttctatttttattttaaaattttttattttttgaatcaataaataattaatattttggatatttttggttaccgaaaatatttcagttcggtaccaattataattttttttgttatataataatatagtatacatccaattatttttaaattttgattctgttcgattttt

SEQ ID NO: 25660 - DNA, 1160 bp, Arabidopsis thaliana landsberg
agactcgactctagaggatcccaatacgagctacatgagtatatagtcatgtcatttggcttgaccaatgctcctgcctacttcatgtacctgataaactcggtctttatgccagagctagaccgatttatcgtagttttcatcaacaacatgctggtctactctgagtgcgacaagaagcatgaagagcatctgagaatcgtgttaactagacttagggagcacaaatcatatgccaagtttagtaagtgcgacttctagctaaaggaagtgcaatttctggggcacatcatgtcaaaaaatgggatatcagtggacccaagtaaagttcaacaagtaatggaatgggaggcacgtacctcagtttcagagttcagaagtttcctaggataggctagatattactgtcacgtcatgtggcagaaccgctagattattccagcttaagtgcctaagtcacgctcaagggtgtaacacacttaaatcggaataacccgtcagtccctcagatctagtctgatgaagccacttaactaggatcaaattccacaatctcactcgaaggtgagtcacagaagaaatacaataaagcaggaacatcaaattaaagtactaaattattacataaatcggagttttttaagttgctgataagagttcataaaataagatgcagcgaataatcgatgtcgtcggtagcgaggaaatggacaaggcctagcccactaatcctcgtgctcctctcctgacggagcaacatcccactcgaccgtccaacccggtggcagggtggtagaccaagtcacaccatgaaccatatcctgaagcgtacctacaaaaattatgccacaagcaaggctgagtatactaatactcagctagacttacccggtgtgaggagtctactcctctacctctagaccatgcagttgtttggctgaggggtttggtttgccattgtattagctgagtctaaggtcaatttctagcttttccaatttctagcatcattatcttaactcaagtttgctccttctaagcatacatggtagcaagcatttagtacaatcaacaagttacctcatgtaaacctcatttcacttcttactcaatgtagtacaaggggtcaagcagtctcattagctgcgagaagcagacga

SEQ ID NO: 25661 - DNA, 829 bp, Arabidopsis thaliana landsberg
acaatatattactaggagaagagaaaatatgtctgaagaaaaattcccagaacgtccaggcgaaccagagtgcagctattatcttagaactggaaactgttatctgaaacaaaactgcaaataccatcacccgaagaatataacgccgagcgagcctcaatgtactctcaatgacaagggcttaccattaagacctggtcaagccatttgcccgcattacagtcgcttcggcatttgcagatccggtccgacttgtaaattcgaccattttacctaaccatcatcctcaacttgcaaatgataaatttgaaactgatattccttatctcgtgtttattttcaataatattctaatatctatgttttatttactctttatatgtatgaaaggatgttattaatctaaggatcaagttaatcaccatggtatcaaattttcatttcatgtaacaaaattggatttttcttttcaagtttacccaacaaacaaggctttgtcgtctccaaattttggactaatggtacatagtgaaagccttaagaatcaacccaaaggagggtcttaccttattttaggagctttgtccataccaggaggtacaaaaaaaaaagatcacaacaacagacaatagatgccaaactagtttacaagtgcaatttatgcaaatgatgagactaaatgctaatctttactttagccgagtgaataatttgaagtgaaatgaacctaccaaaaatttaacaacctctcatatcatgatcttgggagtggacactttagaatcttccttggctgtgtcacctggaagaaagaacataaaaccagtta

SEQ ID NO: 25662 - DNA, 1018 bp, Arabidopsis thaliana landsberg
  unsure (1)..(1018): unsure at all n locations
atccccctggtgcctcatcccaagcaaaatgttgtgggaaccaagtgggtgttccgcaacaaacaggacgagcacggggtggtgacgaggaacaaggctcgacttaaaaggttatgcccaagtcgcaggtttggactttgaggagacgtttgctcctgtggctaggctagaatcaattcgtatcttgctagcatatgccgctcaccattctttcaggttgtaccaaatggatgtgaagagcgctttcctcaacgggccaatcaaggaggaggtgtacgtggagcaaccccctggcttcgaggatgaacggtaccccgaccacgtgtgtaagctctctaaggcgctctatggacttaagcaagctccaagagcatggtatgaatgccttagagactttctaattgttaatgctttcaaggttgggaaagccgatccgactctttttacaaagacatgtgatggtgatttgtttgtgtgccaaatttatgtcgatgacataatatttggttctactaaccaaaagtcttgtgaagagtttagcagggtgatgacacagaaattcgagatgttaatgatgggggagttgaagtatttcttaggatttcaagtaaagcaactccaagagggcaccttcattagccagacgaagtatactcaagacattctaaacaagtttggaatgaaggatgccaagcccatcaagactcccatgggaactaatggcatctcgacctcgacacagaaggtaaatccgtagatcaaaaggtatatcggtcgatgataggatctttactctatttatgtgcttcacgaccggatataatgctttttgtatgcatgtgtgcaagattccaagtcaaccctaaggaagctcaccttacggccgtaaaacgaatcttgagatatttggcttatactcctaaagttgggctttggtaccctcggngatccacatttgattaattgggtattccgatgccgattgggcggggtgtaaaattaatagaaagagcacatc

SEQ ID NO: 25663 - DNA, 1066 bp, Arabidopsis thaliana landsberg
agtgagttctggccctaatactatcttcatattcatttttgttaagccaagaagggaaaaatgtttttgactgggctgagcaaacatttaaacgattactatgaatatgatagagctcgagaggcatcttttaacggaggagggaacatcgcttttagaggaaaactcaagggagatgcgtatttcacaacaaggctcttcaaaccccatcttcagctttcatcttcccccatcacaatctcctactctgtaagtctctgcttctagatacatcacattatgagatcttcttgtttttactaatggggggttttgagctggtgcaggtgaaatcagatgaaacctctaatcttggaatcctgctttctttctcatctccatcactagagactaaatccatactcgtggtgccagaggatcccatccgcagatttgacgacatgtccttacagtgtctcaccacatcagtgcagactgtatccgagtggacggtacacgaggcaagtcttgtcatggatggtcacacactgactgaaatctctgccttttgctacagaccagagaattcgacaaagagtgcagaatttgttgcattgctcggacacatctcagtcaaagatcatgttcaaaaccagcagaaccccgagattttacttccagcttcatcgtgggtcatcgaggctcataacgtagagcttgtacccagcaataccagatccaatatcctgacggataagctagaatggagacagatagacctcgaagaatccgcattcacgcggtacaatgtgtatgcccagaatgacaagtcgactgatctaagaccgaggaagggtctctagaaaccgacatgcgagacagtgcttcttggaattgctcacgtgccaacctattatgtaacggcactggtggttgcatcatacgtggaggcagaccgtttcatggatcatgctagtgccgaagatgcttagttgccgaagctggatgaagctcttagccttcttgtggaactagacagactattagtaccttacgatcgaaaacaatctgtatttatttttttgca

SEQ ID NO: 25664 - DNA, 1212 bp, Arabidopsis thaliana landsberg
tttcaaagatgctgatgatcatcagttactgaagcttgaagctatttagtttatcttcaggggagttcggctaaaccgggttatttggatcggtttgttcggtttgggagaaattcggttttaattttattttaccgaatacccgaattaaaattcggttcgggtcggttcggaagtcggtttattcgggtcggttcttgactagaaattgtgttccgaacttaaaaccaaacaaaaatttattcggtttctacggtttttaattcggctcagatatttaaaaaaaaaattacactaccaaaaatccttttccaaatatattacccactacaaattaataaaaagcccaaaatacaattcaaaaaagcccaaaacaaaaactaatagcccaaccctagaaaatattagggttttgaccaaaagatatgagctgccgaagggttgcggctgcggctccaggtgacgtaacgacgacggccatctctgatgatcctattcatcctttcatcgtcattggccgtgctattcatcttcctcctttcaacttcattcgccttgctactcttttaaacctcattcgccttgctactcatcttgctcgttgccttcgtacaattcttcgttctttatatcacaaagtaacaatgcttgtatataaggatgacgagagcctatgatgttttggatccaatttataaatcaaaagaagaagcaacgaagaaagaagagcgtacggagatgaagtgataaagtagaatagaagagatgagatatttgtttagatgtgagaagcaagatgagctttcacgagaataagaggcggagccgaagcgaagaagataaacaaattagggtaacttagttaggtttacacttatatatggctcctattaatggacttaggtttagagtaataaaccgatcggtccgattactgaaccgacccgaaccgagtaccgttgcaacaaattaatttcaccgatcagtttagacttctctcttcggtttacgccgaaacccgaaattttcgggttaatcggttcggtttcttcggtttactccgaactcccaaggctagttggtatgtttttagtactttttaacattatgttatgtttctggattgaaacatatctattcttatcttataaactttatgatattggggtctttaaagattcaattttaaaatttaattcgtttaacaatatg

SEQ ID NO: 25665 - DNA, 1052 bp, Arabidopsis thaliana landsberg
ggggcgctttttagataagaaggggggatctcataaagtttcctctgtaacccaaaacaagtgcatagtgacaaatgagagaaatgaacaaaccaatatcatcagaagaaagatcctacgaaactcgaacgagccaatccaaatgtgagattacagagttcaaagacaaagagagaaacaaagcaaaagtgcaaggaatcagataaaatcataggtaaagaaggaacctttaggggatcaagaacaattgatccagagacaatgactgactatggaaagagaaaggagagagttagtgattgagtagttgtagtagtggtagagagagagagggagatgggtgagatctcattaattgaagaaagcgaagaatcagagaggatgagaagaagaagaagaaaacaaaagagagagagcttccctacagaatcttttttggtcttcgctttctttcatgaaagatcaaaatcaaagcttacttgcttttgctatttaatcattttaaaaactttcctaaatttccttctttttttttttattttcttgttacaaagaatatagggaaatgaaaatcaaaagatcaatttttgtggatataattaaagattgtttgttcttaattgcattgtggttaattgtatgatggaaaaaaacactattcagcttctttttacttagtcaacttcttaattgctttttatttagtcaacttatttttttgtggtgtcctaataaaagcaagacgacataagagacgagaaataaatgggacacttgcaaagtttgcaaaaacagatgagttgtccaacttttctccacatactactactaatccccacttcgttatttatttattttatgttccattaaagtctatccatatgaatttcatgcatattcacccaccaaaacatttcactaaagaaaatgagagcgaattatatggttgatagtcaaatagagatgtgaaggcgatgattaaatttattatcagttatatggagtaattcatgtttttagagaatcatgatatccaaaacatttcttattaa

SEQ ID NO: 25666 - DNA, 1207 bp, Arabidopsis thaliana landsberg
gtagaatctagttttgattctaatttatttttcttatcataaatagatttgaagtggaatctatatcgatcaagtttttttgggggttttggtttcatgttaaatagaattgaagtggaatatatagattgatgtgtatttatttccaaaattttaagtttaatagatattttttattctgttttactaatttgtgcaatagaagaatcaaaatcgaatggcatgaaaaactttataattatgtgattagatcgaatattctgactttctgacttttcagatttactaggacaatactgtaaaagatagatttaaatatttgagatgaacaaaaggttgggggattttttttttttaacatttaaaattgttatttcaacttatttttcattcatataatcaaaatgaatcatgatttcttttcattgttaatattttctgctctttaccaaatccccaaaaataaattcatagttaatgagcatttaaggaaggattaacatgcaaatgtaattagttaaattaaaaaatctaactagtgttaggcttaaatgttgaaagatttcttaaagaggcaaatgggtccaataacacatggttgcatagtttgaagtttcccaatcatatccggcgccaataaatattttttattttagtttttgttgtgtcagtgtaagaattccacgtggctcatactcaatttattgaattccaaaactatcgaaattcaattctttcaggcagccccctttgtttgattagttaaaactcacgcaaagactcgtcgacaaacttgtgtactgtattttaatattcttgggaacacataaaaacaattaaagtttctttaggttataataaatgaactaggttctatgttctggcggcgaatgaatcacatggatgctttgcgaatgcttcaatttattttagttaaaatattagtatagagtataaacctagattgacaaattcattaagtatgagatctaatgagtaatagttacacaatagaataatataaatgggttagtccaaataaaataagctaaattgttcgcaaataaaaaagatgagaaaagtagtcaatttatgttgaatcagcctatgataatacagcatattttaattttatggcatgggtcatgaatgatttgagaaactcaaaagccagtttttgcgtaatctaatcaggaaaaaataatct

SEQ ID NO: 25667 - DNA, 1024 bp, Arabidopsis thaliana landsberg
agacattacttgagtttctttcagtctatcgccagttgatccgctctttgacaaacgctcactacccgcaagatcaatcaggttcaagacaccttgtacttgttgctctgtgctctgtaaataaaagataaaccccagtgttggtttagcagaaacaaacagcggactatcaaatgttgttgttgcagtaagaaacccgattagtacctcgttgaatccagagatcttcaatgtgaaaacgaaatggcttctagaagattgctcgttcattgcggtcttccctactgacctgaaaaaaagtaagacagttaattcattagcagcttccagtttctttaaaagaggaatcattgcgaatcttcaaaacagatacttgcctgtttcgagctgcgtggtctaagaggaacgaaacctgtttcgagcttcgaacatctacaacagtaagttccacaacatgtgtattcccactagcatcatgtttgattgcatatttctgcggagaaacgccattgtctgctctcacagcttccttgtttgttgacaagagatccctaatcgtttcgttgtatatttctaacatagacacctacaacatatagaccagccaataaatactatatgaatgcatcatctatttgtaagtctttataaggtttgttacctgcaactcatacttccaaccctgtgatcgaagagactgccttgtttgaaatatttgctccaaacatcgaggaatcagtcctttttcatccgggtttcctggcctacccatcattgtataagtttttccagatcctgtttgtccatatgcgaaaatgcaaacctgaaaattgtgtaatagaacctttagtccaagaaggtacagtgaaacataacattattcatcattcatgtgcttttattgaccagttagacagttttaccaaaatacactctgaaaatttgaggaatcgaataatgaagacataagtaaacagggagttaaactaagctaaagcagatagtcggtgttcctcaaagcgct

SEQ ID NO: 25668 - DNA, 1156 bp, Arabidopsis thaliana landsberg
tgacagacacaaaaagtattacgagcattttcttgaaaacactgatgaaagaagaaaaagaatgaaagctatgggttgattagaaagaagcaaaacagagaccagacgtcaaactaagccaataagaaatgttctctctgacctattagagacattctagaagatgacatattaagtagaaccagtgattgctttaacaaaaacacccatgtggttgaagaagatttccaagccacagaaaaggcaaaacatctaagtattttattttttagaagccagagtcaaacctcaatagagactaatccaaaaggattacacaaggaatattcccatagaaacatcctgataccacaagtagagtatactagtgtaagcctaaccctaagcaaaagaacagattaaggacaaaaacatggcaggtgacaagacatggcaagtggcaatggtcctcatagaatcaggcaaaccaatagtaggtaccaaaacaagagtaaggaaacaagaaccaaatctggaagaaaatgtcaaagtcctaaagatctttttgaaagtagaaaagagtttgtcggttatgtttaaacgccaacaaaggaacagtcgtctctcaggaaagaaaaagcagaaccaaaaaagattgttcaacaaatttggaaactttgcaatgaaaaatcaaaactttataactccaaagaagcattttgggtttgttattggttacctagcaagaagttcaagcttgggctgcaagaaactcttcttcttcttagaagtcagagcatacccaacaacgagcttctgctgctgctgcagaaacaaaggttgttgaaactgaaacggcgtcgtttcgctcaccaccacttggtcttcttcctcctcctcctcttcacctttgtatggcaccatgttttccccttggaatctcatagcaaagtcttcaaatccaccgcaggaaacccctaaattggacgtaatccccaaattacggttcagtctggcagtttcgatttcgccggaagcaagagtcccaaacattaatagaaacggtataaaaaagaagaagcaaagggagaatctttaaatattcctctcagattctatatccgctgacacacaacacaagtggtgaaattggcactgcctacaaacgagatagagc

SEQ ID NO: 25669 - DNA, 682 bp, Arabidopsis thaliana landsberg
  unsure (1)..(682): unsure at all n locations
aaataaaaagacaaatttgtatactcatgctgaatcaattccttgacagacatttgatttcaaaaagtatgatgaaaagatagttgggtcgagggttaaaatctggtggccgttggatcgcgcgtaagcattttgtagtttgtgctttaatatactacttcaatttatttattctttctgtgctatgtattttcctttaatagctgaatctggactagcacctcggatggttgctggttgcatttctgtcgaccatgcctgtaaatgagtattggatttttaccacaggtattatgaagctgtggtcatttcatattgttctgctaaagagagacatcgggtaaagctaaatatatcagtcttctacataactattttcgttggtttttggtgaatcattagtctattctcctaagtgatacatatttttaatttgatccaggtcattgataatatgctatatttgtttatgctgctgctgctatgtcgttttcaggttcgctatattgatggagatgaagaaatcttgaatatgagaaaggaaaagtggtattttctgaatgaatcaaagtcatcaaaggtggggaattatatctctcatctctggttttttgttttgtttcatcccccgaaaaatgaaacatgcttccacattttctgttagcaggataaagnagctaat

SEQ ID NO: 25670 - DNA, 4259 bp, Arabidopsis thaliana landsberg
gtgtattggtgtaagcacctaaatatacctgttcctctgatatagcgtctttctataacttatttgagcaatacgcaggtcctttgatggtttgtttaagcaaattgtttttaaatctttctcaggggtcttcggttcatgtgctgtttccggtttaagctatggtggatgactcagagaatgggagaaatgggccgagatattccctacgagacgcagttcttattggtcgagagcaacgatgggtcccaccttgagtctgacggagctaacggcgtcgagtgtaaccagaaagtttacaccgttttcttgccgttaatcgaaggatctttccgttcgtgtctccaaggaaacgttaacgatgaggttgagctctgtttggagagtggtgacgtggacactaaacggtcgtcgtttactcactctctgtatattcacgccggtacagatccgtttcagacaataacggacgctattcgcaccgttaagttgcatctgaatagtttccgtcaacgtcacgaaaagaagcttccagggatcgttgactacttcggatggtgcacttgggacgcgttttatcaagaagtgactcaggaaggcgtcgaagctggtcttaagtctctcgccgccggtggtacgccgccgaagtttgttatcatagacgacggttggcaatcagttgagagagatgccacggtggaggccggagatgagaagaaagagtcaccgatttttcgactgacggggatcaaggagaacgaaaagtttaagaagaaggatgatccaaacgttgggattaagaacattgtcaagattgctaaggagaaacacggtttgaaatatgtttacgtgtggcacgcgataacgggttattggggcggagttagacccggggaagaatacggatctgttatgaaatatcctaatatgtcaaagggtgtggtggagaatgatccgacgtggaagactgatgtaatgacgctgcaagggttgggtttggttagccccaagaaagtgtataagttttacaatgagcttcatagttacttggctgatgctggcgtggacggtgtgaaagtggatgtgcagtgtgtattggagactttgggtggtggtttaggcggtcgggttgagctgactcgtcagtttcatcaagctcttgactcctctgttgctaagaacttcccggataatggctgcattgcttgtatgagccataatacggatgctctttactgctcgaagcaagcagctgtgattagagcatcagatgatttctatccacgggatccggtgtctcataccatccatatagcctccgttgcttataacagtgtgttcttgggagagtttatgcagcctgactgggatatgttccattccgtgcaccctgctgcagagtatcatgcctctgctagggccatcagtggtgggcctctctatgtcaggtatcatcattcaactactagtatatctctctagttgaacttgcctgttgattgcaaacttacattgttacatgttgtttgtgttcttaatatatagtgatgctcctggaaagcacaactttgagcttctaagaaagcttgtattgcctgatggatcgattcttcgtgctcgactccctggtagaccaactcgcgattgtttgttcgctgatcctgcccgtgatggtgtcaggtaagcaaatttggcttataaagataattcttcaaaactttttggtttctcattttcttaatatgctttgttttggtttcagcttgctaaagatatggaacatgaacaagtacactggagttcttggcgtgtataactgccaaggagcagcttggagcagcacagagagaaaaaacattttccaccagactaaaactgatagcctcactggctccattcgtggtcgtgatgtgcattcaatatcggaggcctccactgatccaacaacctggaatggagactgtgctgtttactcccagagcagaggcgaacttattgttatgccatacaatgtgtctcttccagtctcactcaaaatccgtgagcacgagatcttcacggtgagccccattagtcatcttgttgatggtgtatcttttgccccaattggtctagtaaacatgtacaattcgggaggagctatcgaaggacttagatatgaagccgagaagatgaaagtggtaatggaagttaaaggatgtggcaaattcggatcttactcttctgtgaagcctaagagatgcgttgttgagtcaaatgagattgcattcgagtacgattcctcctctggattggtcacctttgagttagacaaaatgcctatagagaacaaacgatttcatctgatccaagttgagttatgaagagtgattcatacaattcattaaacaaaaacagtctcaaaacagttttaaatagtctttattatttgtaaacctttggttaccattgtagctactttcaatgttatactacagttcacgttattgttctataccaatattaattccccaaaaaaaacagagtatcactactaaggcaacctcaggtttagtcttctcaaccaaacagagtgaagaagcattctaagcatatcaaacggttgtgacggtctgttgatcacgaaatgtctctggacctgcaaaacccttctctgcaacaccctgtagcgtctccaggatatgctctttagtatggttttgatctcagggatcttcttagaagggacatgaatggtgaacttagtccaatcaagaacgtctgagaagggcaaggcgtagtgatcagagatgatgacagggacgcaacctaagttaatggctgcaacgactcgagggcttgccacttcatagccactaggacagagacagaaccttgccgtagccatgagcttgaagtaatctttttttttggctaagtactcgtggacttggacctcctcatctttgtctttccaatgctgcagtagaattctgcgaatataaccgtgtgaaccccctgcgaagaaagcaaggatgggtcggtcatggcccgaagagcgcgataaccgaggtggtcccaggtggcctccggggatgttgatctccgggattgagacgtctcgttggggcatgaaaccttctgatgtgttggcgttgcagagaactcttatcaggtttttcatcagctccgggttcgatcctgagacgtctggtgcctgcaagagtctttaaaaatgttacatttcagtagcaacatcacaaaaataagtctggttccagaaagaaaacaaacccaatcatggcaagaaacgtagaaatggtcggctccaaggcttctgttccaataaggatacttgtgagccacaacatcgacgtagtcaagaaaaactttgtgaagttgttccctcgagtaggtcacgagcggccggtataggtaatgaacgatgttggcgacgctgacagggaggagaaaggcatgagcctcttcggggttgttagccgcgaacgggctcatccctgtctcgatctcgtccatgaattggccttcaatgctgtatatgttgttcattggacccatgtgaactaacggtgtctctccttctctgtacacccacactttgaatttcttctccatctctatatggcttctgctcaatttcataagaaaaagtgttgttactactcgatcataattcataaacacagtgaagtacatttgttcctacagtttttgtttatttaaagtttgtctatgaatttgtgatagataaccgttggtgcaggaattagcacctccgacaataccgatttaaaccaagaaataacatgaataaaatcgagaattcggttgaaccgggaaatcccggttagcctgttaatgggcctgagtcatgagctcgcccgaagattcagatcgacaattgagatcgccgtaggcggtttctgaggtcgtgtgaagggaaaacttctattttaaagaggggaatctcatgaagaatggaagtaatggagatttagatctaagataattagaagtttatcatattttggtatgttcgacccattgtataaatagggggggtcaaactcccaaaggatcatcgttaacctaatacaagagactacaattatagagcaaaccttagcttttatttcaagcaattttgttctttccctttgattatttgtgagctaagagaggagtgaatttgtctaaatcgcttaatacaaattcattgtttgattcagaatcacaataagtattgatactatttaagt

SEQ ID NO: 25671 - DNA, 1367 bp, Arabidopsis thaliana landsberg
taattttacgtatattgaatatttaaactcatatttttctaaactttaaacaattaaaacaaaaatctttataaattagtgaatattaatttaaagtaatggtgcttttttgtagataaattaacatcatgataaattaagataatttcatgatcaaaaccttattaattagtagagattttactaatgttaaaatgttggtttgttggttatctctggtttaaaaaaccgggtataacccagacgcgccaaacacttccttattactctaaaacgcacccttcactttctcttttcccccaattgcttcatctccaatcgctctctctctcgctcggtgtgatccgtgtagagagattgaatctgctgagtaacggtgcaatgtctcgctaccagtctcattcctttgatgacggcgaggttaatccttttgcggtaagcttgattcaatctcatcatctagggattctactttttattcggctttgttgaatcgcaatgtttctgatctgatttatcacattctttgttgttttttgtacgtcatgccactcgcaattcttgggatcgacttttcggttccaatgcacaaggagaaacgtggttgatcgtttgatcgatttacgctttcttgtgttcgcatgattgttggactttgtgatgtgagtgtctctgggaagggtgataacaagtttcagtatgtaattgccctaatttcaattggtcgtaccctcaattgtttattaatctcacttacatctttttccatttccagtttagtgcttacatgtggccattgatactttatactgatcttggatatggcgtaatggtttacttacttgcttgcaatggctgttacatattcatatcagtttcttgtccattgaattgttgtctctgatgttctaaaggtctcgtagatcttcattgtatagtctttactttaaacattgctcttgcaccttaaagaccataactgctcttgctataagcattattaacttctttcccctttttgttgtatttgaaccttcagaatcctacaagtgttccagctgcaacgtcaaagctttctcctcttccccctgagccgtacgaccgtggtgccacaatggatattcctcttgactctggaaaggtattttctacatccacagaagcctacgtaccaagtatattctcagaataatccctgagacaattttatgattgccaacttctaggatctgaaagctaaggagaaggaactccgggaaaaggaggctgaattgaagaggcgggagcaggtaagctgtgattggatttgaaaccaactaatgttacataccctgatgtcatttctcaaatggttagcagtaggtttt

SEQ ID NO: 25672 - DNA, 1931 bp, Arabidopsis thaliana landsberg
gtcactagaatatgtatatcctgagagctttgtcgaactgcacttgttccatcactagactcttccacacatgaacactgctccaagaaagcccttgctgcaattaatacaatgtcatactaagcagtggacgcgataaagaaaataaccagaagaagcagacaattcgacatttacccgaagaaagccaccggtctgtgtattcatcagtcacattatacaactcatccaacccactcatcgattcgctgtcaatgaatggacacaaaccctgcaattataaagagatgacatttgtacttgagtcatataacatcagcaacaaaaaacatgtaaaaacatatcagtaccttttcgtatctctccgcaacagctcgatgcctgtacgcaagtttcctcttgttcaagtcatcagtaggagtactaaagtcgtcttgtttgaactcataccgagaaagatcctttccatcatcatactgtctcaatgaatcaagaaatggctcattgcattcctcaacctgcaaagaacacaagactaatgctttgtaggtgacagagtttacgagggcatctcatcattcccgttctgaacttatcgttaagagaagacttacttgctcgtataagaaaaaatcgtcacagatcttaagtatgtgtttctcccacatcctcccaatctctacacctcttttaacatctttggagccattaaaagactcagcataagttccatttaacagagatctaagtaagataagagtctcgtccatgtcccatacatatacattcactggtccatcatcagaaaccaaagttcccagcttttttgatgtatcattattcataatctgccctcttccctgaatataacaagttaaaaccagagatcacatcttacatcaatcgacaaaaggattcagtaggagcaacaaaattgagaatcgatgagaactcattcacggcatctacattggctactaattcaatgatgaaacaatcaggagcatgtggattgaattgagtttcatggcggaaacaaaagcgataaaactcccaaaaagtgcattcttttcagcaaacccatgactaatttcactaaacaaaacctacgaaattacgattaacgattctaggtgaatttaatttaacaaaaatgagaactttcagatcaaacgaggattgataacagataacacaaagttcaaaacctaaaaaacaatacctgcgctgccgattccgataggaggatgaccaaagatagagagctccggagctaagtgacgacgatgcgtgtgtttcaaagatcacagacgaaagtaaacagcgagccacgcggcgtcgtttagtataatttagctctcggcccaattaaaggcccattttgttcaacagtcacacacaccaccagaaactgaagaaagcttgttttttttctcttgcatgacccttcgcttctctgttgctttcttctctaccgaagtttgattcttgtgggctgaaaaagacaactgccgatcagtaagtacttctaaactcgtatctataatctgtaagattgattaatcattttgccatcaattaaaacccatttctcctgaacctgctttggtttttgtgtttcatttgtggggattcaatgatcttcactctttcaatctgtgtggaattgttcttttccttcagattctcatatatacatagacgtgcttaaactctgatgggtagtactgtgagggagaagcatgttagaccagaccggaagaccacatccgtgaaacccgaattcgatccgtgttgtttgctcgacaggacggctctagcgaaatcgattgttgaatcgagtcttaagcatcttgtttatcatccgggtcttctcgattcgtgtccagagtcaaaccctagtggcagttttgaggataataatggttggg

SEQ ID NO: 25673 - DNA, 1043 bp, Arabidopsis thaliana landsberg
atttaatattgaaagatgggggttttctattcaacatggtaattagggctcaaggatcaacatgttgaaacaaaaactcttaattaaaccaatatatagatataagcccggttaatttcccactacatattccccaattgccaaatgacctaatgagttgaaagttggaactaactcttaaaagaaaatggtgaataaattactccttagttcttattttattctatcttcaaagctctaaagatttccctttcctcttatattcttcatcatcacttagctgcatagccgaagaagacgatgccatttcgccacgtggcgacctccaaaatgattgatcatcgtctctgatcacaaccggagacgaggaagagtaccctgctactcccatttcgccacgtgtatcccctgaagatgaagactcttccacgtcaaccccaaacagcctcagcttcttcgtcgtcgacggctgaggaggcgccgacggaggtaccctccccgctggaaaaactggaaccgagtcataaaccaacggctcagatcgaccaagattccactgatgatgttgatccaacggtgatcctgcgtaataacgcactccaaccccatttacaactctaccataaccataccctaaatattcccgttcttgaaattggttgtgataaaacggtggaacactccggtatggcatggaatattccggcgtcaccggataaaacctagccgttggatatgtcggagacccgaaaacgaagttatgattgttaatgcctgtgtacaaagtttatctcggctctaggcctccaatcgatgaacattattttccgtcgtctctccggttgtgcgttatcgtcagggatgtagccacggtagaaagagacggtgtctccggcgaagagtttcttctccttgacgaaacggctccatcctttggtcatcacgtagctttggctactgttccaatacgagtaacgaaacctccacatcttgccgtttttgtcttggaaatccaacactgtgccgttttgattgtccttaga

SEQ ID NO: 25674 - DNA, 1433 bp, Arabidopsis thaliana landsberg
attccctattgtgcaagttacaactcgtggtgtacttgtttcttcttctggtcaggatcaatgtatcatggctctccattgctactctccattctcggtcctctcacagttcagaggtagagtgaatgttaatctattcaaagttcagttcttgagcttagtttcttagggttctcgcattgtataatttgagccaaagtgacaagtttgttgttgcaggatcgaagggcaatcgagtcatcatttgtgcaggtatttatgattatacatgtataagttagattaagaaattgtataagtgatcaagagttgtaagtaactttgtgattttttttggaattagtgatcaagagctttgtagtcatgcggatgataccaacaatcttctggatacagtttggtttttgttattgcagatttacttagtgcactgcttcttcgagctattggtcagaagctccagaagtcttatagaatgaatttgaggccacttggtgttcttaggtcatcgcaggatagaggtacacttaagttattcgactatgagaacttagtagtataacatatggattacaatatttttgggaatcgatgtttagtctgattccttgtatatttttgttgaagtttaactctgtgacaatttgtacaaaatcatatttctattttttgatcagaagggtattgctgatctctccttttttctgtttccctcagggatccttccttgtggagatattgctgctcttgtgtatctgtggaatcctttcacaatactttcttgtgttggcttatctacttctccaatagaaaatttggctgtcattgtgtctctttatggagcagtgtctcgtaagcagttgtgggaaagtgctcttggtatctatcttaaatgaaaaacctgctttcggtttgtagtacgctcatccctgtcgttcttcttctcaacaactgtcttctacccttgcaggacgagttcctctggctgcatttgggttaatcatggccacacatttgtctctttattcagcacctttagtgtttccagtatgcataatctcaattccattttcatttttaatgtatctcaaagtttttcaggggagtcagattctaattgctcttatgtttccttcagttgatctttctgttgggatatggtttagatgcccctcctataaaaaagttccttcagacaagacatggaggagttgagactggatcaacctctgatgtttctaaacaagaaaagttgactccgactacacaacttcctttctcatggagaacagtcttgcatttcgtattttgggtattggcttggtcgagctatgtgttggttttatgcagcttatcattgaaacaatatggtgggcttgaggagatgttcaaaaggtaccacttatctgtgaaatctcaatttatttgtcata

SEQ ID NO: 25675 - DNA, 442 bp, Arabidopsis thaliana landsberg
ctaactagaaacacacaacttcacgaatacaaatacatgcaatcacctaaattcaaaacacatcgaaagacaacaaaattcaaacataaacacgtgtaactgaaacacgatacaaaaaaaaaacacgtcacgcagataaactcaaaacaccctcgaacacaacacaacataacaataataaaattcaacacaatactagacacatgaaaaagaaaccaaaattcaatttttctttattggcaagaactatgcccttatgttgccaagtcaatcttaggtgaagtctccttcccttcccattttagtatcttacaactattgttggtcatattgaagtccagtatgaagttttatcaagatcgtaaatttctatgtgattatgaatgaggaattcaagccactacaagggtaaacagtgcttggcatacaaaaacaaagaggt

SEQ ID NO: 25676 - DNA, 1134 bp, Arabidopsis thaliana landsberg
acagtgattgaataattcaccatcggataggagattatggttcgaatcttcccatcacaatttcaatcattaattgttggttaactagtaagaatattcagtttttccacacattttggagattataagttaggattctataatttgatccgagtactcatgttatcaaaaaagaattgttttataaaaaaaggtgcaatcaaatatagttgcattttacatatagaacgaagaagtctactttgaggggaatatggttgcattcagtaacattttttagtgaaagtttaatcgtcagtgcttagaccttttccactgaacgaaaaggccttaacctgcattttctccactctcatatgagattcaatttgtatggaaactaaaaatgtaggtactttactcttacaattattaaagtttaattggattaaaacatattatgtagtaatctcctttcaagttaaggattaagtttcaaaaaaagaaagtccaagcgaatcctctggatgagacagagagttatgaaattacatctttaaagaccgttagttgagtcaacttccggtgggtgctacccccacacataaaataagaaaattggtccacatattgtattgtcactctcgtctacagttcaacgtacccctcacaaaaaagctttagccataactagtttcaagtatcttgtttattatcgaagacattagtgagattgctaaggaaaataagtggaagatatgatagctgaaacgggaatggtgatggtaggtgttttgggattatgggcacgctttgtccgaaagccgctccttcaattcaccggaaaaatgatgcaagtaatctccgaagtcgtgtcgaggatgtgtcaaccagatacaacatcttatgctactctttcttcaactgctaattaataaccctcctcccaatatcgtcggaaggtgataacatatttaaatttagagttacatataactgtttttaaccttgttatttgtaggctctcgattctataatatatacgtttttcgctttcttttgaatgttaaaattatggatcaacaaaagataagctatatacctggttctgtgttcctctctcgacatatgatatatatgtttacatgaaagctt

SEQ ID NO: 25677 - DNA, 1292 bp, Arabidopsis thaliana landsberg
catgatatgagaaagaactcgtctgatattattaaaaatcttcgtaaatattcgattatgctaatagaaatttcatatgaaccaactggtaactgtcggccctaaaaaaaggctatctcgacgtacattttttggctccttggtaggtagttttgctcaaacaattgacatctttgtggtaaatcttgagcctcattagtttgtgttttgacttttgtggtagctttctttaacctgatattttgtcttcccctttgtacgtaatcaagttaattgaaatgaactgcagagttttgagaattacgaattcttgaatcattgaatgacgttgtttccgtgttgttcaatattgatagtcgttgtctatagcagtaaatccagaggtttgagtttctataaaactaaaatttatgtgatttgcctaaaacctgaaaccgaaccgaaaaaggaaaccaaactttaccttcttgttctggtttaacccatttacttacggtacctcgacaaatatggcaagtcattcttcttgtttttctctgacgtattagtttgattccacatcttcccacatgcaaattattttaatttttagagatacttttaatttgtaataggaattaatatattgacatgtcacatgatacatttattagtccatgaagatatttccatctcctagtatactgtcatcattggtcatctttacctaaccatcctattactcaactttcaaactcatctgcgagcctcctgcttacacgaagctgcaagcctgcaattcatatatattatccttgctattttgatattttcttaagacaatttaattacattaatatatatatgcatatttattgtttttgtcagctccttgagtacctttttgggggccctcttttcgttatggaaaacaaaacaaaaaagttgtttatgatatcaaatgcggtgtatagtccacaaacgtggcctacttacgcaaatcccatccgtcgccatctcttgcttttcaatatataattacgattggaactgtgacaaatatgcggttctctcctttggcatatatgctgtgtttacatgcatttattttttacatgcatatttatcatataaatccaggatagatttcgaacgacattgagattaaccttcgagagttgttaatattcaaaagtttgatattcttttacatgcatgatgttgcttaaatctgatagttaataatacaggcccattgttgatagttatgtgctaggttgaataattgccagttggcagttgccaaattatgt

SEQ ID NO: 25678 - DNA, 1130 bp, Arabidopsis thaliana landsberg
cacataatacattattattacggccacattgtgatttgtctctcaattaaaaccaagatgacagaactctagttagtatcgattccgcacgtgagatagaaatccttgataaggagcagaacatgcctatgatgatgtctcaagacatcatgtctgtacgaaactttttctttttaaagggataaaacaccattagactaaagtcaaaagaatcattctacagcatattccatgatttaaagttactaacagttagagtaacccactcgtttattcacgtccataagatctgaatccaaaattattagacatctactataaacatgcctcgagattcgggagtttaatttagaaaagcaaagctgaagagatatcacaccaaataacacaaaaagtaacgaccaaaattcaactaattgtaaatgataaaccgttttttgcggaataaataacttgagaatcttccaacacagaaaacatgaagagagaaaagtaaactggcaggtaattttaataggggacgacgactaaacacaggacaatataaagaaacataaacttagagagtcgcttcgaccgaccacagtaacccaacgagagcttctctctcagcacttgaccttcttcaaaccatgagcgaagtacaaaaatgttgggttagttgaaccctccttgtagtaagcaaagaccaaagtgctgtcatcatgcataccctccccaacaaagctgtaaaatcagacaacacaagcattgatgagatttcagatgaaatatatgtcatgtataacaagcaagatacgatagattggggtatcttacaattggaagtcactgagcctggggagcaaaaacttggtagctccctcaatacccttcttgaagacagcttgatcttcttcgctgagcttgggtgtcaaaagcttaatgtatttcttaatgtaagcgatgaatcccttcttgtcataagttggttgctcctgaagtctgaaggtgtcgacaatgtcaacaaccttttgagcagagtcatcaacaccttcatcctcaacaccttcttaagcagatggattggcaccaatgttaacatctacagctcccacagtaacccactggataacaaaatgaaaacccaa

SEQ ID NO: 25679 - DNA, 1429 bp, Arabidopsis thaliana landsberg
gtgctcatgaggatttctggagggtcttgacttttgaaaatataaggatttctatggaacaatgtaagttgttcttcatacatacattaaatctgtcttttctgttatttgccgtttgaggaaaacaaaaaaacagttgctaattgtgaaaatatacgtgggatgcaatataacctcctgtgctttatgtgcagttgaaaacatgtgtagtcgctatccaaatgctactgaagttaatgtttatggcgctcctgctgttaatgctctggctatgaaagccgctaccactttgaggtatctgtcttgtttaccctcgcatatgctttcgataacttagttattatatatcaaacgtaatgcttttgatctgtttcaggaatcttgaggtcttaacaataggaaagggtcatatcagtgaaagctttttccaggcattgggggagtgtaatatgttaaggagtgtgactgtaagtgatgctattctgggaaatggagcgcaggaaatacacctgagtcatgataggctacgcgaacttaaaattacaaaatgtcgcgttatgcgtttgtctatcaggtgaagttattttcaataaatcattttcattctcattcatttatgtgtatctcattcttaattattatcattatttttctatcttttaggtgtccgcagctcaggtctctatcattaaaaagaagcaacatgtcacaggcgatgctgaactgtccactcctccaacttcttgatatagcctcgtgccataagctcttggatgctgctatccggtcagcagccatttcgtgtcctcaattagagtcgctagacgtttctaactgttcctgtgtcagtgatgaaactttgcgtgaaatagcccaggcttgtgctaatctccatattcttaatgcttcatactgccccaatatatctcttgaggttggtcctgttatctaacgttctccaccccctttcctctcgtgctgtctcattcttgtatttctgacttgtgtgcgctttcctctttgcagtcagtacaccttcccatgttgacagttctcaaacttcatagctgtgagggtataacatccgcgtctatgacttggattgccaatagccctgcactagaggtttgtgattgcttttccgttttccacacacatgtatattgttctacaaccttgacctagagaccactgtttccagttgagttaaccacatatattctgttgcaggttttggagcttgataattgcaatctgttgacaactgtatctttgcatctctcgcgtttgcagagtataagcctagtccattgtcgcaagtatagtcctcatctttggtttcctttcaacctgcagatattgtgatgagtagtcatacctttcttattatttcactcagttatcttcttttcgctgtgtttaacagatt

SEQ ID NO: 25680 - DNA, 941 bp, Arabidopsis thaliana landsberg
  unsure (1)..(941): unsure at all n locations
ctcatgtctttgtttctttttgtcagtttctacatatctgggttcttagagaatacctggagcttgagatgaggattcccaacccaccatttgagattgatctagagcgcattgttgatgattttatcttcatatgtttctttgtgggcaatgacttcttaccacatatgcccacattagagattcgagaggtttgtgttcctgaatttggatttcattatgaattgttcgtttagagaaccttcaagggataccctagtatgattagatacgttagtattggtggtatcagttaaatgtctattgtctaaggcatatgtcaattccgttatctatcctatgttaaaaacttgagatatcttacaacgcattgtaatttttttgatgaaacgttgctgtaattcttcatttcttcagggtgctatcaacttgcttatggctgtttacaagaaggaatttcggtcttttgacggctacttaactgatgggtgcaaggtacttgttctctgttcatattggtttattcaatttacccttaggtgacatggttttgactttatcttttactattttcctctccagccaaatttaaagagggtggaacagtttattcaggctgttggatcgtttgaagataagatatttcagaaaagagccatgcaacatcaggtatttgttagaaaacgtacattattttggccttgaagtgaggcacacattacctgagtagctatttattaatgtatctgattatatttgactggcacgacatttcccttttcccactcggttgtaacctatcttaagtttataatttttgagtagtagagctggaagagatattaatatttcaccatgtgtatcctcacgtntggtagagtgtatgtgaatcttgtttacaatgcaagtatatttattgctcattagagtcatttggaaac

SEQ ID NO: 25681 - DNA, 933 bp, Arabidopsis thaliana landsberg
caccgaaagagacttcaccgaaacccagttctaaaccttatcgaggaggagttaagtaattagaaactcaaaagaaatggggatttggatactgcgttgtggaaaggaaagaacgatcactataggaatacgtttatgacaaaagaaacatggtcacagattcggacagccaaaccaagtatggaagagtatagagggatatggttcccacattccaccccaaagtactcttttatcacttggttagcaatgaggaatagattgtcaactggggaccggatgttgaagtggaaaggcaacgccaatgcaaaatgtgtcttttgtaatgatctagaggagacaagagatcacttgttcttctcatgcccttatacgtatcagatatgggaggagctcacgagaggcttgctgttggacaaattcacggcggactggaaagaaatcacaaagcaaatcgcaaaaaggagtagagaccaaacaatgacgttcatcacacggtacgtgtttcaaaacacaattcactcagtgtggcgggaaaggaacaacaggagacatgggaaacatccattacaagctgcaatgcttgtaaagacgatcgataaaaacgtcaagaaccggctaagcacgctcaagaccggaggcacaccaaaatatgaagatggcatagtactttggtttgcaacaagaagaaaccaagacttgtactgttttctgtcttgtatatattatgaaaagttctttacattcatatgtaaatctcactgatttttgcttttgagtataatttaacataatattcaaaaaaataaaataaattacgtacttacaaaactatgtttgcatttagcatatttcgaattcatttataagatattaattgataatttctgtgatatctcaaccaggttgttgttggtatatcttaattgacta

SEQ ID NO: 25682 - DNA, 1811 bp, Arabidopsis thaliana landsberg
gcgtatatcttttgtttttcgtaaccagttgtctcaaatcgacggcgtttgtggtctctgatttagattgcacaccttctgttattcaacatcaattccatcattttttttttggtaaaacaattccatcattttattgtgtacttttcctcatcgtctaaaatttatcctatagcctttttttttgtgtcactctaatacatggaagttaatcggcttttttgcttgtatataatgtgataaaacgatcataagcaatgcctttttgtttgaaaaaaggtggtcaagtgggagttctagaaaaaacatgtcaatgagattgtggagttactcaaaagtacaggtaagtcgcgccatataatataacatcatttcatgtttctccaacgaattaacatgttgcgccgcttatctagttcaagacttcaagtagttcaataattaagctagagtgtttagtagcagcctaagagttgttggtggtggtaatgttaaataaccattatcacgttttctcatgtcacatgttttaactagacacgtatttggcttcttgcgtttaaagtcataacttgctgtcgactatttatcattctttaattcagatatttataagtcctaaacttttactttttgtaatgtttttgttccattaatgtttttttttttatagatttgattaactaagatagtaatattattacacaatggagaagggacaagtgatggtgaaatagagaacacaaataacatccattgctactactactagtcttactagactactactaatggatttgggctaaaaagaatgagagtgactcataaagaatctaaactttgatgagcccttccagattcgatggcggattcattcaaaagtcctcttcagtcgtgaattcgtagttctgatttccattttggaggttcgacataactgatgccttctgatactctcccactctcttctcaaagaagtttgcctttcctctgcaaatttgtcataaaagtaccaaaaccaacttagtcaatgaagatacactactgttcttgatatgttatcttagcattgtgatcctagagatgagagaaactcagcgatatatatcgactacttactgcagagatatgaactccatccagtcaaatggattttctgctttgtatgtcctttcacatcccaaggtaacctacagaaaccaagacaaaaaccataggttcgaataaaaagctaattcatgtttcaaaatgccagaaactagagggaaaacaattttaccagaagacggtcagcgacaaattgtatgtattgactcatgaggtttgagttcattccgatcagatcacatggaagagccttgcagacaaactctgtctcaatttccactgcctcgtgaacaatttgataaactttctccaatggaagctgcttctgcagcaaactgcacaatgtatgataaggagtgaatggataatagagatggctcaataaacacagtatggcttgctgttaccatacagacctattcttacctgtacaagagacacgcaaagtcacagtggagcccctcgtctctcgatataagctcgtttgagaaggtcaaacccggcataagacccctcttttttagccagaagatggcacagaagctgaccaaaccacatgaaattcttatacaccagagcttatataggataagttctcaatgcctatgatttcaaagacgtcataccttcctgagaagaagattccttcgacacatgcaaaagcgaccagcctcacagcaaacgacatatgactgcagagaatg

SEQ ID NO: 25683 - DNA, 986 bp, Arabidopsis thaliana landsberg
  unsure (1)..(986): unsure at all n locations
catggaaagaaataagattccagctgaggaggtcatccgcgggttgatcatcataatatatgggaagctcggacttttccatgatgcacagagtatgtttgaagagactgaacgcctgaatttactggctgatgagaaaacatatctggcaatgtctcaagttcatttgaattcgggaaatgttgtcaaagcattagatgtaattgaaatgatgaagacaagagatattcctctttccagatttgcctatattgtcatgttacagtgttatgctaagatacagaatgttgattgtgctgaggaagcatttcgtgctttatcgaagactggacttcctgatgccagttcttgtaacgacatgcttaatttgtataccagactcaatttaggagagaaagctaagggttttatcaagcagataatggttgatcaagtgcactttgatatagagctttacaagacggctatgagagtgtattgcaaggaaggaatggtagcagaagctcaagatttgatagtaaaaatgggtagagaggcaagggttaaggataacagatttgttcagacacttgcagagtctatgcatatcgttaacaagcacgataaacatgaagcagttttaaacgtgagtcaacttgatgtcatggctcttggactgatgctcaatttgcgactgaaagagggaaatttgaatgagactaaagcaatcttgaacttaatgttcaagactgatcttggttcatcggcagtaaatcgagtcataagtagctttgtgagagaaggtaggaaaattaatctggttcgttgttctttagatatgggtatatgttaacaagctttggttatgttgttgaagatttacattcattttgtatgcaggtgatgtatctaaagcagagatgattgccgatataattatcagactangactcaagatggaagaggaaacaatcgcgactttgattgctgtatatgggaagcaacat

SEQ ID NO: 25684 - DNA, 1767 bp, Arabidopsis thaliana landsberg
ctttcatggctatgactgcggcaattaagacaaggttagaaactagatttcacttgtgaagtcattaaccctttacttccatacttaaaaggttttgttgttttcgcagaatggctagccaaccagctggaggtgccaagccaccaacggtccagatccgtggacagccagtgaaccagcaatcaggctgttgttcttcttgattcaattagtcaccactcctctttcgatcatcacaccattatgatcatttgtttgcattgcatgttagacttctccaaatcaccagctctttggatccttttgcttgtttttcatttgctttcttttgatccgattcttttctgatgtacgttgaagtttgaaacccataacttctatatagtaaaaggtcttttatgcaaataatgtagagcactctttaatgccttcgacgattctaaatcatcgctcaagtatgaaagatactagatatcgtgctattagaaatatacttcatttatgatgtacgaaaagaaagatcgaatgtgtaataccaaaattagagagaaaaatatcttaataatttttttcataacttaaaaaacgtaatagtttcgcagaaaagaccttcagaaagtgtaacaaaaaattataaaactaacaaaattcaaccaaagagaaacgaaagacagagatagcgaggctgaaggaccaggggtctttactagcccaacgaagggaactgagctgtgtctccaatcgccggagctgcagcttcttttgcatacctttggtttcctccttcaccacgaccaccgcgacctcctcttccgcgggagcctccacctctcccgttgtacctctttccatcagccggcttcaagaactcattaatgctcaacgactacaaaatcacccaaaatcactcaggtaaaaaaatgacacaacccaaaagaaatcatgaagtgagaacagaatgaactaagacctttttggccttctcagtagcatctttgcgtttttccttgtcagatccctgaaacaataaaataccaagtattaactattgctccgttacagtgaagggaatagataaactgaacagtagatgattttctgaccagcttgatgaagatttcttcatcggtgttcttcttgttagagagctgttgcatggactcaaacactttggtgtcaactttcctttcctcaacctttgtggcttgcagagccttcttcttctcctccagaattttctcatactcttctagagtcatctcctatatgacaaaaccatatcagtttcaaatgttagcaaacattctacttcaaacttaactaaacctcaaaagatgtttcaagagctgtaaatgattgtaccctggcttcagcttcttcagcttctttctgtgctttctcttccgcagtgagttctttctttgcttcaggggtttcatcctcacctccttgcttctcagcaacagggctcttctcaacctctgtggtaggttcctcagacgttctaatataagaacaacaaaagtttataaacaacctaaagttaaagtcatatggataattaaagtgaagacaaggatgcttacggagggatatcatcttcagtagtgccccagtttccacgacctccaccattacgtttcatgccagtactatcaaacatcaagttaacataaatgaatcacaaacacaagaagtcaaacaaagtagtaactaaagtagtggacagaacaaaaagaaagcttacccatgacctgtcctgctatg

SEQ ID NO: 25685 - DNA, 802 bp, Arabidopsis thaliana landsberg
agaaaaatattatgatataaacaatacgatgacagtcatacatttacatttacttgttacgatgcgtgtcgatggcaaatttttatctatgtgttgttgatacataaacatttgtgtatcaactttatctgcatgcatgaactcgtgtaaaccaaagaaccgggatatcgatctcccaagccttagtcgaagcacattcggtccaaaatgctttgacaatcagatgattcatattaaagtccaaacatatttgtcttcaatagggcaaacaaaaaaaagagagttcatacttaattacgccgcaacatgtggacttcgagtcacgagtataaccaatgatcgttttttttggaagacgccattccgtctccggcccaaagaacaatgaccgttttcttcgtgtacatttgtttattcaataatcaatataaatatacatgacaatattttcaatgttcttaataaaaaaattattttattggatcaattatatgcttttaagcaaataaaccttttattttatttttacccgaaaatagaaatgtttattttgtcatataagaagacaaaagatctggcatatagaggaagtagctaggctataaactcctgttgaaaacgatataattaaaaatcaaaacaagaatgaaccatgcatttacccgtccactagtaaaacctgaaaagaatttcaaacacgagtggtctttagattcaacagttgatgcataatacataggcaaatcatattgtgtagagtgattaaaaaatcgactaaagtatgataaccctatgtagaaag

SEQ ID NO: 25686 - DNA, 1480 bp, Arabidopsis thaliana landsberg
ttttgactgtaagatatgcaaattaaattcctaaatttctaagagactattaattattattattttttggatttggagtctttttcgggtttggggtctgtttgggtagggaagtcaaaaaaaattcgggtattctagcaaattggtttgggttcggttcagtttgaacatgacatattgttttttttttcctgatatgcgtcattaggtgcaatgatggtgagtattctgacaggggaagctcgaattttcctccttgcaaaacaaacaaagattgcaaatatcttcactgctcgagcgagacacctctatgtgtatggagacaatacacatgtaccatttcatcgactcatcaagcgaaatttgactagacaataaattatgctaagacgtgcaagttgatgaatgattataatccgtctgtaatttgcatgcatacttggttttactatattcggaagattttctcaatgataataataatattttgaaaaagagtattgctcatattattatgattagaaggataataattgtgtatttcataacaatagtaggcgtttttcaactaaccaaaaattgttagaaaaacctaaatatatgaaaaaatgaaatctttagtattagatcatgttttatttttatgtgatcttaacaatttgcgcattcgtattgcgatttctttcttgaacttcaggaggcagaatactcaatctacatacatgcaccaaattaatgaaacaattcagcccaagaaaatgtaatcaaatttatattgaaactacaatttacacggtattttctttaagattaattaggtagaaataatcataaaattttactaatattggtcgttttaattcattgttattcaaagtattgtaagtaaaaaaaaattgaataaattatccttttaatgtcgctccctgaaactatttcaatcatgatatgcagtaaaatttcaaacatatttttgttttccttcatcttttaatatatatataaagtgtttattcccgtttaattgtttatccttttaattaactaacgacatacttttgtcttgatggcacttataacatactaatgcggaatcattactgttagtataacagagagacgtgactttggggaatgagaatcggcttaattcactctaaaggaaactataaataaatctatatgtccaaactaaacatatatccaaattcttttcggggccgagatggattcttaccggcctaaggcaatttataaccacataattagaaaggaccagccacatacttctttgattgattaaacaatattcgtctagagtgatatatatcacatgtcgaagaacattataaagtcctgcttttatttagcttgaaatcaacgtgataaagagatttctttatatagatcgattcgagattttgtgcacacaatatgactatgtttgcgctcatctaaaagtggggaggtatgattcacc

SEQ ID NO: 25687 - DNA, 884 bp, Arabidopsis thaliana landsberg
  unsure (1)..(884): unsure at all n locations
aatagttgtagttttttttctctgaaattatttttgtttcgactataatagtaaccaaatcaaaccgaagtaaacccgggaatttctcatttttcgaaaacgtataatttaatatgaggctaccaaacaaataatctactggccactgcagagaatcatctgtcgtgttctgtttgttctcacttctcacttctcacttctcagatttttataaacatgaatgaaacctgaatcgttccactaactctcagcaaaaatgcgatcactttacttaatcgtcttcatcgttnnnnnnnnnnnnnnnnnnnttagattcttctcaagttcttttgagtatactgtgaaactaatcagaactttcttatttgttatcaaaggtcttgttaaagcttcgaaaagcgatgatgggttttgttcagcgccttcgattgttgaatcggatgagaagacgaaacccatttattggaaagccacgaatccaacactctcttctttacacctccaaggcaagtgttttcttacagcttcgtgttattaaaagtttgatacttttgctggttaagtttgattgctgtttttatcaattgttcgaggtcttgttgtatatgattgattttgagattaagttattgaaaagttaagattactttaattagtgtttaatctgagaaggtttttggcttatgtcttgcaaaaatctattaacttttgatcaattagatttagacataaccatggaagcattcaacttcagttctggatatacagtctctttctgagagttcgctctctctgtgtataattagattagttttctaatcaaatttggaattgttttttttgcattcgcatcttcatcaagtgccgaagcccaaatattcatg

SEQ ID NO: 25688 - DNA, 1216 bp, Arabidopsis thaliana landsberg
  unsure (1)..(1216): unsure at all n locations
atattggtgggggagtggatagaatctgataatttcgtgttcataacttaattatgttggcgttgatataatggtcaaaactatgaatatatactatgaatatatttaaaatttcgttggctctgagtagtcaaaatgtggttcagttgccgatttggattcaaatcaacgagccatttagttctctgtaatcgcataactcctaatatgccaaagctttaccattatggcgagaaagaaatggccgtatagcatcttcgtgggcatcacacacaacatttcatctctctcagacaattgtcaggtttatccacaaatgtctcacttggctatattatcaacaagatcaaagtatggtagtgatctgattatgcattgactttcgacctgagtttgacgaaggattacagggttcagaagcacctatgtttttttatcctctgtttttggcctattatacttacaactttaccaaatccttttccttcacttttttctaaaatatgtctttagttgatcaataaatttaaccaaaaatatgtattctcaaaaaatgattcaaaaacttgttccaaactgcactttattctacgggtcaagctatgagatttgctacatactagcattttcagaaataaaaagatctcttaattctaaacaatctccttcacagttcacattacatatggttacatatactatagtaccaattttaattcttaatatcttaacatattttattaaaataattattttggtttgattcaatcataatagttagaatttactttgtaattagaaatattaaatctgagtcaccatttaatgaaccttcactgaatcggaagtcataaatcaacgaacatatatctgaaattagagactatttaaattcaaatcattgataagttaaattatatgaaattggaatcttaggaaactatgacactatacatgggtgacggatttctagttacacatggcgcattgctattcattcatattcagaacacgcatatcttactcattaagtatatcattgttttgggtttaaatggtgtctttttactactcccagttaagcaaggctactctaggttgtactatgatacaccgatacatattgtgacatatctagtgtatatacaatatagggcaaggccagacaaacatgccatgagtggctctgagtcggctcattcatatnattctaatt

SEQ ID NO: 25689 - DNA, 990 bp, Arabidopsis thaliana landsberg
ctctgaaccatccctaagccaagaggtaagaatagcatcatcaaacatacaaatcagtaagatactattcttttaaacaaacagaacaacgagcaaagagcgagaaccaaaccatttgccaaatatgttaccaacagcatcttctctaacattaagaccagcaagtgccatcaaattcttcacatacctaacaaaaccaatcaacttagcttaacaaaatctaatctttatgattactcaatcaagtaaacagattcaaattaccttcgagccaagacatctttatcagtataaagaactctggtgactgatggagaaggagcatcagagaaactagaaagctcatctatctaaaaccaaaaacaaaagaacttcatccatcaaaatcaaagttctaaactttagttatctactgttccactttaagaaattgaacctggttttgcagtcctggagcatcaacggagagtgaagaagcgagattgatggaaccgaattgacccggttcgtgaattgggtatccggaaaaatcttccattgttctgattgattcatgttgttgttgttgagctaagcttgaaggtagaagaagggagataagaagaagcgcaatagagcagaggaaacgtttcaaagattccatttttatttttttctccttcagtgttttgattctgagagagcaatactattcattcataatttggtaattatactttggggaaacttattaattaaattttgagcattatcattgtccaaatttgttttttggggaatcctcaaaactaagtgggaatctgacagagtgttttgttgcactctattgattctgatctcatctcatatgtaaaatactatttttaaaaaaaattgaattaaagtttatatgttttggaatctttgtattttgtatcattagagagttagaaggaaaaaaatccatcatttatttcatagaggcccgtttcatcatctaaaaagcccaat

SEQ ID NO: 25690 - DNA, 381 bp, Arabidopsis thaliana landsberg
tcctcaacctcgacaaggagcttgagatagacatcgtcggatttaggctcagtacgtttcgtcttcttgctcttacctccggctatcaaatcgataccctaaaatgatgaaacacacagaagaagcccaaagtgagagtcaaaatctagaaagaagcagaaccgaagattgcttgggagtgaagataagaagtgaaactactaataatatgtatcagtttagggtttttgatgggctaaatatattaatcggcccactaataagaatattgggctaactgatgggcttattagggctttaggaggaacagagttaaacctcacttttttttattaattcgattttgggtggttccggctaataatcttctccgaattcgac

SEQ ID NO: 25691 - DNA, 967 bp, Arabidopsis thaliana landsberg
gctatgccagagaggaacctagtttcttggaacacattgattgggggatactgtcagaataagcaacctcaagaaggtataaggttgtttcaggaaatgcaggcaaccacctcgctagatccggatgatgtgactattttgagtgtgctaccagctatttctgatactggtgctctcagtctcggtgaatggtgtcactgttttgtgcagaggaaaaagctcgataagaaggtgaaagtgtgtacagcaattcttgatatgtattccaaatgcggggagatagagaaggcgaaaagaatctttgatgagatgccagagaaacaagtagcgtcttggaatgctatgatacatgggtatgctttgaatgggaatgcacgtgcagctttggatctattcgtaacaatgatgatagaagaaaagccagatgagatcacaatgctcgcggttatcacagcttgtaaccatggtggattagtggaggaaggaagaaaatggttccacgtgatgagagaaatgggcctgaatgctaaaattgagcactatggctgtatggttgatctactaggcagagcagggagcctaaaagaagcagaggatttgattaccaacatgccttttgagccaaatggtattattctaagctctttcttgtctgcgtgtggtcaatacaaagatatagaaagggctgagagaattctgaagaaggcagtcgaattggaacctcagaacgatgggagttatgtgctgttgaggaacttgtacgctgcagataaaagatgggacgacttcgggatggtgaaaaacgtgatgaggaggaaccaagccaagaaagaggttggatgtagcttgattgagatagattatatcgtttcggagtttatatcaggagatacaacccatcctcatcggcgaagcatacatttggttctcggagacctgcttatgcacatgaatgaggagatataca

SEQ ID NO: 25692 - DNA, 3998 bp, Arabidopsis thaliana landsberg
  unsure (1)..(3998): unsure at all n locations
taaacccctggtatttaaaacatgatttattattagactccttaacctcaatgttaggttggccagttattaacatcattcaagtactacaagcacgatcatccagtaagaaccattctacaatataaactagacaataatccattctacaatgaaagcttctgaatgttcaaccaagaaatggcatagaagagagtaatggagaatcttctctcaggaacagcttctatcatacttagttttagggtaaaagtaggcaagttcacttaaatttgtcaaaatctgtaatgcagtgtctaaatcctatttactctaataatttaacaagttaacaacaactctatgcatcaaacgaatttagaacgatgataacatctaagaatgatgactaaccattccagcaatatcaggtgcagagccgtgaacagcttcagcaagggcaataccatcctccccaatattcatactggaacaaaacataataagagcataagatgattgcctcattttcatactagacaataatctgtgagacgaagaaacaaatgttacctaggagtcagtcctagtcccccaacaagtccagcacacaaatcgctgataatatctccatagagatttggcatcaccaagacatcaaaaagtgctgggtttttcacaagctgtcagaattaagattatcaatcccacattgttccataagtaaaattagcgaaaagcagacccaagtatgggttgctgggaaatctaaccttcaaaatcaacaagattatcccaaatactaacttaattaacaatgagattgacctttacataatttggaacaaaagatagggtggatatcatgttatagcttaccatcatacagcaattgtcaataacaaccttctcgtaatatatctcaggatacttcgcagcaacttcatcacaacactgcaaagcaggaagcaaataaaaacttgtctcagaacaaaggttaagaaaaagaagccagtgagagactagaaaaattgctatgttcccctaattgagaagtgctaatgtattctgagttccaaaatgagctgacctgcaggaaaagaccatcagttttctgcataatgttggctttgtgaattgcagaaactttcttccttccgtgagtcttggcataaagaaaggcatactcggcaactctcatactcgccttacgggtaataattttaagactttccactacacccttgacgacctagcaaataaaaatgacaaatcatcaacatggctctaaaaatgatactagatacagattcactaaaatgacagaacaatagactaacctggtgttcaagcccactgtactctccttcagtgttctcacgaatggtaatgagatcaacatcatcataacgggttttgtaaccaggaagactgtaacaaggcctaacattggcatacaaattcagctctttcctaagagtaaggttcaaggaacggtgaccctttccaattggagtagccattggtcctttcaaaccaaccttgtttttaagcacagattgaagattatcccatgtcaagaaactattggttctaggatctacttcagtaccaacaaactgttcgtcccaatcaataaccacatcagcggcagtaaacacctggatcagcataaagggaaaacattttcagaaccatcagctataaactaaaaaaaacaaactttatgattcaaatctctcccttgacacgtctcaaaaagtattcagacattatggttcctaagagtatccagaatctataacaaaatttatatggtaacataaattacacaacaccaaagtagattgaaaaaagggacctgcttgacagattcagcgatttcgggaccgatcccatcaccgggaaagagagtagctttgatcggagtggaggaggagaagaaagccctagaaacggaaatgaacggaccggagctagaactcgaagtcccgagaatctggctcgatccgttaccgataagccgtctcgcgagaaatgctgtcatggtcatcgcttccagcctcagaaggacgcagagagagaaagagaggaaagaggagactttttgctgcgttggacctgaaaaagtttacttttataccttctctagctccagcagagaagcagagaacatttcgatttccatgaaataaaacggcacaaagttagtgtctgaaaataagaaacggcatcagcctatgttcttaaacggccatggtcaaatgaaccggatatcaataaattataaaaaccggtcagatgaaattaagcattcagatcccgataagcagtgtgacactgaaacagcgaaaggagctctctctcactccgaggcgatttcttctgtctcgacgatcttgcgcttttcacatttgaatcctccaatccattacttcttctccgatcttttattccggtgatcctttggattatgattatcgagatccattgctgcctatttgagtcttgaatcatttgtttgcgttctcatctgtgcttagttatgtgattctccgataagatttagttatgtgattaatgcatgtatgtatcaatccgaattttggtgattcgttgtctattattaaatacgtcaatctccatttgtaatccctggttgaaataatagctatcttgtcatggagatcatcaacattacatttactacactacacacataatgtcacatatgatcttagtatatgtactcttttgtaccagtgactagaacaactgtgagtgtgggttgaagtttttaatatcttgttaaaatcgaaagtttttgactcagatactacttggttttgtttttgtcactgtttcaggtacatctcaagtcttacaacaatgtctcctgtaagtacatatgcattatatgattgtatttcgtattctgttagaatgtgtgtatgttgccgcaatcatacagctttgtaggagttttactctttttttggactggaacttaattactgactttccaatgtacattgaataggattcttgtcctttggtaaagaacattcttcttctagactctgaaggaaagcgtgtggctgtcaagtattactcggatgactggccaactaatgccgccaagttaagttttgagaagtatgtattctcaaagacctctaagaccaatgctcgtacagaaggtaagactacataacatttttcatctacacaatttctatcatgtttcctgacttcgtgtatgcttatatacttatctctttcaaatagccttatcgatgttttatgtgcagctgagatcacactgttggacagcaatattattgtctataagtttgcccaggaccttcacttctttgttactggaggtgaaaatgaaaacgagctcatcttagcttctgttcttcaaggcttttttgatgctgttgcacttcttctgaggtatttgtttgacttgacaactgaatatgcctttatttattgatcaaccatctccacaactaaagtatgatgcatccctttttttttttaccaggagcaatgtggaaaagatggaagcccttgagaacttggatctcatctttttgtgccttgatgagatggttgatcaagggtatgctacatatgctttcaaatactattctacgatttttttactatgttaaattcggaaatctatcattttagccttgcacaagagttaaaagattactgagttcggaaatctattgcaactcttaaacatgggtgtgtagagttaaaagattgctgagtttagcttgctcttcatatcttaacaattagctttctaatatgctgatggagttgagctaaatacggacatagtgagatctggtacttagatactatgagaacttattgtttgatcatnnnnnnnnnnnnnnnnnnnnnntgttgaagcgttcttgttaagtctagtgcagccctatttgcaactagcctaagggggggttaaggaatatgtagctttgcccattcag

SEQ ID NO: 25693 - DNA, 1290 bp, Arabidopsis thaliana landsberg
  unsure (1)..(1290): unsure at all n locations
ctgtccttaaacttataggaggcgatgcattgatcgacaaaatggctctgcgcaaatttttaatgagttgttagtccatggtaactattctctacatctcatatctcagctgatattaatttctaaatttgtaaagtaactgagtagataggcaaacctgcaactaagctaatatttatttagcaatattactagtagcagcctatagagccattaggatagtttggtacattgtcttcattcatgtgtttacatctacgattcatgatcggttactgatgataacaatctgcttaacgccgccattgtttgtgcatttttgtgtccagtatggtggattcagtaaattccccggacaattaccagatctgtatcattcatactacggttacacggcttttagtctcttggaagaacagggcttgagtcctctatgtcctgagctaggtttacctcttcttgcagccccgggaatttgatgtttagattgtctcaaagtcacattcttttttcaccacattgtaacatttatgtcaacattccgtgtggtaacattgctaaaactcacagaatgaatattgtcaaccaaagaaaagcaaatttagttgttgagttttattttctgttctttttagactagggacgaaaaatcaaaaacttttaaatcataaatctgtgaataaagatgttgcatgattgtgtaagaaagttcgggaaaaaaaacaaaagactattgtaagattgcagtttcgctttgttaacgagtgagtggtgttgttgacgccacttggatggaaaagtatcagacataaactgcaaaaactgggacaaaatcctaaaggggaagagattccccacttggcctctcatgagtcttgtctctattcataaatcgtcttattccaatttaccggtcgatgttcttcaatgccgtaaaaagaatcattcttactgtagtgtgttttgatgcaaatgatctcgaataaatcaaattagattagtatataattcttttaccttttctcttcacgtgttctgtttaactttctaactccatattcgataaaacgagaattaattcctttttaaaagtgaaagtcggtttaggatttgagtgttgagttcatgcatctttaaatgtcaaccacaacacttgtggtaactttgctacaagaaaatagaatccaaagcctatctttattcgcgtgatttgactcaaaatccacanatttggctaacaaattctctatccaccgaaaatttacaacccggttaatccgatgacgagct

SEQ ID NO: 25694 - DNA, 1482 bp, Arabidopsis thaliana landsberg
tgggggctggggatcctaaccccaaaaaattggggttcctttgtacctccgatccgctccataggccatcataggccatagccgtcgaatactacgtggcacatgttcatttagtgtcactgtgtttccttggtatatttttggggggcactggtatggtgtaaaatcgtacatatgaataatcatattaggaggagaggtttagacattagtatctttgcttaaataaacgattaccccaatttctcttaaccgtttgttctcaactttccccattatcatttgccaccttgaaaaataacaaattttctgaatcaattttaaaattgatgttagcaatatgaaaaagtagcataatcttttcatgaggcttatgattctagtttagatcttgacatatgaaaaagtagcataatccacataaccaggtttgtttcgaggctgctctgagagtcgcattactagagaatcatcatctatttcaaccttgacgggtcatccatctaagtggagtaatctcctttcgcttgtcccgcagtctctcagtgatatgaatcaacctccatcagctacttcatcttccagtggtcctttgattctgtcattggtgcctatatcactcaaaccattacgtctgtcatgcgtatcattattagctgtatatgtctctgcaaatgctaatcaagtttccaaacctggattgagtaaggtaacttgcttcaacgtttcttaattcagcttatttctccatttttgtatatgcaaagcaacttttacaggaatataactaatataagtaacaaaactggcaagaatatatccaaatttttacatgatttcgagtttcaaccaatgatctaccttgttacaaaagcaatgaattacatcggttagcaagttttatatagtctttacaatgtctccccggaactattaaatacaccaaccaaaaccccaaaccccgagtgagagtgacaaaccaaacttttgcttctacaactctattatggggtatagcttaaattaaacagaaaaagaaaatcactaagaattgtgtagagatgcaactttcacagcagcagtctcatcttgttcctctactatggaatcctgcaagataacacaatacttaaatttcttgcacaagaacactaggtttcaaacattcatgcacctataaagaaatatgaagtttccctttctttacctcaatgttggttttagattgtacacctatgcatttagaaccactaatgctagagcttttcatcaggttacgcgcactataccctcctcctcctccattgtctgtaccttcagcttgttgtgaagctttgggactgtctaaggttgaagctacagcagctgttgttcttctctcgatatcggtgctgctttcttcgactgtttcattcttggatgctggaactcgctctctgaaaatgcaaatacaagaacatcaataatgctggctgtttatga

SEQ ID NO: 25695 - DNA, 948 bp, Arabidopsis thaliana landsberg
atgtattgtggtgacctttgggtgagaatgagaaagaaagcgtgtgagaccaaaaagacactcgtagctaggtttccatttatcactgtgcagtagattttgtgggacccatgttcaatgttagatatatctaacttgtcgggaccttttgagtatcccttttaatgtaacaagtatggtgccaaattgaaaccgaagaaattgcattaatgatctacgagcgatcatcacaagttttgcattattaggctatcggacaaaacttaagtacgacgacttaacattaagcggctatctcggctagttgccggaaatacttacattgtttttggtaaaacttttgttttattattattattatttaaaaaatttggaccatttgtgtttttggtaaaacttaaatcgatattgtaagaaaataataaatattgtaagaaaataataagatttatataacattttctcaaaataagttaatataatattttctcaaaataagttaagtgtgagttttgaagtggtctaggtagtttcaaagacttacagaggctgtagatggcaaaactaaaataacatagtaatcaaaaggatgcatatcttagtttgaaggtttggatggttggaagagacttaagaacctagagtggatacgattattttctccacaactgttacgattaacatgtgattaaattttcaatcaatgttttaagtaaagaaattaggaaatttgactttaatgacatggatatgattgtgaggaagcagaaaaatccaagcccatctccattgataaagattggctttactactttccattttcttacatcaataatgaggcaactattcaattactaatagttctacgttgggaatatctcgctttcacattaattttgttttcgtttcccctactttcatttaacctttacgttacttaaaaatggt

SEQ ID NO: 25696 - DNA, 945 bp, Arabidopsis thaliana landsberg
ggatttgagagaccaaagagagatacgagacaagactcaaacagttgatgatcttttgatgtatgaggttgtcttcttaaatgagaaacattgtataccaagtgaatacgagacaaacacgggtgaggagtatacttgctatcttgataacggggctagcaatcacatgaccggacataagagatattttctgttttagatgactctattacgagaaaggtaagatttggggatgactctcgcattgacatcaaagggaaggggtcgatctcttttgttgacatgaatggagaaccaaggctaatgaccgatgtttatttcatgcctgattggaaaagcaacattattagccttggtcaagccacataatcgcggatgtgatatacgaatgaaagaaaagtgcttaacaatgcatgatactgatgtgagattgattgttaaggccaatagatcaagcaatcaactatacaaaatccacatgagaataagaagcaatgcatacctacaactaacaactgtaagcgagaagaatagatggcactcgagattcgggcatataaattttgaaacgatgaagtccatgatccggagagagcttgtgcaaggagttccaagttttacctttgaaagggagatttgcggatcttgtttactcgggaagcaaacaagacaagtattcccacaagccaccttttaccgagaaaccaaggttcttgaactcattcatggagacctttgtggccccataactccaacgacactagccgggaataggtatgtattcggtcttattgatgattgctctaggtacatgtagacgattcttctaaaagaaaagagcgatgcttttgccaaattcatgagtctagtagaacaagaattaggcttaaagatacaaacttttataacggataggggaggagagtttgtttcttaagagtataa

SEQ ID NO: 25697 - DNA, 534 bp, Arabidopsis thaliana landsberg
aaatatttttatgcgcactttaaacgttttctcacgtgcgagttgctctgcgtcacctacatggatggggctattcgtttttaattagtgagttaattacttttttgttggatctgcggtgagtttaataaagagtttttttaacgaaatttatatcgtgcctaatattctgaattcatttaaccaagtgtaaatcacgtgtctcactatcttttgtatatgggtcgttggtatgttttttttatgtatgtgcaagttggtatgttgattgttgccttcttgcatcagatttttaaaatgtcgactactactgagaacaggaaattctattcaccggtttatacattagcagtgacagtttatgagatagacgcattagatatcactctgggactggaagaaatgtaatgtatatattgtagagaatgtatatgattgttttgtgtttgatgcatccgaaatttagtccatagtaaaaatgtgactttggccgtgtaatttgtgtttcacagtttttgactatctactgttgac

SEQ ID NO: 25698 - DNA, 1045 bp, Arabidopsis thaliana landsberg
tccggcatgttatgggatatgttgtttcttgttaggtatgtttttactcggatgaggctcattgcctgatcgggtcctgctgctgggctaaaagtagagtttggtatgtaaagcaatacgttcttctatacctcgttgaaagtttggggtgctgttttctcgagtgttctgtcgagctgccgttttgtcttcttgttcccttagagcatcggtaggactggctttgtggttcaggtacgtttgcctggtggccgtgaggctgagcgtcaggtgcctggtcatattcctggctctctttaggtatttatgccttcttgttaatcttttcgaattcgggttctcatcagattagcaagctatcgctataagcggctagctcaagtatcaaagatgtcaagaaattggttttggatccaaaatacgtctcaaaaactttataatacaatgtgtatagaagcaaatttaagaaccattttgttaaacaatttgagctcacaagattgtaaattttgaggatttaaacttaactaaagcagtcaaggagaagttggacaatacaatgaagcggccacagtaaacgaaccggcttgtacaaacgttgttgtgaccttacctccacaaaaattgtatctacatgcatatgttttctatcgtaaagttcttagatcatattcgtttcatagttctattgcgcagattttgtttcaaaagaataagagattacccatgtatataatatgtagcagataataccagagaaacaaacaaaaaaaaatttcttcctaaagagctctcttcttctgtacacccttcttcattgagtcaactacgcgcaaaaaatgattcagacttcagtcttcattgcttcttgagccacgcctaaagggaagtttcaaaacaattggaggaagtttagggaactcggtagtcaccttctccgaatcctttatttgttccacatgcttactacttgtcaccgttactttatccacaagaaagctcggttcggaatcctttatttggtctgacggtttacttgttatcg

SEQ ID NO: 25699 - DNA, 1023 bp, Arabidopsis thaliana landsberg
  unsure (1)..(1023): unsure at all n locations
ggaaaccaccacacgccgtagcagattctccgtcgtctgcaacggcggaggattcttgtatgaagcgattgaatgcccattcggatgcactacgattcaacgacgtcgttccattaaacgaccagtgatggttaccggagattttttcgtcggagaaaactttttccattttttcttttgtattttgtttgtttctttaaattgttttttttttttttggtttcaaatttgtcaaaacagtttcttcttatccgattgggcagtcttgcattttaataatatgttcttttcaagttttgttgttttgttagatatttaattgtctgattattaccctaatggccccgacaagagtcgtgtatttctatttacagcaaaaacttttgatttattctgttaggtcactgttttcttgtagtatcttaaaaaacgacaggtcataatacaaaaaattataacgatttttattaacaacagaactaataataaataaaaggaaaaaagtatctggaaatatggttttagttatactaatttttctatttttttagaacaatttttagtttataagatatatagaatggaaaaaataattaaagtgtcaaacttttttttttctttcttaaaacatgtttttaaaannnnnnnnnnnnnnnnnnnnnnnnnnnnnataataatattaagatacacaaattaaaatagaaaaaactgatcagggtcaaaaaagaaaattgtatcctagtggacaatggaaaacggagaatctactgcttaacccaccttatcccaatatctttcttcgatctcacattgggcgacacaatgaccgagttacgagaaaaaattgttactatcaccaacgtcctctatcataaagggatttttcgaggtaagggatttcactcactcttaagcactcaagataaatttcaagattagcggtaaaaataaaaaatattcgaaaatttttaaatttaaaaacgattttttaaagaaagaaaaacccgtagaaactatgcaacg

SEQ ID NO: 25700 - DNA, 1033 bp, Arabidopsis thaliana landsberg
acaaacttcctaggtaaaaacatatgggtctacattctctcgttcgaaagattatatgtaggttcaccattttgtaagagagaaacgaggtgatatagttcatatatgagtatatcacattgataaattatggagagatagagatatgattagtcatgattgtttttccaatgcgagtgtaaccgaagatataccaggaataagacccgaacctcaggttttacatggaacaaaagttccttggttgatccataagtgtttttcttctcacttgtgggcaaaaatttcattatttacccattgcagatctttttccttttgaatctagctgttcgtattgtttttctttcttttgatctcttacaaattggtcaattcacttacattagacatcagtggtgtagactgtttatttttatgcactgtaatgttttgtgatttctgtttcacttgtctttaccatagaaattttggtcatggtttacttccttctacataaatcctctccattgtaaattgattagatttttttgtttccttctttttactatcggtttttgccttctgtatgtgtgctggagtatacctccaggaaatgtttgtttgcttttgccttcttcaactgttcttttggactccccatgctttgtagatcaactaacaatgagaaaatgcaggtcctctggcattcgtcatgtctggatagtttgctgttttcagttcatgacaatacaccttcaactgttgtcaatgatcctgcttggactgctgctgttcgatccttataccagaaagttgtacgagaatggatcataatatcgctttcatatgctccatgcaccagtcagggtctgcttcaggtttccttctttttgccaattcatattatcttctatatgctcattcaaaatatctttatgtttgatagatttcttctgtttcttcaaatcgattccattcttaaaatgcttaaagcagctggacctcagtctttctcgccctctgactagtaactaccgtaattcctgtgtca

SEQ ID NO: 25701 - DNA, 1167 bp, Arabidopsis thaliana landsberg
tgtctcgaatttgagtttggatgcgacgttttacgtactagttttataaaagtaaatgttatagaccttgaatttcaaagtggaatgtattttacacacacaattgatacaccaacaattgtggaagcaaggatatagagtatcgatctttaatggagaagaatatatccttaaagtaatcattactttttaattacggcggaaagagaatagttaaatttacggcgaaaagaatgttcattaatcaattgatgacgttcgtttataatttcaaataagatcgaaaataacaggtgaacaaagaaaaaatagacattaaaaatagtaagatcgaaaatacaacccttaaaaatctcacgaaatcaatgagagaaacaattttgagatacggtcaacgtttggtctcctttaggaaagtacacgcataagatcgaacgtgtcgattcttattgctcgttcccaaaatcgacatgctctcggaccgctacattccaaatagtctgacgtaagcaatgacaaaactcacctacattacagtctgccacgtgtccctctccatctacttcaaatgaatcctccactatacagatttaaccatttttctatttttgtttgagattcctttccaccaacacaaagcccctgtctatccgccatgtgtccacgacctttcttatatatatagtcatctttcttctttgctcgagagaagtttcaactttcaaacatatctttacagttctttcttgctaaacaacaataaaggggaaaataggttaattatgatgaaatctggggctgatttgcaatttccaccaggatttagatttcatcctacggatgaggagctagtcctcatgtatctctgtcgtaaatgcgcgtcgcagccgatccctgctccgattatcaccgaactcgatttgtaccgatatgatccttgggaccttcccggtacgtttctttcttttcccctttaaatcacactatacactaacagtaacaggattctataaaatcggtctaagaattaataaaccggtttacaatttacagacatggctttgtacggtgaaaaggagtggtattttttctcaccaagagatcgaaagtatccaaacggttcaagacccaaccgtgcagctggtactggatattggaaagctaccc

SEQ ID NO: 25702 - DNA, 1062 bp, Arabidopsis thaliana landsberg
  unsure (1)..(1062): unsure at all n locations
attggtttcccttatgatgggatttctaactaattccgggaatatttaatagctaatttaaccttttttttttgggatttggtttcgatttcgattattctgtgttttggaaccaaataagttaaagtagaagtatatatgtatatgaatggaatatataaaagtaccataaataaaaagatttggattgactgactaaaaactaaaaatcctcatttggtaagaattaatagtagtaagataaatggattagtgttttgttgggtttaaaactttagagggaatgaatgatggttatagaagcatttttaaggtttaaagataaacaaaaaaaaaaagaggatgaaacattataagtccaactaaaggagacttttagcaattagtaacatgcgtgagacgtggtgatccatgtgacttttcttttctatataatttggagagatatattaccaacttaatttaaatattttatttttatccattatatatataaatataaggagtctcagtgtatggaaggattatgtgaaagcgtgctttgtctatcattctagagagagagagagagagaaaaaaaaagtaacagtttctcagnnnnnnnnnnnnnnnnnnnnnnnnnnnnnnnnnnnnnctggtgaagagagattttagatgtgttaattttgctggaattctttagaagaagaagaagaagaaacagaggttgaaaacgacggcgtattagtttgtatcagagatggcgatgaagggttatttggatgagtatgaaaagcttgttattaggatgaacactccaaggtttgttttcttcttcttcttcttcttcttctctgtttttttttttacaaaatttttctttaagaacagagctttaaaattgaaaaacttatattttaggtttctttttgtctcgtttttttttctggtgggaaaattctcccggaaaatatatttttatcagtccgggaaaaaatcattttcaaatgttcacaattgagtttcgaaatttgaaatttttttctttttttttttgtcatcgttggattacttttttgtttt

SEQ ID NO: 25703 - DNA, 6549 bp, Arabidopsis thaliana landsberg
taccggttgggacagcgagaggcctagtttacctacacgagcaatgtgacccgaagattatacacctcgatgtgatagcagctagcattctgttagatgaggacttcgaagcagttgttggtgatttcgggttagctaagcttctagaccatagagactctcatgtcacaactgcagtccgtggaactgttggccacattgcacctgagtacttatccacgggtcagtcctcagagaagactgatgtctttggctttggcatacttctccttgagctcattactggtcagaaagctcttgattttggcagatccgcacaccagaaaggtgtaatgcttgactgggtaagtctcttttctctgtttcttgtttcactttctagaatcttgaagctattgttcataattctggtttggttcggttcagtcttgtttgatagaaaacttaaaccaaaacaaaatataaattagccgtgattttggctaaattttggttctgtttttgtgcttgataaaagactcagtttggttttgtgttatctttgatttgaattcggtatagtgtgaagactaaactgttattttggattcggtttgattctgtttgggtgcttggtctggaatcggtttggtttggtttattggtctgagaaatgagtcttaaaaatggcaggtaaagaagttgcatcaagaagggaaactaaagcagttaatagacaaagatctaaatgataagttcgatagagtagaactcgaagagatcgttcaagttgcgctactctgcactcaattcaatccatctcatcgaccgaaaatgtcagaagttatgaaaatgcttgaaggtgacggtttggctgagagatgggaagcgacgcagaacggtactggtgagcatcagccaccgccattgccaccggggatggtcagttcttcgccgcgtgtgaggtattactcagattatatccaggaatcatctcttgtagtagaagccattgagctctcgggtcctcgatgattatgactcactgtttttaaaaaatttcttttcttgggtttgttttttgtttgtcgttttataatgttgatatactgtagatgtgaagttgagtgtgtaatttttatgtaaagaaaaaatatgaaatgcaaaagaaaatgttgattagcctgccacattactcaatatttgaattttgcaagtgaggtaagtatttgtggatggcataaaaatcaaaccgaactgaaagtttttgaatcgaaatgaaccgaattgtaagctaaacgtaatttcaataccgaataaactgaattgaattcaccaagtttcaatactacaaaataagtttgtaacatgtatataaaaaaaacatttgcatgtataactttttgtaattcttaaataaaactaaatttgtttaaactatgttatctccaatgcaaaaccgaaacaaatctaagattttcaaactgacctaaaccaaaaccaaaacaaaatcgaaaaggttcaaactaattactaaccgaaagaaaattctgatatggtttttctaaaaccgaaaaacctaaaaccttgaaccgagtaaaccggaaaacaaaattcctaaacatacattcatcacttaaccaaattaaagattccaaaccgaaataattcggtataaagagaatcgaactctattcggtcaacgtgtaatgaagaattaaacttcgcctcagacacactatctaaggtaaggacacgacaaaaccaccgaacataggaattaggatggtctttaaaatcaacgaataatgggccaagtagagtcgtaaacgtggagactattcaggtgtgaggacagaagcgtgcacctgcagcttgagagaccacacatgaaaccgttagatcacgcggctataagcaatcgcaataaacgagaagaagaatgatgtcggtccaaagtctcgtgagccgttcttatgccacgtgccttagatacagtcggtgccactctgccgtattattttggtcattaccacgatctcattaaattcctcattagtagtaattaccttaatcatctaaaattattaagggaaataattaaaatcatactacaaatgagcacctccatgatttaattaaaagtttagatccacatataccgcattacttaccacaattattgacaaacaaataaggataaacatacattaacaatttcattaagaaatggctttcaatttaacttttgacaaacacatgaatggtggtttaaaactgaaatcgttatcttcgagagaaaccgctcttcccccaaattcaagttcatcgaaataaaaaatttaataaactctccctcacttttacattctgaaccagaatttaccattttcttaaccacttcagtttcttctccaagtttccatttgaacaaactaagaagatggactcgtcgaagaaactcctgtttccagaccagattctgtcttctagaagaaacatattaaccagattcggtttaggaatcgctgcttctttccttctccttactcttctctcccttactagttcctccctcaatgtacccttcgtctctcctctgcttcaaggtctcaaaagctccaatctcaacccttcttcttctgtcaagcaagtgaacaagaagcctgaagtagtgaatctcaccgacaaggtcccagatgtgaaagttccaagctttgtggtggcagacgctggttcgaagaacacaactttgtctgaagaaagtaaagttccaagctttgattctggacaaagatctggagaaacagttaagaactcgagtctggctgaagagggtaatggttcagttgcagatgaccaaaatacccttgaagcaaatgcgacaacaagtgtgggaaacagctcgagcttggtgtctgatttgggaggaagatttgttgtacctgcaaacacaagcaaagagaatggctctgtgactgaagatcgaagcagaggttcgtatgaggattgtgatatctacgatggaagttgggttagagctgatgatgagacaatgccgtattacccacctggttcttgtccgtatatagacagagatttcaactgtcacgctaatggaagacctgatgatgcttatgttaaatggagatggcaaccaaatgggtgtgacattcccaggtatatgattcttaatgttcttgatgaaataacaagattttgatgaggttttagtgaactaagttttgagattagattgctagttattgttctgataagtagagcaatgtggtctctgtgttggaatgtgaaggttgaatggaactgattttctggagaagctaagagggaagaagctggttttcgtgggagattcgataaaccggaacatgtgggagtctcttatttgcatccttagacatagtctcaaggacaagaaacgagtgtatgagatctctgggagaagagagttcaagaagaaagggttttatgctttcagattcgaggtgagatatcgatttttcttgcggaatatgtagtaccatactaagagctgcaaacaatgtctgttcgcttgatgtgatttttggatcttgttcttgttcttgcaggactataattgcacggtggatttcgttggctcgcccttttttgtaagggaatcaagtttcaaaggtgtgaatgggactacattggagactttaaggttggatatgatggataagacgacatccatgtatcgagatgctgatatactgattttcaacactggccattggtggactcatgacaaaacaaagctagggtatgagtctgaaacagagaacataaacaagaagaccttgttgtgttttagttaacagtgattttgatgttcctttgcagagaaaactattaccaagaaggtaacgttgtgtacccgaggctcaaggttctcgaagcttataaacgagctctcattacttgggcgaaatgggtcgataagaacatcgaccgcagtcaaacccacatagtatttagaggatattccgttacacacttcaggtaattctcaatctaaaagtactttttgtttactgcaaaacgtgtttcttgaccgtagtgaaactggtgctctttgacagaggagggccatggaactcaggtggacaatgccacaaagaaacagaaccgattttcaacacgagttacttagcaaagtatccatcgaagatgaaagctctcgagtatattctccgtgatacaatgaaaactccggtgatatatatgaacataagtcgactaacagatttcagaaaagatggtcatccttcgatatacagaatggtttacaggacggaaaaagagaaaagagaggccgtgagtcaccaagattgtagccattggtgcttgccgggtgtaccggacacatggaaccagctcttgtacgtatcactgttaaaggccgggctagcgtctaagtggtagtcgaaagtcctctgtctttgtattcttgtttactgttgtaaagtaaaaaatgtaccaaatgaaatctcctttatagaaaaagagattgtatcatgtcacatcacatttatcactggttggttactacggtatatagaaatatttttgtatgaggcaataatttaatctgcctatactatagtatataaaaggaaatttattaagatagaatagatcggatctaaaatcttgagtttccttctttagttgactttcttgctctcccatggcgatgatgaaagagctccaacatggctcccacgaatgcgtgtgaaccacgcctgaaactataggtatcacaactacttagtctaatacatatatagtacttagtctagggtttacacaactactaatggcaattatatccttaatatatacaactccttatacaagtctcatgaacacacattgttttatgttgggtgctatacttctgaatatatagttggtttagaggaggatcgtcactgtgtaatatgcaagacatgtgcgggtaaacagttttatcagtgcgtggaatgtgactggaagattcatttcgaatgtatcgagatacctctcggtccgtggtaaagaagaatttctaggagatgatgattctttggagtattgtggggtttgcgagacaatggtacatgtaggacatcatgtttatttctgccaagaatgtgattatattggccacattgaatgcgttttacgctaggtacgtaatatgtctatgttgtcatataactctgtttattcttgatggatatgtttgtaaagaaataaaatgcagcaagcctgcctgttcgaagtcatcatttgtttgaagttatggtatctaattcatatatgatagcttgcaccatttgtgatgagaggttttgtgtggaaacgttttgacatgtaggagtgtggagagatatattatcctcattgtattgaacggttcagagagaaactcgttcatcccattcattctcacaaacttgaaatggagctgctgagggattttaagtgcattgcctgcaaactggatattaaatcatatggccatttttgcttcatttgtgaagtcggcttccatattaagtgcatcaaagatgttgatggactaggtaagaacagctttcacaagcatactctctataacttttggattgaggacttgaaggtactgactcatcaagcatgtagtgtgtgtggtagaccttgaggtgtgtcgctctatggttgtattgattgtaacttcagagcccatgtaaaatgccttgggtttccaggcattgtgaagtcccaactgcatcaacatactgtcctagaagaggaaaattatgatgcgggaaagtgtgcgctctgtaggtcaggatgcttgggtaagagatattcttgtaaacagtgcaaggaagtgtttcatgaggaatgcataatgtccaaggtaaaattcaatataccaatatatgttttagaacccaaactatatagtattttctatttcatgtttttatctagtttatgaaatttgtattttcatacaggatgcccgcgaagctgcaacagaagaagaacagcttattggagacatctattttatgtacattgagcgctttctcctaatgttcaaagaagaagaagaaaaggaagaaaaaaagaaaagcggcaaattcaagatgaggagattacagaattatgtaagtggtatatactttggttttgcctccccctctatgaactaagtacgccaacctcttttttctgtggttatgccttaaataatccctctcttattttctttatcgtgttcacagcgatggaaatgaagcacacggaaagtgatgaagaagccgacaattctgttactagctagctggttatgctccggtgccacggcattgtcgtatgttctttttttttcatcaggtttaggatccatttattgatttgtccttcgagtgatagcttagtcgcgtcattctccccttttagtgaacttttcagcatatatgcgcttttttaataatgtgagtttatcaattgaaccaatagccgacccatccatggttgacacaaggtcaa

SEQ ID NO: 25704 - DNA, 1417 bp, Arabidopsis thaliana landsberg
cagcataatttggaaatcatttccaatattcttgtaattctatattcggtcgtctatgttttcgtctagaagaggagtttcctctgacagcgacaagaactgagtcttcccttcttttgcttttccccacatcacagtgtaaaaccctaacgatatcaaaatccctccgaccaaactgcaacattaaccacataacaagaaaccattagattagatgtgtggtttttcttgtttcacaaacaagtgtgtctgaagattattgattcatatatacatataccttcctaggtaaaaagaatctccaagaaaaatcgctcccataatcactgctattaaaatcgataaaggtctgaatatagctaagtaaacaggtcctttattacgtactgcccacagatgaatcgcgtaatatcctggattaaatattccctgcgaaaaatagctatagtattgaaaagaagtttaagatataattaagttttctaaaatattcaaatttacgtaccccaacaactatgcaaactaatgtaatgtcaaaatgaatgatccatatgctcggattgttcttttctgctacgattccgatcaatgatgtcaagattgaagcaatcagaaaatagaagaaagagaccgtgaatggtgctggatatatcttcatatgtgtgcctgaccaattcaatattaatctactatgaggaaaatttagtttatgtacatgcatgtatgatgcatcaagttagagaattatatagtattacttggagaataaaagcaacaggaacgagggtgtctttgatggctaaaagacaaccaccgatgatccaatcggagtttgaggatgataaaggcaaaagaagctgacggagttgtggaaatggtggagaagatggggtgaagactcgtggaccatggtagagaactaccacaagtgcgccaactagtgaaactattgtcccaaccattttggctacactactcttttctttgaaagatgctttctccattctattttttgtttcacaaatagaaaacatgataaatatttaaatgatcaaatattttgctaaatggaaaaagcaattcattttaatcatacaaaatttcaaaattgctatcacctatgaaatttgtaataaaacttgacacagtaataaataaaaataattttaaaaatgtagttatttccacttctcttaaacaaatatatatttaatacattaaagaataatagaaacacacaaacttttttttttaatcatcccaaaagatgttttgagacattttgtttttgtggttcggttctcagaatagccccattaaaaaaaattgtggtggatttattgtgtactctaaattaagaggaaagatttggtctttttggatttttagttgcctttccgggtttggcacctaaaat

SEQ ID NO: 25705 - DNA, 815 bp, Arabidopsis thaliana landsberg
actactcaatattttgaacatccactaattttctttatattctttataaccccactactttttcttttaaaagtattgtcctatatattttatcttgtttttgtgtctttgtatatatttaatgtgtgtgatttgtcgtgacatataataagagcgccaaaatagtttgtttttatatttgtatagcgccgaattcatatttggataaatattgctacaaccgaatttaatggtttatgcaatatcatggtttaaatctagatattcttttatgtgagttgcagttaaaaaaagaagaagaagattagtacagttagtgatagattattaaactaaaactatgtcaaaagtgccaaatggttaaccaactaaaaactaaatctagatatgtttattttcatatgtttgtatttttgtatatatatatatatatatatatatatatatatatggtttaaaaaacactaaaaaataacaattttcgattttctgaaatacgaaatatcgtggcatacaagtttagttggtttggcataaaacttatcaaactagctgtggtatttagggaatacatccattctacatacatatatagattttctcatatttttgtagttcatattgtacaatgtttaccgactatttataaaatcacccaataaagaaaaagagaagacactagaaaaagccattaaaaaaagaccaatgaaaataaaccaaaataaagaaagaaaaaaaaaaaaggcaaagaagagaaaagttttaatttcttcttcatcactcaatcgccatgggatccgaaacttgagcagagg

SEQ ID NO: 25706 - DNA, 1034 bp, Arabidopsis thaliana landsberg
caacctttaggcacaaaaatagtgtcaccaggccatattatcggtctaaggcgacgggagctgtgagacactttatctactcttaagctctttactaatcctacttttgatttccaaaatccaaccgttctttcaccgctttcctctatattgataatcttgaaagtcgtcgcctctagctttccgttttttagctgaaatctcccggcaacacctttgaaactgactgttgacaaggcatcaagaagcttgggaccagatagagcaacgccgagttcatcaagatcagtcccaatatcatctcttgaagtgtcttctttggtcgtgttgaaactcatgtttacgtgcctaatttcctcaactgacattgcaagtgctgtggcagcatcataagcccaacatgcaaagttgttcagctcttctcctccgaatcttttttgccaacgagcttcaagatgtagtagctctttggattttgcaaaatatgtcttgacgcccaagacaccatgcatattcaccaagcttgattcccccattatactcatgagatcagctataccatttgtgactatccatacatatcctttgctcagcatatcaatctcttttgctatcgaaaagagtcttgacccgagatcaggcagcatgtgcacgataaaaaccctagtaggcatggtcattagtttgtaaagctctttcttgatttgatcatcagaggaatgtaatgagatggcacttcggtatcggatacgaacattaatctcttgaaaagcatcaactaagttaggaagaataccttctccgaactcattgtctacatatataggcacaacttctctccatctaaatgactctatgatggcgctaatggcttggacttgagacgaatcgtcgtgagtggctctgatgaaatatggactacggagggaatcaagaagagggcttgttgcagagaatgaaatgattggaactttagattggtttccaaggttgattaaaaatggagcttgcattgaagtccctggtccataatg

SEQ ID NO: 25707 - DNA, 1437 bp, Arabidopsis thaliana landsberg
ttctgaggctgtaggttcttcctattgaatttatttttgtaaggatataaaacgtttatacataaaataactaacagaaaacaaccatgggttctatgcttagaggaaaccagaaataaatcagggtgttattccgaggcttactttttgtaaggctgaatccgttgtataggatcttgcattatagctccagtgtccgtacagatatatgatctttccacctgcagacaagcccacacaaggtgcttaaaacctcatacatctaggaaacatagatcttatataacaccaaaacatagatgtcaaggaatattcttgattcataatatataaaaaaggacagatttgatctgaaaacaaaggtccacacttgtaatggaagtcaaaagaacaaaagacgagtaaaggcacaaaatttcaattcaactaaaggagctttcctgtaaaattaccttcacaggaagattagttgtagagtcaagccaggttatgctgccaggaatagccggtcggagtaaagcataaccattcagttcaatagacaagccatcacagatcacaaacgtaattctttttgctattctcttggcaagtacacgcttcttcagttggtccttcatgtcctctaatctgaaatagttacatttcagtaaaaagtagaactaaatgtgaattcctataaatccctattcaaattaaagataacatttacaaagtggtattttgaagtctggaaacttctcaaaaaaccatcacggctttgtctgagtgtagtactatgatactattagcaacggaatgacaaagacatataagggattccaacaggcaataaagaatgaaagaacatacttctgtccaactgatggcatgaactccgtaagttcatcactgtttaatccaattagatcctggaaatatgttgacaaaaaatcatggaaatagaaaattaagagaaattgcctataaagccccaggtttgtaaggtcaacacaagaagtagattgttaagagattaaccttgtagaagagagttatattgaattgcttatcaggttgactgagtggtagaagctcgattgagatgccaaggtcttgtgcatccttaaggaatcaccaaaacgcaataaaaagtaaaccattagttattctataatttgattaccaataagcttatttagatagatttcattgtaaatcatatctaagtaagggttgaagctaaactaccttagctctctgcaacgtcgtcctcgtcatatcctctttaacagagatcctcatactcccaaaaggatcatcttcattagtgaatagaaacatgcgtttatctgctgtctttaaagatctaaatatgtttttgttacagaatattacccacacagggatcagatgtcaggcccaattattacacctatccccaacctagcccccgat

SEQ ID NO: 25708 - DNA, 2761 bp, Arabidopsis thaliana landsberg
  unsure (1)..(2761): unsure at all n locations
cttttatcagaccagatacaatactaaaacaaatgcaactatcagcgagtccaagtcttttcatttgttatactagagaagaaagccataaaacttttttttgcatcatccacaagccagaacaatcggatctaccggtagcaataaaggttgttatatgtccaattagcatactacatatgaaagatacattaccttgaaaatatttgtgaagtgtgaggctgtatagtttccgagttgggaacaaggcgtagctttctacaatnnnnnnnnnnnnnnnnnnnnnnnnnnnnnnnnnnnnnnnnnnnnnnnnnnnnnnnnnnnnttaaatccaaaagcaaagcttcagaatttagattcccgagtttgactaattaataatagaaaacaatatttacgaggtttgaacatacaactaatcagataaacaaacgttataaagcatgcaagaaaaataaagagttcataacctaaattgcacaagtcattaaagcgtctagagcagggaatgaaagttatacttacagttgttcagatgttgattctctgtcaagtcttgcagatgccttgttgttttatgacggatgactcgttcatttataatcgtctggctagtgtttgcttcagcaagtcttctagcgcttggttctgtcctaggagttttgtgtaagaagaatcttgagtgattaagaatttaagagccgagttctgaatgcgtctgttaacactttggctaatagggaaagaaactgaaactcttttctcattcatctcaaaaggagccaatcaaaatcagcaatgcttgtttccttaacattacatatgaatctcatgtgtttgcatgaacatgcttgtcaagaaacaccttagccaagttactaaagcttagactgactgattcagcagctgcgtacctctcgataagatccaccacttctggtctcaaaatctcctctcttgttgctctgttatagtcacacatgtagtacaaagccccaagcgcatagttcacctattagaaagccaaaaataaatcaaataattgttgagttttcatttaaacaccagagaaacataaatgaggtgtactcacagtgttcctgacagggcttgataaggatttgataatcagaggaatcccatcagcctcgacaatggtagcaacattttttggctctgcacaagacatgaaagagcatttggttcgatgatcagtatttgcaattatggtaacagcaagaaacagttaagtatcaggctacattcataatcttccaggctttttaccggcacaagcgttacatattcctcctatcccaaattctacaagcttctcatttggctctgttagacagtctacgaatagttccaagacatttagctgctcgagtacaccagcaacatttccatcgtgagaagattaaagaagagagtattagggttctttatggaaaacgatagaacatgagcatactctcgaggttacctgacgtaaaatagtgtagttgtaagggtcatatgcaaaattcgccaagtttgctacaattttctcctttgtttctgcagatgcaaaacattaatcatgttaatataacttgacaaaactaagtgacaaaacaaccagagatatactagattaggcttgctacatctaaaatcttatagatgcatttgaaagtgatgacagcgatttgccacaaggcttatagtgccaatgttggactttaattgctaatctattgtcatgtttgcacatgttatgaaacctagatatgtgcccataaactaatgtttaacacgaaccgcatctgcttatttatttattcatacatcttctacttaagtagccacacacagtcctcaaaatcatactacaaatcagcaatgccttaaagatacatcaatcacaagaaagtatcaagccagtcttatgcaacaatactttctaaatgttcaaacaaaagcatgaagagatgttgactaaaaccaaactagttcataccttcatcagttgcattctgaaactgactcacaagctcctgtaattaaaaagaatacaaactcaactccaacaatgcttcttacattcttattaaaaactcaaaaacaggttaaaaaaaaaagattcttgaagagacctgaagatattgaagccttggtgttccatgttttccagtacgttcttcttgtctttgattattagtaaacattttctcactatccaacaactaacaatcttgtctttaaaattttcttctgcaatttcaaaatcaaatccctaaatcggagaaaacaaattcggatgccaactattaattcaactacagaatcaaaaattataagacaacgccaaggaaatcacaaaactcaagcaaagagtgttggattttctgagaaagatgattcaattggtcgaaacaatacagaaaacagtccaatagacttaaacgcaaaaacctagtcgataaacagagacactcacgttttgaagagattcgacaacacaatctgtcaattttgaatcttcccactgggtttgattccgacaacggagcttgtgagagagagaaatataactcatattggtaaaaaaggaagaagaagattactctgcttgttccggttcaatttgtattctggtgcaataaccggaaaccgaaccactagcaaacaattttactggttaaagcccggttcaataatctaactaagaaaaaaggaaacaatccattgacagttaagattaacaacagaaaaaagg

SEQ ID NO: 25709 - DNA, 1584 bp, Arabidopsis thaliana landsberg
acattttgctattgttgaaaggctgaacaaaattcgatttttggtaatgaaatgaaacaggtttagggaatacaaagaagcacttgatacattcaacgagaagaacagggagaaagtacagctgatcacaaaactcatggaggttagttccgagttctcaactaagttcttaatatgtagaaactgcgggaacaaaaccgagttttccatcgcttgttatacataaatggtgtttcttttttctttttggggagatggaacagttggttggagaaagcgagaagttgaggatgattaagctggaggagctgagcaagagcatataaaccgtgtgaaaaaggttgttcaagaagaactaattgggttcttttgtgtgatgtacctacctagtttaaaattttcatcatgtaagatgtgtgggttgcttttttttttattgttatagtttttttaaagtctttgggggtttgatttgtaaaatttgtgggttctctcttatttttgattagccaaattaaggatatgggaaaatggtagactcttaggatactgaaactcatcacagtgattagtctttctttctctgtattatgttttgtatctgtcttttgaagaattttttttttttttttggctttttagtaaagtttcttctcgttggcaaagaagaaaagtgactctcgcgtgcgttttttgaaatctaaaagctgtcggaccggcagaatcttttcacttgtttatttgcataaatcctatatggtttatacatcaaaccatcgatttatacgcaacgggaaatttcatattatataacctcaacagtttttagctatgtagcgcggccttaagctactattctactatagcgtttggacccaactgcaggcccacttcttatagctataccgaacatacattagccactactgtttctttttcaaatactcaacaaatttagtttttctctaactctttttctagtattttaatttggatgtaaacgaaaataataaaacatcttcttcgtttttaagctaacatgaatttgtggtcttgttatttggtctcgtcaatggaccggcgacattcatgccgtcatagagaagatttgatctttgatctatacgacatcatactcttctaccttcatcatagtagtaatgcgttctttaataacatgcattttcttcttattttcagtgtaaatacgttggggttttgtttacttaaagcgtgcacatttagaaaaacagcgtcaatccaatatcatgagacaacaatgaaataatacatgtgatttacccgttataacgaccgtttttattgctttatttggtgggcgggggtatgcatattgaattcgtcagactctgccttttatatatgatattttcttaactcgctatccttgctttttcatttacatattttctttttgtcttggtgaatttggtacgtttatgtatatatgcaaacaagacattaaaatcaaaacaagatccgcatgccagtttgtgcttttgttcatcaattatttaggacgtataaagtgaaccgcacaaaatactatgagctttgaatttt

SEQ ID NO: 25710 - DNA, 1256 bp, Arabidopsis thaliana landsberg
accgtagagtccgccattaccgcgcgaagccatcttctgcgtaatgagatcgctcgccatgaatctgaccagcgagatcagcatcaggtccagaaagtcggtggacacggtttaaccgggttaattcagacggaatcgatccggtttacttggtctggtttagagctgacctgattaagaatttacagacaacggtctgatacggtgtcaaaccggatagtgtgttgcctgaaggatctaaagttacaagatagggacgccccgaacctatatgtgaaggaatcaaaccggagaaatcattaaaggaaagatctaaagattgtaaactccgacatagtttaagagattcagggatttgaccagagagttgcattgattgaagctgaagagagagaattcgattctctttagcgttccagcaagaaactccggtgagtttgcaaatcgacgatgatgaattagggaaagaccatgtgttgagttgatttgaaggatctttgagtgatgatttaaagcctttgagacagagtacatcgtcttctgcgtgagaagatgacattaagatgatgacgaagaagattgagatcgttttcatgatggttttttttttgtttctttagggttttgtgaaaagagggaagctttttttttgtccttttatggcggaaggacggccattgactgtgtttaagcttaaagctttgtggaaggcacaaataaaaattcaaacttttggtgactttaaatacaagtaaagttatctgtaactaaacggtgtcgtttagagcagtttgagagtttgttttagtgaatgtgttgatgtctcaattgaaaaggaaaggtggtaaaaaaagtaggtaccaaagcactttctgcgcaagaatcaatttgtatttcttgttttgtgaaagtatagattattatttagaaactttagtaattgtctaagatcaatcgtatttttatgttgtactaacattcgtttaatttggccaaacagatataaaacgtgtttgaactgttggtttaggactgtcataattgttgaagatgtttctagccttttgatcgcaattttgggaatgttatttcatattttgttaaaatatgtttagtgagagcactaaatggcttgaaatgttttggatattggacatagcaattcgattatatgagtgtagttgaatttgttctatttttagtttttacgttcttttttggtgtggaggaatttttgattaaaaagacataattga

SEQ ID NO: 25711 - DNA, 1154 bp, Arabidopsis thaliana landsberg
ctgagctccctctagcaatgaatcagcttcaagggatttctcgaaacaagttttcgcttcttcccatctgcgttcagccacagacacgagtccaaggttgttgtatgcgggtgcataaccaggtttgagttccaacgcctttgagaacattgcctttgagacttcgtactgctttttctgtctgtagaggttccccaggttagacaatatcgcgtgagcttgatcctcttttgacacggtcaaggctcgcttgtatacttcctcagcttctgaatgttcatctgataactgcagcgaaatacctaaagccaacaaatgaatctaacatgagtcatgcaacgaacttaagattgtggaatcatcaattttctcctcgcagtttgagcaattaggttaatctgcaagcattgattcgaagaggatgttaccgagatttgaccatgcataactacactctctagaacgaccaactgctgccttaaggtatttttgggagagtttatattgttgagagcagagactatgaagaccgagctgatgccaccggacagcatcttcaggatcctctgttactgcctaacgtgaataaaaagaggataatgagatgaaaacattttcgatgcgaaaatatctcttcattatctatgtgtgtctgtacttgtgaccataccagaagacgtgccaatgacttatttaaggaaatcagtcttcagctttcttcctattctacccaactagttattatctgaatgcaacatctgaaactaacttcttaagcatcaaatcgcagaaacggcatacctgctttaagctgtacacagcccgctcttccatctctgtcaattcatttcggtcagcaacaaaagcagctgcaatttcatggtgagccttgtgagccatggcaagccctgcccaagcaatgggagggtcaattggaacagattctccttctcttatcactgaagccatctcgttgccagcccatgaaagctggtcgcttgcatcctgagacctttctgcatctttgattcgttggccagcaacagcaaatctagtagccatacagttgggatcaagcttggctgcctgaatcaaaaaaaggtcaagtcggtcaaccatcccaagactgcagtggagggcagagagtttgcagc

SEQ ID NO: 25712 - DNA, 1342 bp, Arabidopsis thaliana landsberg
ggagaaactgaaactttggattagaaactctttttcaatatactatagaaaatttcgacaatctctgattctcacttttagatcaaaaccctaaaaaggggtgagagaatcttgattcaatgccctatattgacagcttcaagcaccaaaaattgagagagctttttttgggcaaaacacttttctttctccatttgtgtctcaagctatacttccttggtctgaggtgtcttcgttgtaataaggtgttaacttgccatccttgtcatctcttatcttgtgtaggctatcttcgtctccaccaccaatttcttgcaacatcttaaccacacgcctcatggaaggtcggttaatgggcaacggactcgtgcagaggagtccaacattgaggattttgcttatctcttctttgaaacaagagtcgagtttcgggtctatcacatgctctatacctttttggtccaatgtagagcaaacccatttcaccaaatccttctccccaagttctggatcaaccgggcgtttcctagttactatctcaaggatcactaccccgaaactgtagatgtcgcttttctcgttcacacgaagcgtatatgcgtattctgcaagtagtttgaaatgaaagttatggagggaaacagacaaacaaacaaaaagtttcaaattccattaatggacaagtgagaagttgtggagccatggtttcagacatgtctcaatagatagtgaatgctcatttaagtctcaactaataaaacttaaatgtggttcatctgaaatctccgtgcaacatgtaccaaatgagcattattaccttaagcaaaactgttgattaaacaaagcacatttaacttgaatcataagactaacctggtgcgatataaccgcatgaaccagcgatcactgacatcgatttaggagcttttccggtcaatgtcgccagctttagccacaccaaaatcagcaactcttgcaccataatctccatcgatcaaaatattgtttgacttaatatctctatgcacaatcggaggaacagaatcatggtgaagatacgaaagcccctcagccgcatctaagataatcttaaacctcgtttgccatcccaacattcctcctttactgctatgaagcaaatctcccaaactaccattaggcatgtactcataaaccaagagcttgcagtctcttgtagaacagcaacaccatagcttcacaatgttcttatgcctaatcttacccaatgtctcaacttcagcttcaaaagcctcatcttgaactccaggcctgaacctatctctggatcacaatctccagtttccttaacagaggctgtcca

SEQ ID NO: 25713 - DNA, 2243 bp, Arabidopsis thaliana landsberg
aaccacatgacacgtatacgcctttcaaaataatcgaacaatccgagtgctgtgagatatatgaaatgatacaataccgtatgaaatcacactgctgagagtacttcactagattaactaatacagattggccagactccagccatttcatattaatttaacgttctaagacaaggactacatgcttagtaatagaacagggtcaacagaaccgtctatctgtgacaggttcagcttttagatatactctgctcgttaaatcctagtatagcatctgcttacaatctgagctcgttcaacacttagttcccgtgtttccagttttagacaatggtggaaaatggttcatccaggtttcagagaagatatggatagaaatgcaagctagatgtcagaaagtatatcgcacatgcttatttaagtaacaccaactctcactgtacaaaactaggtagggagatatgcaaagtagaatttggaagtctgaccttactgctgcttgacccactctctctcatagctggcgtcaattgttttacttcagtgatgatattctctgatgaagacgtctccgcggttgaatatattgtaagcgctgacggcctgccaaaataatgcaatgagacttgcacagtaaaattgaccaaaccgtgattaaaaaaattgttgatcattcatgatgaatattattgttatattagccatacgcagatggatatctgaaaaccctggtcataacatttttagatggaacataatcagatggatttttagattgatggacgatgtaatgctatagatgtgaatttttaagcttctatgtgaagacatctggttgctctattgactgcttaaaatcgtgaattgatctctttagtgcacagtaattttacctggacaagtgatcgttctcacatagattttctgacgacgaaagccactcaatatcaacgaaatttgagacactagacatatcttcttgctcggacaagtaaatggagctactaccattatgttgaactttttggacatctccaaaaaaatgtgtgctaggcattgacggagtacacctacaaagatgttatagctgaatattaagaccaacaacaaagacgagtattattatgtactagtacacacaaaatcttaagctacatgaagcacaaagagtaaagacaaccacctcatgaataatatatgagctataatcatggatagaattgacaagcacaacagagctttgacccaggaaaattataatgcatacacagcatggacactcaagctaaatgtaccagcagtacatattttatctagctataatgaagaaaaacgtaagaaagatttaaacaaacctcgataatgttacatcaccggcagctggcatatctggtgatgattctgaaattatatgagtatgagtcacttggtgtgacgacacaaaacctctatgtgatatgctttcattctttctactcattgcagacatcggagtgtgactttcatggagaatattcccatctgataagcacctctttacaagaaacctggaaacacagtaataagagctatgatatagatgcgaaacaaagtcaatatatttttgttcacttttagaggaaggctaataaagttggaaacttcatatactaaaaaacagagcattcttaagctagcagagagtacagattttggtacagttcgatgcagttaacaaaccaatcctagtttcccatgaccccatatgtctataacaaaagcccatacctccttgtatctaaatcctatgttaatttcgtatgattagggtcacaacagttttgtaggatctaaactggaagttatggtggagaataaaattccagtgaatggataatgtcgagatatgtagagcctatattttccaaattcgtaaacttaatgcattgcaaataggtataagatattagaactcatgtgactcataaatcatcaaaatatgtctaaagaagaaaatggaaacctcaaaacctttctacctacatgacagcaactaattatataggcatattattgttgaatttctgaaatccaagttagcagtcacagaacctacttttcatcttcccccatgcttatctctccacttcgttcattagagtgggaatctgaacgcaactcccaaaccgcctggctcccttgttcaggccggaaagtaccaagaaatctgcatatagaaattcacaaaggcccaaagaatttct

SEQ ID NO: 25714 - DNA, 855 bp, Arabidopsis thaliana landsberg
ggtttgttggctcgctgagacctcttctatccctatggaacctaatctctgtctaaggattctggtggtgatctggttgatgcagagttgtatcgtaggcttattggcaggttgatgtatctgactattactcgtccagatctcacttttgctgtcaacaggttaagccagttctcatcagcatctcgtacagcccagatgcaggcagtttacaaggttttacactatgtgaaagggacagttgggcagggtcttttttattctgctacatctgatcttcagctcaaggcttttgctgattctgactgggcttcttgtcccgacacacggcgctctgtaactggcttctgttcattggttcctctctggtttcttggcgctctaagaaagagcatactgtctccaggtcttctgagtattaagtaatccatctctaatcttccatgaacgtgttgatgagatcaatttcctcttcattttgcctgaaaaggaattaaacataagattacagaaatcatgtgaattgattatttaatcatatacagatctgtaaagtattaataatattttaggaaggagaagattcgagtatgattcctcgctttcaaatttgacctaaccgatctcttaaataaaatatagtacaaagtaaaaaataagtacaaatttacgaaacacacaagaaaacacataagcgagagagagagatcaaaggataaaaaggcgcgagaatgtgaaaagccagtgaagagaaaccactcggatcgatgacgtggccaaattatatttgaaatcccgcctaaacccctaaagaattttgacaactcgtgggaaattgaaatatactttttaatt

SEQ ID NO: 25715 - DNA, 2161 bp, Arabidopsis thaliana landsberg
ttagtaatttataacaagaaattaaagtgctatatcaaaactctataatggcgttatatcgttgctatcgtagcaaaatataccatagcgtacaaaacgatgctgtcataggggtgacacttactatagctgccgcaaacatagcatttgtgaattcgctgtgtattacatacaatagcagatggtttgcgctaacgatgaagactttttttgtagtgaggacaaggaaattacgtaactcaaggcagtgaaacgaagtcaaatatgggaacaaaaagaaggtgtgacaaaagagaagaaaagaaaccggtaaatacacaagaaatagatcataggtattgtaaaaaatggactaattaagttgcactaaacttggaacataagagcacacaagtggataacaatttcggtctggagattctccaacatacacttttttcaaggaaccatccactccaactatgtaagctaagtcatgagagcggtggtttgtataaccattttcgtctttgtagactttaccaaaaaccaccgcgacttccttctcctcgtcaataaagaaacttccacctgtaaccgcaaattgaaagccaaagccaaagcaaggtgagtgttctcattcactgttaagaacgacctccatgagaccgcattaggctcaatcttagtcgttatccatacctctaggatcaaagtttttgagtcctgaaataacaccgcaagctgctcttctctaacactagcgagagtcacagtatcaacacaacgagagtgaaacggcagatgaagatctattcttggtccgtgtatatacatctctcgagcaaaccagtaagtatttcccttgagagacacaccaagttgagaaaacggtaatttccagtcacaagtgaaatataaaaccttccatgaatcagagttaaaattgtagatttcaaaccaagaattttgggaggaaggatttatcatgaaacaccaagattttgtagttacgaagtgggctgttcttcatcttctcgtgtccaagagcgtaattgtcggttatatggtaatctcttctggttttgatacaccttgtttgcccacaataaggattacaaaccacaagcctgatcccaatagtgatgcataacaataaaccgtcgcagtgaaagactttacatatatcatcgactcgaactcgatcatcatttagcctaatgagtttagctttttgcatgatagatgatttaacattgttatcatctttatgaattccatggagattgaccctcattaaataaacctccaaatccatagtcatgaccaccagaaactccttttcctttgttgccattgttttaccatagagcttcttcgtgaagctctgaccgtaggttaaagagttccaatttttacaagtggatctcactgctgctatagactttaccggaattctacagagtacctcctccaacaaatctcttggaagattgtacatcttcttcattatgaaccaggaccaatgtaacgcaaactagttaatgtcggaaactatttacgttaatcttcttaaataacaacaaagaacaaaaaaactgcaccttattcttatttttcctctgtctgtgattacagatttcttcggcctctcgatatatataaaacaattgaagacggcagtcacggcacaatcccttgaggattcgattaagacagaacaaaacaagagcaaatcccaaataacttaggttaacaaagaagaaaagatcaattatcctcaggaatcacgaccgacagaacaaacaaacaagaacccataaagctcaatcgggtccatgttcactgaaagtggactttaaaagcccaaaagcctatccaatgtgaacgagagagagataagacgactaggcacatatatcacattttgttttggttgaaactgtaactgtaatctttaataatcaacaaattaattattgaataacctctcaagttgtattagattcatctttctcgtttctactggaacaatactgcaacaaagcattcgtgtaaactaaaagaccaaaaaaaccagaaactcatgaatcttgaacacaacagatacacacatgaagaaaactcctagtaagcgaaacagaatgaaatgaacgaaaatctgtactgtgattcacttttt

SEQ ID NO: 25716 - DNA, 1311 bp, Arabidopsis thaliana landsberg
gggcagccgagacgaagtgcatgaacattaattaaacatgtttttctttctattgtaaaagttgttgagtcaaaggctattctaaaactttatatattttgttaaaaaaggaagccgtcagtaaacttttttaaagaaagtatattacaaatccttataagaaaattaataatttattttcgttttataatttttaatttaattaatgtccataagttagtatttaacatgtttatccttaatgagcttaaattaattgggtctttgaaagttagtttttcaatgtacttccaaaatattagtatagggatccatatatcatcatcttctattttttttttttttagttatttcagaatttattttcttttaatttcctaacctttaattattgttagtcatgactcattgcaaccgattatattttttcttatcatagtttttcttataaatatattatcaattatttttatgcaatatattttttagtcaacaattttagcggtgaaaaaaactataaaaagtgaaattaaagagacatatagtggcttcgtatttcgtagagatattttgtgggtggtgtcaaagaacatatctcaagagtaaaaaatgatagggtataaaacacaccttttgtggtaaaatagatatttgattagtaaatggatgtaaataagataacgttttgacatgtactttgcatataaaaccggttttgaaaagttatgggatcatatattttaagcaaggttgcataactactttgtttgagataggggtgtacaaaatgagccagctcgctcagctcagctcacctcatgatgaacttggatcttttatgagccagctcagctcaactcatttattatatgagcttcaaaatacaaactcggactcagatcatctaaatcacgagctaaatgagctagctcgccagctaatgcgaataaatgaaaaaatttatattttctaaacttgttatgtaaattatatatttttaaaaatatatttctatttttatagattatataaatatttatgttttgattattgactttttgtgtatattactaatatttattttcagaaattgttatgtaacttctatattttctaaaatatatttctattatttatagaaaaatatatatatactttgattgttagctttttgttatattacttcaaaaaaaccaagcttatgttcattaaagctcgctcatataactcggggggcaaaaaaaaggtccggcccccaaacccctttttttaaagagacccctaaaaaaaaaaaacccccccccttaaaaa

SEQ ID NO: 25717 - DNA, 991 bp, Arabidopsis thaliana landsberg
actccatgcccaccgaagtaaatccggggagacaaaacgcatatcacagaagaatgcttgaagaacttcctagtctcctcatcatgtgaccccataactccaggctgcaaaataaatgtcacacaacatcttaatgtcaaaaacaccaaataacctgtcaaaacataaattatcctcaccagaaactccaattaacattacaactagtaatccaaaagctcaaaaatagcaatacgaatccaaagaacttgtgaaaacactaaccgtttttatcccaaacttatcatgagaagtcttatcatcccatacaagtagcaaaactcgaacaccttcctgggatttgtatttgagcaattccccaagcgtcatatccttatctcttggaacttttgtttccctaacaagcttaatcttatggaagatagaccaaccaacaatgtaaatcatatggtgagcctcagatatagcataacatatatcttcccaacacttcccatgctcataaactttcccgttatctaacccaatcgccggcaacgttccgtccataacatgagcgtcctggtaaagcctcacctgacttcctttcctcacagggaaataagtccgtctaacacccctacgctccggatctccggcgattccacatcggtagctatggatctggtcaaacggagtaaatttcatatcgatgaaaatagcagtttctgccttaggcggttttcccgaagcaccgagtacaggaaaccaaccagaaatgcgttctcccgatgcgatgtctcgaaccgggatcttagccgtgccaatgatttgagcaccgaaaacatcgtcgtctttgacctggaactcgagataagcaaacggatgcgctatagaaatgttgaatttctcgtcccaaagaggctcttgtgagtttttcaaaacacgtgttcgagctagagtcgcttgaggaacgaccaccgtgacgtaaggatcgctggtgataacctta

SEQ ID NO: 25718 - DNA, 5387 bp, Arabidopsis thaliana landsberg
atgttatattctcaaaatcgtcatctcttgagaatattctcacaaaagcctaactctctctcattatctctcaagctctgaaacacaaaacactctatgttctaaagtttcgcctctctcttgcttattaaaggtaagttcttagtttagtagtttcgagagtatattgtagaataagttcgcttgagtctattactcatatgctcaggtattagttcgtaatcggttgtatcttggggttcataaattgtgattgtctgaatgcacttatggcctatttattgaattgaggaaaaaaatatcatatcttgcatccgtaatttaatttctccatttaattactgttgtaatttattattgttatcgttatttcaataaaatttgtacacgtttctcaatttggtttttaagctcctaatacaaattttattgaaataacgataaaaataatgaattacaataaaagtaattaaagaaaaaagtaaattatgaaggcaaaatatgatatctttttccttaattcaataaatcggctgtaagtgctttttggacatcacgatttttgaatcccaggatacaaccgatcacgaactaatacccgagcacacaagtattagactcaagcgaactagatctatgatatactctcaaacctattaaactaagaacttacttttaagaagcaagagagagagaggagagaagctagaatttaaagtgttttgtgtttgagagcttgagaaataatgataggcttgatctctttatataataaagggggataggatttgtgagaatattttcaggatatgcatgatatattttgagactatcatgagaatattctgagactatcctatcctcagaatattttgagactatcctgagaatatttccataagattcaactcatcaagcccaataactcacaagcatgacggtccacaagcccgacagcccttgagccgatgacgggacgcccgacaacaggcagcccgactcagcccggtttggttcggttcggtccggtttggcccaagtgtcccactttacacccttatttctcattcaatacaactccgtttttgacgtatgagtataccatttttgtattactctttaccagctttccaatgcactaatgacccaacaattccgtttagccggaattcggccgaaaagtcaccgaaaaaaaatttatgtcaaaaaagttccaacaatcccccacatgaatagaaataagtctaaacatatgacgattttactaatcctaaggactgacccaactagctagactagacagaccttcgagagtataaacgaaaactaactgtatctgagttggtggcgtttttcagctttgaacctactcattattagtatctgtcgagtttactcggccagatggtgaacatgatgtcttgaaccatccggagtttgatgcaaacttagacagcaggtataacacaacttcattttctcatagaacgaggttctctgtttttgttcattgtggccttgaacatgcctggttaatcatgagggaacttggagagtatagcctcacatattctcctagaaacggccccatttcacactcacaaagtgatttactagctgcatgtatttaaaaaaaatatccagtaaatacttcacatatcttacaaagctaggttcaaatcattaaaagcaaatgcttaacctttacacatacaggaagcactgtacatcattttaggaactaggaagagataagagtctctcagtgcttttaacagttttagtttgatttagttttccctttgaacctatgtcatgggatctccaatctttgtaggtggggttatcatcaaactttctcttaggtggtaggctttaaacccattcctcttgatgatcttgcaactttatttcgattcaaaccttttgtaaatggatccgctaggttgtcagctgccttgatgtaatcgatcgtgactactccagttgagataagttgtcgaatggttttatgttgtcgtctgatgtgacgagattggctatcacaatgtacacatattgcaggcacaggtttcccccacatgggaatgtcttccaagaaattacgaagccacaatgtacacgtattgcaggcacaggtttcccccacatgggaatgtcttccaagaaattacgaagccattcagcttccgctgcagttgtatccaatgctatgaattccgattccatagttgatttggctgccacagtttggttgctagatttccaggatactcctgcacctccaagtgtaaagatgtatccacttgtggacttagagttgttggaatctgcgatccagttggcatcactgtaaccttccaaaaatgcgggttctttaccatagtgcaagccatggtctttggtataacataggtagttcaaagctctagttatagccttccaatgcttatgtcctggattgcttgtgtagcgactaagtacatttacagagtgcgctaaatctggtcttgtactgtttgtcaagtacattaaactgccaattactcttgcatattccacctgttgcacaggttcacgagagtttttggtcaagtgaagttgaggatctactggagtttttgcagtcccattagaataatgcttgaaacgatcaagtatcttctcagcataatgggtttgagacaaggtaatgccttcatcagttctaatgatttttatacccaaaataacatctgctatacccatgtctttcatttcaaaatatcttttgagcatgtttttagtttgatttatgatatctgtgttgctcccgaagatgagcatatcgtctacatataaacataacaaaatgtaccccgttggagtaatttggaaatatatgcatttgtcacattcattaatggtaaaaccattagacattataacactgtcaaacttctcatgccactacttaggagcctgtttgagtccgtatagtgacttcacaagtttacacactttgtgttcttgtcctggaataacaaactcttcaggttgtttcatgtagatttcctcttccgaatctccatgtaagaaagctatttttacatcctacatccatttgatgtatttcaagatctcgtaaggctgcaatacctatgagcatcctgattgaagttattctcgttaccggagaataggtatcaaagaaatctaaaccttctttttgtcgaaatccttgtaccacaagcctagccttgtacctatcaatatcaccattcgttttccttttaatagtgaaaatccatttactctccaatggtttagaaccttggggtagatctgctatctcgtaagtatgatgttgcaagataaagtctatttcagtattgactgcttccttccaataaggtgcatcaggggtagacatggctttctgaataagttcttggtacgttttcagctaaaaacgccatcaagtaatcatcaccgaaagatttctctttgcgagctcttttgctccgctaggttgttcttcaggttcctgttctgtttcttcaacagtaatagtacccaaagaattgtcctcagcttccgaggttgctgcatctcgttgatcatgagttcgtttttgagttttcctacaaggaaaaatatcttcaaaaaacgatgcatttcttgattccataactgtattttcatggatatctggaatatccgatttataaacaagaaatctataagcattgctgttgtgcgcatatccgatgaagatacagtctacaatcttaggcccaattgtgacctttttgggaggtggtacagccacttttgctagacaccccactcttttaggtatttgtacgagggtactgtacctttccaaagttcatatggtgactttgcagtcaccttatgtggtttcctattaaggatgtatttagtggtaagaaaagcttccctccacatgttctaggctaaccctgattcctgcaacaatgcattcatcatttctttcagagttcgattctttcgttccgcaactccgttagattctggtgaataaggagcagttgtttggtgtataatacctttttctctgcaaaatgcattgaatggctcattatattctcctcctctatcacttcgaactatttttatagttctctgaagctgattttctacttcgagtgtaaattctttgaattttaccagagcttcatctttgctatgcaatagatatacataacaatatcttgtgcaatcatctatgaaggtaacaaagtatttcttaccacctctagtttgcacatattttaaatcacataagtctgtgtaaattaaacccagaggttcagttgttctttcaactcgtggtgagggagttttagtgagttttgcatgtacacatagttcacatttttcttggttagttttgaatttcggaattaaattcataggttcagttgttctttcaactcgtggtgagggagttttagtgagttttgcatgtacacatacttcacatttttcttggttagttttgaatttcggaattaaattcatgttttgcatttttcgcattattttataattcacatgtcctaaacgttcatgccaagtagtaaacgattcaaccaagtaagtaataggattttcattcatttccacaacataagcagaagctacattttttggaaagactgtcattacagacattttgactagtccacctttaacaaaaccctttccagagatgagattcttccgcatgtcaggtacatgcttcacgttttgcagagtaagctcacgtcccaagttagcttcagaaccactttgcccttaccttcaatcatagacatcgctgtgttgcccatgaagagttgttcgtttgacttgttcttcacataggtggagaacatggtcctatctgtgcagatgtgtgtggttgcaccagtgtcgtagtaccactccacttggttgtcgtccaccatgttacattcagtgaccactgcaaccatatcctcttcagttaggtttgcctggctcttgacatccttggctttgctcttgcaaacatcacccttgtgtccaatctttccacaatgatgacactttcctttgaacttccgctcaggattgctcttcttgaagtttgctgtcgatgaaaccttcaagttcttctgaggaatagagaacccttttcccttgcctttcagcttggccttatgctcagctacattaacatcatgcccttgattctgagcacccgcgtgagccccatgattgttgccttcaatcatcaacttcggacgagatcatcaaaagtcattgccttacgtttgaagttaaggtaattcttgaaatctaaccagcccggtggtagcttctcgatcaagcaattc

SEQ ID NO: 25719 - DNA, 594 bp, Arabidopsis thaliana landsberg
ttattagctaagcaattttactcaagtaaaatctttccggtttgattatatgttaaaatcggtttgattcaatttaacttttaaaaaaaaatcgataacatcaccacagaaaacagcccaccaaaacctactaatcctcataattcaaaagtgataacatacaatctgccattcttaaacaatctacgacaatattactttaattgataaaaaataaaatgtggaaaatgatttacgagctacaacggattgataagaaatagacttttcggtgttactcgaaaacatgatcttaacttttcggtgtacaagaactggaaaacacgagcgaagagctttttaattttacatactaaaagttcttaacttttggtttgcccatttgcttagtacgttcctttacaagctatgacaacattaatttaattgataagaaatagaaatgtggtttccataaccggatttcttgagttttgttatttttacattcgtttatttatttggattaataattgtgtatttttttaatcaaaacattgttgtaatcctgactgaggggaaattgtcttttaacttagaataagattcataata

SEQ ID NO: 25720 - DNA, 927 bp, Arabidopsis thaliana landsberg
atgcgaacagtatggattactccccatccagtgaatttggatctgtaatttacagtgttctctctcattcccgatcggttacataagatgcatcatcattctcattcccgaccactcaattcctccctaatcttcgccgtctgcctcaatcgtcggagaaaatcgacaccatcatcatcgccatcactggcaaaaaagagagagggagaaagagtcttgttttgttttgacgcgtgatgatgttttttttttttttccctttgttttgtctaaaaatctaccaatgaatgacgccacatcatcgcctctcttgcatctcaaaaactctcacaagagagctgtctctcttcatataccatgattttgatttattttttaattttttttcatgggaaccatagaaaagaacccaatatatgaaccgttggagatgctctaagagggtctagaccagtctaattatcctgccaaaaactccctgtttcacctgagcctatctcacaaaccagaaaaggcctagcgagaggtctaagtttacaaagcttacgccaaatccagctgctagaggagtaagtatttaaatccaaaaacttctatgagcaataagatttatcctgacccaggaaacccacaaagaccctgcattagtaaacaacatccaaattaatttcagagcaattactttataccaatcagctacccacggggggccagacccacccacttcctgggtggtcaaaaccgattcctaggcaatttgggcccttctcgctgagttgggagctcctttccacaagcaggcactacacatttgctccaatcttaagagacattggttggccggagggaggccggagacccaaaggttgttaggggaatagatgactgattttaagagctggagcctccctgcaaatgaaagctgtc

SEQ ID NO: 25721 - DNA, 1757 bp, Arabidopsis thaliana landsberg
aacgtttaagtaaatcttaaaaattttcggagtaacgtttttaatcttcattttcttattcccatctccaaaccttaaatttttggacaaagcaaaaacaaacctacatcttatttaattgtatacattaagatcttaccaaatcaaacatttagacagaaacaatactgttcggaaaaattaaagtagaaacatgaaaaaaaactatttagtttacagttaacaaacagggaaaaaaccaacaagacatggtgatctttgttcacaacatatcaagccatggggtagagcctattggttcaagtttttttttaggtcttgtaatctcgttgtttctcctcctgatagttttcatgtctctgtttcctcgatatatcctcaacatatcgacgccatacgacttccctatcttgcctcggcatcttgctgtacctgatatcgggtttcagtacttgtttagccgttgaccaagaattaagcgcagtctttccatcttctgtttgtagagtagctgcttcagatgacaacgcttcagctagaagagctttgaagtcatgaacacatcgctgtgaagcacaataagaaaaacatttagacgaaataggcaaccatagtatatttccttcctcaaatcaaccaaaaaggagataagccgaaaaggtccttgacactaagttttgttctgatcttgttgcagaaaatgctgagaatttgatttggtaagggttacagttgagtagtacacgtacctcatataatgactttacgtggtctcggaatagcttctctttatcagcaggttctaagtctggattagaggcacgtttttgaggatccctctcaagtattggcttagattccgtccatgatgccttcagatgttgaagaaagtaacaaagaaaaccaatcagaatccccacagagtaaacaatttacaaactaacatctttagcccaaatgaaacttttagctagctacataaaagaagtagaaatacctcagggtctctgattttttccactaacaaagcttgataagaggagcttgcctctttccttctaattttttgtcgtaccctttccacctcttgcacttctctttctttgcgtttccgcaactcacgctcccgttccctcagtttgtcctgaacccaaattcaggaatcacacagacgtaaatacattatgtgtctatgtagtttaccacatttatagccagtaaaacatcatttttatttttttacgctggattccaggcacataaacaaaagagatccaaaaatcttgtatagcaaactataacattcgctaatttacaacttgtttcttcctgcaccactagcaatagcatgcagagaatctgatgataataatattttccaaagtctctcaaattagaacaaacaatcaagtaatataacatgccagaaaacagggaatacgtgaatattctcactttgaaaagaaagtataagagggctgcttaaacattgtggaactttctagcgcttttcatgaattgtaatttgtgaatataaaaagttaatttacctcttcgtctctggctttcatctcatgatcatctcccctttgtgcagcttttagttccgcaatgtactcataataaaaaacctccctatcctcgtgcgcaacggatctatatcttggttcatttctcagactatccttcacctgataaaatatggaaatatatcatataggtggtatgaatatgctaaccagttaaaaagaagccgt

SEQ ID NO: 25722 - DNA, 1952 bp, Arabidopsis thaliana landsberg
  unsure (1)..(1952): unsure at all n locations
gtcccttcagacacagcatgtttcgccaactcaccgggcaacacaagtctaaccgcagtctgaatctccctggaagtaatcgtcggcttcttgttgtaccttgcaagcttcgaagactcaccagcaagcttctcaaagatatcgttgatgaaactgttcatgattcccatggctttgcttgagattccgatgtctggatgaacttgcttcaacaccttgaagatgtagatcttgtatgtctcaacgttcttctttgatctcttcttcttcttgtctccggcgacggctggttccttggggagtttctttccggcttttggtttcttctctgccgctgctgctggttcggctgccggagttttctctgccggtttcttctccnnnnnnnnnnnnnnnnnnnnnnnnnnnnnnaaacttttctagggagtgagttttttttgctgtgatggttttgatttgatactgttatcttcgagaattgtgtgtttgtttatataagagaataggaagagatctgattagttaagatactgaaacgcggatgcgtgacgtggagatatgagtgctgttcgatgaagggttttggtgaatggatggttcagatctattttactttaatgcgcgagttattttaaatttctttttcgaaatattgaaaaattcgaattttctgttgcgctttttgttatccgccataagttcatgaagcggcaaagagagaaaaagtttttgtcgtggatagctgacgtggttacttttgatccgtctaccaatgaacggctatgattttaccgtatctacaaagttggtaacaactttttcctatctaacatttttatggaaatgaagaactaatgcataattataagttttcaactctttcaaaattcttcaaaaataaccaactttttatagatacaaattttgaatttctctaaaatgccaacatttagttcagcttaataagttggactcatcttaataagttaatatgtagttgtattttaacagagttaacgatgtttcttatattttcttaaaattctgcatgatatatcaatagatagttgttgattaatctgagaagtgagagacgtattaaacataaattttgattctcactgattccacatatttctgagattagtgaaaatctatgcatgatacccatcagaaccaaaatcatttgtaacattaacgttaatgcacaagtcactatgatacaaatctgtatattatcttatctttgtgacattaatttagagaatatagaaactcgtgaaaagaaaaagaacaaaaagaagagagggagtgaatgcacgtgtcatttcttgagatatcgtctatgaaatctctatagacctcaaacttcctatgttcttactttagggtgattgtcggcggcttggacgacccatgtgccggtacgtggcccaaaaacaaagaaacgtggctcatcagcttgtctttcctagaaaatttagtcccacaagagcaaacccactttatatccccacaatgcttctcgtgtgtcctaagatcagacagaaccgagaaatgcttcacactacatctcctgcacatatacattttgggacaatgactcctcttgtaatgattcttggcgcaaatcacagatttcaacggttggaacttctcgtgcctctggttccatctacacccgtgttgaggacaggagtagtaatgtttctttaacgagtattctcctttcttgtcttggctcgttgggctgatcaaggcctcacgtgtcttgtactcatccccgtgcgctctcatgtgcatccttagattagcgtctctcttaaaccctttcccacaaatctggcagtaatgcgtgtatttcgctagtaggtccgctacgtctagctccagtatatcgtagctcccggaacttggtttagaacgatgtttatcttttttagggtttatgg

SEQ ID NO: 25723 - DNA, 1263 bp, Arabidopsis thaliana landsberg
atagctttggcatacacgttaaaattttctagcgtctttcgcagactcttcacacaaacgatgtgaataatatcgaaatgggacaaattttcatgctgttatattatacaatcaatctaaaaaacatatttcgtggacttagcgcgagtcttccggcgagaaacgagctactagtgaaacgatgactgaagaaattatgattatatatgtgacattaactaaaacgatagagatcttttccttttttaatttccatcaaccatggagagatttatttttcctttttgtcaacaacaacatcgttggatttcttaaagcataaaaaatcttataacgtaaagcaaagaaaattaaaaagctaaaatggttacgactttttacaagaaacaaaaaaatgattacgactaattaatgatttgaaatatttgggaaatagaatttaccgaaaaacaacggcgaggatgaaggtaaaagcaggattgacattgctcatggccgaagataaagtcggcgagctatattttatcccattgtagcctaagatttgaaacgcacttctgttctttttatgaagtacaaatacaacaaatttaagtaagaaatttcttccataaaacaattttttttgaatacacacttatatgcaattcaagaaccaactaataattggttttgaaacctagctaggaagatatatgcattgcaaatgctactagatatagtgtttccaaaataaaagtaacttacgcaattagaccaagaatccccatgttgcatagaattgaaaatgtcaacggagggagagatcttgatctgtagagataagtctatgtaagaaaaattacttaatacttcacataaaacttgaaacagaatcgtgagaatgaagaacctgaaggagaagaatgtaagaggaagaagaagaagagatccaaaagtgtaagagtatacgagaaccacaaatgggctaagtcctttggacgtcgctgctttgaccagagtgtttactcctacgttagaaaactctgtcaccaccatcgccgtcaagatccagccatctctgttacataaccttccatgaaccatttttagttcttggcttcttctttcttctaagcctctgtctctctgaaagttgatatattattagctcatgggatctcgattggaaaagacatgtgaaacagtctccatcaaataaatgaataattgctggcttcttattgcctgaaaaaacattcatttgttgggtatgaaatggat

SEQ ID NO: 25724 - DNA, 896 bp, Arabidopsis thaliana landsberg
cattgctgtaattaaattatttcatttccagtctcattaaataaaagcatggtcttataggtagatggagacacgagtactaacgacacagtcattgctttagctagcgggctatctggatcaccttctatatcatctttgaactgtaaagaagctgcacagcttcaggcatgcctcgatgcggtatgtatgttattttgctatcttcctaacagttgttcaagagctggacttaacatggagcccatctttttcaggtgatgcaaggacttgctaaatcaatagcttgggatggtgaaggtgctacatgtctcatcgaggttcacaaaataaaactattattcccaaccctttgattgaaaacaaatcttaaccaataacacaaatatcaacaggtaactgttaaaggaacagaaactgaagcagaagcagcgaaaattgcacgctctgtggcttcctcttccctggtcaaagtatgagatcctagatgtatacatgaataatcaaagggagctttcttgtttctaaataataatactaaacgtctgttgttgctggtgtgacaggcagctgtttatgggagagatccaaactggggacgcatagctgcagctgctggctatgccggggtttcttttcagatggataagctgaagatatccctcggcgagttctcactcatggagagtggtcaacctcttccgtttgacaggtttatcttacaactgatatgtctttcattgggaaaatgaagttcgatcatgttcttatacatgtgtatatacgcagggatggagcaagtaactacctcaagaaaaccggtgaggttcacggaacagttacaatcgatatatccgtaggtaagagattcatttggctagcattattaatcaacc

SEQ ID NO: 25725 - DNA, 1895 bp, Arabidopsis thaliana landsberg
caaaaccaactggaataaagttcgacacctgaagcttatcctttaacaaattccttcttattcaatcatcccttcgcagaccccaaaattcaagagtaggttcaagctcagctataaagtgttaaccgagtaaagttccattctttacaaggttctctatatgatcatagcacacataccaataaatcaagaatctttcaattcaatcatctcaacatatgaacaaaatgaatcacacaagtatgctactaacaatgaccctttaaagcaacgatcacaactcaaactttacatacttaaagaacatagaaacttacatgccatctccaaaatcttcattgataatctcctttatactctcaccaaaatgcatcactgcttcattcaacctaaatcaaaatcaaacccagacatcaaaactaagccacccaaaaatgtaaactttccagagcaaacctgtagatagtgggttcttggatgagattaggatcataggatctccacggaggagacatcatatctccgattagttcatcggtcagagctggtaaagcttccttaagctttgggactgtgtccggtttgagctgagcttgacgacgaagaagctgagctacgtatacgttggttagacctgtctccgccgctaactggctaaaagtcttgccggaagctgatttcacggcgagaagctgatttgtaacactctgtttcttcgccgcttccatttttttctgaccaatcaatcacttttgtctcttcctcactcttttaatggaaaaatcgctatgacgtaattttatctttaaatgggctgagtatctctactcttataatgggtctttaaatgggcttttaaatgggttttagttcagtataattcaaaaatatatgaaaggctcatgtcaacgaatttgttgtggtgactctcatcacaatatagtatacgaatccactcagacagacagacagacagacagagagacagttatcttatataattatattcattcaataatcaaacataatatatatatgtaaccgagagaaacgtgatatcttatataacgaagatagatcatagatgtaatatatataaatcaaaagtcaatcaatatgtgttgtcttttaatcataatatattcataaccattatgtgcagcatgtgcaaatactatataaaccgtacccacataatatagatctctgttatatgtcgttttaattattaatcagttatgcaaattattgttaacaaaccagatagagttatttccagatacatgaaatttgagtaaggcctattgtggctgttgggtttggaacgaaatttttgtttttcggacattccttgttaataaatccgtggtaacattcttttctaaagatgatacatactaaaaaaatcttataagaacccatgaattgtcacaaactggctgatatttctcaagtgtaaagccgactagtcattcaaaattcgaaactatatgtgttaaagtcaccaagcttatcaataattgtcatgaactatgaacaaaatcgaattatatgtgttaaagtcaaattatatctgaagttcttgtattaatcctttgagatatgtagtccaaaagattatctaaaatgatatatatcaatatatgcatagtttagagtgcattaatatatggttggagtaaactaaatgtatatagtaagcgccggcctcattttaaaaatcgcgtatgttctgcactaatcatttttttatttataattacgacaaaagaaaaagaaaaaaataacaataaatcatcaggtttcttgtctcattagataatatatttatggactaatcacagctcacgtaatcaaatttataagcaagttgcaatattctatgaataattacc

SEQ ID NO: 25726 - DNA, 818 bp, Arabidopsis thaliana landsberg
gactttaatatcaatccacattaaactttctgagatcgaaatcaagagttgctatgtcggctggatataaataacaactgtttggtaactaattaattgtatactgaacattaataatatcttatgataaatgagcaaatatcaatatatgttaccttttttttttttgaaagatttatatatatggaactagaagaagcaaagtgataataaacaaagtaatatattaaaataaatactgaaaacaacacataattacaaccgtttcaccaacacctatttctacattacttataataacatgagttgcatcaataaagcacgagatatttagttgataaaatgattatacatacaaaccatcccaatactccatgctttgtaaataattattatctaacatataaaacgggatgttataattagtttccggggcaagctcgaaatcagttggtgcattgttggcttcaacagaaagcgatgaacttgaactgttggttggcatttcttcaagtcgttccgacagttttcgaatttcactttgagcttcactcaattgttctgttagtttcaatatctacaacagcaaaaaaatacatcattagttaataccatagttaatcactatgtgaagaagaaaatcttatataaaactcttatttagtacctagataaacaaaaataagagtaattttgttaaccaaaaaaaaaagatatattttactaccaattcagtgaaataaatagagatttaatacaatgcaaagttaatgtcaaaagaaaaaaattgttataaattaattttgttattcatcaaa

SEQ ID NO: 25727 - DNA, 581 bp, Arabidopsis thaliana landsberg
gaagaccagacgtgtacatttgttaaatttccttgaaagtgttgtttacaccaaataatggggctatgttcatttccttgtcactagcgattgcaattatgtagttgaccaataactatataaccagattctgatcggttcgccactgtataaacaaaacaaataaggaaacgtatcagcccatcactgacatcaactaaaacaaaccaaatatagccaatataaaactgtaccaagtgaactcttgttcggggcaagaagttaaatccgccatttattttttgaaattctttaaacttcaatagctaccaaacaccattgcacccaccattgcactcgttggacaaactttatttatcttttgaatatcatttaacattacattccaaaaacaaaaacaaaaacaaaaaaactgtgcctagtgccgaactgaacaactattgatatgcattctctttcttgtcgctagaatcacaacacttagaaaagaggtaagctacaaaatgtttgacagaagcatttgcaaatatacactgaaattggaagcgtgaaaaggatcgtcgattgtagaaacaaaaaag

SEQ ID NO: 25728 - DNA, 1100 bp, Arabidopsis thaliana landsberg
ctttgataggttacgctgagaagttcctctacgtatgcttctgcatgcctactgacgaaaccttatgttggtgcatcctcctcccaactgtagacgtttccactgggaacaatgtgaatcgagctcatttgatcccctcgttaccctctcagccacgaaaagataaatggcaatcgctcgtcgaacgtcttgttcttggattgtcggtctcataagtggcaccacgtgacctccatgagagtggctcgtgtttcccctgaagtcagtgtagtggacggaaagataaacgtgtggggaggctgcaagtacaagcattactacgactggggagaagtgttcgatccaaagacacaaacttgggctgatatgtcaattccaaagccagtgcgggaagaaaagatatacgtggtggattcatgggatgttggaagctattactacttgccgagcacgagtatatcccaaaaagggaatcaagattcaaagcgtagcaaggattggtgtctaatagataagttgatatatagttgtggtaacgatggaggtatatattggtgtgaggcaggggagttggattggtgtgacgcagtagggatagattggagggaagtgtttggtttggagtttctgtcaaaggagctccgtgaatcgagagtggtctactttggtgggaaaatggtgaaagtgtgggagtcctacaagatcatgtacaatattagcttaaaccttgaagaattacttcccgagacccaattgaccaacttgaccgaacttggtcataatgttttggtcttttgggaaaagctcgaatgttgttgtgatggttttaagatcttggagatttggtgtgcggagatttcgttggaaaggtgggagggaggcgagattttggggaggtgtgattggtgccatcctatcctcgcaatcaatcttctcacggtcgatcctctcttctaccactctatggtcttgtattctatcccttgagatgttttgaaaatttctattgttctcatactctataagtgttacttttaagtatgatttataagaccacacttaagtcatagtaggcggtacggttttttttgttaaaagca

SEQ ID NO: 25729 - DNA, 2786 bp, Arabidopsis thaliana landsberg
atttgcgagatttggatatagaggatctttttatttcaatttcccttaatcataaagtaaaataaaataaaattacaaaattatagttttatctttattattattttttccaaggcaaaaattgaaaaaaaaaaaaaaaaaaaaaaaaaaggttttgtttctctttctctccgccgatggttgcgcaagcgtaatcttctctgtgctcggtttaaaaagttgcaatacctaaaagtccaaagaagagggcaacatctccatctattcccatattgcatccagaatgaagggagagaatctgacgcttaggcataaggtaacgcataacattgattgctattgtttaagccaaacttttgacattgtgacttacatgttgtgcataaacagtgaaggtaagcttttttttttttttaacgtctggtttcattgattaagaagaagagtgatcctcatggaggatgtttacaacgtattgtggtacatagaagaaagattcaaagagcgcatgattatcaaaagtagcttttgctattctgtcggacgctttgttgttatatcttcttgtccatcggatttctgcacttatgaacttgttcttccacatattgatctcacgaacccagttgtcaactttgaagttgcgcttttctccgttgataagttgagtggctgtgtaattgtctccttcgaagataatgtgcctataccctttaagccatgcttgttgcattgtaatcagtagtgcttgaagttccgcctccagagttgtaaagcatctttgtccgatactgtgtcctgctgatagataggtaccgttggaatcgcgtattatccatgctgcttgagatgggtcgtcagttgcgttgaacttgcagtcgtagttgcacttgacatatccactcttcagtttttgccagcttgataagaacggccgtgttctcgtggtcggaatgctagttactcggattgtctaaccagcagttcacccattcttccgcctcttgctctgctttggtgatatcctcctgccaattgctatctttgtgttgataaactaagaggtttctgctcttccatattctccatagaagccatagaggtaattggcgttccatctatgggatataatggttgttgtaacaatcgatgatggactcgaatttttcagtgaacgttcctgaggcgtcaaagttgcttcgttgtagtcccgcggttcgtcgccagatttcttgaacgtattcacaatcaaaaaacaggtgttctatcgtttcttctgctctgttgcatcgtttacatagtgaattggtggtgatgttccttcttacaagtacagtgcctgctgctaaagcattagataggattctccacaggaaatgctgaatctttggtgttgttttcattcgccatattgatgtcttgaatgcatgcaaacctggggatggggtgacattcggctcgtttcctggcatgtgcgtggctagccaatatccagatttgaccgtgtataacccggaatcgttgtagtgccaacttaacaaatccggtgctatagtggggcttattcttatgttaagaattacctggatgtcttcaggtgtcaccgtgcctctcaaacgttcaaggttccaaccgttcttttgctcattcatcagatcacttactgaataatgattgtccattgttcccatcatacattcgggtggtctcggcggatgcaatggtaaccaaggatctagccatgcacttgtattgtgcccattgccaataaggtatctcatacctgttttcagtagttctctcccttctagtaatgacttccagatgaaagatggcttgtatcctgtcccggcggttaagacattgttgttgggaaagtaccttgccttgagaagtcttgaaagaaagctattcggtgattgaagtatccgccagaattgtttccccaatagagcaagattaaacttctcaatatctttaaagccaagccctccttccttttttggtaaactcattctcttccaagagatccaatgcattcctctcctttctcgacttttactccaccaatagcgtgccaaagtactgttgattttgtcgcatatcccttttggtagtttaaagacgttcattgtatagactggtaaagcaattgctatggtcttgagtaagatttctttgccgcctttagacaaaaatttgtgagaccaattttgtgttctctgcttcaccttgtccaccacataattgaaaatctccttttttctgcttccaatctgttcaggcaatccgagatacttcccacctcccccatcattatggatattaagtatgtgccggagtcttgttttcacatgttgcttaactcgtgctccaaatgtgattgctgatttgttgagattcaccgcctgacccgagacctgctcatactctcgtaggatactcattatagtggtgcatgacttttgatgtgcatgacaaaagaataatgcatcatcagcaaataataggtggctgatggagggacctgtagtacttattttcatgcctttcagcttgttcgattcttctgccttggtgaggaggttactcagaacttctgccacagtataaataagtatggtgagagtgggtaaccttgtctgattcctctctttggttttatcattcctctaggggacgcattcactaagactgagaagctgactgattccacacactgcattacccaatttatccaaactgaatcaaatcccattgactgcattcgcttctcttaagaaagc

SEQ ID NO: 25730 - DNA, 1928 bp, Arabidopsis thaliana landsberg
tctgttggcgtttatgactagtttcatttaattttgaataggacaaactttgtaattaattgtaagtagctcaaagaatctacatttaaacaactatttattattgtggtacttctttctaagttgttgtatttttaaatttcttgagtcctaaaatcgaaatcctttatacggctacacatttattgcatattgatctctcatcttattattcacacgtgacacaccccacacaaataatgcatatgctttagatggtcctaccaaaacctcaaaaaaagtcatagttttgttgattaattgttgcgtttattttgatttgtggaattattgattgcaggagggatagtttcataactcatagagcattttgcgatgcattagcagaagagagtgcaagagccatgccaaaccctattatgatccaagcttcaaattctcctcatcatcatcatcatcaaacacaacaaaacatcggtttctcttcgtcatcccaaaacatcatcagcaacagcaatctccatggtcctatgaagcaagaagaatcacagcatcactatcaaaatatccctccttggcttatctcatcaaaccctaaccctaatggcaacaatggtaatttgttccctcctgttgcttcttctgtgaataccgggaggtccagctttccccacccatcgccggctatgtcagccacagctttgctccagaaagcagctcaaatgggttctacgaagtcaacaactccagaggaagaagagaggtcttcgaggccaagctataataacttgatcacgactacaatggctgctatgatgacttcaccaccagaacctggcttcggatttcaagactattacatgatgaatcatcaacatcacggtggaggagaagctttcaacgggggttttgtccccggagaagagaagaacgacgtcctggacgacggtggaggagagacgagagatttcttggggctaagaccgttaatgtctcataacgagattctaagttttgctggtcttggaagttgcataaatagctctgcttctgatcagcttcatccaaagccttggcagggttagttaggttttttgctcataatatataatatgtgtatatatatttatatatctagttttgcatctttctcttgttttgttcttcgttttataaatttatatgttgaatgctcatcaaaggagaatcacagaaattgttacgagtcgtcttattcatatttcttttttttggggggttatttgaagaaaaaacaaaaacaaaagcaaggtcatgattaatggtcaactgatcatgattattggtcaactcaaaattaatattcttcgttatatgatatcacgggaaagattggcacactagctaggtaggtcaggaggtattttaatcgactgtcaagtggcttgatgagttcataattttcatttattaggttcttttgatgaaataagtatctcgaccttaaatttttatccaagtcaaaatctttttacttttttcgaaaagccaagatttttactcaaacgtccgaagaaataatgaaatataagaaaatgactatgaaatgtggcacatgaaaagcagaggaggatatgcattggattcgatctaagggtggtgactcatcttttgcttataaacctatttcgaatattggtttttcttattggatctcatctcacgcaggcacgtaaatgggacccatcagaagatagggacacatcacgttttgcttggtggcatatatttatcagtcatggacataactttaaagatgttatattgttgatacacaggtttgcagcacttcatcaattaatattttagacattgtaagatatatatatatatgtctcgggattattctaaaatgaattccatgaacataattatatatatatatatat

SEQ ID NO: 25731 - DNA, 1539 bp, Arabidopsis thaliana landsberg
tctattagtcgaaataaaacactgcaattagattaaaaaaaatctcggataaaaaaacaagtatgttgctttgtttggagccctgaactctggctcaaatgtttaacgtggtgtgtttgtaacactttgatccattgactatgagttatcggaaaagaagatctgttgaacaaaaggcaattgataggttttttaggacttgtgttttaccttttacggataagataaaatgaattgattataagaagtttgaaatacgaagaagaccggcaaagtaaagaactaaagataaccaaacaaatggggacaggaacaaaacatcaacaattataacaacgcgtttttgacattacttcatttttaatttatcagaaaagcgatgtatatgtttaactacacacacctataccttcttcacgcgttttctgcaatttctttacttttttgttatttaaagactacgattgtctttttttccacactaattcaatctcttttttattttaaattaaatatatatatacatttttgcagttattttgtgaaataaatcctatagttgagatttatttacaatggatatatacatttttgcagttattttgtgaaataaatcttatagttgggacttatttacaatggctgccattagtttttaattattgatttttttctatcaataaattgattaacaaactaaaaatattccaaatatattcagcaactatttaaaacaaaaaatgtttgacaaacaaaaatataattgcaatcccttaaaatgaacaaaacacacctaaatacattctttatctatccaataaatcttttttctccaaaatttgaactagattttggcaactatttaaaacaaatatttgtttgacaaaccaaaatacaattgcaatcccgtaaaatatttattttcattatatatttaaattagcggtgtaccgcggttttttttacgggacggatttggcgagacgggtttgataggacgtcacttaataacaattgtaaactataaaataaaaataaatagatttaatttgtaaacttttatatatactaatttaaaaaataagttgtccccgcagtataccgcgggttaaaatctagtcgtacatatttatccttcatttatcatggttcatacacttaaatggattctgtcaatcacggctttttctacgtttaccttgtattaggtgagatcctctggatcttaattcgtcatatagagattattcatttagagatgtacattcctaagatttaagatcataatatgtacctaagtatagtgttcaaatgtaaatatgtgtatatatttttgctcagtgtaaaatctactttttaaatgtgattattgttcaatccaataagactacaaatatttttacaatagtcatgtttctctataaaatcgatgctttcttctttgagacgtccccttttaattcacttcctccaaaaagtaaaggattaaaacctagactccccgggtgtatacgcgtgcaaaagaaagaccaacttccg

SEQ ID NO: 25732 - DNA, 801 bp, Arabidopsis thaliana landsberg
actcaaggaggtggccaagtgactactgcgtaagctttagcttctctcttacactcttgagtaccatttgcattgactctaaagtacaccagttgaatatggagtacaagtatgcatattgctataatcacagagtcactagtgaatcaaaatgcaaccttgaatctgatgtatataggtggttgctaaaacctgaaaggttgttgtggtcaggactttgtctagtactttagaggaaacttgtcagagatggctatgattctggtgaattgcttgcttgatctttaattgctttcttaactacaccattgaccatttcaagtccaatctggtcaccattgaatagtaccctggtctctcttttggtacgataggcttgcacttatgctacgcttatgttagctctagtaaggggagatctctaagaaaatgtaaaactggattaaattagattctcactttctcatcacccaaagtactaaatctgtaggcatgagtgttgcctccgataatttgcatgtgtttaagctctgagatagattcgtcaatgtatgtggactctctttagtcatcatttgcacttaagatatttgtctgttttacttcagctgattcactcggttgctatgatagtgcgaatatagagaagcataacaatgcggaatcttaaagcttttgcgtatttctccaagtgtgcaatttggatatttttattgccatcgtttccacattaaagctcagaaacacttgctgatttccatctcgtgtgtgttctgttgcagatggacagcaatcacacag

SEQ ID NO: 25733 - DNA, 1147 bp, Arabidopsis thaliana landsberg
ctaaagaggaaatgaatgttttcgataatagtaatgactaaaaaggaaatgaatgttttgacaaaaaaaaaaaaaagagaggaaatgaatgtttacatgtacgtgcacatgagtttaaaaataataagtttgaggaaacacaagtgcgttagaaaaaaagcaaacagatattttcttttgacttacgattatgaaattgaaaaaaaaatggatctgaagataaattttgattggttcacaaacttcacatgataaacaagaagatttttcttttttgaacaaatcttttgataccttaaagaggaagatttttgatatcaaaatgaataaaaaaacaaaacagagaaaattttgtttttgattcgttttgatacctttatgaggaagtaacatacttatattcaaaatgaatcaatgaatcaacattgtaattaattaaatttttaacagaccgcttgactaattaaacaagttaagattataatatttcaacgcattattgtatagtactttggtgatttgcatgtaaagttttttttttttaacaaagacttttcttaatttgctataatcaagtgccattatttagatcgagagagaatttatggcggctgaataagagaggacgacgcatgtatctgtatctcgaggtgtagaatcaatatacgacacgccgctataaattccacagaagatatcatataatattagtatataaagaatagggttgattctgagaaagaggtctaagtgttccattgaatcagcatatctcaagggaagaagacgagagcttgggtgcgccggcaaagggctcgctactagactgcgacacaacaataccaaacatcgaattaataaaaacacacaacatttaacggattaatggtgacggaatggaaactgtttgatttagctgatgtattcatgttcttcttcactttctttctcttcatactcatcacccatcactctttctctagcctttctcgcctgccaatatcattcaatacacatcactttcactttcctaaacccactagccaatttatttgaccataacataaatcaacatattaaagtacatcactttcacttaacgaacctgttttttccaattagtgaggataacgataaggacccgggc

SEQ ID NO: 25734 - DNA, 1315 bp, Arabidopsis thaliana landsberg
  unsure (1)..(1315): unsure at all n locations
tagcctggaagccataagaatagctctatctccttcttgtctctcattcccaagagccagtggatgtgttgttgtagttccgttccgtggctgtctttgtttatcatcgtttaatctcaacctcttaaatcggcagccatggcggttcctcatccttcttcttcctcctctagatctcatcctttcctctcccatgtctatcacactagcttccatcattatcatcatcataatcatccatcgcttgtgctcttctggtgcctcgagttttctctattatctcctctcgctctctcatcatcatcttcgtcttcttcttcttcctcagactcgtcgtcatcatcgacctcccatatctctttagggaaatgcggattctttctctatctattttatcaatcgaatcttaatattttcacttcttaaaaaagtgattttgattccggaacattctctcattcgttagattctgtgtagctacatctctttactctgttttttaccaatttgattacatttgtaacaattgtcgaaataggaatcggtgaaacagannnnnnnnnnnnnnnnnnnnnnnnnnnnnncctaagggacgaagctgtagcaagattacacgagcttggacaggtattcatcaacccaacaaaaaaaaaattcaaattgcttagctttcacttatactctgtttttaagattgtactcttcaatctgtaatttaatgtcaaatctatacacttttataccttcttatgacatatgccttggaatgtttgttttctcgtttgaccaacatgattaataacctcgtttgatggtgtcgttatctctcagggttgctcttaatttaatcaatactttaaaaattcttttctagctgtttcaatctaatgtttcttccagctactgttatcttaaaagtgaatacttctttattgaacatctcttagattctcatatctgagtttgttttggtttgatttctttacaggtgagtgatgcagctacccacttagagaggacttttatgagtccagcatccataagagcaatacctcttatccgtggatggatggaagatgccggtttatcaacgttagttttttttttacatgtactctctttttgttttatggactcatatacaaaactctcttgagtagatgaagaattggatattctttttttgcagatgggttgattacatgggaaatgtacatggtcgagtgcaccctaagaatggaagttcccaggctcttctaattggttcccatatggaaggtaattcacaattctgtttttattacctgttgttgtg

SEQ ID NO: 25735 - DNA, 1590 bp, Arabidopsis thaliana landsberg
caaatgctacattgttcatttggtttcttcttgattatgtttcctttgcatcggctcttaactggtttatgattccgtatagtctcaccctgaatctatggttccttataaagtctagaagatacatatgatctgtagagtttggagaactaggcaaaattcttctcagttttcatatctttctatctaaaatctgttttggtatataatgctactattttaggttgcactggagactgagttctttacagaatacggtgaagctagccgataccaaatccaagaagttatagggaaaggaagttacggtgttgtggcatctgcaatcgacacacattcaggcgaaaaggttgccattaagaaaatcaatgatgtgtttgagcacgtctctgatgcaacgcggattctaagagagatcaagcttctcaggttgctccgccatcctgatatagtggagataaagcatgtaatgcttcctccttcacgccgtgagttcagagacatttatgttgttttcgagttgatggaatcagatcttcaccaagttatcaaggcgaacgatgatcttacacctgagcactaccagtttttcctctaccagcttcttcgtggtctgaagttcatacacacaggcgagtgccttggcttgagaaattcgtgtttccttttgtccattactgcttttcaaactcaatctgatggaaaacttttttatttgatacagctaatgtgtttcatcgtgatttgaagcctaaaaatattctagccaactctgattgcaagttgaagatttgcgactttgggcttgctcgagtgtcctttaatgatgcccctaccgctattttttggactgtgagtcatttatcaccaagactgtgaaagcttaagttgcattagggtaacattctgtttaagtgcttgtggactcactcttactaactctgttttaataggattatgttgctactcggtggtaccgtgcccctgaactctgtggatcatttttctcaaaagtaagcttataactctcagaagattggacttctattactgtttaatttcttttagtctcatttttcttccaatcctttgatatctcttagaatatgatgtatgcctttcgagtccacttttgtataaaggcctgctctagttagctatctacatctgtgcaggataaggtttgattacagatctcatgctaactctacttttgcgcaatacagtatacccctgcgattgatatttggagcgttggttgcatatttgctgaaatgcttttagggaagccgctatttcctggcaaaaatgtggttcaccaattggatattatgaccgattttcttggcactccaccacctgaagccatatcaaaggtcagttatactattccagatgcttgttttagttttttcacagtttaaaactttgaattatagctctctttcttctgtggaagaagaaaaaaaaagattattcattagttgaaaaatattggatcaagcaactttgagttgcattgtaaatgaatatgctatcttcaaattgacagatcagaaatgataaggcgaggagatatcttggcaacat

SEQ ID NO: 25736 - DNA, 1609 bp, Arabidopsis thaliana landsberg
ggcttccatgtttgtttagataaatcttgtcttccaatttttcaggtgttgatcccaaagcgaaactaatgggttacacaagaactgatcctttccataaggaatgtatagaaacagcaacaagaattgtttggtttcagattctgaggtcagctaagttaaatgagcttgctagtgtcttgccagcaagactcgagattcaatggtacaaagaccgttgtgatgcatcagaagagcatgcagctaggttactacgatttcttcaaacgatattcgttgaagagagacttcaaagtgaacataagtcgcataagactagctaagttttgggacaaagtgattaaaatggtggagacgaatgagttaccttctgattttcatttaggaaagaatcaaagaaatgaatttacgcatctcaacattccttatgggaaaaagaactacttctgcaacaactatagttctcttcttatgttgggccttatacaaaaacacttcaacagtttgagccttgaacataaccgatggcccagttgacaaaatataaacccatttagcaaataaaaaaatggaaaacataatttacagaaaaaaagaatgagataatatcaaattgatttcggaaaaaggaaaaaggaaaattagcagattggtaattaagtttggctataaataataattagagaataaagaaaattgagttgaaacgaagtaattagagaagaaagaaagagacgaagaagatgatgatgattccaaggatggttaagaacaaaacccctgctccggttcaaatcacggcggagcaggttttgaaggaggcgagagagagagaggacagtcgcatcctgcggccgcctaaacagaagatcacagattcggatgagcttgccgagtacagactccgacgtcggaaggagtttgaggacaagatccgcggcgcaaaaacgaactcacaagtttgggtgaggtatgctgattgggaagagtctcagaaggatcacgatcgtgctcggagcgtgtgggaacgagctttggaagacgagggttgcaggaaccatacgctctggctcaagtacgcagagttcgagatgaggaacaaagacgtcaaccatgcgaggaacgtttgggatcgagccgtgaagattcttcctcacgtggaccagttttggtataagtatattcacatggaggagatacttggtaatcgacggagctagaaagatggatgaagatggaagaattaggatttcgaaatcaaacaatggaagaagatgataaaattagagatttctgaactaaacttagagaaaaggatctaagatgatgtggaagatagaagaatttgggatttcaattagctatggaagaagagggaagaagatgattgaattagggatttcaaaattgaattggggattttgctgtttcattttatatgaaacgacgtcgttttcgattttaacagaaacaattaacgtaattaacgtctgcttacggcgggtatcagatctgttaatgccagttaacgtttcgggaattttggcctagtcaacattttgatttgtgttaaatggcgggtcaacgtttttatcatattttatttgac

SEQ ID NO: 25737 - DNA, 754 bp, Arabidopsis thaliana landsberg
  unsure (1)..(754): unsure at all n locations
tctatcatgtatgaagtaaagacatgttctgcatagcttctgttcatgcttgttttggatagtatctactttgtggattgtgctaaaacttgcaggtgtggaccaaggaagagacagatcagttgtttgaattctgtcaaaattttgatctccgctttgttgtaatagctgatcgatttccagtatcacggactgtggaggaattgaaggatcgttactacagtggtatgttggactattatacgttcacttataccttttcctttcatttgttttcatctttgatctctctgtttctatatcatgttgcaccagggttcattaaaaaaatacaaggactgagaattctcttacgtactttcttttgtagtaaaccgggccctgctgcgtgctagagctcagtctccagcagatgttgcaaaccatcctctcatgaaggtcaaattccacttatatctcttcatagcaaactaagaactcttatgttcatttatatgtagtttttgtagcaatctctnnnnnnnnnnnnnnnnnnnnnnnnnntttctctaaatgctttttttccaatgtattggcataaacaggaaccatatgatattacacgcgatagagagcgcaagcgggcattgtccatggtcctatcccagagtagacatcaggagaagaaagatgctgaggttattttctatataatttggaaggaactggcacccaaaaaaaggagatgagttttttggttttttttacctatcct

SEQ ID NO: 25738 - DNA, 1063 bp, Arabidopsis thaliana landsberg
atctcgttaatgtaggtaccttaagaacatggaatgcttctatttggatactcttgcttgactcctgtaattcaagcgattgagtttatttcccaaactattataatcaagaacaaaaaaacggagagtaaagcatcgtactcttagaagattcatgagaatcctcaagttatccctcgagctcacatatttcgtcatcacagctgaatttgatcgatccaataatatatcacccaacaactgtttaacatttacaccatacagtacataagattgatcagccagtaccatcatttcaatgttttagattcttgtataagttagcctaccttaatagcttgccgtctggttatataattacttgattcaagaagctttgagttgtagtctgcgaaaaactgcaaaccaaaaagtttgagattattatacgacttgaacgcaggacctgcagaggataaattacaatgttctgtcttcaagcatatatcatagtgcattgttgctacataacttacccagtcttcattcttggtgagaaactcggcaacagtagacttatgccttgtcagcagttcctgtgaaaataaatgacaggtttggagttatgattgcatgtttactagtcccagacagggaaagatccaagctaaaaatgcgagttttgttttggaaccttaaaagtagcagcagcatcggcagcaatgtcgaaatttggaagctgtatgtaatcaaagaatttcttcacatggtcagactccaaaacatatctgaatccaaagaaattaagttagtaaacacattttccgttattctctgaatccataattactccataggttgtaaaatgaagaaaatgaaacgattggctcacttagccacaatctgatgacggatacactccctaaacatagcaccatagtgtaaagccatgtctgtgttctcgaagctgacacaaaacatggaaagctataaaaatgataaaatgaggtccaccatctcttaatttggaaaaacgtaccaaaagataacttcaatgatagtaacacacaagactcacccttca

SEQ ID NO: 25739 - DNA, 1536 bp, Arabidopsis thaliana landsberg
ttaaatacattcattaagttacaattgaaataataatgtagacataattaactaataaaaaccagcagaaaatcttaatttatagtaattattaatttacaaaaaacctaaaggtgtatatttaaccaattatattcaataaaagatatatcatatccaattataccatcatttcatcatattagatattattaatcatattaaaccatatagaaatgatatgtaataaagtttagttgcagtatggtttttcgtggtaagtttttttcccatacctaaaaataatatttaattattttaaaaatctcaaactttttttttttttttttaaaaaaaactcaaacttatgctcttcgtaaagaagttccgattctttagacccataatttatcggagtcagatatcaaaaacaaggttaatgaatcctccctgcgctctctactccctctttgagaggttacagaatgttcaacaattaaagctagtggattagagtttttagatttgacttccgattatgattatcagtcttgaaatacataagagagtatatagtttgaagaatcgatagataacttttattgataaacttagattataatgcgattgtaaatattattacaaacattcacatttttgaaggagtaggttgcagaatcctcccctgttacactgtaaagtacagtcgatgtccctcttgcaagatggggctttgttcaaagtgtcattctcatcgatgataccgtactgtggacttgcggctttaccttcaacaattacgtcagcaactccggccagctttcttgcttctgctccaagatcttctcatccatcatttgcataaacaaaatggctttaaggttagaaatttccatccactaataaaagttctaaaagttaatacgatcaagatcaaaccaaaattttgctcgttggtaaatgttattttccaccaaaaatgaatcaaaacctagaaatgaattatccactacgctcttaaaacttgtcaaattgcaaaacaatataattattacttaaaaagattcaggattgaatatgttttcacgatattttagatattcagttagtatgattttcatatgtttttacttcttgtttctgtcacttgtaacaaaaacaacttcctacacctatttttttggttttattcctacaattgttgacaaacaaaaaaataaacttactagatgtgatgaccaaaatgaagatcaagagtgggagcttgagagaagcgttcttcatcattttcaaatttttagaatgggagctttggatttttcaatgtttagtctcgtgaaaaagtttgctatgtatgcgtagtctttagccatacatttataatgtggcaaattaattgttcaggctgtttcccagatctggtcatgagtggagatgtttacttacctgatatcatgggtgaaccacgtctcatagagtgacactgagaccttattgattgatcccaatgctaaacattatctgtgatgctggtctcctgtataaagatgcaaagac

SEQ ID NO: 25740 - DNA, 1705 bp, Arabidopsis thaliana landsberg
cagcccatcgaacgttctcttctgaatcttcatcgtccaagaccctgatctgatcggcctaagcaatttctgctcggggaagagggagctgcggatcgtttccttctgttcggtacgtcgtgtcccgatttcccaagattgtcgactctgctcggtctcttccaatttccggcgcggttcggcggatgggcctcgtcgtgttgccaggcgtgtggaacacgagtcgtgttgggttgagatctgctgccgttcgtcgatcgtgaagatgcctcgcgccgaaacgagtagtcctgacctgtccttggaaggtagctgcttcgagttgttgcgccaaagattgattcgcctgttcttgatcgtttaccttcttctgaagttgagccatcatacttcttaattctgctaggaccgcaagagcggtggcttcaggaacgtttgtctggtttggagggatcgggtttccctttgcgtcaactgtgttatcggggatctgattgttgaccattgtggattggttggtttgttctgtgttctgggagtaagagaaatctcaatttcccctccttttagcgctaaattgtgagagccaaaactcgcacaagagaaattgtactaagggtttcttcaaagaacggatctatgtgagattctcaaagaacaacagaattgttgattaccgcggacggtgttcttggttatattattgaaataatgaggattcgatcgtacaagtgtttagaaatatggaaaataagtgttttgccttcaaaatcagagcgtttttgatagcctgaaattgagagcgtttttgtgcgtgtcccctttattgttcccttgaagcactttatatagggttttggtgaaccgcccctcgcgatattcttgggagattcattgttatcttagaggcggtggtgatttttctttatcttctgtagattttcgcgggatcttctccctatcgataatgtccttaaagatttcccaatatcatttccggggttttcggaaatggtatcttgatcttgcgtcgggtctgagtcttttcctcgggtttaaggtgctttggccttggtacgaagtttcttccgagtcgggtgcctcttgtcggcctgtagctagacggctcattttgcgcgagctaaatcgtttacccgatgtgcttctgaggttcgcctcggggtggtttcctgagagcacccgaggcgttcctaaggtcgggtcggaaggttacttgcagcgaccccgaggtgttttcaaggctggctcgggatgtttctccgatgcgatttccgagatatttgtcatcggcctggagtgtgcgtcctaaaatgatacccgagccgaagtatctgaaagattggttttcgaggcgttctcggaaattgcttggttggctcggtttctacgagaccaaatccgaccccaacaatagatactccttcaatttcattataattgtattttaaggtttcttcacacagattacaaaggaaacacaaaaatctcatttaatttatctcttttctataaaaacatcattaacattacacctattttaactaataagaaagtatgctgtaaagtataattgtccaaaaattattaaatacatttactttttgcatagataaataaaaacaatacttattttacaaaaaagaaaaaaaaaattaaactacaaatataataaagagaggaagta

SEQ ID NO: 25741 - DNA, 1701 bp, Arabidopsis thaliana landsberg
actaggttcccggttatgccagctgaatgtaaagggacagagacgcataagttactactcttgagggttttaatgaatttatgctatcattattatttgaattatgcttgttcaagagattgatatatgtattgtttgttggcccatgatgtttatgctatatttgggccaagaattacatgttataattcatatatgtattgattagctatgtattttcatatgttatgatctacttacaagttttattctttaacgtggtaaaagtgcatttggtattaactaacataaacgtgattattattaactattattgagcggccgctttttctctaatttctatgtaagacacatgaacagaagaaactagtcccttcctcacatgcctgctttgcgagactgtttaaaatttacacattttaaaattataaattatgtcttttcgaaatccattgttaccctaacactgttaacataactttttacgcatgtatccttacgttatcgtttttgtcagttgtagagtataagcgaattattgcatgttgtaggattctaagattgtattgggatattgcgttcgggagttttttttttttttttaatatgttttcttctctcctgctaacgaacagtcatgtgctttcattactatataaaggagagagattgcgattgaggcagaagaacataacccttgtctaaaaaatttcttgtgttatctgggttgattgtcaatcgatatcatttccttccgattagagggttcttcattcgttttgggtaattgattttagtctcctctctttgattttgtttcttcatttgttttatctcgctgtgtcttattagggtttttcactttgtgtagacgatggcttcgattccacttcctccccggttaatagctctcggcgaagaacctcgtggtgaaagggttaatgtttaccagaagatgaaaaccctctgcggtatattcaacgctctcgatgacgatgaacgacaatacctttctcggtctcctttcgctagactgttggagttccccaacaatcctgcttggtctgctagttttgggatttttattttgggtaggcagttggaggtgactaagcctaacgagatttgggtactattcgcgggtacacctattcggttttctctgagggagttcaagatcgtcactggattgccctgcggtaggtatccgagtttgaagatgaagaagaaaaaaggcactgcgggaaagacgattcctttcaacagtaagttgtttggccttgaggaggatgtaaccgttgatagggttattacaatgttgaagaggagggttgtttcagatcctggtatgaggatccaatgtgcttgctttgccatttttgatgggtttcttgtccctatatctcactatcccaagattattaaatcccacgccaaaatggttgaagatgtggatgcctttcttgcttatccttggggcgttacacgtttgagatgatgattaagtcgataaaagagagggaaatcgaacaattggcaagtacgtgttttgttgttcagggattgttgtatgctttgcaattggtcgttttacaagccgctccagccattcaagatagtcctgttatcgacaaccatattgattccgattcgaaaggtgccgaaaacgatgtttaagtggccacccgagagtcagtaccc

SEQ ID NO: 25742 - DNA, 1065 bp, Arabidopsis thaliana landsberg
gataaggatcgtggaagaggaataacaagaaagagaaattgagaatttaaaacataaatattgaattaagagtaaaaaagtctttaaaaaaatgaattagtagaaaaagtgtctattccctataaagtgcctcaaacggaaaaacattttctaaaagtgtctaatattggaacattaatcgcatcacagtataataagacgtccaatttttggtcttatcatatgcccatacttattaataaggaaattttggtcttataatattgcaaaaactgatttttctttgtttactattcatccctatcacaattcacaacattaacaaaaactttctaatggatttttcttcaactctagaacattgcaattccttttcaaatctagaatatcaaataccgtttaaaagacaaaactatcagttaatgatgtcacaaattactcaaaaaattaacactctcttaataagaagaagacttgtattttaataataagaagacctcgtgtgaaacgagatcaattacaactttatgtattagactttttgacaaattcacaacggtcatcaaatggaaacaaacaaaacgaaggctcctcttcagtctctcaacggtcacttgcttagaagctgcgactacgaccagcaaaaatactcatccaatgaatacgacgacgtatagaacctaacggtcgttttaaattctttaagattcagtttttcatttaatttaaaaaggagaagaaaaaaaaagtgagtcatcaatgaaacacttctttaacacagatacgttacccacatgcccaattattagcattcgtttccttttagacgtgtttttgacttcatttgaaatgtctgttttaacctcacagagcaaacccaattaatcgcttacttcatcggtttagctattttagactgtgaatgaccgttttaccctccaacattctcttttgtactatctgctgagtattattgaattttattctacgttacaaagggcccttcttcttatttgcaatactcctctttctgtttatgatagtctactagacataattttgttt

SEQ ID NO: 25743 - DNA, 4466 bp, Arabidopsis thaliana landsberg
  unsure (1)..(4466): unsure at all n locations
ctactgcagatcttactattattctttttattaattcatcagtatattttattattttttcttgattgtttatccgattgatcttgtaagagataacttttgattattacataacttacttcaacatgttaaatgacacaataaaatagacaatttatttttgatatccttttgaaaaatattaaataaatatttgtaatgactatgtgttgcactaaaaaatcgagataaccccatgagtgataatttggtaacataatctaaacttagagacaattaactaattaagttattatctgagaaataaattagacaatatttttattcgtgtgtgtaatttttgtggtataatattttttcttatattgtttcaattctacggatgttttggataaaaaggttaatcaaatttataaaatgtaaaattttgcttgaacaaatgaaccaaaatgtttactaattggctaattgctggaaaaaaacagttatataatttttgttaacaaaaaaaatgtttgatgtaaataattaattcacagctaaaagtcaatttcctcatttatttttgattaaagaaagtaataaaaaacaattaagtataccattcgctgtacaagagtcgtttagttctgtcggctcgacaaccgactcaagccggctcgagtcgctaagtgaatccactcgctgtctgtcggtggacaaagccggctccaatctgatcactctctctcaccagcacacacacagctctctctcttccctctctctctcctccgctttatactttgttgagtcaaaatcacagacgaagaagaagaagaaacctctctctcactcctctctcctttctctcgtcttattcgcttctcttctacgtaacagattgttcatcttcttctccttgttgcattgaggtgagttcaatttgatctatcaatgtctaaatgcatgctttttgaattatcggatctcttgtgtttgatttcattgatagagatccaattatgatctagatctgaagaatcctgttttttgagttcctattggttaaaaagtttcctcatttagctttagttcgaatctggaatgttaaacgattcggatcgagatttagcagtagtagaattcagttaggtagagtgatatttttatactattagtcttcaattataattgcattgagcttttcctacttcactgtatcgttttctattgtaaagattgatcctttttatatattatgcagggggtgttgttgatgttctgacgatctgatttgagtagatctgggtagggggcaaggtctctgggtctacttttgatttgagaattttttaagtgaagtgaagatatgacaagtgctcttggatggagatttccttccactaatggaaatggccctgccccaagtgacacggtaataattacttgattcagtattaacattcatcacacgggtttatggaaaagcttgtttagttgatatactgcaatctttctgagttgcaaagtcagatctggtgtattagcaggatgattaagctgatatgtcccttgcattttgaatctgatttgaaaaaagtacttgagctaagtccattgttaattaatggctttgtaccagtcagttatatctgatagagtgtcatgataaaggttatagtttttccattgcataggagcgaaaaggtcttgttgctcttttaacttattttctgttgtttggtcttgattgcaggagagaaatggggatatgaagatgcatgattcagagcccccaactccacattcaaccacaaagatgagtttgaggtaacgcatatatgtatttggtactgcatgggagctaatcatcgtgataaaattgaggttttatcagtatttgttgcaccaccatcttggtttaacaatgcctgtggaaattaatattatctggattggtttcctatgttatcctttcaaatgagacattttaagcagaaaggcacacctattagcgaattagtatctaactttccccatcccctgcagagaccggacaaccagcatggaagatccagatgggacattagcaagtgttgcccaatgcattgagcagctgcgccaaggttcatcatctgcacaagaaagagaatattgtctgaagcagttactggaccttatagaaatgcgtgagaatgcattcagtgctgtcggatcacactcccaagctgtgccagtacttgtctctcttctccgatcgggatcagttggagtgaagatacaagctgcaaccgtcttgggttcactctgcaaggagaacgaacttagagttaaggtgttacttgggggatgcattcctccattgcttggtcttctcaagtccagttcagtcgaagggcagatcgctgcagcaaagacaatctatgctgtttctgaaggtggggttaaagaccatgttggatcaaaaatattttccactgagggagttgtaccggttctgtgggaccaattgcgcagtggaaataagaaaggagaggttgatggtttgttaactggtgcacttaagaacctttctagtaccacagagggattttggtctgagacaattcgagctgggggagtggatgtacttgtgaagctgctcacaagcgggcagtcaagtacactatctaatgtctgcttccttcttgcgtgtatgatgatggaagacgcctctgtttgttccagtgtattgactgcagacattacaaaacagcttctcaaattattaggatcgggtaatgaagccccagtgagggcagaggctgctgctgctctcaagtcgctttctgctcaatctaaggaagcaaagcgggaaatcgctaattctaatggtattcctgttttaataaatgcaacaatagctccatctaaagaattcatgcaaggtgaatatgcgcaagcattacaagaaaatgcaatgtgtgcccttgctaatatttccggtggtttgtcatatgtcatatcaagccttggtcagagccttgaatcttgctcttcgcctgctcagactgccgacacccttggggctttagcttcagcattgatgatatatgatggcaaggcagaaactacaagagcatcagatccattggtcgttgaacagactctgctgaagcagtttaagcctcgtctaccattcttggtgcaagaacgtacaattgaagcacttgcaagtttgtatgggaattccatactctctgtcaaactttccaactcggatgcaaaacgtttgcttgttggtctaataacgatggcggtgaatgaggttcaagatgagcttgtaaaggctcttctgatgctgtgtatccatgaaggtagcctgtggcaagcactacagggccgtgaagggatccaattgctaatatctcttttgggtctttcatccgaacagcagcaagaatgtgctgttgcacttctttgccttttgtctaacgaaaatgatgaaagcaagtgggccatcactgctgctggaggtatacctccacttgttcaaattctagagactgggtcggccaaagccagggaagactctgcaactatccttaggaacttgtgcaatcatagcgaagatatacgtgcttgtgttgaaagtgctgatgctgtccctgctctcttatggctactaaagaatggtagtccaaatggtaaagaaattgccgccaagacattgaatcatttgattcataaatcagatactgcaactatcagtcagcttactgctttgctgaccagtgatctacctgagtctaaaatttacgttttggatgcattgaagagtatgctttctgtggtcccattcaatgacatgctacgtgaaggcagtgcttccaatgatgctattgagacaatgatcaagttgatgagctctggtaaagaagaaactcaagcaaattcagcatcagctcttgcagctatcttccagagcagaaaggatttgcgtgagagtgctctagccctcaaaactctcttgtcggccataaaactgttaaatgtggattctgagaggatccttgttgagttttgccgctgccttgctgcaatcttactttcaattaaggagaatcgcaatgtggccatttttgccagagaagcattgcctaccatagtatctctagccaactcttctgttctagaagttgctgagcaaggaatgtgcgctttggctaatcttatattggacagtgaagtgtcagagaagnnnnnnnnnnnnnnnnnnnnnnnnnnnnnnnnnnnnnnnnnnnnnnnnnnnnnngtgtctgggaagacacttgctgctgcggcaattgcccgcctccttagtcgtcgccgaattgattctgcattgacagattctgtgaaccgagctggaacagtgctcgccttagtgtctcttctagaatctgccgataaaagatctgatgcaatatcagaggccctagatgcgcttgctatattctcgaggt

SEQ ID NO: 25744 - DNA, 1064 bp, Arabidopsis thaliana landsberg
tcttcttttttttttactcttaaatgttgtctgcctttgccattgtcatcttggcatgagtttccgtaatttagtatgcacattactctaaagttcatcttactatattgtatgatttcgcaaaatccggactcttgatctataaaagatccctctaatcccctgaccatcgtttctatacatcccatttacttgttataaaccagaaacaatgaagtattttttgttcaatgcgaagaacatatgagcaaaacatcattagaaaaaagagtacagactaatgccattttactctttttctacttttcacgatggtacaaattatatcaaggataatacactatataaaatcaagctattactaatacactttactgatgaaacaaacaaaaaaaatatcacaaaaaaaggacgttaaagttttagatccaacctcttctttttatgacatatcgaaaacaagaaaaattatagcaaaattactattattatggtgttatacttcaaacatactatttttatttctaaaatgcactagttttcaatattttgaaaagtgctaaaaatttgaaaacaaatggagcccggattgggttttttttttttttaatcttaaaattatataaggttcgtggcattttaaaattcttaaaaataagacctagcaatgaaatgttacgttcacattaaggggtattaaggagaatagacacaaaggcgaacaaattcagttagtaggaaatcatctttttgacctttttttgtgcctcaaaaactcctcagtcttcatacttaccatataacgccttgatgatagtattagattaattttaatcaaaccattaatattacctttactaataacaaaactcgttttagtaatactattactttatgtgaatgtaaacacattcatttaccaccttgccgcccctatgtgaaaagaaagattcatgggaacactcacatgactttgttccttttcattttttcttcataactaataaattattatttcttccaaaatattgttgtaattactctgagttcctacaaaaagcaat

SEQ ID NO: 25745 - DNA, 1302 bp, Arabidopsis thaliana landsberg
tacatttacttttgtttaggcccactaatgcaaaacatattataatttccaaatctcgaagtgcgtggtggtggatagtatttagcatacatttacttttgtctaggagcattagatcattagatagattatcatatctcgtctgaatcttagattaatgtttttgagtataagaaaccgatgttgtaatttgtgaagtacaagttatcaacgttgtttgatggtgtgatgtccacgtattgtttggtattaataaatgctttttctctagcctgaaatcacacccaaaagaatcatatattcatttcatgttttatttgttaaagtagcactagctagcacattatagattataatggaagttatacaaatttgtacttacatttttaaataattttatggagactgaggaggctgatgatgaagactacccctagttaccctagttagtatggtcgacgaccaaatttgtttttacattatacaatgtcgtttatcaaattatacataaaatgtagtttttatacataacataaactctagttgttcatggatataaatagaatgatattatttatagataggtacatgagtatacacacatcattttaaacatactatcttacaatatttgtcacatagtgtagtagtgacattaactactgtagcacaactaatccatattttttttttaccattttcttacacgtgagcgtcttgatcaacatagctatttgatagaagagtacatttattagtttactaacaagtacaacgtttaaaactggctatattcttaaacataattatcaaaaatttgatgtcgtccattaaatacaccctttaaattaaggatcatcggttcgatgtcaaatactaaagatttcgaaatctttaccacaaaaaagtttcgagaagtcttcttcgactttataacagatgaagatgggaccaaaatggtttttaataacctctacttctcaactaccgataagcaacaacgattcacaaaagtcaaacattccaaaattacatttacacttcagattttctcttccagatttcggtttgcttctagaacatccactgatccacattacccaaactattacaattctcatttattctcaagcacaaaattgcaaaaaggtcacatgttggttagaacttagaacaacactatataaagaactagtaaattggtaggttgaaatgatgaatgaatatataatttactcttaacacgaattattacttgattttgcgttcatactcacgaaaaagacataaaagtcaacgcgt

SEQ ID NO: 25746 - DNA, 894 bp, Arabidopsis thaliana landsberg
atttattattagttaatggtacacgaaaatctaattctacgatattacccaatcttccacattaacaacttatatgttgcttgccttttttctttaaactcaagacattcaataacaacacttataaattcatactaatacagttttttcatacttaccggcaacggaaagtttaataaaatgtatgcttatgaggcaaatattagccacccaatacttagaaaagctttaacaactaattcgacagtgtaatgattttaggttctgatcaggcctctccaccattcaatttaactgcggcgctgtgtaggactccacatgacatcaattagttggaataagaattcatataatgtaaaaattactataaactatgttcctttacaaaatgctactaatgtaattgtgtgttcttttttaatttgctgctttttccgaagttgtactaattagtattgctcaaagaacatgaaagtcaattaatcatatgcattctcaattttgtcatctaattaattcgatagtctaaatgaaaagaaaataattaaaagtttgggtgaagactgaagatgacaaaatactaagatatattaattagttttcaaataaatgtcattttagagtaataattatgtttttgtttgtcaaatttttactcttgctattttaatgtactttcgataaggatctttatccattgcccctaagtaaaattaataatagtgtaacatataatacattgatacaagtacaaaatgaattttattttttagacttaatcaaatatttaaatgagtcgtgtaaaaatgacacttcatatgaaatgaaaacaaaataaaaaatgtgcatggattacattactcttattggagattttgatatgaatctgatatc

SEQ ID NO: 25747 - DNA, 2258 bp, Arabidopsis thaliana landsberg
ctgcatcatagatattctcttaacaatgtgagttatattcacaaagagacttcaagtcttgaagtttcagaaataactaattataacttattttatctaataacacattcgtataagaattgctttatacaactttttaaatctttagtagtcaaagattgaacataatcttctggatatgtcacttattatccatgtgagattcattacttctcctcctcgaaatgatgaaacttcaagttcatccatctcgtttttaattccactctagaatcataatgtattttatatctcatcatattaactttaagatttggagaattataccgcatcgatgattttaattttgtattcccatagaaaacaatgtatatgctcttctagactcttttaataagattttatactacttgatatactagattatttcatcattagaaatttttcttattatttttttttttttttaccatatttattttctaaacttctggtgataatttaatttcttgaaaaaactttgaccatcaaaaatatgatatcttcttaagatacattaaactagtcattcatgaaaatttatataagtgattatacctttaaattaagttatttatcaatcaatttatttcataaaataatcaagtattatataacaatataattttaatgcaatattgtaaaaccaatcagaataaaactattttgtgaaaaatccggattttacatatatcttgacaaaacttttatttacttcaagacttatatttacttcaaaacatatattttacatatattttacatatatcttgaaaaatccggattttacatatatcttgacaaaacttttatttacctttaaatatgaattcgtgcaagatttgggtaaaatgatttcgtgcaaaattagggcaaaaccatgaacaattttagggcaaaattagggcaaaaccgtgaaaaattatcttgcaacgtttttagtaaaaataataataacacaatcaaatatatggaaatcaaatatttaatatggaaaagtcaatatctaaaagtgataagatatgtataacgttttaatcaaaggagttaaataagagatatcatatcaatcataaatggattttagacaatataatatttataaaatgatattgaatatagatgaaactatttaaaactggaatgctaaaacattaatacatgcttgcatcacccaccaccgggctatgaatagttacaaaattagttatataattataaaattggtaatttatatattcaatattgtaatagtaaatcacaaaaattaataattaacaagcatgattctcttctttaacgattttctttgtagaatcattgaatcatgcaatagtaattataaaaacaaatgataagcatgattctcttctttattgaatcattgaaaacatgcttttaccgatctatactataatcatcgatcgactcatattgttttgtttcaataatagaaaataagtactatgaaccataagtcgataagtaaacatggttcttaaaaaaatgtaagaatctctatatctatcttttagagcatgctgataacgtgttataaccagagaaagagatagaagaaatgagtgtgttattccattgagaaaatggttgtttatataggagtacaaggaaaaggtaaaccttagaaacatctagatgatgggcttagatgatgggtcttataatgggcatccatctttattcataacattcaaaacattttaaaggagacaggtcaaacaaaccctcaccttttccaaaaacatgtaaaaaactctcaacttttttggtgggtttttaaaccccgtcttttttaaaatggtagaataacacctatgattattaaaattaatttaaataagacaaaatattatataaatatataaataaataaataaaagtaatttggtttaaaatttgtttttctaaattctgttctataatttatatttttccaaattaaagtttttttaattttgttgaaaataattacatgaaaccgtaatttcatacctatttgagatatagtaaaacggttcattaccattaaaataattgttatgtaaacaatttaaatttggctcagacaattggtttcataataaagatagggatacatccggaatctattcacattttgttttattttggttggagcgtagttttgattaatttttttggataaaaaatattatttttgtgatgtagaatattttttt

SEQ ID NO: 25748 - DNA, 1796 bp, Arabidopsis thaliana landsberg
  unsure (1)..(1796): unsure at all n locations
tgattttttgaagactgtgggtaaactactaactcttgaaatgtgaaactcacatgtaagtcctgtttcggtaattaatctctaaattttaatcttatgtaaccctacgttaatagacccaaaaatattttttaacttgagtaaatcgaaattcataactcatattactagattataatctcatatcatattcctaatttttattgtattttttctgtttctcttattgccatttatctgaaattttctttttaatttattttctcttatggttttgtcgtgattcaggagtagtaattaattcacgtcatgcgcgatgtaatatgaatttaaaaatgctatctcagtccatgagaagtagtaattgtgttgtgcgtattggtttgaagtagtccaccaagagatcaataaatgcaaagctagtagctctgacctatcttttgtgttgtcttattacactcttgattgttttctcctttgccatgtctatacagtatacactattattctgtcttattgttcaatatatgagctacataacacatttgatataaacaacatgcatgattagtttacattagatagaaaacataagttgtgacatgatccaggactttggtatcctagtggcatgtccgcatgtgttgcaatctcttaaaactctcaaacagcaactacaacatattctacatagtctctagatttgtttgggtcaaccatatagtctcgaatttaaacgtcaaattcacagtacgtatatggttcttaaccactatatgccaattattatcactaaccctttcaattatactgtatttgaaacccgaatcttatattaaccttagcgttttaggcttaattttattgttgactttcgaactgttaacatacttttatgggtgtatatatatgacttatgctacaaccaacttttgatcctttaacttctagcataagtccatgactgtagtttccaatggatatgcttagaatcccgttgacatatattttgagtgaagaattagatgatggacaatataaaagtatttaagccttttaacaaaaatataaaaatatatttttaaaaaatcctgttaataaattcttttacgggaatgaccaatcaaaatatatgtgggcttattgttccacgaaccaggatgaaacacatcagatgaaaaatcattcaaaggttttgcgaaagttctttttatctaactaggatttcggatggtttgcctaaaataacataatagaagaaaatatgggcgttacgtatcaggaaaatattatcacaaaacaacatatcaagaattcattacttttaaaacagaaatagtaaggttagaaaatattcaaaaagagtgcatgtcttttaaagttgttgggtcggtcttatagattgcgcatgtcctgtatctctcccaaacattgtggaccggtctatgtatttgtgaaaggaaatatgccaacttttactagtctctctctcgcatgtgtgtgagtgaaatagttttaatatttcaaatttatttccaaaacaattcttacaaggattatcaactgcgcagcttaaaaaatccaattatactcaactagtattatcactctatagttcagaatacttttcttcaaaatatgaaatatatataaacataatnnntatgntttttatattatttaatggaagacaatcatgggattaagaccttaacgtgtgaaacataagaatatatgattatcgaaggttgagatctatgtatgcttttcaggaccaaatgaattatacatcctca

SEQ ID NO: 25749 - DNA, 904 bp, Arabidopsis thaliana landsberg
ttattaaattcaaatctaattgatttttatatagatacgttatccagtttgatctggtttggtcgaatgtggctcggtttgtatacttacgcatccttagctttatctactacatagtttgacttcagaaatttgtgcaggttcaatggaatgtttgtcatgcgttgagcaatttattctccaatgagacagtaaaactgcaagatatggattggtaagcatcctttagctttctattacccaagctgcttctctcggtgacctctaataacttctatctttttcttttgcagggctccaagtgtttttagtatcttactattgctacttcgtgatgcatcaaactttaagataagaatacaagctgcttccgctttagctgtcccagcaaccccacttggtgactttgattctctatccctctctctctctaaccatgtagctatattaatttggagaatagaatttgtttgtcttatattgtatgtgttttgggattgtacagtttggctgatatctttctcgcacattatgtaattgcagcttatgggagatcattccctgatgttgtcaaaggtgtagagcatactttacaaagtctccattctgacagagagacgactgcagcaaatttcaaatataagaggtcgcttgagaatcaggtaacatgatgttggcgtaattttaggtattgatgaatgatttatcttaaacgcagttgctcgttgcagttaacgtcaaccatgctgcatctcctgagcctagtttcaagctgtcatttcgaagcgttgtcagaatttcttataagagtaagaaactggcagctattattgttaatacaactggtttcatcgcttgatttaaaggattagtgactcgtattgtcttgtggtgtcgcatgaaa

SEQ ID NO: 25750 - DNA, 1021 bp, Arabidopsis thaliana landsberg
agacctaaggtttaggtatgggaaatcttgcaactgttttttgtgtgttccactaggaaaagacaaaacaaaagattgattgattagcctttaattgatgtgtttgtttgttattgttgtgacttgtgacgatgatacaaaaatcaaaagaaataataatcactcatccaaataggaaagttccaccgttaaagtggtgaagacgacataagaatcaatgagaagaattggttagttgcccgaataggaaatttccaccatttctagtggatcacctttcttttaatcatagacttttatatttgtttgtgtaattaaaagtcaatgggatggtaacaacttacataaagtaaaatttcaagcaatttacataattttcattcaatgatttcattcttctttctaatagcatgcgttgatagccgaacaagttgatgacaagtgtcttttaatctaacccacaaagctaccatctgaattatctatggttaaatgatcagttacaaataattcacttcgctaattacatcaaaagatttggtagagacaaatcattcagagaaagtaaccatcatgatcatgcattgggtctttgttgggctgcttaaagctcgtaatgaagctctgtcaattgctcttggggcttaattttattttggaaacggcttagtattatagtgaagaaaatttatatggaatgtaatgtaattttcaactccttaatatgaggataaccatgtgagtttcttcgtctatctgaacactttttaagcatagtttgcagagtttttaatgtttatgtttatatttaaattgatacccatttattaattacaggtcatctatttctactgctgtgacactcttttgacttcatcttcgtcttagcacattgcatcacatgccttgatgtctaaactataaaatgactttgaatcatcattacatttgatatttgcacttaatgtcttcctcgaagttaatggactttggcctaacatggattataatgataatgata

SEQ ID NO: 25751 - DNA, 1364 bp, Arabidopsis thaliana landsberg
  unsure (1)..(1364): unsure at all n locations
tcctcttccttcgttatcacccctctcttttcttctccatcccctgtttttccatagacgaacaggttctagctctcctctcatggaaatctcagttgaacatctccggagacgctttatcttcttggaaagcctccgaatcgaatccttgtcaatgggtgggaatcaaatgcaacgaaagaggtcaagtctcggagatacaactccaagtcatggattttcaaggtccgttaccggcgacgaatctccgacagataaagtctctgactttgctcagcttaacctccgtgaatctcactggttcaatccctaaggagcttggagacttgtcggagctagaagttcttgatttagctgataattctctctctggtgaaatccctgtggatatcttcaagctcaagaaactaaagattctgtctctcaacacaaataatctcgaaggtgtgattccatcggagttannnnnnnnnnnnnnnnnnnnnnnnnnnnnnctcttcgacaataaactcgccggagagattcctagaaccatcggagaactcaagaatctagaaatcttccgtgcaggtggtaacaagaatctcagaggagagcttccttgggagattggtaactgcgagagtcttgtgactttaggtctcgccgaaacaagtctctccggtagacttccggcgtcgatcggaaacctgaaaaaggttcagacaatagctctttacacgtcactcttgtctggtccaatccctgatgagattggaaactgcacagagcttcaaaacctctacttgtaccaaaactcaatctctggatcgattcctgtatcaatgggacgtctcaagaagcttcaaagtcttctcttatggcaaaacaatctcgtcggaaagatccctaccgagctaggcacctgtccggagcttttcctcgtcgatttatcggaaaatctcctcaccggaaacatcccaagaagcttcggaaaccttccaaatctccaagagcttcagctaagtgttaaccagctctccggtacaatccctgaagaactcgcgaattgcacgaagttgacgcatttagagatcgataacaaccaaatctccggcgagattccgccgttgatcgggaaattaacaagcttgacgatgttctttgcgtggcagaatcagttgaccggaataattccagagtctctttctcaatgtcaagagcttcaagcgattgatctctactacaacaatctctatggttcgatacctaatggaatctttgagattcgaaacctcacgagagctgttcttgtctcgaactacttatctggattcataccaccggatattgggatactgacgaatctttaccggttttgactc

SEQ ID NO: 25752 - DNA, 1188 bp, Arabidopsis thaliana landsberg
ccctttcctagttactacttatagagtgcgtgagtaagcgttttttagaagaacaatattttctatgttcttgttgggatataattttgtttaatcataattaaattcgcattcagtggaatacacatgatctcatacacaacagcttaattcttcatactaatattgaaaagggcaaccgggttcaaattgatgtgacaaacagtgtttacaaattgattattatattgggggaaacattaaatgaaaatataacaatcaacgttgtccgtcgacatattttacaaaaaaaacataaaacgcttgaacacgacctaacccaaatgcaggattctttatgactcttgcatcatcatcatctcttatctaatgtttctgcaagtctaacgccacaactctgtatctttcaagtttcaacccgctgcacctctcttctcccttgctggcaaagttctcaacttccatcatagactcatagttgcttctttcactaatcttcttgcccctttgtccttctcttctatccttctttttctttttttgcatcaacaagctccttttattagtagtatatgtaatatatattgtacatagatgtttcatatgtgatgatatttggtggaccggtccaagagtttgtttgtactttcagaaaagcatcattatttttgtctttttgatgtgaagccgaaaaggaagaactgaattatttattatttttaatgtattaaagagtttccgagttaggcccaaaagatcaatgtcttaagttaggcccaacatttcatgtttctgtcaaagatccctttgccgtaagtggagaagatcatttccttgaggagaggatactgaagcagaacaaacaacagcgccggtaaacaagcaaaaaggatcgtcggagcaacgatccatttcccttctttacccatcatcgtgaatagcgccgacgagaatgctataagcatcgccgctattgaaacgaacagtatcgaaagtccggcaatcatctttgtcggcagaaagaccaagaaatcgtcgaaggagtatcttgcggttagtatcccgaggaagatgaggacggaggtgcaagaggcgaagcaggagatcaaatctgagacgatgaatatgatgaatcgccgatcatgtaggtgaaagggtttaccttttgaattgtcgtctgtgccacca

SEQ ID NO: 25753 - DNA, 2527 bp, Arabidopsis thaliana landsberg
  unsure (1)..(2527): unsure at all n locations
ttgcactaagcagaagttccaagataaacatgataacattgctagatggaccatcgactttgctacattacatttaattctatagttgttaaggaattttgggcttaacttaaaagtacaaagagggtcttttattattagcacatggatcccattaaacattgagccgggcctggttataagcagaacatttggagctaattttagtagaatatttaaaaataatggactaatatcaaatattttcttgatccgtatcatcaatttataaatggtgtaatctgtcacgataagctggttgtgtcggtaaggtcaatgactgtcggaaaaatactaaaatattttacgatcttgcatcaaggaagtttacaaacttgtgccgtttgatatttcaatctttcgtcttttaccaacaaaaaactcaaagcagatctaatggaccaacaaagcgagagagtgaagcaattctgcaatcatccgttaagatacgcaagaattaagcaggagggagtaattacaggttggtcaaataactgcgatggatgcggtgatgattcangctaccgatattactgtgaacgctgcaatattcaagctcatgtggcttgcataggttggccagacatcatcaaccatccgtgtcactccaaacatcctctcaagaaagtcttggccgagacaattgactatacagatggtaactgtcatttttgtcgaagcccacttgatgaggtgatgtatcattgttccatatgtaatatcagcatagatttaagctgttggatatatcccccaccacttactatttatcaaccaaagagccacaaccatacattcaccctcatggcgagaaaggactctttcacttgtaacgcgtgtgggttggttggtgaccgtaatccttacgtttgtcttgaatgtgatttcatgctacacaaagattgtatcgatttgcccagagtcataaacataaatcgtcatgaccaccgcgtctctcgcacttaccatctcggtcagggtgattgggaatgcggagtttgtcgcaaacagatagattggacctttggaggttactcttgcaagcgttgtcctagttatgctgttcattcaaaatgtgcaacaaggggtgatgtgtgggagggagaagaactagaagatgagcctgaagaggaagaaattgaagatccatacaaggtaattaatgaaaaagaaatccttcatttcagtcatgaacataatttaagacttggtgatgataatgctgctgataattaaaagatgctgtgcgacgcttgcatcactcccatcagttctgatccattcttcaaatgtgtgcaatgcgagttcttccttcataaagtatgtgctagtcttccacggaggaaacgaaatatcatgcacaccgagaagcttgatctacaagttacgaaggctggcgagtataataagtgtatatcttgtagaaaaatatttgatggcttccggtactgttcaaggtttgaaaagtttgatgtgcggtgcggctccatttccgagccttttcaccatgaactgcatccccatcccttataccacattttgtcagcagccgaaaaacttaagctttgtggagcctgtggtaaatatttacactatgtcttaagttgtactgtttgtgagtttaatttaggcatggattgtgccactttaccaagaaaagtgagacacagatgcgacgctcatgatttatcgctgcatcatggagctgaaaactccagcggtcaattgtggtgtgatatttgtgagggaaaaacagatccgagtgtatggttttatggatgtgatgattgtgggaatacactccatatcaactgtgtacttggagacatgtattacttcaagccaggcaatagatacggcaaagctgaagtagttgccaatgttggtatgactagacctttttgtgtagtttgtggaaagcgttgcattttctcttcctttcttaaggctactactgctttagatttaagtgctttagatccagctgcttcagattcaactgttctatgctcttgttcaattgaatgtgcctacgaacgcggcccttaccgagatgccgagccgaagtggtattatgaaagtcaacgttgaggatgtttgaaaggtccacatgacactaaaaagtgccaaaacgggggagtggggaactctcgaaactcctatcttcagaaaacgagaagttatattgcttcatagcttcttttatctttaccttttctttcttattttttattcggatttttatgtgaagtgttgtgattcttcgacgatcttccgtaatttggattctaatcctatctgaacttgtatgataacatagattttcttccatataatacatttttctttttcttcaatataatacactgttcttttctttgtgaataatcagtttttcagtagctgagttcagtatccaatttgtacaggctatattatgcgcgggactatgtcctaatattgtagagggattagttaatcgtttatc

SEQ ID NO: 25754 - DNA, 561 bp, Arabidopsis thaliana landsberg
gctctaagaactgtgctttttagatcagtatcatatttcaactggtagtcttcgtcatgcagtatgtgtgaagcttcatctattaaacaaaaatagtgtcagcattataattcattagtaagtacccatcagagatagataattatatctcatcttactagcaaatcttccttctcggacactttcttttaaccaacttggtgatactatccacgccctgcaagcaagtatgatggaccataaaccgcgtcattcctatgattttacgcataagttcacaatggctaatatgatgcctgtatatttgagactaacccagagcaaagagcagtgcagagattcagagttttcctgacttttccggtgacaatatgcgtgctcgttgtgccatccaaggtcacagtaccaccaagttttcttattacctgcatagaaatcagaagacaacgtaaggtggatacaaaacccatttaaaacccaaacaactcagaaagatttatatacctaaaataaacaagctctcttgttttcatcacaaatgtccatcaacaagattctgta

SEQ ID NO: 25755 - DNA, 1053 bp, Arabidopsis thaliana landsberg
tttgttttttgcaaataataggtcagatttgagtattaagagccacatctcatttaaaaatgtcattcaaatgtgtcttggcgtcttggctaatttaaattttgtgtaatcaatctatttgaatttctttattttcctgacgaataagtttctcacaaatgggagagtccattcgtgaaaaataaacatggaaccagcaagagacctggtatgaaaaacaaatatatattttgtgaacagaaaaaaaaaaaacattatctaaaaactctcatgaggggacatgacacattcctcttttaatttgttttcttggtcaactccaatttaagtaaacgttttaatataatataaccaaatatgaaagtcatccaagctatcccatgagggccaaatgtggcgtgaacatttctaaaactgtttacttataccatgagttaggcaactttttagccaaatcatatattaaaggatgttgacatcattatataaaaattcaaaacaaaattcaagggctgaaaagaaaaggtttaagcattcaaatattgacaagtataattttacataagattaacatatatgtagaggtttatgcaaacaattaagaaatatttacaatgcaaatgacaataagatttagattcacataaaagtacaattctgttaatattgcattacacaaatacaaatcaaataaatttatatgagatttgctaagaatctatcaattaaacaattcacttgtatttcttgctagagttattctccctaaaccaatcaagccaattacgtaaaacccacaaaatactaaccaaaatagcaaacccaatcacaacaagccacgataaccaagcccaccgtggaaccactccatccgccgcaccgctaccgtaaaacgtcgccatatcatacaaaaccaccggaccagccaatccacgaaccacagtataaaaaagataaaacggcggagacaaaagctctctcactctcctcgctaacgcgacgtcgtttgttttatacccggtgatcgtgcagacgttgtgacacgcgctcgtc

SEQ ID NO: 25756 - DNA, 1640 bp, Arabidopsis thaliana landsberg
ttaataaacgctgatataaagttttaataagcgggatctccaaatacttattccgccaaataccgcttagtcattttcgagaacaaaagccaaacacaagacaactttttgaaaaccctaagaaagaagactctctcagtcctcagccgtctgtccgatgaactcactattccggccaccgattaaaccctccgttgcctctccgtcgccgccgtgaaagctctccgtgcaactgaaacctccgctggcactcaatccgctctatgtctgtccacttcgagatcgaatcgaaggcaagtcattttctatgatatcccttcccctttgacactcaatttgttactctagatctgcttctatcaatctttgagactcaataatcgatgtttatgtgattgtagtttggttttcttcctcgattcttaaaatttagtcgaatttgcatgcctttgttatttgttccagtaatgtttttgtgggttgcttttggtgcatgtgaacaattttgtattcgaaattttgtttttatttgggcatttgagttgcaaaattttggattatagcactgaaattgtgaaaaaaaaattgggtgataaaacttgagaatttcattgtcattgattaagcttcttctgttgtctgaatcatgttgttattgtcacatcgatttagttcttttgttatgtcaaactatcattgattcattttcttgaatatataacattttgctcattcaataactttgttttgcatttgttgttgagtggaataatgggactttgaagcttgtcatttgctcttttcacagcatagctgcaagttagtaccatcctctcttaaatgagtgtgatttattaccacgtctcttgtgtttcactactattgagtgttgtttgtcttgtggctatcatgtttttcactttcatttgttcaaaacataccacttatagctaagttagtacttatcttgtttgatattgaattattgagattgttttgattgacctattatataactatgagttatatagttaaagtaatcttttgttaactatggtatggtacttagggtacttaaaggtttataatacggttataatataatataataagaaattacataggtataagtttcagtacacgtttggatactttactttctttctttttttctttttttacctttaaattatgcgttaaagagctgatcctgcttatgagagaggagctacaaagtttgtacaagatgtggctgccgctttgggagacgtagatatgattatatgtctttgcattgattatcgcaatatagatcgtcactcaaccaatgtagttgtagatcatcttgtaataaggggaatggatgaggcatataagatgcagggtgactggtataatcatggagaattgaattcaagggttgagagtgataccaaactaagtcagtgtaaagatgaagtatttgggttctatcaaggtgctaaatttctagatgaagagtttgcttctaaggcctacttgagtgagattgcagagtgtgatgacaagaaagaagatgagttccttgcaaagcttgcagatgctgaaacgccgttatatccaagttgtgtaaaccaagcaagttgcggctattaatctct

SEQ ID NO: 25757 - DNA, 1778 bp, Arabidopsis thaliana landsberg
gcctgaacgtcaatggcctatcagtggtatcaggttctctccaaatggaccagttatccatcaccttctattcttatatgacagtctgtttatgtgtaaagcggatagaaatgaggtggctgtgattaagaatatcttcaagatttacggtgatgctacagggcaaagaatcaattttgacaagtccaatatcacctttggagctaacgtggaggaagagagtaaagtctggatcaaatcagagacgggaatcaccaatgagttatttcatgttatttcattacttacgtttttttttctcttgagttatttccaattatcacttccgtttttgagaagtatgctattttgaagaattgacgataataaacaagttttttataatagaaaattttgactttcaagataaagtagatacatgcatgctcttactaaattttttttttacagaaataattccaagtctcctacattaatatagttacaaagtaaaatgaattatatacacatatttgaaaaaaacgggtactgaaaacaaaataatctaaacgggtacatgataatacagggttttgttttgaagatggacatgttctatcttctcaagaaaataatccttgaagatatatgtttcaatcgatatagctttagtatgcaaatttttcgttgtttctaatgaagatattagttccccaacgatttaactttgatatatatttaaatttttcgttgtttgtaatgaaaaatattagttctccatcgatatagctttgataatatgcaaattaacgtcgtcatcactgaaatgaaggtgcttaattaagaatacacttaataatttaattaaatcttgtgatcgcgtgcgtccaagctcttattggctccaaatgtcaactctttccccctctctcttgtttttctccatctcatcattattcttttgtggaggtaatcaaaaaataagaagtttgaaatggataatccagtgaccattcttgttacatgtattaaaactcgcaataatgtcattgtaaaatctacatgtatacattcattgatagcctatcttttaaaaatcaagtcacggatacttagaagattcgacagttcgacacccatcgtaatcacacattacatttgtgtgagtgtagtgttccactgacctccgtacgttctgttttaatagtccagcacctgttgtgggtatatatgtatgtgtacatagatatttggccatatatatatatatacatatatgttttcctcatataagatattagagtagttcggtaaaaaaagaagtatggcaccaaacaaattacgtgtctgaaaatagaaacttaaccgaattcttaacctaatgaaggaataggtgggaagttttgttttattcatataagtttagacatgaatttaacaaaaaaagagtttggacatgcaaaataaaaacctaatcacttgaaaaatcagaatacaaaacatcacatattgtttagtgatgaaataaagaacgtcgtcgacgcatctatatccataaacagaggagaggttatagattctatgagttggtaatatagatatatatttgctttgatatggttggactacaatttggtagttgtacttggtagatcaccaacatttcgaaggacaaatcacgattaagatatagacatgcatgagcatgactcatagaatcccaaaaaatggtgatttggatgtaacagagaaagagagacaaagaaagtttaaataattgaaaaaagaagaataagtga

SEQ ID NO: 25758 - DNA, 2740 bp, Arabidopsis thaliana landsberg
gggatgttgagctctgaaaactgcaagatatctgttgggattgttcatgaacctattcaagttcctttaaatttggtcaagtgattgatgaaaacaagaaattgaagatttttgttttgtattcgagatattcttcatgcaattatgtaagatgtctaaagatgaatggttcatgcacgttaagtgatttcttttttttgtatacgtaattaagggatctccttcggaggagcgtctagctaccacggaagcttaatgggctcatttttcgtatcacttctttaattaagtctcttgttcttcgataatgaataatagcataatattactctagtgatccatccaattataaagagaatgtaaaggatggtataagttaagcatgtaaaccattccgcattggattaacctgtttgcatgttgatcaatttcgcacacacatttataaataaattcaggtttaagtgggacgtaaattcggtaacttgttaatcacgttttagtggctaaattttaaatgcttcttcccatgtgtttccatgttatatatctttagtcactataaaatggtgaaacacaaacaaaacgtgaaaacgctggtaaacaatcatggttatgaatatttagttaccgtaacattgaaaatcaaatctaaacgcaaaataaacaatcgtagccataatttgaaatagtctaacagttgatattaaactttttacggatttaaaagactggtttcttcgtcggtttggaaaagatcttcagttttcctaacagctgcatgagacaacacagccaaggcacctgccacgatggcctcctgcgatattgagcttcgcatcagttaaaaaaaggatggaaagagtgataacagacatgattataagtacgatacggtgtcaatctcgcggtcaaaaacagtgagcggttcatcacggaggaagtagaggaagagccatgcaccgagtagggcgagtagaactaagagggagaagggattccaaatcaggctgagaaatacggagaagaggacgacaatggtgtaattggtctggaaatagaccgtgttggctctgattctagtgatcacggtggctagtttgcgggggaagttgaaggaaccgaggtctagcatttgcttccaagggcggcgcgtggcgaggccggatcttttgtgttggttgatgccacgggtgacgtactccagcttgggggctaagtcgttagacgacttctgattggtgccatatgttgtcatattgtttttctcctttgtgatatgggagagagattaattatttttgctataagtgtgatgtgtttgtggtatgtgaagagaaaagcattacatgactgagaggttttatagagttttgtatttgctataacaaaaaaaaaaatttgaacatcttgtatagtatataaaaatgtgaaatatgggataacattgaaaatacctaaaattacgggacacacttttgaatccaattgttcagaatcagaacacatccacataagtcatgagtcatgactgactttaatttagatttcatttccaaactaatgtttcacttcactttttaattttctatcatgtaattttcaaactgattgtgttattcacgtcgcacatgttattgccatttttgtttatcatttgtaaaatgtattggattggcttgctaatcgatattgatgttcttatctataagataaaacgtgagggaattaacagagtcataaaaacgacgtgagaaaaaaccacaatatacagtatataagaataagtgtgtctagagttacaaaacgacgaggtgaaaggggccaacgggaggaagaacaggccacgttggcgttgtctaaatttaaaactgaaaagaggtgacaccaatgagaaggtgccagatgggaactgtaataagaagagaacgaggagaaaactgcaaaactcatgaaaggccagaccagaaagagatgagacttgcctgcccaagttattttttcttgcaattattgaaaaaatgaacatggctctcctttaagcccaccactccaacttggaaaccttgaattctgaatctttttattattaaccaataaataatacatatatgagtcatatatgtactaaaaatgataaatctcattcagtgtatgatacatacaaatctttgtagaaaggtataggctcttgataagtaattgtatggattatgatgtttggtttcagatgtgagtgtatgaaaactggccgtaaggtcaggagatggagtatatttagttcaattattggacatgtagacattctacattagcacctgcgtatcgctcttgaattataccattttagtactcttgtatagcgtaagctaagttttgggttgagatgacaaaaaaataataggaaaccacaaaaggaaagcgttaaatatattgggcctattgcacggcccattcaataactaataaaccgacgtgtactagtaacatcgaatcatcatcttctccgttaagactttgggttttaatctgctcggacgccgctttatttttcagaccaaacctacgaacttagttgtcaacgccgtcaagcaagcgacaaggctcaacatctgctataatctctttctctgcaccagttaacttccctaagatggctccaaacgctactggagtcttgaagaggcacaggtgccatgagaaattcgactagaaacgagatacgaagaagcacatacat

SEQ ID NO: 25759 - DNA, 395 bp, Arabidopsis thaliana landsberg
  unsure (1)..(395): unsure at all n locations
tgctcatgctttttccaaaattgagctaagtatccagagagatttcgcggctgcggttctgatgcatgattctagcaagaaacaggtcatgagctctggcgaatttgttaccagaaaagttctaggagctgttcctcatgatattggtttgaacgatccttggtttgaacttaatgcttataacttgttcaacacggataggtggaaagacttgaactccaagtttgttctnnnnnnnnnnnnnnnnnnnnnnnnnnntggtgacctaaactttgcgaaagcggtttggccgtcggtttacactgcaatcgcctacttggaccagtttgataaagacggagacgggatgattgaaaacgaagggtttccagatcagacttatgacgcgtggtctt

SEQ ID NO: 25760 - DNA, 1054 bp, Arabidopsis thaliana landsberg
ttagtattgtcacataagcagcagcttatcttcaagtaggaagattccatgtcgattatggattcatcagcttccactccattatctgcttcttcatagctattattgttgcagcttctgttggttggttgtccacagaggagacgattacctaagtagctttctgcatcaaaggtgttaaactgtcttccctgtggaatgactcctgataagttgttctgtgagactttgaatacagagaggctggtcagctctgttagttgtgatgggatccggccttgtaatctgttgaaagaaagatcaaagctttccattttctccattcttgaaatgctgtttggtatcactcctgatatgttgttgtgagaaagatttagagctcgtagttccaaaagacctccaagctctactggtatctcaccactcagctcattttctgagagatccattccaaacaataatttgagatttccacccatgtaggcatcatacctgtgctttgttgcaaattcaattttcgtctgggagttggtttcattgaccatattaaattcatctatcatgagtagagattcaaaatatacaggatccttagctgtgccaaatcttgaagggacatcatatctataagaatcatcccctttcctcaaaccaaatgatgtattgctaagacatgatggtatcgatccattgaatttgttgttggaaagatccagaagttggatgttacttagactgcagaactggtgaggaatctgtcctgtaaaattgttcccccgcaaaagaagaatactgatgttttgggtgttgatgaactccggaagattcccagacagtcggttatttctcagatcaagtacaataacattcagtagtagtgtgtctggaataacccctgataaattattgttttggaggagtaacactgccccatgatatatggaacttacgtgcggaggtatatccccagataacctgtttgaagaaaggtccagtagctgaagataggatatgttgaacaaggaagtaggtatttcaccttccaacatgttgt

SEQ ID NO: 25761 - DNA, 722 bp, Arabidopsis thaliana landsberg
aggcatgcgtgtgtcatagacgacgtattgtactactagggtacgacccagtcatttacaagttatatgcttatgaattccaaaagaaaagtgttggaaagtggtaaagggtgtggaaggattgctgagaatattctcatggtcatgcgtgacgagtcactgtgaaaagttggtattgttctatattatcgaggagccatgtttacacagttggtaccaatttacatgatcaaatgtatacaaaccatgtgtgccacgcagatgactgtgtctagtagcatagaaaaaacttgtgtgtaccccttgattgtgtcgaataaaacagaaagctcaaagtttacatgaattactaaattgtttctctttaaaatccttaaattatgtaccatatatgcatatgggattaagatcattactacgcaataatcgaagtctaattcagggagactaatccaagtaattcacaatcttgattaagagatcattggtagttagaagtttcagtgcataacagtttctcaattggtcaatgtatttactttattgtttcggtcatctccacaaggtcgtcaaaccatatacagatatactataaagtagtataacacaaccaattccataaatctcttttctcaatatgaaaaacgaactagattaactacaaatcaacaagagtttggattaaaacaaaaacaaaggagatttgggaaagaagaaagttt

SEQ ID NO: 25762 - DNA, 809 bp, Arabidopsis thaliana landsberg
tgctcgttagtcattacagtgtctttttgttgctggagggttgaatctgggatttgtagcttttgatttttgtttggtcggagaataaatcacgagacttattagacttgttaagcttgtccgtgtgctaaagagtgttttctgaggaatgtcctgcactgcccgtatcacgggaacaacgtgcattttgcttattgcttctgtctgaagcagttttcttcttaagattagtttgaaacattacttaatctctccgtgttttccggaatttcagagagtctttgttcttcatctggcaatgccaatctaaaaggagtaggtgaaaaaagattcaatttttgtatgcctatcaattagaaaggagaagaggggaggtggttagattggtttcaatgggtgagacgcagaagattttgcaagggccacgtcaccacacatctctgaagaagcccttatgggttgttttgacagtctcagtgaccagcatgcttctaatctgtactcacatgtatccaaaacatggcaagagctcctcgtgtcacggcctctatagcaccagaggctgtgaggatgctctctctaagtggctacctgttcatgtcaggaaattcactgatgaggagatagcagctcgagcagtggttagagacatactaagaacgccttccttcataaccaataactcctaaatcgcgttcttgttcttgactcccggtactttgccatttgagaagctttgggatgaatttttcaaggcaacaaacaccttgacgaaatttgcaaacttctagctccatttcattgatttt

SEQ ID NO: 25763 - DNA, 1588 bp, Arabidopsis thaliana landsberg
gtactcagggctttgtcccatgttgttttaggtgaggaagcgacaatattttgttgcttctgttcaaaggtggtacccaaagaagagaaccaagactagagctgcgggagggaaggccctccgctaaaaactttttactatctatttggggaggagtttttgcctcccatggtttgtaataataatactctgcactcgtatattatgttctggtctgtaaatatttaactatgtcttacttttaaaaaaagtaagttattataactgcttccacacttccgcatctccgatgatttgtaatatccgcgtgatgggtaaaacgctcttggggaggtaaggaattcagataccgagcttgtcaagtgattaggtgcacctgcagggttgtctgaggtccgttggacaaggacaactgtaggtgggcctaataacttgggaggtccgtcacacttagggtagtggtggtggtggaatacaaattatgaagcgtcttaccgcgctcttacaacgttcttaccagcactgcaggtggcaaacggtgaccggtgtgactgtccaatgagcgtgggtgtgattgcaaggagtacctgttctgctcgagagaaagctggagttctgggaaggctgactaaatatatatatgtgcacacaagtcagtaacagatagcaatgctgaataagtgttccaagtactcgtcctagttgctggcctagaaaatgtaatagaacagttggaccaaagcacaagaaaggaggtataagtatctagtggaaatggcagttctgtaaatatggtagatttttcagcactagtagaaatcaaaggtgcgtttcaaaaggagtaccatcaaaagagctcgaaatattctgcattttttaccactgatccaaaaacacaaaggatggaagcacacaaagtttcacttgaaacagagttgtattgtggcctagagaaattcacaaaggacctctgaaattcgtgaaaacacttaaacaatttttttaattatcttcccgattttttttgaattttttgaccgaaccaaacacgcgtaggcaagtttgggtcaccccagaatggagtcaagaatctgctgtaaaaatttgagctcaaacggagcaccgagcgaaaagttatgcccgttttatggaaggtacctcaagttatggttttcaaagccacaaattggcaggaaccctagcggcggctcgggagcataggggcacaaacctccctggtataagcaataggtaagcgccagatgatgaaacaaggaggggctatgatgcaaggcggcttgcaatctaatctagggctagcgtggcgagagttcacacaaggcggctagcgagggcaaatcaagtaatgtggtgtctcgacttttaatctgggaaaggtggatgggatagcggcgaaaacaaataacaatgacggagcggttgaactatgatgatgacacgacctaaaccagcaacaagactcgaacacggacacaaattcaacaaatcaatctaaaacgaaattgcaaggctaaacagggttttaggacagtgccaattttttttatatggcaattatctgaagtta

SEQ ID NO: 25764 - DNA, 1728 bp, Arabidopsis thaliana landsberg
ttccaaagggttttatttttgttaaatgaaacttttctgaaggcttatggtttgcatcaagagaaatcattgtgaacatattacataccaatcgaaatataacgtatgaaaaatacaataatgttaaatcattctttctctggaaatgaataaatgaaagtgttagttattaattagaatatgtgaacagataatttgtaaataaaagtatcaaataagcgatctgcctaattgttctgtatattatataaaaaaagtatatatataactacaataagttgagctataagagacataggtgtctctcctaaacacatggggccatataggtcccaagaaaaatgcagatagaattgttggaaaacaaatgcatatttgttttagatatgacaatcgtctacctttaaatcgttaatcagatggctttttgaccaaatcagctcctttaattatggaaattgcggtgtatttctcgggagatcttcttttccaatttaaaaagaggtatcttttattgaaagcaagttttacaacactcaaatatttaatacaagagcctaaacttaaattttctataaccaaatgtatgcaaaacattacgattttttctgcgtgaggtcctcacatgcacgatactaaaaacgaataggtcacttattttttcacgttaaatcttaaaacaacgagtatacacgatcgcagttttttttatttgacagcactaagatagatgtttaatgggctgaattttagggaatcactgaaacctaaccttggaaaaagatgaacagagttttgagaaataataacaaaataaagagaaaagaagaaacggaagagagcacatgggtggtgtgtgcagaaggaaattaaaatagtaactgaaaaataagaattttgtttgagagtgtcacaagctcttcctgaccacaagtcctgcccttctttgtactcttcagtacattgatgtttccaaagtccgtgattgacgcactttaactacacctatgctctgcaggtagagagacacgaattgacacatcttgaagtgttctttcaaatatgtctttagcaaaaataaaaaatttgccaattaacattaaaatccaaaaaaattaaaacttaacttaaaatatttttagagatagatatttgtaactaataaaatcaaaagtgataaaataaggacatgaaaatatatgtaattgttaagtcgacaataatctaaggattttcttaaaaagatgttgagtcattgctccataactcgaatctcatttgggggagatgattgacgtgggcaacgaatattgaactcctagaaacagcagtttatggggatgcgaagaagacttccggtctttttttttgtgaaaatctattgcagtttacatatctatattatatttgggtttatcttttggagctcaaaaattatcaccatcacttttcctaactcgaaggaccaatggttatgacttcatatagtgtgggtgtgtgtaactgactaacttattgtgggtgtgagttttgtgatagtgagaattagttagcatgcggttagccacacaaaaatactatgtttgacacgtccggtcttaattcacttcaattttcttcttctttccaaaaccattaattaaagatcaggccatactaaaacataaatagatccgagtcacagattttgaatccacttttaacatccctaaagaggtgtatacatat

SEQ ID NO: 25765 - DNA, 977 bp, Arabidopsis thaliana landsberg
tgggcaatccctggctgcgtgagtttcttgtaatagcactccaataagtgttttttttaatagatatgccatggctaccaagagatatacaccagtgtggagtgacatcaagagtcgtccataaaccagactcgaaatcatagatttcataccattctaactcaggtccatggaagaaataatctataaacctcaataatttgtggctacgacatgagatattacccacgtatccaagagcgtaactgaacctttcgcatccgattaggtggtgggaatacctgggttcgacccaccttgttagcccccaatacggattccaaaccacaagcctagtatcttttttttaatatgcacaacattaagccctcaaaatgaatgacttgagatatctctacttgatctgaattgtttaaccaagtaagtttacctttacactctatatacggatcaccatcgacaacaacgctaatcaaataaagattgtaatccatcaacaatatcatctgggactccccttccttggttgttgttgcttctttaccaaagtgtagcttggaaaagctcttacatttagataaagtataaaacgttttgcaagttaatcgcactgctctcatatatttccgaggaactctagagataatttcctctaccaaatccgttggaagatttgacaacatcgtcgtcgtcgtcatcttcataagttgaaacaaggaacaatcaccaccagatccaacattgactacaatcaccttgaggttatcaagtaaaagagcaaatgcccttgacctaacaccaacacccttggctttgacgttaagctcaagtcccaaaagttgtatgtattctccagacccatctgctacaaacttaacatgcttggtctcagggtatgacttttctcatgcctttgtcacagatggggcattccctgcaaccaatcaatgcaaacgattgcgtcaatacactaaacg

SEQ ID NO: 25766 - DNA, 3587 bp, Arabidopsis thaliana landsberg
tccacaataattgtgagcagatgggaaaggtatggtgcaataaataagaagaatttcaacattggtcgtataactattatgacggtttcccaaattataactataagtctataatcataaccacacccttttttataatagaagtattttaaagccttttttcgttttgaattttttatatgtttgattttttattttttaataaatttttaagtaaatcaatcaacgtgttttcttttttgtgcctcgtgtacttgctttctcatcaatgccctttgactcataattcattgggcagttcatgcgtttttaattccatgattttttatatttgcatcgtcacctagcatttgatcattgcttgcatgttataatttacaagttgtacaaaaacatctatgagtttaatgtgtttacgcgcgtacatgtcaaaaaataacgtatcgtactgtacgtttttggatttgtttggattaggagcaaattgaagcaaaccgagatggaatgcgagtatctcaaaaggtggtttggttcattaacggagcaaaaccacaggctccatagagaagtagaagagcttagagccatgaaggttggcccaacaacggtgaactctgcctcgagccttactatgtgtcctcgctgcgagcgagttacccctgccgcgagcccttcgagggcggtggtgccggttccggctaagaaaacgtttccgccgcaagagcgtgatcgttgatttgtgtatcttaattatttgagtatggtttagaagtcaacgaaggtctgctattgagcctacaaaatattaacgatcacatgatttcgtgtaaatactaagagactctgttccgctttgtaaatattattattattattgttaaccagaagtcccttatcatttaatcttgtttgaaataacataagatactgtttagaaaaattatatctcagatcattatcacaaaagtctactaaattcaattgttgagtttattactcccatattgacccgtaaaatttgttcgttgtattggtctctgttagagtttgctcgcggtaactaggatgggactccagctttttggagttgtggaaatcacgcgaatttctgagtttctctgaattggtgtttcttctttcgttttcgctataaacattcgttctcctcttttactgttttgttatcatctttttttatagattttgatctttttccttttcttgtgtttcttgtaatttctgtcacaatttcaaaaatggtataaatactttacattttaccaaaaaatgtagggagtgctacattgtatataaactaatttttaactaattaaattctaaatgacatatgttgatttttggggaaaaaagaaaacttgtgttctttgaagacaaattatagttgcattaatgttgtgatctaagtcataagaacgcgaaacactgtagccgttaaatttagtggcccatcataacttgggccttcgactagttcagtggtttggtacctcttagttaaattcggttcggtccggtaccaaataaatttggccgaggcctaaaactagattgtgtttatttcgagacaccagacttgatcaagacatcatacatacccctctagctcattggtttgttaaaccatcaagcgtctgcttagggaataataaggacgctctagctcttttgagttttgagaaaatcacagctgtgatctttttttttgcatgggaccagaatccagatcatcgtgtcttaccataagatttgatccattgcgagatattacatgtaacgaacgaacatgcatatgtttattattataagcatatatatatatgaaaagagcattgatcttgtaggtacgccaaactcgatacgtttctatctaagggtctataattctatttatatcatcgtaatcttgatactataatatgtgtttgaatgctagtttatttgtagttaatgtaacaaacaaaaaaaacgattaatggtgagtgtgactcgtgctctcgtttcttcagtcttcgccatgtgattaggtgtgtgttagaaaatatgtcgttaattataacaaatataccccctcgtccgaaaatactcaaatctcctaaacaatatcccatgattattgattggtcgtatcaactatcaagtagtgttaggtcaaactctatttgtctagaaaataaatatatggatcagacatgattgggttggacatataattgaagtgtcttatgcgggcggaataataataatatgatcttggacgggaaatgatatacagtactcaagtgcttaatccatgatcctttgaatttgagcaagtttatctacatcacaggtctggtagataaagatgtgaatgatattcttacgactatatattttggttaccaagcaataatcattgttacaataacacatatatattgtggagagaaacaaaactataatttgttattaccaattcattcggatgccatacttcttcagtcggctacgatgtaagtttgattttatcgaaaatgttgagatcaatgatcacgggtcaagacggcttgcagggagctcgaagacaagttgaacgttgccttcggagatagtgaagccgatcaaatactgtttttcaatagttacaatatcattgaactgatctccacattctcacttttatatgtttcctggtttgtaagatttttgacggatcatttaatttgcttccattgtatatttaaagaccaaagtcttgatggatatgaagtagacttgaaaattgatgaaacccgttattgtgttgtgtgttcaaatcccttctatgatcgttgttctcatagatgatcattgatcatttttctcatttttttatgataaaatacactttttccggaaggcttatgagaaaaaaatactattcttgttttgtaaacatatgtgttcaataaagaatctattttcatttgcaatcattcggattaattaaagtgattgctggatgaatgttttgaatctctttttaccatttcgctacaaaaataaaaaaattgcgaatttcgcatccagatatatactagtattaagcatgggagattattcactcctcgaacacatcctatgactatgagttacacaaatcaaaatttttacattccaacgttgatgatcctttggatttggtatttttccatgtcatactattgtaactttgtttgtaatttctttctggtcaatattactctattgtggatgcaagatcgcataactagtcctccatcgaatcaaacatgatcacaattttaagaatcaaactggacttttatataccgaaataaagttacaaagatttcgctgagatgttcttacttcttagagctagatgagtaagtaatattagggattttctagtgtacaattgatgcctctatacattactctccatcagatttataggacttgacctcgtctgcttctctgatatttcccagaaatctcgctccttttagtttctgcttgaatctatcaaatcctagtgattttgcgaccacctacttctttattctttcctttttgttggttatgtc

SEQ ID NO: 25767 - DNA, 1203 bp, Arabidopsis thaliana landsberg
  unsure (1)..(1203): unsure at all n locations
ctcaggggcgtcaacaagtatgcattattatcgtaattcaattcacattttgaattcttctattaattacatgtaccttgttcatgagatttcatttcaccatatcatcttacccatatttagccactgttgtttctgatcattgtcaatgtacttattactctgtttaattcattgaaggtcaaatattcatgatgaattcaattcttcaagtctggtttcaaacacaaaaacaaatgcttcagttcgtggacctagatcaggatcggggttaccaccaaaactgtctccaggactccataacactccgtccccgattgaatgggatatctctggctgtacgaataagcctccaacattgtcaggagttacacaacgcaagcgtatgacatcaaatcgttcttcatcaccacctgtcactcagtgggccagtcaaagaccacaaaagatatcccggatagcaagaaggacaaatttagtgcccattgtttctagtcaggacgaagttccctactctgataatatatcagatgttggttgtagtgaaactgggtttggatttcataaacgttcaccagctgcttctcctcaattgaaactaaaaggtgaaagcagcttctccactgcagccttatcagaaagtgaagaatctggccaccctgagatcaaatctaaagacaaaggtaaacagtctgatgaggtaaatgggaaagctgcacagaatgttcctagagtgtccatccctgctttacaatcaagaaaaagtaataagcctgcagctggtgaagagcttggggatggtgtgaggagacaaggaaggacaggccgtggcttttcttccacgaggtctcttaacccaaatggagtaaataagcttaagaatgttgnnnnnnnnnnnnnnnnnnnnnnnnnnagacctatttttgacaagaatgaaaggtagagattattcttattttccacgtactcttattttttttttcctgtatgattaaaatttgttatggtgtttatctcatagaatttttaatgagttctgtgcagtaaggtgggtcgtccacccactaggaaactatctgatcgtaaggcctacaaacgtcagagagctacggcaacaaatgctccaacactaaattttcatggtaaaacaagttcagtgtaataagaattgctctttttggattggatttttttcctgattta

SEQ ID NO: 25768 - DNA, 1455 bp, Arabidopsis thaliana landsberg
aattaacatattcagaattcagatttacattttgcatgcataaagtaatatttatttgaatgtatactgtttagatattttgattaaaaaatgattgttaagctcttaattgtttatgctttttactgttttaaaataaagaattaaattgtgattgatattgtttattagttaggtaaaaattataatttaatttgtttcaatggatatttgtagggtcttttggcttctttcacttatgtattttaagtcaataatccttgtcaacatattccctccacatgatccgtttcaatatccacaaaccacaaccaagcaaattctttagctttctcacaccatccatattcactatcacttgtatgcatgtacatagatatcttacttcctagttctaatttgagttacaaaaatgttgaaatttccactttgttgcagtgagttatctttagaaccgaagattctagcttttgaaagtcagcttgtttcggggcgacgcgatacaatcaaagtttctgcgggaaaaatcggaaatttctctcttggttcggtaagatttcactatacatccatatacaatatgatatgttatcatcgtcaatgaagagttttgttaattcttcaaaaggtttatacaaacagattttcaaaagctgcgagacttgtggagctaaaggagcaattgaatgtcccggttgcaaggtactaatttgatttcattactagatactatgtaataaaactaataataacttcaagtgagtctatttctttagtatatgttcaatctttttcagactatacatattcattttactctttcttactctatatgtatgcatatactagacaaaattctcttgttgtctacagggaacaggtaaaaataagaagaacggaaatatgtttgagaggtggaagtaagtaataactaacaatgtcacatggttctaaaatatcaatctaaaaatttactgttcaatgagtactttaagtagagttaatttgggattttgaatatgtccagatgttttgattgtcaagggtttggtatgaagagttgtcctaaatgtgacaagggaggcttaacgcttgaacagagaggggaacgttagagttatatagtatttgtttctcctacataagttaattttgtgatccaaacatgtctctattcctataacatttcagtcgtataattggcatgtaaaatacaagtcattaataaattatattttcgctagaatatagcaaagcgtttagaaatgaaaaagtgatattaacaaagttataaaaaaatgatcattgtttagaacacataaaatagtcacactttgtgcttacaaaacggaaatgtaacttttagttggcttttaaaacgaaaaataaatgttagttgcgcttccgacgttatgtttttaaaatcgtgttttcgccatgttcttttgtgcatag

SEQ ID NO: 25769 - DNA, 1173 bp, Arabidopsis thaliana landsberg
gtactgacatggctacatctttatcgtgtttgtacattagtcatatgcaagttatagagttattttgtgcctgatgtgtggttatggatgatttttacatgcagaaaattccaagttggaagtgagaaatttctgattcactggcttttggtaattaaccgtaagagctcagaagttccgatgatcgatgtaaatttggtatgtttagcattgattttgagtttttatctaatctttgattgattagatcatttgctaccaggaaacaggcagatttgggtaataccagtttttggatttttccttgtgggttgattttttcatttgcgcagagatattctggaggagatctgcttggagtcacagctcaagttatcgacatgcctcatagctgtacgtaatactacctatctagctatattgtgtcctgattaggtgctcctgtttattaacaactgttttctgagcgaataagagaattgtctggtctggccaaaccaaatatgccaagtcctacgttcatatttgaaaactctagattatatgatatattaggtgatagcttctcggtgttgtgatgtttggttgcaaagcctatggccctagttaagctggcttcaatttgacactattcttattatatccagagtcttacagtatctggtgtaagttaatatcatcttcaccttcttagagacactgggtgctaatatattggcagtttgcattatagtccatttttctgttgttatttttgtgtcgattacatagactgattcaatctgtctgtctggtggcattactaaataaatttacattttcatggttatgttaatagtggctttgaaaatttcttgtaactaatgaatctcatactttctctgctctgattattgaattttcatttctgcttgccttagagtagcactcagttatagtttaattgagttgagatcttacccatgaacagatctgaatacacacccggagatccgcaaacagttttgggatcctcaacactggccaaaacatgttcttgttagatacacatggtacaataacttttctcacctcttttcctatctctcctagctaataagtttgtgcatatggtcgaatcacaaagcttaaggataccacgttactgatacgtggctgagatactttattgtg

SEQ ID NO: 25770 - DNA, 740 bp, Arabidopsis thaliana landsberg
tggacagacatacgatcaagatcctcgattctcttatagcctttttgagtgaatgggcgatctcttcactcctctcaatcccgggatcatcaaacatagtgatcccgttgaagataaactgtttgcgcatgtgactaagaagtgttttacggacatccggcccatggaagctcgagaagacattgaatttgtagttgcaagagggaaaagaggaaggagaagccatgagagacatgctaagagagatggaaaaatgagtaatgagaagtggaagaagataagtagtcagatattctgaagttaatgtgtttttggaaacaagaaacaaaaaaaaaagtggggggccttcaatatatgtaaacgcgttatggagtcaaagaatcaataatgcatgctttgagcagcctcttaacaaaagtacaaacgaatcgatatccatatttgcgtagttatgttgacaaaagtacaaacgatcatccaaagtttgtcaaatttgtaatattgaagaatttgaaaacttactgttgaatgattttactcggagaaaaaaaacataaaaagaacactgtgcaaaaagaaatgagaggttgattacactttgtttgcccatatgtaggcccatcataagcccatatgttagccacccagagaaaaaaaaatgatggattacactttgtttttcatataggcccaacttaaatcacctagaaagacccaacctatggattagccaaggccac

SEQ ID NO: 25771 - DNA, 1382 bp, Arabidopsis thaliana landsberg
aatagtatgaattttttctcttatgtaaacgatataatctaatgtgattggtaaaatgttatggagcattagttacgaaaactgaagaataatgtgtcagagaccgaattgaagagtagtcttaccaaattttaaaatattgtaaccagaaattcagatgccaatcacatctctgatctatattttttttttaaagaaacgatggtaatgtaataatgaaatggtgtgagaggtgtaggcaaaatgatggatgtatgatcggacggctgagaaaagacgatgagaattggagtgctattagaggtcaaacacaaaaagtcatgccccaatcgtgcttacaaatcacaatttacaaaaacccatttcattttcatgctaataataacaacaacacaactactatggcaacaatgtccattagccgaaaaatattttagtatcaaatatcaactagcttctttctaatgtaagatagactcataaacaaaaagagtggttacagtctctagtattttccctaatatcttaattttcactcatactagaaactgtagatcaaattgtttactcattttaaaccatccaaatagaacataagatttgaccaaacattggaatagttcttgaaacatgtacacttatgactttctcctaacttgcatttttgttataaatttgatattagacagtaaaggccagagccagagtagagtacaaagtcgtttacaatctgaagtttttatgatagcaaagagactagtcaaagagaagtaaaaagagtgatttgactaaaactctgagctatgtagactttgatttggtggtttcagtttcttcggtcttttcttcctttcttcatcttcctaaactgcacaaaataagacgaaattgtattagatagagagacattagaggtaacaatgaactcaccaagggtttaagggaagaacttaccatgttgagaacgagaatttgaacaaatagagaagcaaagtcagtgaaaaaggtaaaagaatgttgcacatagtccatatcacctgttgttttctttctcgggtatcatctgtgtgtgcaccactatgtatcccacaaagatcaagagtccaaagtatagctgcaaataagagtgtttgttaatacaagcaagatttttttacgatgaacatacaattttataccctagaagggaaaaattttaccccaaacttgaagacagttgttgaagccttcgaagatggaagaggcaatttgtacccaccaaaggatggacatacaacaagcaagtgaagctccgaggtaaaggtaccttttacgcgttgccaacattgctgcattggaaaaacacacaaatgctactgctgttcccacaaatgcagtgacca

SEQ ID NO: 25772 - DNA, 733 bp, Arabidopsis thaliana landsberg
atagatctaacatttgtcgcatcgccctcattggtgacaaaggatccaacaatcctgtggatagattataacagaacattgtctcagttcaaagccgaggacgagagttttcgattgacaaaagctgagttcataaaaacagagcaatgttttaagtaataagcagaggatgtagtttttatttatacaagtgaagtccgtttagttagttgaacgtaccgaaaggagagacgtccatggttaagcgttgttgaggtcttttttcgacacttgatccttggttccctttttgttgtccttgctgaacaacatcaatggagttttctctctggtcttgagccctgatccggctagggatcttccgtgggaacgaaaccgagaacggtgtagcggacttcgatgagacagaaggagatggagcaagaggtgaacatagagccgatgcagcaaatgagagtgtagaagccatttgtttcgagtatgagccaaaaatatcgctgagtgaagattagaaaattctagttctgagtttgttgagtatctactacaattgtagaagtgagtgtatatatgtaggtgaggatgagaaggctctaagtgacaaaaggagaggtcttgaaggttgaagatttgatacgaagctttctcgactcgttttggtttctatctatctattctactatttgttaacctttgtgcgttttctcgagttttctcatcttctccccaacca

SEQ ID NO: 25773 - DNA, 2155 bp, Arabidopsis thaliana landsberg
ccgcatgcatgtttcaggataagatggtgaagaaaggcttctttcctgatcctgtttcatttgctgctattttacatggtttttgtgtggttgggaactcaaagcaatggaggaacatggacttctgctatctgcgtgagaagggtcttgaagtagctgctaagcattcgcaggttttagagcaacacttacctcaaccagtgatatgcgaggcttcaactattttgcatgcaatggttgaaaaagctgacaccaaagaaccggagaactgtagaatctccgtaagataaagacagatgatttgctgctgaataaagacaagaaactgatttcagaatgtatactagtttcttgtatttccagacaggagcgtctcatcgactctcaaaatgccatagtacatgaacaaatttttgtcattacaaaagttgtgtcagctcaagaatgtggtaagaaaagaaacagcattacagctcaaattcacagaagcagtcgggcaaagcaaatcctctgccaatggcaaaatcgcttttatgaacttcccagagagctttcttcaactctgcaccttcaagaccctgagaagtgagctccgcaaatgcttttctgctcaggaacagtgtattatgcatctgtttatatgttcgcatagctgcaactattttatccatgtttccaaagtacgtagccacatatgcgtcactattgatggacacgtgataatccaatgcagcttttgtgtttccatgcattctggtgaaatcctcttggttaagtagaacagactttgtgaacacatttgtataaacggatgtgaatccttccatctccattagaccgtctccagctgctaagtatatgtttgtgcttgatgggatgttaagtgactgaagcatcaacactgtttcattaggagtcagagggcatttgcctcgctgtctccatgtctgagctagttctccagtccatggcttcctatcagcacgagcagcttcaatggcagcgatagatgtaggagagaggtttgggtattcacattggctgtgcgctaccatgtcaggttcaaatctgaggtgaagcgacaagaagggtttgggaatagcatcaaaaagctcgacggccttcttctccaaggaactagtaaggtgtatagccgaataacaggcttgacacagagtggctcttgcatattcgggatacctgaaaatgtattttatcaacgtagaagagtaagatacttgaaatattttagaaataacaactacagacaaaggcttttatagtctattagaatggcacctgtccctgcgttggctcattgctggtgtaaaagaaatgtaatgatgttccaacaacagtggaagaacactttcaatgtaatcaaattgacccttccttttgctgcagtctactttgaatggttcttttgatgcaatatcttttggcaattctttaacaacttcgatataaccactcatcttttgaataaagtagtctacatcaaacacatctgcagatccactgcatcaacaaatatcactgattagtctcttccttgattaatttaacgaagcacacgcttggaattgtgttatctaagtttcaagagaaagtaggagtaccttgactcattccaataggcagctacctcaaactttggcagaacaagtgtagcattcaacaaacgggcaatcccaactccatcacacaactgcaagcagcatcacatcatcatatgatttacttcctaaggcagatataatacaagttgaagtcctgatgaataacatgtgcactgattcatgaaatggtcgatcttttgtttaaaacttacatcgcgtctcatctgattcaggccgccatagcaatcaacgcgtatatatccattagttttagcaggtagagctgcaggatttgaacaaaaaaccaaagcagttgtctgcaatgaaagaccgatcacaaaagttcagagaagtaacactcactacaagcaatctacattctacccaactgcaaagtcttctcttttcaacgaccaaaaccaagcttttggtacaggattaaaaaaaccagattcaagtgagcaaattactaatatcaacagaactttctagaattagacccatcacaaaatctttcacagcatagaactaaa

SEQ ID NO: 25774 - DNA, 1320 bp, Arabidopsis thaliana landsberg
  unsure (1)..(1320): unsure at all n locations
aacatggagcttcaggagaaaaaacctaagcaaaatgcgtgtttcttttgtttctcacgctttaatcaaagacgcggtaagactttcgcgtaaaacagagtaaaccgatctccatccttcttctgtagggtgaagtccatcccaaaagaaagcagttttaggattatcacatacaatatacttcttcactcccttctcatccacacttccacagttatactcgcggctcacacctacgcaacacggctttaatggactctcaaaccttgtactccctgcatttcccaaaaaaccaatcagcataagcaaaaaaaggaggcaaaaatgcgataaaatcaagccatttttttcttttacctggattagatcctttgttcttgaacacagtcaagaaagcattgtagagatcaaggatgatgaaagtcgactgtttagtctcgttattgagctttgccacaacttgctgcaataagttgttgtggaggttaactaaagcgttttgtgtctcgttgcaacgctggaacgaggttacgaatgtgaagggagggagacaaccaagcggttgcagggatggtactgcaatctttttcactcccaaagcgtggatccgtctcaaattcacctctgtttgatccacaacttgctttatgaatgctgggaattcctgtaagacgcaatgaaggtaagaaatgaatcactatacattttaacatcactatctaagaaataaaaaatagggtttcgtatcttacagaggcagggcggtttagggcgatgaaattggagtagtcgttgccagcgacactgacgagagccacggatgaagtaagctcgggaggatagtagatgtcgccggtggtgagaatgttctggaagatgtcgatttgagttgtcatgttaggcaatggagtttgagtgttggggagcggggtgngtggtacgcaaaattcattccgtactgtaatcgtttctttcccgcgtaatctttccaaaagtatgggattggtgattttatccccacaaatttagctacaaacacacataaaaaggatatatttgagaattaatgcatttcatcgttgacaaaatgtaaatttaatacaatttcatcaatccttagaaatttacatagaaaggctattgacataagactttttctgagattaatgtttattaaactataatgtatgtactttgacagtgcatatgttggtgtgtagctttatagtctttttatataataataataaaaagatgaaaaagaaaagactgaagtatgttgctttgttgatgcttagtggtagtggcgctatgatgaga

SEQ ID NO: 25775 - DNA, 639 bp, Arabidopsis thaliana landsberg
ctgatgttttgcttcagtttaatgggttaatttagtagatttagtgtatgtggggcattttttatataatttaatttagggtcacaaacgcacgtgtgacggctttcccaaacaaacacaaacgaacgttgatgggtcacgcaaactgtggcaaagacggcttcgttcgaacgcaaagttgttatttctaaccccaaccatgttacaatatcgagttacgtgaaaccatgcattatgtaacgaatataaatctaaacacaagattaacaaaagacacatgttgaaatgtaaacaattccaggacatatgtgtaaattaccaatagtgacttaagctcttcggagtaaatcggtaaaacaacaatgttttggttaatggttgattgtgttactgaaaactaaatgcttgacattaaaccttttacaaaaacaaagcttttagaaggaagaagaaacacatgttaagctcaatcgcaggagattgattcaagagaaaaaatatattacttattagaagcggttggtgagtcgtgagtgtcttcttgttggatgtttgacatatcaggaaccaagtagcgagcagcaggaggccttaacaatccaatcaacttttgatcactgatttgactaaaaaatttgt

SEQ ID NO: 25776 - DNA, 1485 bp, Arabidopsis thaliana landsberg
cctgaatcatcaaccaaccgactcttcttcttcttcttcctccggtggtaataatcgaataagccctatcattctcttcatcatcggtctcttatccgtaatcttcttcatctgtagcattctacatttgttggtcagatattacttaaagaagaaaagatcaaacctttcgtcatcaccaaacgaatctaatcaaaacccagaattttccgactccgatacttaccaaagacagcttcaacagctctttcatctccatgattcaggtctagatcaagctttaatcgatgctcttcctgtgtttctttacaaagagatcaaaggtacgaaagagccttttgattgtgcagtgtgtctctgtgaattctcggaagatgataagcttagattgcttccgaattgtagtcacgcttttcacatagattgtatcgatacttggcttctctcgaattcgacttgtccactttgtagaggaacccttttctctttaggtcatcaatttgaataccctgatttcaatttcgggtttttcgccggagatgatggaggaggaggagttgggttctccggttcagaaaccagctgagaatgagattgggaagagagtgttttcagtgaggcttggtaagtttaggagcagtaatattgtcaacaatggtgaagtagtagtaggaggaggaggagagacaagtagtagtagtcttgataatagaagatgtttctcaatggggtcttatcagtacatagtggctgaatcagatctggttgttgctttgtgtcctaataatgaaggattgaagaataataaggatgttgaagggaagaagattaatatgagaagtaaaggtgagagcttttctgtgtcaaagatttggcaatggtctaataagagatcaaagtttcctaataatcatccatcagagactaatcttgtggttggtggttcttcttcttcttcttcttcttatgtttgttctggatctgatgggttatcattgaatggaaggagatttcagggtccatgagattttaagggtatagatcagagggtagctttagttctgccattgatttaattgaattattgattttgtgtgttttggtgaattcattttgcttaacacgatatgaccactgtagtgttgttttgtgtcctctgtagctgaatctctcggtttgtttaagggaataagcttttgttctttgatgatgttatagtggtacactcttatatgtgatgtttctagttctaaatcgaactttgttcataaatcagtcacaaattctgagaaagttagaattcttaaaacattttgagacaaaagaagattatgtatttgtgggacaaatattttaaaaatgaaggttgtaaaaagagaagtcaaatatattattctctttggtggggtttctaaacttttaaagagtatccaaaaatgggatggaatcattattggtaggggaaaataatgatgacccataatt

SEQ ID NO: 25777 - DNA, 1056 bp, Arabidopsis thaliana landsberg
gagagatgaagtttttttttttttttgttgaggtgtgttttgttgatatcaagaagatggagaaaaaatgtttacgggtaaagactttttttttccttggaaacttctgggaaactcatataacacgttttgactagtattgttattgtgaccatttttttttgggggggggggcaactaattgtttattttttgctttaattaatatgatggaatcgttattttatgggaaaatatgtaagtggtaaagagatggacaaaaagaaaaaggagatttggtcaagttttatgagcacaactctctttgcatgagctgagacgcaatcatggaactagactttctatagagtttatgaatcttgtatacttacaaagaaatggtaagatagggtaaatctaattttgatagagtttaattatgcacctaatacctaatattcaccgtgaagaatactctagaagagtatttagattttcatatttgtaatacatatatatgtactacatttttttaatgttatttatttacattttgaaattaaataaataagttcaaagaataaatatgatttaatttgaacgacatatcagaaatgttgtaatctgtttttttttttttttgaatattgtaatctgaaaaatgaaagtttaatggtttgatatttcggttgtatgtgtgattatgtatgttttgatttgttttcacgtaataatgaggaaatcaggatcaaaactttaaaaagagcaaacagaaaattaatgatgttaaaagtttattaatacgaagaagaaaaaaaaaagttttattgatacgaccttgtttgaaataggattaataaattttctgatgaagttaatttatgatagaaacaaaatcaaagattaatgcttacttccactgaatctgaggtgcagggaaatcacatggaccgatggtcccaacagttaactgtccatgtcaacttaaatactactaatttacataattaatagataagaaaataatctttgcaatgaatattgaacttgtaactttttgtatgtgtttaatttgag

SEQ ID NO: 25778 - DNA, 809 bp, Arabidopsis thaliana landsberg
  unsure (1)..(809): unsure at all n locations
aaaacttttaaattagatttttttaatatgtttttaaatacaatgttttcttaataaaatgctattcatttatttgacccactttggacaataatgtcaagttctaattttctaaacaggacgttattatttatttgacgagtttgaacaaaataaacatcatctagtcagattttaatacaaaccaagtgtcgtggaggttccttgatttgtttaattctcctctagttagattttaatatataaaccgagtgagactcgtcactcgtggtccgtgcctccgtggaacccatgataaacttataaacttactcgtggtcgtgtgtttaactttatagtccagccgaaacgatgccgtttaatggaaaatatcaatagcttatctccgttagtttacgtggagcttaaggaaatttccccaatcggaaaattccaaaaacccataataaataaatcagatttgcaggatctcttcttacttcgtcgaactgtgacgtcatctttagtttccgataaaattttcatcttctccggttaagaaattaggttttcgaatgtcgagaaaggtaaatgttttctctaccgaataagctctgttctttactcaagttgattgtatctggatttgaaactactaaacttggtatacaagaaccaagacagagcaattcaagatttgttctgcaatggtgtaggagttaaacaaaattcagacccaaattcagtttcttctatcgagtatctttcacattngattgctaggaaccaaagaaagctgattgggtttggaataaacgctacatacatat

SEQ ID NO: 25779 - DNA, 753 bp, Arabidopsis thaliana landsberg
tcgtgtatggttttgattttggaactcaattttgattggttttgggatcagatttaatctctgcatacgcttttgattcttcctttgttgttcgtttctctgtttttgtttctaagccaagctgtgagattttatagatatctctgtttaatgatgtacttgtcattaatcttgtggttatgttttgttaatcagaggcaaggatgagtgaatcttctcgaatcagagagaagtaccctgacagaattcccgtaagcttacaaattcatgagttgattaacttcttttcactaaatttagtctaatttagaatcttggattgtatgtaggtgattgtggaaaaagctggacaaagtgatgttcctgacattgacaagaagaagtgagtaatgggtttgctttatttactctttttctatatcataatcttgataacttatgtttcttccactttcttttaggtatcttgtaccagctgatctaacagtgggacaatttgtatacgtggttcgtaaaagaatcaagcttggagctgagaaagctatttttgtctttgttaagaacacattgcctccaactggtaagagttcttaaactctttaacaccattcaggatcaaagtttctttctttaccactaactttggtttcacttttgtttcttaacagctgcattgatgtctgcgatctatgaagaacacaaagatgaggatgggttcctctacatgacttacagtggagagaacacttttgg

SEQ ID NO: 25780 - DNA, 1625 bp, Arabidopsis thaliana landsberg
  unsure (1)..(1625): unsure at all n locations
ccttcatcaatcatcatagcgcaacggtttcttatatgggtgcatttctatttgctaatttaatgggttggcttttgggcggtaagaaaagaaaacatggagagacgggtccatatttatgaataatgtcataattcatgctagaggaatggtgcaaaccatgtgatatccttcaactattatatgtctctaactaacaagtatcttatatgctttggatatataatggatgatgacttagagacacttgttggctattattgttatcatccgagtgtgtgtcgcctgtttcttgggaggtggatgtgctactatgtttcccccgcaaaaaataaataaatttgacacacctttcgtatctaccgacacgttttcgatgcattgcatcttccacatatccataacccaatgcttacttagcaatagtcacgaattgtttcatacttatctcactttcattacattagggaatactgattactaagtacacgtgatgcaagactctttggacgatatatggacgccgctagttctccaagcaccaataggtcggggtatctttcgaatcttcgcggatggatagaaaaaaaaaataaaaaaaaaaatcaacccttaaattaaaaactttcagtttgcacatatctccaacgctagctagaacagatcattgttgtggtggtgtggtgtgaactaaatgaaaactacctgtttaaacatatcttcatgcatattgtctgcgaaggaaaaaaaaaacaattgtgcattaatattctgattagacctagctaagttcacattnttgtgagatacggtctacaaacttagtattaaaacgagtttttagccaccattagttattgctaatatacactttatcaaacatcatcgattcgtaccaaccatctttgaatgctaattacacgaatgaccacatcattatataatttaatattttcttatgtagctttgattagtttagtgatgtaaagacgttaggaaattaaacaaagtggtcataaatcactgtaaaatagggagtctcactattcaatcgtagcaaaaaaaagtctcgatcgaacatttcgtgtattttttggtgaaaacagacattaacctaatttacttttgaaatctttgcacaaaacgacaccaaccccgacaacttttttgtttcgtcctaaaagatatttaaatatctaaactcgtcgtttttactcaatccgtgattactacgaaatttacactaaatgtacgcattcgtgattagtttagtgctgttgtataatgtaaaagcatgcgtgtattgaagcgttcgatcaaatcttcacatacgcatcgtgacacaccactctcattttcacccaaatcccgtttttgccgattggtccagcttcacacactttaattatctaaatctcaagcatataaactgagaacatgttacgtattaacgtagccgtagctcagaattaatataaaccgagaacatattacatattttgaaatatataaacagagtataataacatataaagattattatatacttcaatattaaaattattagtctattaagggaataaaaacaccaagaagcaaaggttttgcatttgcctgtttgcgta

SEQ ID NO: 25781 - DNA, 736 bp, Arabidopsis thaliana landsberg
tgctttacttcatatataaaagggattattggattatttagaacttttgtaagaaaatattaaattaagggataagtatactgacagtcttggagacgtcttggaggagaacaggttggtcctcggaccatagatccatggattccgacaaaaacttgtgcatgtctctaacgatttgagctttgagaagtggcgactttaagaaagaaccgactaatccatggaaccgtctatgtaaactcccgttgataagaagtatcgacgattttcccattagctcccttaccgtttttgggtaaaacggcacgaaagctgtcgagtcgctctgtaaaacggctctgttcacttcagcatccgtcgacacgatcgtcgccgttccaaaaatatgcgacttaaacactctcccatacctttacatacataaacacgtatatttaatttattagttttagattaaggaacacgtatagaaagagggataagagttgttacatgagacgacgcttgtccatgaaactctcaggacggtctgagtaagcagaagagacgaactcgatggtttcaccgatgacgggccatcccaagcttccgtgtggaaactttggtccgtgactctgggatgtaacatgatgatcattaagttttttctttgaagctggggatgatctgagaccgttgatcttgttgaagatgacgatgatgatccagaagaagaaggagaagaacataagtgaag

SEQ ID NO: 25782 - DNA, 843 bp, Arabidopsis thaliana landsberg
atgtaactcttaaagcgtttcatgaaacaatggctgattctaatctcaaggtatgtcatcattgatttcaagttattaacaattcttatattggtatggcttaaaaattacatttgctatgtttgcagaagtacatttctgatatcctgtctgtcctggcccttaccacgctctacagattgcactatttcttgataacacgaaggtagaactgagccttctttaattcatctagtagttgttgtctgagtttgatttgttgattttgcttttgatatgtgattatttgatgtctgcttttgattagttgatgtctgcttttgattatttgatgttcggttttgattatttgttgtctgcttttgataagttttttttgtttctctgtttaaatgcaataatttttgagttgagatagcattccattaatattttaaatgcttagaacaaagtatgtgttctctatggttaaataaaattcaaccccctttgatcaaaaaaaaaaaaaaaaaaaattctaacacctaatactaacttgaagcttttaaaagctctctcttagttattgcgctcaaaatttctctgaattggtctaagcaataaaacctaattgttttttaactgtgataaatgcatgttaactagtgtattttggagtggtttacattgggtaaaagtattatcatagttatggtctattttattgaatgcttggtaggttaagtgtaagtaaaagctctatgtgatttattgctctctatgatcaatatcaaagagcataaaattaactccctaccctaacttgaagtttctaaaaccgcatctattagcaacaaactaaac

SEQ ID NO: 25783 - DNA, 901 bp, Arabidopsis thaliana landsberg
  unsure (1)..(901): unsure at all n locations
gcactattttgtccgaagtaagtaaatatagcaagtggcagtaaaaaaatagtaataaaattgaaggcaagatcaggagagagctggctgaaatgaaggcaagaaactcgtgaaaataataattgatccatctctatccacgaagccctacataatttagtaacgcaccacttgtggttgcatgcacatttatttccataacgacaaaactttgtgtttaattntataaattatttctgttggcacaacacactcattatagccatatgtttgggtttatattttctattttcatagaaacaattaatttaattctagatgccctagacattttttaaatgtatataataataaaattatagtataaaagtctatatattaccctaaattttacaaaacatatacaatcctaaccaatgggatcctatatcaaattgcattcaggatgaaaaagaagcgacatgaaccacgacaaagagaaaagttagataaatttaaagttgagtgagaacttgaagtctttaattctcattatacaagcaacaattttctttcttcggagagaaagaaatgagagattgcacaacacttcaagttctctcctaagattgttttgtggcagattgacataaccatccgtgacaatatcgcaaaggttgtggaagattgttgtcccaaatccaatggttcacccaaacctagttactatagttggctcttgacttgtattagtttcagttttttttttttttttttgttggggtccatatctagaagcttgtccaaagtaaataacaatgttttttttggtaatagtaattcacattttatcctaaaaaaatcttcaaaaaatgaatatgaaaagtacgacttacgagagaaatgtaagtgtaaaataatg

SEQ ID NO: 25784 - DNA, 957 bp, Arabidopsis thaliana landsberg
ttttggaactcaatgaaaattctcaaattaattttaatatgaatgaaataaattagggggagacggtccttaaggcccattataaatctagagggccattaaggcccattaacacaaatcaaacccactcttggagctgaagcagtagcgttcgttattttggaatgaatcaccgaacgagatcttttaactgaagcacctgcgattcatcttcttctctgcccgtcgtttcaacgtgaggagaaaaaagaatggcgcttgcataaatgaggtttcttttccgaaaatttcagccagtgaatatatgaagttgttatcttctaatctgccttatttttgaaacttcctctctggtacgtgttttttgatgttgggtatgaagaaagttcgaggcttttcaaaggatttagtcttcactgtaatatgattcctgtgactatattttgtagcttgtatagacttcagaacatatgtgagtacttgaaaatgattgaattctcaatgatttgctttctgtccataaaatgtaatttgaagttgctcatacgataataataggcattgtcaattttgattcaatggtgaatttgcttttaattttcttttcagggtgttggtgttctagcaaagagtaccacttttgctaagaatccaaggcaactgcaatttgaagccgacattaacaaattgtttatgtttacaaggttggtatttttttggtatagattaagagcttttgaacaagatttataatgttcaaggatgtaggattatcaagtatcaacttgtctatttattgactaagcaaagagtcagtctctgtaattgttggagattttttccactatatggctcacggagtttctctgtgatatagctataatcgtttgggacgagatgctgaggaggctgatgctgaagagattattgagatggctggtaaagccactttctgag

SEQ ID NO: 25785 - DNA, 1377 bp, Arabidopsis thaliana landsberg
  unsure (1)..(1377): unsure at all n locations
gaggagaaggtgacccaaacagaaactctgcaagaacaaaaaccaaggcatgtttcaacaaacctttttatatgagccaatttttgcgatagtgaccaaatagcgacccaagaaggattacggcccaacccaagagagttatccagcttgattacgtcccagaccccctatgacccgatccggaccggctcagaccatctcacaaaccgataatatttactacgggcattaaaccggttaaataaggaactttccttatttagatttttttagggcaagagtctgggaccacgagagactctagtcaatccaagcgaaaagatcattcaagatagatagactacaattttcatacttggccgtggcccgtgggtgtccttaattaactcccaacgactatgccacttaatccagcaaataggcgcttattcacttaccttatcaaaaccataatccatcctatgacttcatttcttttttcctcttgatgcctcacttatgagttcttaaaacaaaaatttctctcatgctttttcatttttagtatgattttaatctccagctcaataaatttgaggttcctgaggtgagaaaaataaatgggccatttttctcatgttttttagaaagaaaataaaaattttgacccaaattttaatgtatttcattagcacctccaacacatgtctagtcgtctagagcagagtctgattttaatgaaggtagtttagataccttcaatggaaatacagttaaggaaatccattaataattttatttctgttcttagggataagagacctagttactataaaataagttgaattaaaagccataataaggtaactaataaatgtttgtagaaaataatttgtaaaaagggtataaaaaggtttatatgaaacttgtatcctcatttactcagtagccaaaaaggatcaagcagagagagttcgcacttccaggtttcttctgcatatntctcttttctatcttcttctctgtagatgatcaaatgttcgatatcgtgtcttagttaccgcgattactgtgttcatccatttcttggtcttttctgaattcaaaggacctattatttcgagttcatagatcgcttgccactttgtgtacgtcattgtgagtgattgtcttgttatctcctagggtttctttggttccatgtgtctcattctctgttttttttttgtagtagaaagcttggcgttgaagaaagtgtgtgcaaatgcaagtgaaaaagttaagagtcgccaagtggaagaaagagcgtcttcgtagatcattgatgaaggccgagtctaaagcctctgatgtattgtccttcacgctatcatggagagatccagactctcattttga

SEQ ID NO: 25786 - DNA, 4645 bp, Arabidopsis thaliana landsberg
ccacccgacccaagttggttaacccgaccaagattggtattatcccgccctgtaaacttttagctaaataagccgatttagagtctagaggcccatcacctacaaatgttttcaactatgaatcggcctattgaaaagaaaaatcttttgccattagaaagatagaaattcagggtagcagcaacattattgttacatttaaaagttaagtcaccaccaagcagtgtgtcttttagtaattgtcttgtgtcaaactggagcataagtgtatggatacaaaaattactattattgcaatatgattgctgggtcacatgatctggaaaagtaaaatcagctcattatagggtactatgtattgttaagaggctttgggttttagcactcatatgcgttgacgaatgtcaacaatctttagttgacacgtggaaagtaatagagacccacatccacatggaagcagttgagatattgaccaaaaagtacacaactaaaactctaaaaacacaaccccaaccacttggcatcggatctctcacagaccggtgcggttgctcacctgcattcacttctcattgtcctttcgttttgttattgtacacatctatctaatctatctattgttccacatgttaatgtaagtaaaagacaacacaataaaaccaaacaaattaagctctaaatatcaattatttacttacttttaggttgaagatgctacccaatagtagttgtgatatactactcataatagagagagaatttggtatatacaaaggcaggcgagacaggtgtgaaccggttgttgttgattcttaattagttaccattataattaacccattaattatatatcctctgtaaacaagttttgtttctcattttttttacctgaataactgtgattaagtcaacgagcattattgttgcatttcttgtgtaataatgagccacattattgttgcatcacacacttatgctaataaagaaaacatttctacacactagaacaaaaaaaataacagcaaaaagatattagcaaggtaagcataatttgatcatataacaaaagagaaaagttatgatctctattagacagcttaaccaacaaagctaaccccactttcctcttcatatttaatctctctttctctcctttcttcaacaaatatctcctgctcttacatctgagtctttttctttctaaccttctgattcatgagtaatcatatgtccattatgaagttcttgaatcaaatcctctgttctctcttatcctctccatatccatgactactctttcctttgctcagacatgttctaaatacaagttctccagcaacaatgtctttgactcttgcaacgatcttccttttcttgattccttcctccattacacttacgagtcttccaccgggagcctccacattgcttatcgccacactaagctcacctctggtaaatgggttgcttgggctgtgaacccaacgtctacgggaatggtgggagctcaagccatcgttgcttatccacaatcagatggtactgtcagggtttacacttctcccatcagaagctaccagacgagtctactagagggtgatctgagtttcaatgtctctggtttgtctgcaacttaccagaacaatgagatcgttgtgttggcaagtctgaagcttgcacaggatcttgggaatggtggaaccattaacacagtgtggcaagatgggtcaatgtctgggaacagtcttctgcctcatccaacttctggcaacaatgttcgatcagtgtcaactctcaatctggtctccggtgtttcagcagctgcaggaggagctggaggaagttccaagcttcgcaaacgcaatgtgagttgaatcttttgtggacacacatctctttccctaattttttatttggcaacaacgaataatgattgattttggtaaaaaaatggttggcagattcatggaatattgaatggagtgagctggggaatcatgatgccactaggggcaatcattgctcgatacttgagagtagccaaatcagcagaccctgcttggttctacattcacgttttctgccaggcttctgcttacatcatcggtgttgccggatgggccactggtctcaaactcggtggcgactcaccagggattcagtacagcacccaccgtgccatcgggatcgctctcttctctctagcgacagttcaggtacattacacacttcacatcaaaagggaaaccagtaaaatatataggtttcaacaccagttaatcgtttgttttgaaaacattaggtgtttgcgatgtttctgaggccaaaaccagagcacaagcataggctctactggaacatttaccaccacacgatcggctacacgataatcatcctaggggtggtgaacgttttcaaagggctaggcatattgagtcccaagaagcagtggaaaaatgcctacatcggtatcattgttgttctcgccattgtggccaccctactcgaagccttcacctggtatgtagtcattaaaagaaggaaactggaggctaaaacggctcagcatggagcatctaacggcactcggtctcagtatgcttaagattagcaatagacttgcttccttttctctttgtgcatagagacacagttatttatctgcttatctatctgttcccatatgcaatgatgattttttacattcatgatttaggatttataatgccatttttatttgatcaacactaaaggagtgtacatgtgaattcatatgatctaaaaaaatccagagtagtcaacagcgtagatgctgagagagagaaaaagaaacagtacctaataaataacaacaatctttgatggtccaaaaatgtctttcaaagattaacagaaatcatgagcttctgtgtatatgtgcatgctcaagcaagctctcgcagcttaaggtttgcaatctctctcacaacctgagctttgtctgcgtcaaacctctcgtcctctgccagataacagacatgaatcataaatataagaaactcgttttacggtgagaatcagatccattctctggtgatacaaggcttcatataacacaagtcctatacctttgtccggcttgatatcagccaacaatctcagaagcttgtttctgtttgccaccagaatgttggcgatgtctgaaggcttgttttggttcgctacaaacagctgtacagaaacaacaatatcagtgaactttggttgccccttcatgactttattatcaaaactcagactacaatcacattaaaaaatccgaaaaatccaattgccaaagcgtctgactgatgattatgtttcactgggtaaatttactccatgtatttagagtacaagaaatataccttgaaaacatggaaagcttctatctgaatagtcttgcttgattcctgcatttgagagttttcgaccacaggtttcagtttgtttccaatattaactctgtctggcagagccagaaattaagaatttaatgttatggcgggtaaagcatcatactctgagaagattcatcagaatcctcaagttatccatcgagctcacatacttcgtcatcacagccgaatttgacctatccaataatatatcgcccaacaactgtaaaattttacacattacaatccatcagaatgctctgtcactactatctttttcgtgattaaccatcgatgatatcatcactcctctaagttactctaccttaatagcttgccgtcgggtaatataattagttgattcaagaagctttgagttgtagtctgcaaaaaactgtaaatcaaaacagctgagagtcataccagattgattcaagataatttttctctcaagcaaaattttatggtttggtacattgtaagagaacttacccagtcttcattcttaatgagaaactcagcaactgtagacttgtgccttgtcagaagttcctgcaagaaaataatcacggaactggagttatgatggcatgtattagagatatactcagatcgtgattatgagggaactccaaatatgtcgcagtgttcccaaaccttaaaagttgcagcagcatcagcagcaatgtcgaaattgggaagctgtatgtagtaaaaaaacttcttcacgtgctccgagtccaaaacatatctgaaccatagaaagagaagcagttttcactatataaattcgatagagattgtctctttatggattaaaacatataggatttaatctcgtaatcaaagaaaatataagatttgctcactttgcaacaatctgatgacggatgcactctctaaacatagtaccatagtgtaacgccatatcggtgttttcaaacctgagagatatcacagaaacccatatgaatgataaaacaaacctcatgatcaaaatcttaaaagagccattaacaaaatccataatgcaacctcaaactacatgattacatctcctaaactcacccatcaactagaaaatccataagatcaatgttggattcaagataatcagcagcaataagacgtgaattgacttgttgcctctgaagatttgcaacaacttgtgtagcatctttccacgcctgaacaaaaagacaaactctttattgaacagattgcat

SEQ ID NO: 25787 - DNA, 2210 bp, Arabidopsis thaliana landsberg
aaagaatgaggcggatcggcgtgaacagtcattggcacaacataagcagaagagcgttgatcaggaggaacaagtcttgatacattactatgataagtctgaggtgaaaaattactcgaggtccaagtagttgcgacaaaatcactctgaccaacgcccaagctatcaacaacatccacgccactaaaatcagaattcggattagaactaccactagctacactttccttactcacaacaacaccattcacagcctctacatatctctgcccaatatcaactccatcaccatactccaatattccgaaagaatcatccacctcagacgaagaagcatcaaacaaaaaaactctcaacttccctgacccatcagaagatctctctaccaacttctcaaactcctccatcatattatcaatatcttcactagatgaaacagaaaccaaagcatcaagatcctcatcaggaagctgatacttaacaacaacagggtgaccataaacctgaatcatcttttgctcaaactcatcaaatgtcacattctttttaacactaacgatccttgtttgaccaccaacgtaacgtaacatgccatcacttggtctagggattatctttccattgtagctacataaaaacttcatcttttccaattcttcatcatccatagcacttcttttattgcctaaatttggattgtttctattcatagcatcaatacttaccttctcactcccaaacccagaaataattccatcagagacacgcttattgctcaaatcagagctataatctaacccagaagctgaaagattggccggattagaaacaagattcgaacttgggctactgggttcatgcgccattgtttggagcagggagagggatagggtttatgattactcacctggtcaatatcgtggtcgtcgtattcgaggaagaaacgaagaatcctattttgtagagagaagaagaaaggagaggcaaagcgagtcgttggaactgatacaacgacgacgtttctttgggagtatcaaaacctcaatttggattttctctgtagactttttagaatttttctaaaagggaaacacgtgagagatgagaagaggcacgtggtctggcctcatgcaaaagaatggttgcgtttgttttccaaactgtgagaggagtgtctaatgctccaaattccaacactcgacatgttttttttgtttttggttattactgattattcttgaacttttagcaaaataatgaaacaattttgacttttataacacacaaaaaaagcaatacaatttcaaataataaatcgattaagagataaaaattgtgataatttggatattttaattagtttgtgcaatattcttttctcgttgatctctataaattagagaggcaaatgcgactgctaggagtcgaaccttaccattggactacaaacgcttttgtgtttaagttgactattaaatttagatatctgattgtttaggatagtttaaaacgctaccgttttggaatctttatacgctaccgtgttattcttctttgaccaaaattctggagaatttgtcttccccttcgtatttctggcaacttttttaatactaaaattctctctaaagccgtcaaagaccaaaaaaaaaaaaaatcacgaactcgaaatctctctcgtcttgttgttgatgatcaagccaccacatcagccacgtcaacgtagtcttcttcttccgtgattttttttcatgaggtcatgctcctcaattccaggtgtgatgatacaatcaatgacctgtaaagataaacagtatgaatgaattattataactaattagaatagcaaacgtttcataaaacagtaaatctaggacaactaacctgagttatacccaattctgcataaatggtatcaagaggaaagcctttcaaatggttcttcttgaacctcaccttgcacatcctaggacatccctcatctgctcctgcaatgtcctccataaatttttccctcaactgtgggattgcctcgaatgcaagaagctacagaataagaaaacaatatctaatacaaatagtattctacagtattatcagtattgcaaataatcacctattatataagttttaactaacctccatcggaagacagaaacccggaaccgacatacgtacttctcgttgttggtgactgaaccattaaaatg

SEQ ID NO: 25788 - DNA, 1868 bp, Arabidopsis thaliana landsberg
  unsure (1)..(1868): unsure at all n locations
attcatggacatttgcttatataagatatgatttagatatgtgaagagatatgacaatatacatatatttagtgagacgactgaagttaactatgattatatgaatatgtcagtcactgtgaacacgaaagggaatttcatgcaaaggacatttagcatattaaggcatgactcattctgcaggatttcaagtttttcctttctggagaaactgtctagttttaatggtcactagacagaaaatatctagctataaacatgattgtgaattccaggaagtataacgcccatacttaaaattaactattacagcggcaaattattaccagacagcttaaggagggtaaagactgtagcagcgagaaagaacaccatggagatcgcaacccagaaatgctgcagaaagaaaaaaacatctgtaaattttatttgaagtagcttcccacccactaacaaagatcagaaatgatttttaagcctgactttgtgtaagctaaagttacagaaattgaccaaaaggagaacttgtctcaattcatgacttgagaatcagagttcaaagtcgtgttattagaaaacagagaatggtttatcatttgtatatgactgataactcacaggtagaaactaactgcaacttaagtaagtaaagaaaaaagagtcctagtcttaagctgctgaaccaattactttcaacagcagctaagaccgttggtgaaaaatgtagtatgacttacaggaagagcttcccatactgcttcatcattcacgctctcttcatctccaggcatcagtgcccgacacattctgaagataaagcttgcagtcattaggatctttagatttatatgatttacatttggtgtgtgttcncgagacacatagatcaatacctcaaattgtctaccagtattgttaattcaaaagccaacaatggtaagaaagcaatcttcaaactgacagctggtggccaacgagctgcatttaagatagaacagtccacaatcagatgaaatgggagaaagtgcaaaaagaaaaaccttcatacagaatcaagaaaattgtaacacaagaactacttttagatgtcctccaacttaaccatccgtattatccgaaatacaaacagtagcaagaagaaactttgagaatcatagccaatgtttatatttagtattgaagaaatcagtgtgttcgcatgccaaatagtaaaaaactatcacccaaaaaacctatgaagtgcaaaatctgtaggttacaggatatttaccataagaactctcgaggtatatacagagaagtaattcaaatgctacaagtaacggtgtcgcgacaacagcatggcaaggagcccactgtaaaccaaacgggatcataaacacatcagtacaaatcataggaacgacattgagtgatattttgctaaaagaggtaagaaagtgaaaagggacatacatgacggttacgtggagcaacaggagcaggaagagagaatctgccccttgcaacaactgcatgaaaagcccacagcgggaaaaacaccatcctgcataaccccaaatacagaaatattttttatcagacccaagtaaaaagctgaatccttttggtttcgtgaaagtcattggtaaatgcatacctctaaaggatgtaactttttaacacactaggatacaaaatgcatacatgacttaccaaaatttgcaaaaactttatacagtaaaaactattgacgtgattgcttttgttgctattaacggcaaatagaaacaatgaatcgggaaattgttaaaggatctgctttttcaattctctcaaaaacaaaaactgatactttgcctaaacaaaaagagacaatctttagcttc

SEQ ID NO: 25789 - DNA, 901 bp, Arabidopsis thaliana landsberg
  unsure (1)..(901): unsure at all n locations
ctggcacaaaggttgttgagataggtatgttcttgtttcctacttcatctcatatagtgcttcttggaatcacatggtgtatgtccatagggttgaagttggctgaagatttcaagaaatatggagatgagaatcctgatgctaatactcctctatcaagagtcgcacatcactttgggacctcttacaagtcggtggaaggcgagagggaaactctcctcggagttcttagtgagcaggtaaatttcttggaacgtttatatattattctctaatctttaccgggcagggtctgtcaagagaactttgtgagtttagttacagtaatttgatttgtgtaggtttgtgagccaattcgtacaatgatatatagtgcgcctttggaggatgctcggcatttggtgaatcactatgacaggctgagacaagaagtcgaagctcaggtaaagtcttgttgaacttctcttttgtttgttttgaggcaccttgaatttcttgcggcatttaacgctttttgattaacaggcaactgatgtactgaggagaagatctaagttgaaggaatctgnnnnnnnnnnnnnnnnnnnnnnaaaacttaagaattccgaatcgagattagctgagctcaaatcaagtatgaaaactcttggcaaagaagctactaaggccatgttggaagtcgacgatcagcaacagaacgttacttctcagcgcctccgtgctctggtaaatctcccttgaagttcatgattgtgtttacttgtccgtggattggatatgaaatgatattaccaacgcaggttgaagccgagagatcataccatcgtaatgccctcgatatccttgacaagctacatgctgaggtcagtaactcgctctatctatatangtcagagaatga

SEQ ID NO: 25790 - DNA, 986 bp, Arabidopsis thaliana landsberg
  unsure (1)..(986): unsure at all n locations
caaatgcaggtgagccttttctggacacgaccttcaaagtgtccttcttaaaatttctttttatttttgtgtctattaaagcggtgcttaaaaaaggaagataaatacaaaaaaacattcatttcagactgctctctctctctctccctttcactttgcgtacttagcagctaagtagcttaaaaagttgtggctcctttgctccgccattgttagggtttatggatctccgtttctctgtatgtacttctcaatgttgcatctctgttcgtcactgttgatttttaaccatcttcgcctaatgacttttgtttgttttcagggaggctgaggaaaccttaaaacgatttaaaacctggaggttatagggtagacaaaatgtctgctacgagaggaggtcctgatcaagggccgtctcagcctcagcagcgggggattatacgaactcagactgctggtaatcttggagagtcattcgatagtgaagttgttccatcatctcttgttgagattgcccccattcttcgggttgctaatgaagttgaatctagtaatcctagggttgcgtatctctgtaagttcttctaaaacttatttcttaatttggttctctgtcatttggttgtttatctggtttttggttctgctttctcccttaggtcggtttnnnnnnnnnnnnnnnnnnnnnnnnnnnnntcctacctccagtggaagaggtgttcggcagtttaagactgcacttctacagcgtcttgaaagagtgagcattctttatactctgcttgattcttgcatgtggcagatttggatagctattagaaggaatcttggttttagtacttttctttgacaaatgtggtctactgttgctttgatttttttgcaggaacatgatccaacactgatgggcagggttaagaaaagtgatgcccgtgaaatgcaaagcttttatcaacactactataagaatgttattcaagctttgc

SEQ ID NO: 25791 - DNA, 1042 bp, Arabidopsis thaliana landsberg
aacacctgttaacccaaaaataattaagtgtagtttagtaacattgataaataaaataattcttttaatctttctttatgtacaaccatatttctaaaattagggatgttacatttaggtttctttttttccttgctagaatgtaataatccataataataataatgatttagattctaatctttcaattataatatatacaagtggtcccatggtaaaaagaaaaaacatggaagcataaatcataaaagcaatttcagtccactactcaatataaacacaaaggctaatgaatctagacaaagtgatgacgatatcatatttaatttccaaatccattgttcgaaatgagagtgcgaaagctaagtggaaaaagccaaaattaccaaaactcttagcactagaaacctttcactggaggcccaagattgagccgtcaacttcacatttacgttcatcttgacattttaaaacggctgtcaatttccatcacgaaaagtgtgtatatgtgtattgaagtctcacttcgagtatgttttttttgttgttatgtgattctatcgagttagtattgtttgctattggcgcatacatctttgtggaccagagacaatagcaggctaattagtcattttccaacgtgtttcgaactggagacccggcacatgagctacaacctttaaccacgtgagtatcttgtgctggttggttatcgagttattgttaggttttggagtcttctaagatttatgtgaaaccagtatcattaaaagtgatagcaataaaaaaagatgaaacagatttacgtagcagtatattattatgatagtcttattaaactgggtttcttcttcctttttccccttcaaaattcaaatcaaagtctttgtaaatttgttacgtacaaactaaatattggagtataaattattatgtgaaagtgtggaacatcggaatttgtaatatatttgcattacatgaccctagggctgagataatcaattataaattaattgtcatgatcgtatcgtaacaccctttt

SEQ ID NO: 25792 - DNA, 1058 bp, Arabidopsis thaliana landsberg
ggaggaattagatgatttgagggcccaaaagcttgaaatgctggctgaagctgatagattgaatgtggagaatgctaaatttgaggctgagtgggaacacattgatgtgaaaagggaagagttaagaaaagaagcagagtatataactcggcaaagagaggctttttcaatgtatctcaaggacgagcgtgataacatcaaagaggaaagagatgcattgagaaatcagcacaaaaacgatgtggagtcgctaaaccgagagcgtgaagaattcatgaataagatggtggaggaacattctgaatggcttagcaagatacagcgtgagcgtgctgacttcttgttgggcattgagatgcagaaacgagagttggagtattgcatcgaaaacaaacgagaagaattggaaaattcttcaagggatagagaaaaggcttttgagcaagagaagaagttagaagaggagcgtatacagtcgcttaaggaaatggcagagaaagagttagaacatgtccaagtggaactaaagaggttggatgctgagaggttggagatcaaattggatcgtgaaagaagagagagggagtgggcagagttaaaggattcggttgaggagctaaaggtgcaacgagaaaaactagagacgcaaaggcatatgcttcgtgctgaaagagatgaaatccgacatgagattgaagaactgaagaaattagagaatctgaaagttgcattagatgatatgtccatggctaaaatgcagctgtccaatttagagcgtagctgggaaaaggtttctgctttgaagcagaaggttgtgtctcgggatgatgaacttgacctgcaaaatggagtcagcactgtgagtaatagcgaagatggctacaactcttcaatggaaagacagaacggcttaaccccttcatctgccactccattttcatggataaaacgatgtactaatctgatcttcaagacttctccagagaaatccaccctaatgcatcatcatgaagaagaaggagaatttgccttcagaaaaagttgagctagaatcgtcg

SEQ ID NO: 25793 - DNA, 1199 bp, Arabidopsis thaliana landsberg
  unsure (1)..(1199): unsure at all n locations
gctctacagttcacataagagagacccagtgagtgagattagaaacacaccaaaacaggactagatgctaaataacctaaatcaaacgcaaacttctgttggttcttgctcatcttattatactccaccagcaatgtaacaaaagataacaatcatcaaatcacagatcttatgcaaagtactacttaaagtaacctaagagactataaaatcaattcttttccagacatccgattcaaaattacaatctactgaatcatatagagatcgaaactcgaatctttaagaacatgaaaacaatcccaactcaaaatctccagtaaagtctcaaaatttatacatttcaagagttgggaagcaaagtatcacttgaagccaagatgtataagaatcgcagcgcgagacgacacaggaaaaaaaaaaagcaacaaaatttagagttttgttcagagaaggaagtgaaaaagacgtaccttgttgcagtagaatcgatcgatgatgatgaacaaagaagagattttttgttttttttttatctttctttttgttgcaattggtttcagtcttctcggccaagacagcgagaaagctaaaacctcaaacaaatctcataggcgtgtcgctattatgtgccgctatcgtgcgctactattgtgcgtcgctatcgtgcgatactattgtgcgcctaaagatgctgatttttttttcattcatttatgaaaaattattcttcttttatcctttccaagtattttattttatatttcaaatcaatcgtctatgtactgtatatcaaattatgcaatgaaccaaaaaaaaccccactaaaactcattgagggggtagtatgttgcatacatgtcgaaggaagcttattttgaaattacattatcttaatgatacgcggaatcgcgttgttgccactgcctaattttgaacttatccaagaaaaaacaatggaccgcggtgcaggcnnnnnnnnnnnnnnnnnnnnnnnnnnnnnnnnnnnaaactgtatacttaaaatttcagattgagaaaccgctccattcaaaacggtttagagccggtcacgatcctgtggaagatgatgaaccaactgctcaaagactggactgcatcctactcgatgtggaaattcctagactccgcgtgggtcagattgatgagatataaagcgtgtgcactactaatattcc

SEQ ID NO: 25794 - DNA, 248 bp, Arabidopsis thaliana landsberg
tgtgggatttgagcatcttttacattctcccaaaatctctgctttctagggttttgtgagttttggtgggatgagtagtgtgttcagtgatcagatcctgattgataagctcgctaagctcaatagcagtcaacagtctatcgaaaagtatcctccttttaaccacttcacctccgagttaataatgaaagttttaaccttaatgcctaagacttggaaatgtgccttaaaatttccaaggttgggtt

SEQ ID NO: 25795 - DNA, 845 bp, Arabidopsis thaliana landsberg
accaaaatgcccacgctatatagtctttgaatggcgcttattgcctcgtttgctggtcgttgttcaataatttttttccctttcgtacaaaatggtaaaatagaaatacgacgcgttttaaaaagtgcgcggcatacttgttctcgagactttttgtatattgtttcctccaatttgatagttttatcgaccggaccggaatagactttttgtatatttattgttttaattttatttttaaatgataaagttaaggttttagcaaagttttccaactctctaattttcataatgactagatttctttccgaaaaatcaatctattttattaattaaaaatgtatgttcattgtaatttatttaagaatacgacctcccatttataagaaatatatttactgccaaaagaagaagaatataatatacagtcatttatataaaatataattgtggaccttttagttaattataccaaataagagataataattatattaattatcaattaatgagttgtggaccctttgttgatttttaaaagtaattaaaatatattaggactattttaattttaaaatgaaatgtggacctataattttaattaccaaatgataacatgtgagctgtatattgagatttaatataaaaacttaaatttaaagtcttagaacattttgatttctttatatattttgatctttactctactaaaaaaaaaaggatacgaaaataaaatgtttgaattgtcaacaactcaacattacttgattcattttaatacaattaatctataatattgcaacatttttgtatatatgcagtttcttaatagtcgagaatatatt

SEQ ID NO: 25796 - DNA, 878 bp, Arabidopsis thaliana landsberg
tcggtagccaaattcataagcaagtctttgctacgattattgtagaaaccgacatgattggtacatgacattgaatgttaaaatcaaaaccaatcacatatctctattctctaccaaaccaaattgcaacttatctcttgtaagaaacttcaatgattgcaacgggcgaaaatattgtctcacttttttattttatttgtgtcgtccgcaattaacttactcacataatcggaatccaagttagcactaatacaaagtatgtctttatgtagcaatgttgcatcgttttcaaagaagtgttattcattgcttactttcgtaatgatgattttttcccactcgtttgtcgttactatttactatcaatgatttataaatcatcgttaatgaaaatttagatctattttagtaatagatttgtttggtttagtacaagggattgtgaaaaagataaatttgatgattaaagaggacgcaaagtttggcgagtctttactctatatagagatagggtctaagcattcacatgcacttatgaaccgtccaacatcaacgttaataacgtgtgattcgtatcaaagtttacatatatttggcaaactttaatttattatcttgaaaactatatgtttcatttttgccgttttgagtaaagaatcgtacacccatcaattttcagatatatatgagccaatccataattaatctgattgattagagagaacgttataaacatctttaagatcaacagtatattattggttgaccaaaaaaaaattattttgatggtgaaagtcacataaatcaagtataagttcttgtcaaatttaaagtaatctctacgaataataatattggatacatgaatcatattttgt

SEQ ID NO: 25797 - DNA, 998 bp, Arabidopsis thaliana landsberg
catatatgcctttgttcccttcttgtgggtccctttagcctttttttttcttttgcctgcgccgtttagtgttttttttttttatatataaatagaggtaagttattttaccaatcatttggtgttattaatagtagtattaatgaggttctaaacttgtttataaaaatcagatcttactaaacaaactcaaagaatctcaactatgaacatttttcttctagaatcgagttttaacatcatcatcagcaggatataattttttgtgtttgaattttatctgtattttttttggagtatataaacagcttaagattaaaatatatattaatggaagtatgaatgaaaaaagaaaagaaagataatcagataatagagagagagagagagagagaaggaagcagacatttgtcttccaccatattcttctcatcttttccgatgatagattcttcttcttcttcttctactactacttctgctcctctttcttaagtttctccatttgataattcactcaagtctccagctcctcttcttcttctcgttgctttgttcgctctctttcactcatcatcatcacactcaaagatttctgttgtattggagcaagctctagcgaattttcgtactccccttgtagaattttagtttcctgttttagatttcgaggaatctcgctttggaaactttaagttcctgttcaaagtttctacctttttttgcttttgtttttgttgtcttctctcttatccttcgtcatctttgattaagtaaccactttgatctctcactttcagcctttgggttgtctaatcggacacgatcctctgacttagctttacttcccagttcgcgtaggtgggaagcctacgaggcttgatcattaaagttcccaaccgacaaaaaatgagtccttgttgagtctgtggatcgcccctgtttgtgcatggtttgtgcctggttgttcgagctccttgctgggttgacatgagctg

SEQ ID NO: 25798 - DNA, 1203 bp, Arabidopsis thaliana landsberg
tgtaggttcatattgatttatctctggtgtttagtttcactctttgaaattggactagaagatggtgatcttgccagatgaaatttgttatttgtgtctggaaccatcagatttgtttgactccttagcattggttttaccagtctggcatcgttttaggttttctgttcctagtaaaatacccatcttcaaaatcgccttttgtttctttacgatctgaaatttggcctacgctctcgtataaatatagcatagttgttctgcaaaagaagtttccatggtcagttgttatgaggatttgatgaagtttgtggtgttgtttacctttccatttttcagctataggccttcaccctttttcatacttgatgaagtggatgctgcgcttgataatctaaacgtggcaaaagttgctaaattcattcgtagcaagtcatgccaagccgcacgtgacaatcaggatgcagaggatgggaatggcttccaaagcattgtaatatctctcaaggacagcttctatgacaaggcggaggctctggttggagtttacagagacaccgagaggaggtaaggagaatatccacataaatcttttgtacatgcgtctattttattggcataatatctgagaactcggtggtgatgtattttttgctgcagttgctccagtacaatgtcatttgaccttaggaactaccaagaatcgtgattggttcaacaaccctcgggggattagggtttaggtaagtataaaaaccctaactttgtaagtatagcaagtactgaatggtgtttgattgttagctttgtaatttttgtgtcacaatgttaaaaggtatttcacagtggtaaggtgctttatttgcgatttgatttggcataggaccttataagttctgacactgtagagaacctatggaaccttttcttatgtgatactataagaaactcgtggttttagctgcatctgattgacgttttatgttttgataatagtttttggagacatgttgtcaaagtagaagtaaagacaaatgtttctttaattcgtcggactagaaatcaaagaaagccatttttgtcgtcccaatcgactttcaaaaaagctttaaatcagaacgccacaccaacaatgaatgaatccggttgggatttattaataacccagacaaagcttaaattcaaaagtttgacgttcaggat

SEQ ID NO: 25799 - DNA, 1384 bp, Arabidopsis thaliana landsberg
atgaaaatatttttcatcaatgttttctggaagtacataagagcttaacctgatttgacaagttacacaacatatttacatgctgaatcaatatgttctcctttgcagaaataaacaaagggaacaacaacaaaaaaagtaattctatagaaagaaaaaaaaaagttttgggctttcccaaaaaagttgtctcaagttgaaacaatacaaccataagaattcaaaagaccaacaaatgtttcttctctgcatggaatcgttaatccaccgattggatgattgaaaccaaactcttcctctgctctactaagcaaaccttgaaatgaaggatggttcaaatacgaaatcggaaccacgaatctcttcttgctctccatctcttctccgacataaaccgcaacatgtcctttcgggactcgagattgctgtttttgggactgtttagagttgatcacacgcgacaatctaatcgtcatctttaaaagcaagaagttttataaatctctattctgttttatgaaatcagagaacgattgatgctttttggtggagttgtgttttcggttgttggtgttatatatagagttctttataggtaaggaatcaaatttcaaagtcatgttttaatgatacaacagattttattagattaaaatattaagagtttgcagagtttcacatggtatacttttaaaaaactagggtttacctagaaaaagcatcaagctgattctgatttctgtatgacttaagaatgaatataatcagatagggacccatcattgttacaggactcacatgcactctgtcacttattaaaatctctggccattacatgaaaccagtttggtcctattggctctcatgaatagacaacagaaacaagtgtccttattgatgaaaatagacattttgacaagtcaattgttgggttcttgaaaatgggtggcttttttagtctattttgtgttgccctatagcccacttaagaggacccttttgtatcttaagtaaaattgactttacctaactttatattattaaatttttactattaagcttggaatcatgaaaatgagaaacattgaacgtgcatggtttcttagggttcttagaatgttgaatcaagatcacgaaaacatttattggtagaagttgttggtcttaattaaagttaaatatcatgagttttgggactcaacgcctccgttataacaccagaacttacaacaatagttcaatcgatatcctcattaattattgattctacaacatcaagttaattgtatgatttatttatttttttgtccaggatgaatttacttaagaccatcattaatttgttatcttatctgcaatattacggtggtaagatcgaaatgat

SEQ ID NO: 25800 - DNA, 862 bp, Arabidopsis thaliana landsberg
  unsure (1)..(862): unsure at all n locations
ccattgagtccatattatataaatttaagtgaatttacgtaataaatttatcataatattaattttacctctgcaatgtggactgaagcatccagagctaaaataagcttctgtctttacataaattattggtgatagttaaatgattttggttgagttacagtttaggtcatcaacatatacaacaatgatcacaaatctcgctggacatatgatcataaagacgcagcggcatctttctttaatatatatcatttgtttaacaaataatcgattaagagattatatcatatgcgactggactgctctaataccgaaagtgatcgctgtaattggaccgtacaaattttattagattttgagtctaatgcctttggaactttaaatccttttaggatttttatgtatatatcgttatcgctataccgggatggcttgaccggtcgtgctatgcttggagcattggtaaacttcatgtttactatatgataaataaatttgccatctttatttttacatgatttaatcaatgtgtgtctccactctggtcaagcaattgacaccatattaatttatagtctcaatataagaattataagaattataagataattatcttagaaactatactagtttttttgagactttggagaacacaaagcatcgattattatgaatctagtgcatttggaagttgagagactagctcatctagatcttcccattatttatgcactgcctaaacatatatcgacaagtgcttcatatattctcagaacataactatatttttaattttaaaaacatattttaatgtctntaaatattatgtaacacatatttattctctacgaataaataa

SEQ ID NO: 25801 - DNA, 847 bp, Arabidopsis thaliana landsberg
atttgcaatgtccaaacaactaagtagaagttaagatgtgttttcaattcttaaatgttatgagaatcatacaatctattggctagctatgagcattaacatgagttttggcacgaaatttgttatgaaaaaacaaaacttctccttttaaatacttcattaattgtttaccattaccattgttgatttggtacatatgatttctcgttccatcttgggttaatatctctttaattaatatgttttagggttattgggctcgtatatgtagtgagagactctacataggaagctagagttgtaacacgtagaatcaaaggctaatattaatgtttcttaatcaatggttaatatctctttagtttaacattaaaagagcacgagcaaaagaatataacaagagaaaattgtggtataaaatatttgcttgagaaagtttatataaccacgaacgagttactcttttatttatttaaatttatatatataacacacctagtcatctacacacaaaagagagagagagagaggttctgataacatagatcaatcaatatgttactcactgccggcagcaatactatcaccggccatttagacacgtttgagagactcgaataatataattattggatatttctccttttctatatagtatctattcatttgagccacatcatttactaactacaaattttaataaaaaccttgggaaaaagatgtgtagagaaacatgtgacatatgaccttttcattaccaaaaatatgttgggacgactgacgagagctaagaaccactacattcttcaataatctatgtatcaataaaagatatatatggagtttt

SEQ ID NO: 25802 - DNA, 1056 bp, Arabidopsis thaliana landsberg
cagtacatcaaagatacttaccatgatgggacatgtgaagttgctacagttggttagtgagctgagcggttggattagggactagtatctctatcatctctttgctttggtctctaactgcgtatgtttcaattgcagaggatgggaaacttatggctgatgctgatagtggagaattttggggtttctttggtgggtttgctccgctacctaggaaaacagctaatgatgaagacaaaacttataattcagatatcaccagattattttggtagcttcttctcgtcataatacatatattttgtgccataatgcctcaaatgaacactattttctttactgaatttgtagtgtcgagaagggacaggcaaatcctgttgaaggcgatacattgaagagggagatgctggatacaaacaagtgttacattcttgattgtggaattgaagtgtttgtttggatgggaagaaccacttctcatgaagatagaaaaattgcgagtaaagcagcagaagtaagttttttcaaaaaaaatcgaaagaaagtctgattatattttgttgtatgccataatgtttgctgatgttagtagagccatacaggaaatgatccgttcatctgaacgaccgaaatcgcaaatgatccgcataatagaagggtttgaaacagtaccattccgatcaaagtttgaatcttggactcaagaaactaatacaaccgtgtcagaagatggtagaggcagagttgctggtccgtattactgaactcaaaattggatgatgattttaaatacgtacaggtagctgaaggttatcgtggtttttcttttgtcatttgttgagcagctcttttgcaacgacaaggagtaaatgtcagaggcctgatgaaagctgctccgcctaaagaagagcctcaggttttcatcgactgcacgggaaatctgcaggtttggcgtgtgaatggtcaggcaaagactctccttcaagctgctgatcattcaaaattctacagtggagattgctatgttttccagtattcttatcccggagaagaaaa

SEQ ID NO: 25803 - DNA, 1476 bp, Arabidopsis thaliana landsberg
  unsure (1)..(1476): unsure at all n locations
acccgaaccgatccaaactcgattaaatccaaatcaaaaccgaaccgataattgagatttagttttagatactaaacttttctacccgagattcgtacctggtcgggttcgggttcgagtagttatagatactaaacttttctacccaagactcgtaccggatcgggttctactcgaacccgaccagcttacccgaatgtccactcctaagtgattctgttattgtagtaaaatcagattcatctctttggagaaaaactgatagggatctctcttaattggcgctcctttactaattgccctataattccatgcatcttcggagtcttttaaatcaacaaaaaaagtacaaatcggatccctacgatatcctatctcactcttcacaaatccttctccgagatctacaaacgctgtttcattcttccgatttcaatggcgacgagaagacgtacattgcttaaggtcattgtcctcggtgacagtgggtatggaagattccgatctctaaattctttcaatctttacacatattgttcgattttgattttgatttctgattttcgattttcgatttctagggttggaaaaacctccttgatgaatcagtatccttttcaattgaacaattcattcgatttgggtttaattggttacagattcgttttcgtgtattgattatgtgattatgtgaaatctttaatgggtgaattttaaatatgtgcataagaagtttagtatgcagtataaagcaacgattggtgctgattttgtaaccaaggagcttcagattggggaaaagcttgttactttacaggtttggctttttgtttttaggttttgaatttactttttttttcaaagatttgtgtgttttacttttgttttttgtggtttttagatttgggatactgctggacaagagagattccagagtcttggtgctgctttttatagaggagctgattgttgtgctttggtttatgatgttaatgtcttgaggtcttttgataatctcgaaacttggcatgaggagtttcttaaacaggttcgtatgaaaatttcccttattttcggtacactttgatttggtatatgattgagtttggctctggtttgccttgtttgttatgttatagacatggaacataggaatgttatgataggaatcattagctttgactatttagagtcacaatcttcagattttggttatcgtcgtatgtcttttggttctcagaactatagctgaagttttgttttcccgttagtaactagatgattgagcaatggaacatgtttttatgtttgaatgatcatttgcgtttctatacctagcggnttactggttaagctaagtatattactaacttgctttcgtgtcatacagtttagaatcattatctataccattatacatgctactcgattgattcctttcatgcatcgtttggactgtccagcagccatcgatcc

SEQ ID NO: 25804 - DNA, 659 bp, Arabidopsis thaliana landsberg
  unsure (1)..(659): unsure at all n locations
taatgacgctcaacagtatactatacgtttatataaatgataaatttatatttatttttaaagttttttattattaaattcgctttgattgggcctgataagcccataatagaatggcccatcaagaatagaaaacctccacgcttgaattcttcgtgttaaggcannnnnnnnnnnnnnnnnnggagccgtcacattctttacacataaccaaatgacgacacggcaaagccaacaccgtcgccgatcgccgccggcaaattctacatcccggtccgatcatttcgacccgatcaggatccacgtaagccgattcagcgtcttcagcttcatccacaccgtctacgcttcccgatttttgctccgccatcataataactccgccgccgtgagctactactacggcttgttgtaattgagcttgtaacgacgtcgcttcggcttctctggccgctgctctcatttgccaagcacgtgcctctgtttcgatctgagtcgcacgtgcttctagctcgacatgacgacgtgtggctttctcgatctccgtttctttctctcttaatctccgccttactgattcttccgttgttatcataagctcacgatagtgcctctcactgttttcagctaacatgcgcctaagctgctatcccttcagc

SEQ ID NO: 25805 - DNA, 1688 bp, Arabidopsis thaliana landsberg
ttagttttgggttcttttctaactaccgtatttttgaagtttttttttgtaggatttttttcacctattgattttcgtggatatgataaaagttttttttagtatgaatatgatggtttggacggtgacattatatgtgcatattatccaagattgtgcatgactacaagcaacacaagcgatctttatacaagatttattacaaatagtcatgaaaattagttaaactttacattaattatataaattgatgaaaactcaagagatgatataaataattaagacaaaactggcttaagaaaagaagagttgaatgaagttggtattagttttgggttcttttctaactaccgtatttttgaaattttttttgataggatttttttcacctatggattttcgtggatatgataagagtttttttatttcttagtatgaatatgatggtttggacggtgacattatatgtgcatattatccaagattgtgcatgactacaagtaaaacaagcgatctttatacaagatttattacaaatagtcatgagttaaactttgcattaattatataaattgatgaaaactcaagagataatataaataattaagacaaaactggcttaagaaaagaatagttgaatgaagttggtattagttttggttttttttctaactaccgtatttttgaagttttttttgataggatttttttcacctatggattttcgtggatatgataaaagtttttttattccttagtatgaatatgatggtttggacggtgacattatatgtacatattatccaagattgtacatgactacaagcaacacaaacgatatttatacaagatttattacaaatagtcatgaaaatcaaattaaactttgcattaattatataaattgatgaaaacttcaagagatgatataaataattaagacaaaactggcttaaaagaagaatagttcaatgaagttggtattagttttgggttcttttctaactaccgtatttttgaagtttttttttgtaggatttttttcacctattgattttcgtggatatgataaaagttttttttagtatgaatatgatggtttggacggtgacattatatgtgcatattatccaagattgtgcatgactacaagcaacacaaacgatctttatacaagatttattacaaatagtcatgagttaaactttgcattaattatataaattgatgaaaactcaagagatgatataaataattaagacaaaactgacttaaaagaagaatagtttaatgaagttggtattagttttgggttcttttctaactaccgtattttgaagttttttttttaggatttttttcacctatggattttcgtggatatgataagagtttttttattctttactatgaatatgatggtttggacggtgacattatatgtgcatattatccaagattgtgcatgactacaaacaacacaagcgatctttatacgagatttattacaaataattataaaaatcagttaaattttgcattaattatataaattgatgaaaactcaagaaataatataaataattaagataaaattggcttaagagaaaaatagttgaatgaaaatgagttaaactttgcattagagaagtccatcccatgatgctgagccaagaacttcttgagca

SEQ ID NO: 25806 - DNA, 2089 bp, Arabidopsis thaliana landsberg
  unsure (1)..(2089): unsure at all n locations
actcatgtgtgtaatctctgccaatgctgtctgtagactttaattaattatgttacacatggtttgggtatctcttctataaatgttgctacgaggattctcatgtacgtagtttattagaaaaatggatatgggttcaaagttgttacttccttaacataccaaatcgagtatatatctctatcttctaatgcatggttaagctcgtttagtgcagtttggtttctctctatctgcataaatttttattagtgaaaagccaacttttgactaggaaaaaaagatactatatggaaacttcaacgtagatcagggcaaatatagcaaagccatgattactcaactctatgtactgacacgccatgacaaaagtttcatgcaagtttcaaaagtaaagcatatacacaatttgcaacttgaatgtttgttctctacaggcaagtgaatatccataacatactacaactaacaaaacctttaatgattttatgatagtgagattcctagttgaatgttctctagaaaaaaggttaaattgagcaaccaaaactgatccaagaagaaaaacaatcataacgagaaagcaactagatacacatagaggtgactcgaagacggagtgatgtgccatgagatcaattcgtaatattctgtgtatgtctgaaagtgtagccgtacaaaccataacacatccataacctactttcaaatcatgaaacaatgtaaggaataaaccacatacatgtagtcagaagccgcaacacaatctcatcaagtgcagagtaatagacaagtacacatattcttctatacttgcaacttgcatcaaccacaccgccggagacggatgtgatatttcagacgacaaaactagtcatttaatagatcacacagcggttttgtaaaacttacaaaattaaaacatgaaaattttgtccatatagaacaatagatgggaagaaaaaagttaaacgggtaagtgaaaaacatataaactatatagactttgtaaattgagactaatcaaccttgatacgtttatcatgtctcatatcaatgtcaatgcctttcctaatcacttttttttgccttttgcctctattatgttgtttgatttgcactgtacttggaacataagagcacacatgtggccaacagcttttgtctccagattctttaagaaccaatttcctcacgcatccagcctctccaatgatattaataatgttgtgagcgacttttttttcctttttctttatcaaaaaccatagcaactttcttctccatgtcaatgaagaaactcttacatgaaagatttcgctcaaggttcgatatatatattgtgaagaaattgctccaagttacatttgtggcatcaatcttagtcgtaatccatatcacaacctttttgcttgtccgaaataaagccgcgatcttctctgctctatccgaagatagtggcgcaaaaactaaacccctagccttaaacggcagaggtagaagcggtccaaatcctcctcttgtaaaatcaaagcagatcatatgaccaatggatccgtatgcgtgccgnnnnnnnnnnnnnnnnnnagtgtttcccttgagagaaaggccacgttcagacattataaaccagtgtggagacacatcaagagtggtccatacatcagaatcaaaatcatagatttcatactggggaggcatgttttcgctgaaaatgttgaaattatctgtaaccctcaagattttggggctacgacaagatctgttttcactattatttacgtatacgagagcgtacttttttcatccactaacgcagcaaatcaatcttgtttggatccaccttgtatgcccccaatacggattccaaaccaaaaccctagtaacgtcgtctttcaagatgcataacaacaaaccctcaaagtggaaaatattagatatactcacttgattgtgaatgaaaagttgacctttaacctctatagatggatcaaagtcgacgacaccgctcattaaacaaagtttgtgaggcatcatcatgatcatcatagtctctccatctcttgttggtgttgtcctttaccaatgt

SEQ ID NO: 25807 - DNA, 1493 bp, Arabidopsis thaliana landsberg
  unsure (1)..(1493): unsure at all n locations
gttgcatcggtaacatctgctttagctagtctgagtactgaagagagtgagagaccgaatccacatgttcttaaggacgaagatggaaatactgctctgtactacgccattgaaggacgctatttggagatggctacctgtctggtgaacgcggacaaggatgctccttttcttggaaataacaagggaatatcttccttgtacgaagccgtagacgctggaaataaatttgaagaccnnnnnnnnnnnnnnnnnnnnnnnncagacaacgtggacccagaagtgaggaagtttaacttagattcgaaattgcaagggaacaaacatcttgcacatgttgctttgaaggccaagagtataggtttgttttctgttttctttaataatcagtaacagctacgtttaatctgttaaaaatatgtaaaaccagcttgggacgagaatctcctccccaagatggctaattgttgttcccaattgtttgagtaggtgtccttgatgttattcttgatgaatatccaagtcttatggacgagcaagatgaagatggtaggacttgtctttcatacggagcatccattgggtattataaaggagtatgcaacatcttaaaccgatcaacaaagggtgtttatgtctgcgaccaagatggttcttttccaattcattcggctgcaaaaaacggtcattacgacattattattgaagagtttataaaacgttgtccagcttcaaaataccttcttaacagacttggtcagaacattctccacgtggcggcaaaaaatgaggcctctcttactgcatatatgttgatgcttgataaagatacgaaacatctgggtgttgggcaagatgtggacgggaatacacctctgcaccttgccgtcatgaactgggacttttactccattacttgtcttgctagccgtaactgcgagatactgaaattacgaaacaaaagcggcttaagagctagggatattgccgagtcagaggtgaaacccaactacatctttcatgaggtatttctgattccgtttcatacaacacatttgatccctcataaatgatttatagtttgacctccatatttttggaattacagaggtggacactggcgctcttattatacgctattcactcaagtggtttcgaatctgttaagtcattaacaatactgtcagagccactactagaccctaataataacagacattacgtcaacgctcttctcgtggtagcggctcttgtagccacagtgacgtttgctgcaggctttacaataccaggtggttatatcagcgatgccaacaaaccaaacttgggcagggcaactttggccactaacccaactctcttcattttcctgctttttgacatcttggcaatgcaaagttctgttgcaacaatatgtactcttatttgggcgcagttgggtgatccagcactcatcagcaaatccttacatgtggccttgcccttactacttt

SEQ ID NO: 25808 - DNA, 803 bp, Arabidopsis thaliana landsberg
gtccgaagagaccgctccatggaacggaacacgattctgtaacaatgactcgtcagccctttcttcttattggtgaattggtcaattaacttcacctgtgaatgcaataaaggctataaacaaaggaacactgaagaatatgatgatacaattaaaggatagctgaaaagtaaatttgattcctgtaaaagctaatattctctcccaaacaatcaagatataagatacctcttcaacaagatccccagcaattcctctaacaacttcacaaaaattattctctgtgaacaaatcacttatccagaaactgatgtccttgtaacaaggaggatactgcagaacaaaattttgtttgccatcgttaaacatacaatacagataagtcttcaactagagttcattagtctacgagacatggacattaagtgttttacctttgaatatggcttgaatttcactccaagttctccttttccaaactgcatgtaacatcaaatacattaatgtgagaaaataattcatatttttagacgattagtctcataacctaaaatttgaagttgtcacccaagtaatcacctgggacgtgaatcgttcatcggatgaccagaaaaatcgtatatcaggtatgtcaaacaaaaccatagcaagtctctcaagtccaagtccgaaggcccaagcaacattattttctaatccactttgtttcagaattacttgctcggtcaccccacagcccaaaacctccaaccagtcttcctgaaccgataaccagataatagcttgcgttagatgagaaactg

SEQ ID NO: 25809 - DNA, 731 bp, Arabidopsis thaliana landsberg
gtttatcgggtcttcaaagttgatattaagcttattatatagtcttctctctaaatccaactcatggtggctccattcaggtatgggccttcgttccaatatgctggtgattacacagacaacaaggacttagacattttcaggaggcgaaaaacaagagtcatagctatagatgccatgcctgacccaggaatgggacagtacaaacttgatgccctcattcggtaatcaaaacttgtctttcagccagtttttcattctttccttttttttattttgtttgtgaattactcaattgctccttttgtttctgtagagaggttaataaggcttttagcggatacatgcatcaatgtaaatataatatcgatgttaagcatgatcctgaggcatcatcttcggtaagaccacaattatgctccatacatgaatttagcatacatgttaagcattttgtttttcttgactagaccaagattaaatttgttttcgcaaagcagcatgttcctcttacatcagattctgcgagccaagttatagaaagctctcatagatggtgtatcgatcatgaagagaaaaagattggtgtagctacagggaactggggctgcggtgtgtttggaggtgatccagaactaaagatcatgcttcagtggcttgccatttcacaggcatgcttttctgttttcatcaacttatcttacaaaacataattatcattctatttaact

SEQ ID NO: 25810 - DNA, 579 bp, Arabidopsis thaliana landsberg
caagatatcaatctgcaacataattcccaaaaccaacaatgcagaaactcaaattcaacatcacatttcaacaaaaagttgattttaagaacaaaatgagtaaaggggatggataacgataccggattcaggcgagaaggattctcatggaagccgaaatggcgggagactaaatcctggctcgatttcgtaaagctcttcactttctccaacaccgaagcaattgggtccatcttttaatcagaaactggtaaggaaagcttgaagattctagaaaatttcgaacccagtgatgatcatttctatcgatgataagaggatttgaatagagaagatgcgaaaatgttttagggtttatgtgtttggattttggggtttttgaggattttggtttcaaaatctggaattggacgatccggtttcttacgtcggttcgtttcggttattttcgaatttctgattatttcggttaaagagtttggtcaacctaaaaccagaacaattgattatttctgattatttcttcttttcttttggtatcattgcatcaaaggcgaaggataccaaaggtaaggatat

SEQ ID NO: 25811 - DNA, 563 bp, Arabidopsis thaliana landsberg
  unsure (1)..(563): unsure at all n locations
ttttctaaactcactcaactaactaggattcacctagagcaagcactaaagaggtctaactaacctaagcacttcgcaaagcacctacgctaatcaccaagtgattctattaagcacttgggtgtatgagctcttggaaatgtctactatatgccttggtatgttgcttgggctcccacaccttgaaatggtcggttggggtggtatttataggccccacaccctcaactagnnnnnnnnnnnnnnnnnnnnnnnnnnnnnnntcggtgcaccggacagtccggtgcaccaccggacactgcatagtagatgtccggtgcatgccacgtcagccgaccgttggcgcctgtagcagtcgaccgttggatccgaccgttgtcgtctgcccgttggcacaccggacagtccggtgctacagccagagagcgcctgtctgcggcctctctgcgcagactgtccagtgcctcaccggacagtccggtgcacaccggacatcaatgtcctggtcgccaccaggcgctggctgacagcccgtttcttggattcctttgctgatttctgcg

SEQ ID NO: 25812 - DNA, 1041 bp, Arabidopsis thaliana landsberg
  unsure (1)..(1041): unsure at all n locations
gatcttttcttcttattggagtttaacgcattagacttttaatttgcagattaccatatggccatgctacaagtaccaacgtttttattcgacagaccaaagaatatactaatcgaatcagtgacgtgtaataaaccgaggaggaggaaaaagaaagtgtaaagataagcgaagcaagtacatgtggcagtcctaggcttccgagcaactcaatatctcttccccagatcctcctctctcttcttcactcttttaacggacacttttcactgatctattcactcactcaaatcgccgccggagctaaatcaatcaacaatgacgtcgacctacacgagattcgataccgtatttctcttttctaggttcgccggcgctaagtattcgccgttattgccgtctccgtcgtttactttatctacttccggcattcatctcagaaccaaaccgaattctcgttttcactcgattatagcatcctcctcatcttcatctgtagtcgccggaactgatagcattgaggttattttctttctctccctgcgtttctgaattttgaattttccatgatcgttgttgattcgtttttttatgcctttttgtgttatannnnnnnnnnnnnnnnncgaagcctattgaaggacaaaagactggaactagcggactccggaagaaggtactaatttactgtttctttgtatctggaatttttgaattttctcaagtattggagtaacttgattgatatctattgactccaggtgaaagttttcatggaagagaattatttacccaactggattcaggttccgattcgtaaactcctatttgattgctaatgttagaatggaagaattttttgttactgagagaggttatgtggtataggcattgtcttattcattgccacttgaggattattcgaatgcaacgttggttttaggaggagatggtcgttactgtaacaaagaaacttcgcagggtatgtactgagagctttggatgagcgaaagttatctttactcatatcactatattttt

SEQ ID NO: 25813 - DNA, 1459 bp, Arabidopsis thaliana landsberg
gtgtaatgtgtgagagcccaaagagtaaacatgttcctatatgttggaaaatgaagcattacgttcatcttgaacactcccataatttcctgcaaatttataataacaaattatacgttactagttctctactttaataagatacatataattatttatatcgttatatttacattatatctatatccgattgagtaaaaaggagatatgaagtattacctgttgcgggaaatcaccattatccaattgtgaattaatcaacactttggcagcacgatgaaccggcaaaggatctctctccatttgatcactcataattagaaccataagtgcttgtcctgtattcaccacatttgtcttgtttcctaccaaaggactatatttctttgttggacaagagagatagctctctccccagccgccctcctggttttgcgtgtcgagaaggaaacgaactgctcgacgaatgggttcacagttatggaaagtctttcctgcagccacaagacctcttacggcaaataaggtcccatagataaagcacactccccagtttccgcaccatgaaccatccttcatttgcaaatcctcaatgtatttcactcctttagttataaacctttcaacctctttctttctaaactccgggaactgtttactaaactgagtcaacgctacaatggctgaccctgtacattccacatacctaaagattgaaatgatatcccacaatgtaaaccagtttaactttttacccaaaaaaaataatagatcgatgaaagagaggtgataaatatatcatactcatgctcgatgaccgtgtcttcaacaaattccaccggactaaaccactgcatttacttgatgaggtcatttttaatgttacatctaaccatgtcgcaaaggtatatgacaaataacaaaataaaaactgacctctaaccaggttttcccatccgcgggttcccaagctgttatacctccgttatcactctgtaataataattttgtacaaaactctaaatatatacgaaacttaattaatacaatttaacaaacaataaatattagacttcacatatggtagcgggagtaattttagtaattctttttctttgaatattacaagtaaactcttgagttaggcatattttgcggatatgatcatatcaattttaattttttacatacaccattttgtattactatttgctaaaatatattcccctttataattactttagagtatcaattcaattccggatgattttaaggacccattgaattattattgttaatagatttttcacgttctatgaaactatagaaaaatatatttctattggattataactacctcattatgaattatcttacaatatgaaacgaatatttaaatttaatctttgtaatgcaccccattagggtttgtgccatataattttataaaaataaaatt

SEQ ID NO: 25814 - DNA, 1070 bp, Arabidopsis thaliana landsberg
cgtcatgtcccatatattacatgaaaatatatcatttttaacaatatgtaatttgatcttaaataatttccattttccaataatttgaccccaactatatagataaaagacgttattaattagcaattttgctgtagaacacagtttaatcataaacttttgtatagacccatgtgcgatgctgcgacaagccttgcaaactacaagatgtactttattaaaggtcaatattgttactgttcaaagattacaaaagtttcctatatatacagtgttttctaatgggacattcgatatgacatttgctatttgaatttaacaattactaaaaaaaaattattctaaaatccgtcagaaaaatggcattggatcgaaacaaaggaaaaaatattctacaacaaatacaaaaggaagaatatataactatagactggtgaaatgaaatcctaattagtgagacattagagaaggaagaagacaaaaattaaagaaagttgaagcaaatgaaagaaacgaagacaaaaacgccattgtcgccgatagcttataccgatcacattgcttctctccggcgtccatcaaaagtacggccacgctcgccgtcgagcatgcacctcccaatgacaaaaacgacaaaaccttaacaaatccaaatgtttaaaggaaattataattagcaaacattttacattatttgttttgctaaaaataacaaatagcttgttccatttttgccaaaattttctctgtttattgtttattgtataattaataaaaattgaattgaagtccactatagagaaatcaaattttcagagtctaccacccatcaaaaaaacaacaaatatatacaagttgatgtactctagagatttctccatcttaattaaagcaagacaagtgatccatattcatctgcttgttgcagacagatattttcagatgatgattgtgtcctattgatgtagagttggatgggtcatcagcttactctacttttgatatgactcgttctacatgagtcagctcaatataaatcattatcactttcagattcgacacgatctagt

SEQ ID NO: 25815 - DNA, 892 bp, Arabidopsis thaliana landsberg
attaaaatttgtttgtttaactaatttgaaaacagagagctaacatatcttaattcttcaggaatcgttaatacggattattattcatgacttccattattaataaaatataaatttggtcatgagcccaagctagcttgggcttgaggggccacaaggaagcttgggtttgcggggcagtaagccgtaaaaagtaaatgaaacattaatgtgagttatgtcaatatctttttaagaaaaatgaattattagaaatatgagacgaattatgctgagtaatatccttttaaaaaggatagattgtaagaaatgtgagataagttgtgttcaataccaacttaccatagtttcttatgagcggtagctttcccaaatcttttagacgagtttggtatactatgagtttggtatacaagcaaccaataatggatctctttattgttactgtgtgattgtaaaactaataactcgatgaacaaatatatatgtcgaatagagaaattttttagtcaagtggtttaatatccaccgaaattcgattccatatagatagttgcattagtccgtattttgggtttttgtttatagattggccttgtcgatccaataaataaatcaaaattctcttgttaaacaagtccacatatataggagaaagttgagaaaaatatcttaacttactcactttaaccaaattagttctcattttagtgatgacttggtaattaggtttagctacaccaattattatagccaacaaaccaaaagatgttatcgtgctttcttaatttactgaattctgtttatattgtttgttagaattgcttaagacaaacctcactaaaattttattactactgataattttatatccacttctttacgtaatgat

SEQ ID NO: 25816 - DNA, 638 bp, Arabidopsis thaliana landsberg
tttttttttttttttgctatcaagcacttgcaaagttgcaagggtgtttaaataggaacctaactcacaaaatattttttgtggtttttaatctgtaggtagaatgtgtaaatatttctacctagaactatgtgaatatttaacccatctgtatatattatctatgtgcgtcactttttcttttttgatgtcgtaaacacaaatggtaacactggtaacaaaatattgaaagatagaaaaaaaaaaaagtatataggatatgattggtaatctcttatttgtgtcactaatcgattgaattctatatttttttcgtatttatgtgttggacactaaaattatcaaatatttagcaaatttccctgctgcatttcgtgagttaaagtattcctcccgccaattcaacttaaccggtagtagccggtcaccattccaacgacaaccggttataagaaagccatccccaaaattgaaaacattttcatcgtcttcttaatcaaaaaaaaaaaaaaaaaaaaaactctgaagcttcttctttgattaattctctcctggggaaaaaaaaccctagctcttccttcttctctcttcttttagaattatctgctttcgaattttttgaaaaggagaaacctttt

SEQ ID NO: 25817 - DNA, 1779 bp, Arabidopsis thaliana landsberg
ggtcccctatccgccgctttacgtagcgaagacatctctgtcgatgtgtttacaaatggaatttctcgtgatcagtttcaggaagctaaggtttcggtggtggtttactccgggaactaccagtactccactcctaagaatattacccagcttataaggatcatgggccaagaggtgattcgagttttctattgtgttgatccacaggaggtgaatcgatatgaagaatattcgcagagcatcgtgctgcaggaattcggaggtggacaccaatcaaggtaataatacttgcaaccttgttggatgcatagcttcatacaattatgattcaaactgagtgaagctgttaaaaacaaatatcaatttttgaacaaaagtactttttttttctgagccaaaaactaaacgaaatataaggagactttacaaatctttttttctttccctctcgaatcttgtatgttaagtcgatgttcataggagggtctgctaatattatcttctcttttgttacgtcgggacgactcaagtaatagtatacgcagcgacgccgaactcgtggaagatatagtcagatatgtttatgggaagctatatcctacagaacgaattggaatttatccgaggctaatggaaattgacaacctgctttgcgagcagtcttgggatgtccgaaccttaggaatttggggcatgcctggcataggcaagacaacccttgctgaagcagtatttgaccacatgtcgaatgactatgacgcttgttgcttcattgagaactttgatgaagcacttcataaggcaggacctcaccgtttgcttgaagagaatattggtaaatttctggaaagaaagtttggcataaacgacagtccttacattccaagacggagcctccttaaggacaagctatgcgatactaggattcttgtcgttctagatgacgtgcgcaatcctctgattgcagagtctttccttagaaggcttgattggtttggtcctggaagcctgataatcataacctctagagttaattatgtactagtgcagtgtggcgtcaatcaaatatatgaagttgaaggtttaaacgaagatgaggctaagcaactactccacggatgcgcatttggaatagactggagaaaacagagtgggttggaaactcttgcacgttactatatttctgtcataaaacattttagtggaaaccctctagctcttagcctttatggagaaatgttgtcacacatgaagccagataaaatggaggtaaagctcctcaagctcaaccaccctcctccacctcagattatggaagtattcaagagcaattacaatgcacttaatgacaacgagaagagcatgtttctagacattgcttgtttcttcaggggagaaaaggcggactacgtgatgcaactgtttgaaggatgtggattctttccacatgttggaatatatgttctagtggataagtgtctggtgactattgtagaaagaaagatggaaatgcataatctgatccagattgttgggaaggcgatttccaatgaaggaactgtagaacttgataggcatgtcagactatgggacacttcaatcattcaacctctgctagaagatgaagaaaccaaattaaagggtgaatctaaggtatgttatgaaaaatgttcgatatgctttataatttatcttataaaaatttgattttgagtatgatttattggactatcttgtgttttcagggtactactagagatattgaagtcatatttctag

SEQ ID NO: 25818 - DNA, 2118 bp, Arabidopsis thaliana landsberg
gaaatctgaatattgctccatcactggtcaatgtagttgacttaggtctctgtaatggttaggtactgtaagtcagggaatatgtcatctagaatctgcgctatggccaaaccaaatgatgctgagactctttcatcatcagtagatatgtcacttagcccgcgagttcagtccttaaaaccttccaagactatggttataaccgatcttgcagccactcttgttcaatccggtgttccggttattagactagctgcgggagaacccgatttcgacactcccaaagtcgtagctgaggttaatacatttctcctactggttttgccatgttctgtctctctctgtggtttgttctgaatcgattgtttcgtataggctgggatcaacgcgattcgagaaggttttactaggtatacgttaaatgcaggtattacagaactcagagaagcaatatgtcgaaagctaaaaggtataaagaaacgcttttgctttgtaaatcagttatgtcgaaacggagtcaaattgtttgtattctggttgttttcagaggagaatggattgtcttatgcgcctgatcagatcttggttagtaatggagctaaacaaagtctcttacaagcagtgcttgcagtttgttctcctggagatgaagtaattaaaaccgtgtctttcgagcttttgttgaattctttcgatgtgattttgtttgtaacaatgaattgtatttcactaggttataattcctgcaccgtattgggtgagttacacagaacaggcgagattggctgatgcaacgcccgtggttattcctaccaagatttctaacaattttttgttggatccaaaggatcttgagtctaaattgactgaaaaatctagactttttattctttgctctccttccaaccctactggatctgactaccccaagagtcttgctcgaagagattgcccggattatcgctaagcatccaagacttctggtatatagcataaaacgcctccttggtctttttaagccagtttgtttttgctgaactgtttaagctggaaaacaaaactctgttttcgtcatttcttttataggttctttcgtatgaaatatatgaacacattatttaggcaccttgaacacatacaagctttgcttctttgcctgacatgtatgaaagaactttgacagtaaacggcttctcaaaggtaaagtatttattattgagttggcttctaatgtcgaccgatcaaattcttctttactgatcatatgatatgtaaaggctttcgcaatgacgggttggaggcttggatatcttgctggtcctaaacatattgtggcagcttgcagtaaattacaaggccaggtatctagatataaacatatttctctctaaatctgtatcgaaaaaatgcagcgatcatgagatgaaatcggttctggtttttgttttaaggttagttcaggagctagtagcattgctcagaaagcaggtgttgctgcgcttgggttaggcaaagctggaggagaaacggttgcagagatggttaaagcttatagagaaagacgagatttcttggttaaaagcttaggtgatatcaaaggtgttaagatctctgaacctcaggtacctctccgtttatctttgaagctattactggctagtttcttcttcgtctttttcttgattgttggcattgtttacttgcagggagctttttatctctttattgacttcagtgcttactatggatcagaagctgaagattttggtttgatcaatgattcgtcgtctcttgcactatactttcttgacaagtttcaggtaaacttcgtctacaaaatgttcttctttaccttcaagaagcacaaaacagctcttgaacatagacttgagaaagatttggacatttttttgttctgtttttaacaagttcatatgtttggctctgtttgtttaaaaggttgcaatggttcctggtgatgcttttggagatgatagttgtatccgaatatcttatgccacatctctcgacgttcttcaagcagctgttgagaagatcaggaaagcccttgagccactccgtgccactgtctccgcttaacaagtcggacacagaaat

SEQ ID NO: 25819 - DNA, 1110 bp, Arabidopsis thaliana landsberg
attattttttaaatcaaaattatttgactttttttttttgtcgacaatttggattttacgttatttgacttatttgacttagtattggattttgccatatttgacttagtttcggattttgctataaaaaaagttagatttatacgtagttaatacaaaaacccagatgcatagttgtaactgctagtttccagttgtacctaaaaacttacaacaggtcaaacttaaaatccaacctcaaaacacattcaatcctaaaaacttagaaaaaatcaatcttctccttctccttcgcctttgccttctccttctctttctttttttctttttttgccttttcttcagtaaatggcgaactgacatgaattgattttttcagttgccttcgcggttgcaacacacatttcttcttatgaaccatcttcgtccttatcaatcttggcctttctctaacttcatcacctgtcccatcttgactcttctctccaccagtctgctcctcatcaacactcatgtttccatctgtcccatcaagactcttctctacaccagcctgctcctcatcaacactcttcccaacagcttgctcctcatcaatactcttcccaacagatggctcctcatcaagactcttctctccaccagcctgctcctcatcaacactcttcccaacagcttgctcctcatcaatactcttcccaacagccggctcctcatcaatactcttcccaacagccggctcctcatcaaccctattcccaaaacctgacttagtctcaccaacaacatctccaacattctcacaaccatctatgcggtttacagccgctgcttgctatatcatcccatgaccagtccttaactgctcaccaccactctcaccaacagctttctcaccaccaccaatatcgtctccatgaactttgatctcaacaccaccaatatcatctgtatcaaatatggactcaccaccatgacctctataatcatttacatcaaggccagcgtcaccaccatgacctgtataatcagcacaaccaaagccggtctcacaatctgtcttctcaccgatgccttcttctacgccatcatttcctttacttaggcttg

SEQ ID NO: 25820 - DNA, 729 bp, Arabidopsis thaliana landsberg
ccgaattcggatcgagctattgaggttaaattggagattgagattcttcgaggagagattcgtaaaggaaggtgaaaatttgaattctctttgttgtttttgttggaacattggatttgttatcttgtagtgtatactcatatgatggttttttggatgcttatggagtagtaatgaatttgtttgaggtttgggatatgaaacagggctgctcttgagctggagaagaagacacgagctagtaaccttcaccatgagcgcggtatggagaagactatcgatcatttgaatcgagagattgtaaaacttgaggaagaattggttgatctggagactaaagctagagaagcaaatgcagctgctgaggcagctccaaacccaagtaatttctctgtcttttttagctttttgctttacacagtttaactgcaaaaccaccttatagttttgatgatttgttgatgtaaggtcctggattggctgcaagttatggaaacaacaccgatgatatatatggaggtcaaggccggcaatacccggaggctaatggtactcatgaggtacacatgagtctatagataagtagtaactttacgtgatcatctgttagaagttctcctaatttagcattattatggagaaggagaagattgtactaattgcttggaatgattgacataccaggtcctgattagcttccattctgatctgatatcttagcaatatatc

SEQ ID NO: 25821 - DNA, 1076 bp, Arabidopsis thaliana landsberg
attgagaaattatccgttgtaatgagtttttttttttcttttccttttctgtatagtagaaatatctttttacatgatgaaattactatctgttttatgagattagctaaactaccaccaaaataaaaacctaattcactaataaacatggattttttttttaattttcttttaacaaaaactaatgttttctaatttgaccatagttgttaacctaattgacaattataaaaaaaaaagacagcaaataaataaagattataatttttaagaaaaaaaactaagagtaaagcataataaacgaccaaactatggggagggagggcatgaaattgccaaatattaatcattggattgggacgactctcgtcaagaacgtgcgacttagtgttacggcaccatttcattcctttttctcaaatcccttatcaaattaatatggtttaattttgtcaagagtgtctttgtctttgtttttatagttgtaattttaaagagttttcttcatctttacgacataagaatcgaaaaatcttacacgaacgtgctcaactctctttcaacctaccaatgagcatacgacacatcatgaattgtcccacattagatttatccaaatcatacggtcgcattattacagtttgcttctaaaggaccaaggacacatcaaaatttcaccaattatatttatatgaactaatattcaatcataccaaactaaagaaggggttagagttagctctacgcttctacctactctcaaccaaaaacacctttacccattcattctgattcttacatgaaatgaatttcaggctttatgattttttttataagaaatttgataatgattgatcatgaaatctagtgcttctatttaaagcgacttatttgaaaatgaataaactttacattagtgattcaagtgacaatatggagtgccataagggccataacacaaaggcacaaacacactaacacaactggaagctagaaaagacaataacacgaaggctcacacttgaggcccagtagcgaattaaggcccattatgacaactcttgaaatatcatgat

SEQ ID NO: 25822 - DNA, 1227 bp, Arabidopsis thaliana landsberg
caaattttaaagttcgaaggtatgggggattattgtttatacacagtctgagaataaaaatctggttgtatttttagttcaatctttattaggctaactctctcttttttttcttttaaaaaaaggtaattaatgatttataatctcattgtagaattgatagaaatacttgcatagaagaggtaaaagaactgcttaaaggacatcgagacttgatatcgggtttcaatgcatttttgccaaagtgtttggagatcgctgattggtacaacatagagggtaggtgatttctcattcatcgtactcttcttagtcgaatctgcctgtgattcgttctatttctttatatatttagaaattggatttagccattataggcttatgaataaggttctaaaatctttgttgttcccaactttttatttatttaattataaaagatctatatcctcttaacagttcactcttctaatttaacaaatcttaaactgctcgtttccaacaaaaagaaaattaagaaactaagatagcaactacaacgaagtatgacatattttgttcaaaggagaggagagtgtatagtttctatttgtataggtttcagttcttttcgattcttatgatatgtacatatgctttcatggaatctttccttctatctattagattttctgtttacagatcgaggtactgtattacaagtaaagcttcacttaaaaatgtaacccaaataatttgttgagcctaaccgaacttaaattagataattagttatgttttgggctagagaccttaattagaagttaaaacccatatggtaaacattttctgaaaatcttttactttcggtttggtgtggtcaaaaataataaaactgaaccagctttatggttttcactttttagattacatatatttagtgtatattttagtttagagcatgaatttgttagtctaccagcgtaaaggaagtaattggcaagatgatgtacaaaaagcgataagagactcatatgagtggattcctttgcagcaagacacacaacgacgacgtccaaatgacagaagcaggcaagggtggcaaaaacctattcacggctttatcaaatgcagttatgattgcagtttctcaaggaatgacttagcaccaaaggctggttggattttatgaagtgacacaggcagttatctacttgcggctcaaggtacatgacaactttgcaactc

SEQ ID NO: 25823 - DNA, 1865 bp, Arabidopsis thaliana landsberg
  unsure (1)..(1865): unsure at all n locations
cgttttatgcaaactcactgacaccacgtgagatggaatctcttgttgcgatctgcgataccttcatatcctccatcgacgactctggagtaggacacgtggatgattgtgtcgctggatatttctccgcctccgcttctcagaccggaactcccgaccgcgtaagtgttatatatacaaacatgcattcacatataaaagagatttacatacatgcatgcacatataacatatataagtagatatgcttcccgatttttatatgttacatgctttatcaaaacaaaacctatttgttatatacatgcattttttattatttctagctaaccctttttacaaacaaaagagaatagagcataatttaaatcgtttaggatgatttaaattattaatttggatccatatgcatacgtttgctgagatattattacagttgattttttctttatttttacaagaaataaaataagaatgatttatggacataattttaaaatcacggttttttatttgtaatctttcttgattcagatcgttttagaaaagaaattagtaaacgtaaaacatttctttcttactcaaaggtgattcatatccgacttatacaacgtttaaacaacagtttttacgggttaaactgtctataacttatttagcaaaaagatatttacatatgcatttaaaaatctgcattgcatgcatgtgaatcagtactttccatatctaaaaagagaaacggtactatagatgacaacaaaaaaccagtacattcagtgaaatatagagccgacagatttcaagtacacctacattccatcgtcacgcataccattgatgccataacaagttaattgctaaaaataaatttgttaattccttctcttttggctactatttattcgttccatatatctataattataaatttggtattaatatatcactccgacgaccgattcaattgttctttttttcttgtcataactcattggcaaaaagaaggtaaaaatagattgaaccttacatatcgtgttcactacatcgtgtatgtgtaaattagttgatatgcactattaaaattttcaaagaacgattagatattagtcaattataggaataacgaagaagcgactgcttaaccataatcgtggtttggccgcatatggtctggttggaaatccaaatataattgactcatgaaccaaaaaccgttatgctagatataccagctatgaaaatttgtataggttaaagttaaatagaacgaacatttgttttttgaatacaaatttcattacatttacttaaccgttaaccctgaccgtttgttattgtatcataaattcgtaataacaggtggcgaggttaatgagtgagagacttcaccacccaaagaagtggatactaagagctggattgtggttactctctacttggatcggaagtctagtcttgtgtggttggagaagtttcaccggcgagtttccttacttccggagattctgccggcttccggagaaacggagagaagagatattgctgaattggtcttcaagctatttctcacttcttagaatgttatttaggaccatcaaacttataagtgcccttgtcttcttcactcaggtaaactaaactcgaattctttgtcacttatttcaatttcttatcacttttgatagatgtgtactcattatgtttcttttaagctntatgttttatgattttcacacatttgtttgcaaatattaagtaaaccttagtctactaattaaacttatcaaattatttagaattacattttagtcactttaactggtatgagtaattatttaaataaggacatgagtgagtgggtatga

SEQ ID NO: 25824 - DNA, 2087 bp, Arabidopsis thaliana landsberg
tttatctttagtggtcacccacctaactatgcttgaaaacgaagtcatgtatcatcaatctaaagtttctttaaagaaaatataagtaacaaaaggacccacaaaaccataccttctctgtttaaacgtatctctatattataatggcaaagaaagaactgaaaaagaaaaagttatcatcatattcaaagtactttgattgtaatcttacacacgcaaaagcagacagaacaaaaaaaaagagaaaggaatttaatatatagaagttgttgtatactcataagtctttctcaacagcgcacttgagttaatcataataatgaaacaaaggaaaaacaaaagtctaagttaacataaaaagaaatcatgactaattcaatataataatagattttgacttgaatgcaaaataccccacatcttgataactaagaaactctaaatcttctcttgttcatgtacaatgtgtacaatattttgtgtgttagatgttgaatatgagtgagagaggctttataccttgtgagatatgttgtcttcttcctcaaagtgattcttcagaagctcctctaatctgaaacatccaccacagatatcagcattaaaacacacacaagactgattttgaaagtggaataggaaatataataaaccctagatagaaatttctgaatctataaagcgcatccaaataaaaacgccaagtgttctccactaaaatttccaaaaatagcaatctcgatctaaaaaatagggaacacttgacccaaaataattcctagaatcaagctggtcaaaaaaatcagataaagaaacaacacttcacccaaattaagaaaatcagaaatcagaggagaaatttgagaaatcaaggtctctctatctaatctatgaaacagtggaatcggaagctcaaagaagaacccaggatctctatcacacattacacatagtgcgaaaaatccggagagaaagagagagaatcacagtacattaccttcttcgtcttcgtctagttactccatcatcatgctgctgcttcgtcgtcgtcgtcgtctatatctggaaattggccaatggctctctcagtgtgaaggaggagggaccaatgggcattgatttggtcccgcaaatctcgtagcgaagcgcctcttctctctctctctcctttgtatttgttgaaccgagagagtgcggtggaaggaagataccttttgaaatacctaaattacccctgggaacgttgtcgggtatctgagaaagccctgccacgttggcttttcggttttttaaatttattgcgataattcttctcagttacgcctttgacacgtggcaagaggaccgctcctttatagccgttgaaaggtacggagcccaagtgtttctaaaactctctcatccatccagaggctctcgaataaattaaaataaaaaataacattttattttacaacttcagctttattttacaaccttttttgctcatgcactgacatagcattttaccgaacaaacgtgaaattagttaaatagcgaaattcacggatcacttttttagttttgtcggtccacttattatagaaactagaaagtatataataaaataaacaaggaagaaaaaatgaagtcaaaagtcattaaccatgattctataacctctcatttttttcccacaagtcataaaccctaatcaactgtaattaatgctccatgtgctaaatagtaacataactaacattcctattttatcagcaagcccaatttacatattaataacacatttttacaattagcctcttgaaaacaatgtacaaaaagtaaattggtaacatgtctacataaaaatttagtccttagattcaatgttttttttacctaaaccgttaaatttagatccaatgtataattggtaacatttacgtaaactttgacctgaaatctcatggtctaagttggtaagtgagaacaaaaaagtgactaatttgctggtaaaaaaaaaaaaaactgtcatcctcgtgcagtcatgcccatagtttttggatatcacaaaagcctggaccgaattctatcgaagaaaaaaaaaa

SEQ ID NO: 25825 - DNA, 1660 bp, Arabidopsis thaliana landsberg
gttgtctgactatgttgatgtctttgtgttgtagaaaacccacaaatgggatcccttgataaaagggacagttcaatggtggttcgaagatatctgtcaacgccggatgaaagacattttagcaacgcgaggacaagtcgagagcagcctatatggatctatgatgataacttaaaaataatgggtgcgaattgggaaactgaagaagcaaaaaagaggagtaagacatactccaaagctcgtatgtctgaccgtaacggtcttggtcctcatattcacttatcagggtctaagtcatatcaacaactccataatgaaatggttagtatatctatctttcccttacacctttgcaaatctgacatttgttctaatcattttacatgttacgaaacattgtaggaagaacaattgagaagaacagtgtgtcttggtgaggtcttcattaagactcatacaaaggcagatggttcatttgtagactggaaggcagagagaatagctaagaattatgagaagaatgtggcagagaggttctcagagcttgagttagagacttcagctatttcagacagcacttcacgatcgcgggaactcacagcagatgaatatacagccatatttcttcaggttaagtacaatttatcacaatccacatttattgatacttttagagtgttctaagctacatacttttctctatcatttcacagtccactgagaaggactcaagagaaactctttatggtgttggaagcctcaaggatagtcttctcaatggcaagcgtaagcaaccaggagacacttcaacctttgtggcaatgcaagagcaactgaagaaggctcaacaaaaaattgaagagcaggctgctcaaaatgcaaagcgggttgctgcggttcctgcccgtgaagaagagcattctcgagctgtggctggccaaaagaacaaactcgagcacttgtctttggtggagaagtacctgcgagccactgatcctgcttttctgaacttcatggctgaacattctacttcaacaaccacagagcctctctcaaccgatcttcctacaacaactccatgaacttctccttctcaagaacttttctaatgtatttacttaggtgatcctctcaagaacttgtatgttttagtacctttttcgtttcttctttatgtttagactttgattctcagatatttttaaatatttgaattggtttcttttcagtcttagtatatgtttgcattagagaatctaggtttcaattgtaatgcaaaacaaattacaaccagaaaaaacgaaatacaaaatatttattgtcatataatgtagtcggataacagtcgttaaattagtcatcatacagttgcaaaatagtcatcacaactacaccaaatacattgaactatatcagttttaatcataaactagtcgtcacgtagtcgtaatatttaacgactacattacgacttgatttacgactataggtattagtcgtcaaataatcggtaaatagcgactaatgttacgactatttgatttagcgactttcgatttacaactacacagtttagtcgtaactttgtcgtaaataaccatttaacgagtacatagcgattacttttgtagtcggaaacagcctgttttcttgtagtggg

SEQ ID NO: 25826 - DNA, 497 bp, Arabidopsis thaliana landsberg
gtaattacaaaaggccctttgtcgaatatttacctgtgaagggtaatgttgcgtaaactagtaatttctaacagtataaattggccacaggataaaggcaaacgttgctgccattgtctcgaggttgagaggatacgctgaaatcaactatggcgtataaggtatcgcaaggacggtagaaacttgtgaggatgatcatgaccctagctgtgctgcccgccaattccgatgggaatgttttaatcgattaggttcagtgctttaaatcccaattatgtctgttccttcaatctggtcatagatttccgcaacttgcatcaaatcatctcgtttttgactgattctctaagaacccagatcgatcattacctggagcgactgttcttctttgtggatccggtgtcaatcaggactccgcgattgttgcattgtcacatgaaagttgctatagcttcatgtatacttgatattcgttcacagtgtctctgactactcta

SEQ ID NO: 25827 - DNA, 2321 bp, Arabidopsis thaliana landsberg
atttttttttccataacccgaacgttcgttcaataacagaacgtaatgacacatgccacctattatacatttcttaactgtttcgaaaaggttcaccgttaaaaaattattggagatgatatcttgtgcctctctatgttctcttcgttatggagctaaatatccacgtttattagcatatccagaatctacaagataatacttactatctggaggtacatgaaatagtggatcatcacttatcgcagccgcaaggacacgtgcatcatgggtagatcctgccatcccgacaaaacaatatgtgaaaagcatgtcaagatcgcatatagttagaacattgaagcttgcaattccctttcagtttataaatcgaagaccttctcgccttggtgtcaccataacaggtacatgtgttccatcaagtgcaccaataaatccattaaaaatggcaaacgattagagatagctctaagttctttgacttttcttgggcgtatatactctacagccaatcgttccattgctttaagcacatcatgaaactttcgccaaattgtctcttgggcatgtccaaaccttaatgcaatatcacgttgtgtatcatttgaggcacaaatgattagaaagattgcaacactctcgtcgaggcttatgttcgtcgagctttgtaaaccatacttcccatgtaatatttaacataactgtgtgaatgcctctgaactcattcggataagtgtctgacatgaaacttcattactgtaaatttgatctcgaacaattagccatcctcttcccccatatgatgtcataggttgtttgtaaaatcatcttgtgtaatattgcaacatacgagctatgcattcttccatattcgcttcttcttctagtaacatgaactctgcaatctcttcgtcgtcaagattctcgattccaagtgaacgcaactcgacaattcgttcctgatatttcaagtaaatttgtattagacattgatgaaaatattttaatgaacatataaaatatacatgaaagaaaaacttaattcttatttaaaattttttaatacaaataatcactacttctccccatctttttcacttggcttattaaaaaactttatcatttccggagcattagcagaactagaacctacagacgtaggagagtcatcaatctcactacgagattcttctatacattgaaagttgccatccattcgtacctcaaaatttgctcttctcaaatgagtacgtcgtatcgaagtattctgagcacgtctgacgtgaagctgtcacatgcgtcatgtgtggagtacgtcgatttgtctctctaggtgatcgagagagtcgtggcaaatcatcatcatatatatgctctaagattataattttccggaggaagtgcggtttgaccatcttcttaatgtgtcatccgtggcatatcatcattatatggttcttgttcgatattaaattgaactccaagtatttgaagtgaataatgagaatcttgcttaaaatcgtgtttgttgtgtgtaacatctagtaaatctttgaatagaaaaaactttttattattattattattttttttttttttgaagagacttattttgcaacaaaattatatatttttgttggttttacgaaaatcctgtaaacaaaatatgatttatgagtatactattggtatgtttacaggaaattatatgttaaacataataaaatatgagatattactgcacattgatctttccaccatgacggtttcatgttgatttgctcggatgatttaacatatgcacccatacatttggataattttattgaaaaccaaaaaatttctagatattttaacctgcttttcatctcgggtttctatttaaccgaatcaccagctaactggttgaataatgttttcttcgattctccgtttgcaagaagctaatggtaccctaatcgtatagtcttccacttctacttcagggactacaagttctagaaaaattaatttttttctacacgtccatttatgctaaccatattttaaaattctaaaaaatcacaattaaattttaaaaattatatatggataaaactataaaatgatataaacaaaaaatttataaacatacttgcttcttgtacctttttcaacttttcttaatgttgctttaccagcattttatgaattcgatcggtcctataccgacaatttcacaaaatatctctactatgtgtattatctaacctggtagcattcttcataaattatcataaaattagaaaatgtaagaacatttgtttaaccattttatactt

SEQ ID NO: 25828 - DNA, 1177 bp, Arabidopsis thaliana landsberg
tgaaggtagaatcacaagttaattgggtatatttatggagctatataaaacctctttaacgattttattttattgatagtacgttgataaatagtatgataggttttttttgtttgttacatgaatatttttgaacatataaaagtaaaaaaatatgtacattttatatagagagattgagattgacttgacaagcataggatacaatctaccttaatctgttaattgcatatagcttttttattttcctttttctttcatttgcactattggtgtgaaagtgagtgtacaaacatatacatatacacatgtatatatatgtatacgaacatataaaattaaataaaataaatttaactggtggatgaaagacagaaatagagaaaggtacaaagtggattgagagagagaatcaatgttctttacctaacactaacaaaagagagaaactatacataactccttgcttttttctccatgtttttattttgttcttttttcttctactttttatttatttaatttacagaagctatatgtttatcatcatatgtaacacttgtctccatcaattcccaaacactgctcaaacaatgaaacatcttgttagttttcaccaaaccctttacctttgcttccattttatttgcatcattcttcaatcatttatatccttttttttaattacatatccatttgtcttatatttttccattaaagtaaaattttcttatttttgttttcagatatccgagcgatgttgataagcatatattggcccgacaaactggtttatcaagaagtcaggtaaagaataactccactaattcttgatatattccaaaatttattatcctatttactaaagttataataaaccaaaattgttaggtatcaaattggtttattaatgcaagagttaggctatggaaaccaatgattgaagaaatgtactgtgaagaaacaagaagtgaacaaatggagattacaaacccgatgatgatcgatactaaaccggacccggaccagttgatccagtgtcgaaccggaatcttgatcctcaatagtgacaagccctacatccaagtccggtcgcgactcaaaccatggaaaaatgtcgttagggtcaacgtttgacttttccttgtacggtaaccaagctgagacatacgcatgt

SEQ ID NO: 25829 - DNA, 1154 bp, Arabidopsis thaliana landsberg
catttattttagtcttacaaccatttaacaactccaccataatttgggagtccatagggttttgaacagattcatcatgatacatcaaagaactgatcacgccgcatgtgcttaccaaaccaaatgcatgatgctttcactcttatccgcatgcaataggcttgaaatgaatacgcatggattactctgattacaactttttttcaaatcatttgaagttcatattagagaatgtaacacatcttttcatctgaaaggtacaactcaaaaaggtgaggttatcttggcacccgaaacgattatttccccttattacattctttattatgacctccaaaagaatgatatgagaaaggtttggattagaggaataccggaacactggtttagaaagcttgataccaacgtacgttttgaattcaagcttatggataagagtgaaagcatattgcacttggaaacttgaatgccattacttatcttttttccgtcgaagctgtaatcatcagtgtagtaattcaacaaagaagttccagattgaacaatataatcttagctaatttgttgtttccacaaattgaaatctatagacaaagcgattttagtcaaatctaacgtaattaacatcaagtgtttaatataacagaagattaaactttgatttctattggattaaccaaaaaaaaaaaacctatttaacttgactttttttcttttcttaccgaataatgttttcatttttgttgtgtctaaattcacaaagtcatcttctggcttttgcgcaccgaacagaacagtcagtttaatgggttcgccggataagcaacatcgccgccacgtcgccgccgaatttctccatagcgcggtaacctcaatctcttcctcaatcattcctctcttccctcccaaaacggcgccgtctcgtgtatgcctcccacttagattctcggtatcagacgatgtctcgtcccctttcgaatcgacggtcaagagcacatcatccgcgtcctcctccggccttaattcaacggttaggatatcatctctcagctccgatgggaaacgcggtggacctgctttcgtcggtcaggtatttagtatgtgtgaccttactgggactggtctaatggctgtttctactcgcttcgatattc

SEQ ID NO: 25830 - DNA, 1481 bp, Arabidopsis thaliana landsberg
gctaattacaaccctagtaagtccccctcaggaaatactaaagacgtttttgattatgaaattttccgatacaatgctagttgatgcccaagtcgtcctgaagtatagtggtactcatagcaattcacctatgactagttacatgccttaaaagttaaaacgcactacatctacatatcgaaaaacgttataaataccataaagaaaagatggaatcacctggggagattgcaaccggaaggttgccatcgatacttgaggtactcgctgtcagggcgaccattggacttgcagttaaactgtctctcgatgaaagggcaattcttggaatcatagagagggtaagatttgtcatagacccaacttccttgataaatattacaaaactttctaggtggtagccctaatgatgaaccattcgcactagcactctctatttgttttaacaacacaagtatcattaaaaccatgaccgatactactccggtgggagcagcacctctcatcattgcaaaaactcacacaagttgtcaacgtttgtggtttggtgaagaagaagaattgtgtgatttaattttattttcttgtgtgcctttggtttttatatatcggcatatatatgatgtgtttgtgtgatatatatgtctattggctctagtttaagaaaatacatgtagatttgtttcttaaattagagatattttctttctgtcttaataggtaaaatgaatgttggaatctttattaatgaggaaagagataagtttccatttaacgttggagtcagttttggtctagagatctagagatcttattatgtgtggaagttttttcaatactaatatatggaagtttatatctttgtatattatcttatcctaaattaatttctacgcggttggtttaaaatatcattattgttaatgtgtaacatatggtttgatttgttttttgtttttttatctattactttaacttgattagaatgctgaatgctcaaacggccaaacctaatcctcaagacactcatacgtcagagacagcatgaaaataggtagtgttccttcgtcaattcctcggaaaatttgggacatttcttctcattcttgatacacatgtagctaaaatttaggttacgacttaatcactgcctatgactatgagcatgttacacttgaaaataacaaaagaagaaagaaactcgaaagttagtcaaatcattaccactacaaatcaattcaaatacctttgaaactctttttgtctcctagaaaacaatctctcaaagtaagaccaaattactaatagcttcttagcttggcgcttttagcatttctctaactccggtttactctcttcgacctcgtatccatggccagtctctgcggttgagatgttgctcttatgctcaacggattgatttctgttaaaggaagctagactttggatataagaccatttatcttaaaaagataggccaa

SEQ ID NO: 25831 - DNA, 1969 bp, Arabidopsis thaliana landsberg
tagtatatctttttgggctaagctaatgcaagactggtcaattggagatgaacccaaaagtcatggtacattctatatgggcctcaaaagtccatgtgacataataattcaaggcccaataggcgtcttcttgttatatatttttttttgtttctcaataagacaagaattgtcttcacgcttccgcgaatcgttaagcttcacaatttcaagcgaagaggatcaaaaaatcaatttttttggagaagaaccagaaatcacaaaaccctagagggctctcttcaaatcaaccattaaaaccgccaattccgttatgacaaagaagagaaagctcgaatctgaatccaacgaaacgtcagagccgacggagaagcagcagcagcaatgtgaaaaagaggatccggaaatcagaaatgttgataatcaaagagacgacgacgaacaagtagtagagcaagacacactaaaggagatgcacgaagaggaagctaaaggtgaagataacacagaagcggagacgtcgtccggatctgggaatcaaggaaatgaggatgatgacgaagaagaacctattgaggatctattggaaccgttttcaaaggatcaacttttgattcttctcaaggaagctgcagagagacatcgcgatgtagctaatcgaatccggattgtggcggatgaagatcttgttcatcgtaagatcttcgttcacgggcttggatgggatactaaagctgattcacttatcgacgcttttaaacagtacggagagattgaagattgcaaatgtgtggttgataaggtatctgggcaatctaaaggttatggctttatcctctttaagtcaaggtctggtgctcgtaacgctcttaagcagcctcagaagaagattggaactcgtatgactgcgtgccagctggcgtctataggaccagttcaggggaatgctgttgtggctcctgctcagcagttcaatcctgagaatgtgcagaggaagaattatgtcagtaacgttagtggagacattgatccgcggaagttgctggagtttttctcaaggattggggagatagaagaaggtccattggggcttgatgaagctactgggagacctaaaggtttcgctttgtttgtctatagatccctagtcagtgctaagaaggcattggaggagccacacaagacttttgaaggccatgtcttgcattgccacaaagcaaatgatgggccaaaaccgggcaagcagcagcagcatcaccataacccacacgcctataacaatcctcgttaccaaaggaatgataacaatggttatggtccgcctggaggtcatggacatctcatggctggtaacccagctgggatgggtggtccaacggcacaggtgataaacccggccattggacaggccttgacagctttactggcatctcagggagctggtttggcttttaatccggcaattggacaggctttgttgggttccttggggacagctgctggtgtaaacccagggaatggagttggaatgccaagtggctatggtactcaagcaaatatctcacctggggtctatcctgggtacggtgctcaagccgggtaccagggcggttatcagactcagcaacctggtcagggcggtgcgggaagagggcagcatggtgctgggtatggtggtccttacatgggtcgttagattagccactcaggtaattattttcagcttcttttcatctatttcattgatgttctgtatcagaagactttttttgtagttcgcttggttcccttgtgtatttcaagacatggacttgctgtattttgaccttttcatggttactccattatgttaaactttttgcgttgcaagatcattttgttttcaaagttcctgtgactttgttgtgtttctgaagggtgttaggttttgcatcagtttataaaagtcttctcttaatttcttaattca

SEQ ID NO: 25832 - DNA, 3410 bp, Arabidopsis thaliana landsberg
ggcacggatcatgtccctgaatcatattcatatgttcactttttcttcagaaccatatacaacaattcgatgggattccactattaaaccccaacagcaacatgaccaatccaattttcaataaaattaagcaaaaggattaccaaaatccttagtttgatcatgttcttagactaaaatcaaaattctaaatggagtcagaaacatctataccaaatttcatcttcgatacaggccaatcaacaaaattcaatcctcagatgaaaaacgagctcaattacatcatgttatattcaaatttcatctgttagctgatcaacgactaagaaacctgaacagaaacgattaaaaggaaagaagagaatcaatttaccttagacgagtaccagaagaaaagggattcatgatttgggatgttcaagagttggaccttggtcgtccaccggcaactttacgacgaggaatctgaagaaaatgaaaagttagccgggaagaataatttcgccgccgggattgtgaaaatctgttaccggagtttcgagtagctgatcaatacgagagagagatgaaaatgaaactgaggatttggatctcgatggacgatgctcgtttttttcttctcagtcttcgtaaaccaaaattgccaaattaaatgcgttgtataaacatgacttccatttccacataaaacggtaacgtttcgatcagcaatcctcaaaatatagactgggccgtttctttgtcgaagttaatcacacacataactgggcccgatttgggccgtttctattagtcaaatatgagaaagtcaatgatccgcgctccttaattggttgttacacaaattatcccctacacttgacacagcctagtatcgctcaggccctagtatctttatcgcgagtcttttactttaaaaactttaaagatgctaaataagtaacacaagttacacaacacagtcgctttctcttctcgattttgacatggcttggggattttcgtccgtgtctctcttcttgttcgtcgtgttcaatctgggtatgttttcaaaaatctgttaattcagttaaattttccaaaattcgaatttttaattgtcctcatgattttgttacagtgagtgctaagattgttttagaagaagggtacgaggtcacaacggtggtcgacggccataagtctggtctgaatccatacacgattcatgctttaccaggatcttctaatctgatcgtccttgattcttccggcagtacattttacactacttcctttcctttgtccgttggtaaacactcacaaaaccactcttttgtctcatctatgaaccggatcattataattgtgtttgtatatgagttgtaaaatcatggatgcataagtaaatgtttagggcttgttgattttgattgcaagtctagaccttcatttttgctttctctgtaatctcaaattggaccgcagtactaatatgtgtgtgtagtgtgtgtgaaacgatcaacttacaaatgaaagttctaaactttactatctataagtgaaagttttgtttatctttctttcaattgaagtttgagctccccttgagaatgtgtgtgtggttgtgcagatagtgtgataaaccggtttgctggggatgggacttcgggtcatgtagatggtaaagctggtaacagccggttcaacaaaccccgtggttttgctgtggatgctaaagggaatgtttatgttgctgataagagtaataaagctatacggaagatcagctcttcaggtgtttgtttaatccatttcttgtattccttttgttttaatgctagttgttgttgttgttgttgcataatcttggtttgttgaaagagccacttagtttattttgattatgcatgttttatttactggactttgtaggttctgtaaccaccattgctggagggatctcaaaggaatttggacacagagatggacctgcacagaatgctactttctctagcgatttcgagataacttttgttcctcatagatgttgtttgcttgtttctgatcatggaaatgaaatggttcgccagataaatcttaaggagaaggattgcctccaaagctctcattctagtatgtcttttctataagtaatcttttgtgggtttgtctaaccattcctttggaaacttcaacgattcttctttcactgtttcagatttagggacatactctctttggtcaatagggattgttctttcctgcattctcggggtagccattggattttctgttcgcccttacgtcatccgtcatgtaagtttttttttctatctatactcacattacatttagtgtataatcaacatatcaaatctcttaaccaaatcgttatagacaggaagaagtgaaccacctctcgttcatcatgacatggaagcttctcctaaccaaattgggggcacaagttctgaccttcttctcctacgttagaaaccgagttgctgaatcaaccgtttattcagtactaagtagactagttatgatgattgtgtctcacctttccctcatgtattccgccctaagtagattagttagttcgatggtatctagcctttttttcttgtgtcaaccaaataatgtagctattttagacaagacatgctcagagtctgatcccgagagtccaggttgcggcaacccaaagccgccactttcactgaaaccctctgatgatcttatggacctaataagctttgatgatgaacaagaacctaacaatgacaaagattgcagtaatgaagagactcttcctcatgcaaccatagatgacattataaaggttcatgttgaaggattttcaaagatggctgaagaagatactgcaattcatggttcttcatctactgagtaggtttcatttaaaagcacatgaagcagagagtatgtatcttttgtaaatgtaaagttaagacgttcaaagtttggttgagttgaaaaatcttttactattttattgaagtgctcatcttttttctttataccaaggaagaatcgtgacttttcttacaagagaggtctaaatacccaaatcccaattgtgccttctcaacaaatttaaaaaaactatacctgaattcccaatctatactactactatcatattaagcaacttctcttgtctatgaatagtatccatatgggtaactcacaaattggtgagctctgtggtggatattctgatgagtattcatctggtcttgctcctggcctggcccaaacacaatctcattagtcctctcgctgctctgctcataaagagtgtatgggattgttgagtgatgcctatgagtgatacagttgatgcttctgttgttgctgctcctggaggaattcggcgtccaagcttctgtcaaggcagggcttcg

SEQ ID NO: 25833 - DNA, 1607 bp, Arabidopsis thaliana landsberg
atccctaaatagtaggtgaatacgaaacgaataacaaaattcatactgtgaaaataacaaaacgattgttttaagtcaaatatggggaaaaaggaaagaacacaacgtcatgatcatgatcaaatacatacaccatggtacaatatatgttaaggcaatattgaactttttcagtccttttctctactaacttaatatccaatcctgatcggattcatctccaatcctcagcagtcatacaaactctatagtgaacaaatatatggactcaatgaaatgtttgtcttgcatttagcaagtaggacatttcagaattaatccttagatgttccgagaacggtctccatgtgtcgattaatatcgtttaaatatcttgtcgagttgtattcttcgttatccaatagttcttcagagtaagtcctctggagtttggagttttctcgctctcttagcttatctaagctgcacttgtctcccctcagaatctccacaacctgtatatgtgaccaaattaatcacctgtatatgtaacttgatgatggaattgaatattttgatatgcttgcctggctcatctgaggccggttcatggaggtttgatgtatacacaaggaagctatgaagacaagacggtccaactcttctacgtcgtagtcatcttccagaatcggatcaacaagttgattgatcttgttctctttgatcaatggcttagcctacaaagacatagatatgttagggatttcacaatgaaaaaaacagatcaattagttttaaaccttctaggattttgaagaaagtacgagataaggattctatctagctatggttgaagaggtagccacatcacatacccacatgacaatgctatgttgtgagctgtcgagggcttgtctaccggtaatgagctcgagaagcaggacaccataagcatatacgtctgttttctcgtctactatcccatgcatgaaaaactctggcggaaggtaactgatcgatgaacacataagagattatgtaagatagataatatataaaacacatgatatttgtgaatcagtgtgtatgatctttaacaaagagagagattccaaacccgaatgttccttcaacttttgatacagtatggtgagtccattggtctggtagccatttcgctagcccgaaatccgatatctatagtcaacatttgttcgaaaaaaatcaataaattacttcaaaataaatcttttttcataataataacttcaaaagacaataaactagggtatgaagatcttaggtttttcttagtaataattacctgagcctcaaagttctgagtgagaagaatgttagaagctttaatgtctttatgaatgattcttctctgacaaccttcatggagatagtagagtccctctgctgttcccatcgccactttgtatctcatgctccaattcagtttctccttcgcctctacaaaatggtacaaggatgtttgtttggtttttgatccaaatcatagtttgagatgacattgaaaacatcaaacaaaagagaattatatatcaccgtagagcaaagaagcaaggcttccattaggagatagctcaagaacaagatgc

SEQ ID NO: 25834 - DNA, 2422 bp, Arabidopsis thaliana landsberg
ttctccaccatatataatcatctctttacctggtaacatttacttttccttcccaagtaagcattgaatagggagggggatgtctcattcactgggcatataaattccattcttgagatatatttttctttcacagacatcacaccagtgctcactactcgcatcttgttcatacgaaaaagtgagaagatgttcgtcatgcttgtacctaaatttcattggtataggagcgcagtaaaaacacaaaacaaagtcacattttccacaatcgaaacgggtttgtgagcgtactttgcaaatcgaacagattcttgtagatccaaaatcagacggtagaaacaaaagatgtggatgaaaatgatggttaagtggctcagatgtggatgcacaaattacgtctaaacggaaattacaattggtcatttgacacatgtatgtgaaactattgctttgacgctggcaagctgaacaactgaacatatgtcccacttgtaagaagagggcgtgaggatgtattacatgttctttttgcagtgaaagatttgcacatactgtatggaggatgaactcacattccatgcaactaaaaatatcacaattataaaccggaagtgcacatgcttgacaatgtttgttatcctcaatctttttatcaatatatttgtggagtctcatttgatgtttatgactaaaatgttgtataatcccaccagctatctctttaaatggcaaaagatctttatatatttcatctggttcttcctcgagttcttttccatcccatacgtctttacgtaaagcacatcgagaatgagaaacataataacaacctttcacgcaagaatatcctccatagttctcatcaacctttttgcgacaaaccccgcaaaaccatttccgaggaagaaacgatgaagcaaatgataggcggtgttgatgccgagatatttttacgatgcacggcgaatatatacattctttatggactacaaaatcacattgatggcaaatatatagaaaataccttcgctcgtccaaagcacaaacattgcaagtaatggaagcttctctaggaaaataagacaacgtatgttcgtgcctttttttgtggtctatcgtaaggagtggtggttttgcttcacagtaagcacaaatgcaaaaattgcatatagagcaatagaaattcaattctttacgacgacaacaacaatagcatattgtgattagctttaaatatcagatacgagaacttggagcggatgtttacgatgataaggattatttgttatcggttcgatacactctttatgaaaaaagatacgctcattctgacccaagtcttcgcgtaggaaataatagccaatgtcgtcatctaacagataagagcaaactctgcacctggactcccgtttgcagtatttatctttgttttctccgttgttgcaccagacaaggggatgtgaactgcttgtatgtgtagaccgaagaagttttctttcatcgagaggatataaaactaggacaggtgaatctttgaaatgttcggaacgaaagtcttctttttgatcaaaatcatgtcttagacgacaaacagtaatattagcagcattttcaattttcagaggatccatagttgatacgagagaggatggttatgatgatttgagagtgaatattgctaggttaaagcctacaggctacatataacataatatataggcgtggttatgaatgtatacgattttttaattgttgtaatgcaattttttataacctactactcaagtaaagtactgattctgttaacaactttacccgaagcaaccaaactatacattctcacgaaaagtatcactacctaaaagggaagattcagatgctaaccaaagattcttagactaatgttatgataaatgaaacatgctttgctaaaacgtgacgacggaaaccaattactatacttatatgtgtttatataacagttaaatcaatctgtcagacacattttcacatctctagagaaagcataacaaatgaatatgtgaaaaattccctatgcaatttgtaccaataatctatcttctctttttcttcatgctgtctctgaagccgcgtggtttacatatattgaatctactttgtatctccttacacagcttcaggaccgtcttgcggtagaatgaattgacgcattggccttggcgacttggtacactcgtggcgtctgaaagtgagtgggatcccttcttgctcaaacccattactatctttcaattgttaggaaggcgaagagccaaatttcccaaggacgaagaacctacaatcggacccttgttaattgcagaaacattctctcatttttcattttatacacattcctaaagaaagagctcacccaccatcaaccatatcctttgttttg

SEQ ID NO: 25835 - DNA, 1717 bp, Arabidopsis thaliana landsberg
catatgatgaaagaaaaacttagtgaagaacttagaattagagggtgaagggcgggaaaaaggtggattagggtttcaaacctagattaggatttttgggatgctacaatcgcccaacctagggcgcaggccagccacgtcaacaggaggcgccatcatcaccctaccccgagctgactcgggccacagggaaccagaccggcgtcccatctggctagctccgccagataggcaatgatggcgccccacatgctctgtgacgacggcggctctcagcccccttacggaagcaagaagacgtcagcaaggactcaaccgctccgacagctgtccctccgccaggctccatcgctcctccaacggccacgacatcacaccagctgggtgccaaaatctctccggctgccacaatggcatgtacttagggcgctagctctcctccgctagacacgtagcactctgctacaccccccattgtacacccggatcctctccttacgcctataaaaggaaggaccagggccctcttagagagggttggccgcgcggggacgaggacgagacacgcgctcgcttggggctgctcgctccctcacccgtgtggacgcttgtaaccccctactgcaagcgcacccgacctaggcgcgggacgaacacgaaggcagcgggatttccacctctctcacgcccatctccggccacctcacttccccccttcgcgctcggcctcgcgctcgacccatctgggctggggcacgcggcgacatttcactcgtcggcttagggacccccggtctcgaaacgccgacatccatctcgtgcttccatagcttcttatctcgttgaccagggtcttgagcctattgtacgtctgagttggctcctctcccctgatcattgcgaaccttcctagttcgccttccaccaactccatcttggtgagcatggtgacatcgtttccctcatgcaagattttgagggtgtccagatctgcttggcgttgtccaagccgctcaccttattgtactcttccctgcacaaagatgctaaaagaacagtagtagcttgtgcatttttatggatttgttcattgataaatatggagttatccgaactataaaattgcatcccattttctactatctcccatatacttggatgaagagaaaacaagtgactacgcattttgtgactccaaaatccgtagtcctctccatcaaagtgaggaggcttgccaagtggaatggggagcaaatgagtatttgagctatgtggaatgcgcgaataatcaaaagagaagtttgagttaaccgtcttttgtttgtcgtagtcgtcgttgtccttttgggaagaagaggactcatcgctgtcgtagtagacgatctccttgatgcgtcttgtcttcttcttcttcccatcttttcgcttgtggcccgagcctgagtcattggacttgtcatcccttggctcgttgacgaaggactccttctccttgtcgttgatcacaattcccttccccttaggatccatctcttcgggcggttagtccctttcttgaagagaacggctctgataccaattgagggcacctagaggggggaggggtgaataggtgatcctgtaaaaacttaaacttatagccacaaaactttgattaagcgttagcacagtaattgccaagtggctagagagagtcaaaacacgataaccacaagaa

SEQ ID NO: 25836 - DNA, 949 bp, Arabidopsis thaliana landsberg
ctaagatttaatattacctggaaacgtttttgagttcctcttgatgaatagcttgtacgatgttgaaatcaatcttggcaaattcaacgacgacaaggatcttataattttgtctttttccatacacatctatgtaccatctggtggatagccttctcatttgccaatagtagggcatatccaacgcttggaccacaatttccaccatgtcacacgacccaaaatcttcattactatgagtatcaacaaagtctctgagttgttgtgtagcaaaaggtctgatgaatatttgcaggtttttatccaattttctcgaaagatatgatgcttcgtaaagagatattaaaccatatatatcatcacggtcaaacttcccacaattttccatgaaaccatcgaatacatctgtaatacaaaattcactagtatataagaccagatattttttagacagcaaaattttaacgtatatatataagcaattatctttcttttaaacttttgatttttagagtaaagataataaccttctgaaacattgaaaccatgttgcctgaaaagtcggaactcgagtgcggtggcatgtaggtcactctcccggatgtttgttctatcttttttataagaagatgttaaaatgtgatcgatttcggcttcaaaatgataagaaaccccgagtttttgtagatcgtcaatgaactccaatttgtcaagataagtcttttgctcatcattgagcatctttctcactttttccttcaacaaatctctctctcgtacccttttatctttctgtatgcaatatatggaacattacaaaaaatttatcaacatagtattcaacattacgtcactgtaaaaaagttagagtgtttacgggatatctacgtaccacaaatttattttcgaccgagaggagatggtgatggtcccaacgagaaggctgata

SEQ ID NO: 25837 - DNA, 864 bp, Arabidopsis thaliana landsberg
gtctctgtgttccactggctatctttgacgtctatcttctgtgtgccaggcatcaggtcaaccattttgtaacagcactacagcaatatgtacattcagaattgtctcacgtatcatggtccaagttccttcattccctgaaaaataaggtctgggcacaccttgcacttacagtttatttggtcaaaataaaacatgcctctatgatggtctgctgaaatgttattttaccgaaaagtgggaatctttgtataatttttgagtatgagcatctcaagcgaacttctgttgctctagcttattgttggtactggttgaacgtcattgcttggctactctaaaaccaaagtgcctagtttcttctttaaattgtttcccctggcttttcaggtcaaggatatgatggatcttgaatctgtgcatatggcttatctaagtgaggctttgcgcatgtaagtcataattcagttgcaaagcaaaaaatttcttctgacccttttgtgtcactgtaatttgagtgacctgatctaatgatataacgaaagacatgatataatctaaccgtcctttatcaaacactagcagatgcttcctatctgacgaaacccgaatcatatctaacatcatagagaacatcttgcaatgcgcactggacttccggtcttgtcttcccagaggtattcagagtacagatcgagtcccaaacgattcatggacaaaaacattaggcataaacacatctcaagtatataccaaatcctttttacgtgggtgttttcagtttgttgcgagagctaagttttataatcacataaaacaggtgatgatggtgaagcagaattttgacaaagagttaaaggagct

SEQ ID NO: 25838 - DNA, 491 bp, Arabidopsis thaliana landsberg
caccttcttatagtatagatcaaatccttttcgtaaatcacacgaattctctcaattaccgtttcacaattccgattgatttttgcagtttggtgaatttgtaagaatgagtaaacgaaaacgtccggatccgaaatcaccgggaggtgatctaaacgagccacacgagaagaagcttctcgatctgattcgaatcaaccaaggaagaggcgcaactatgttcgaattgaaacgcgagaaaacgatcccagcaactatagttactcgattgatcgcttctctacggaagaagaatctcatcaaagaagtagcaaacatgaacaacaaaggtgtcaaacattatcttgcaatggagtttgagccttgtagtgaacttactggtggtgaatggtacactgatggagctcttgacctgtccaaaatcgaagatttgaaagccaagtgtgtgatgattttggagaggcataggcagaggcgttgttaccttggag

SEQ ID NO: 25839 - DNA, 1232 bp, Arabidopsis thaliana landsberg
  unsure (1)..(1232): unsure at all n locations
aacatcccaatttcacacacagacagatcaaccttgtcaatatttaattatagcactaaggctaaatattaaattactctnnnnnnnnnnnnnnnnnntacttaattcatgattatgtgtacacacaaagaaaacttagccacatagtgtacacaaatattaaccagaaccatatgaaaacgatgatacgaaattcttcaagcacacgtttcctaaaccaaatcagcaccgagaatttttcatttccgcggagagagagaacataaacagaacctggtggaaggagaggcggtttccgttttcgccggcgagtttcttcacgcgttgaagcgaagcagtataggttttgtcgtaattgtcaacaacgacggcggagtaaccaccttcaagcagttgaagaacagtatgacttccgatatagccagcgccgccggtaaccaaaacactcttcgccatcgttaagagagaaaacaaaatatcttagaagtttcgaaattctggagagcgttttgttttttattgcgttttgggattgagctaaaaagggttttatagaagaagcggttttgactgtatgatttactttctgatttctacgtttcttcgagggagacagagagaaaaaggaagaggaaataattgctacgtggcaggatttggtttggttgcgaatataccggaatgttgtgaattgtcttaattaccctttgacgttttcgttaatggaagtgtatttatatagttgatcttctttttttggtaacaaatgttatttcattaggctcaattaagatttaacaaagcgaatggataaatttggatggatttgtaagcctaaactgtttaggtagaagaagtagaaatgatttttccagaaaattcggggtcacgagatttgagtatgctagcattctaagattgtgtgtaactttaggtatatattaagattttatttcctttgttttaatatatgttattgcgtttacattatcattaagcaaaatataaatagatacatggaaaggtaagttaatataagctttttccctaaaccctattattaaatgtgtgttaaatttctatcccaaataaaattgaacaaaatgggttgcttcactttttgccaacatgtgggcaacatacctaagggatttcattttttgcaaggaaattgagcttattttggatggatgggccaaggtttttttttaataccaaaatttttggaaata

SEQ ID NO: 25840 - DNA, 774 bp, Arabidopsis thaliana landsberg
gacatattggacttgtagcctcgtggtttgtactaatgatcaccgctgtattataattcatgttcaaatctaggagtggaagtgtgtgagttatcgatgacaaataaggaagacaactctatactcatatcaaaggagtaatgaatcatatgtgaaaactatgaattagagtcttctttattatagttaattatccaagaactacttttgaccatcgaaatcaataaaaagagaaacttataaatcatgtagagttgtaactaaccaaaaatatcaaaaacaaatggcactcgtttccactagattcttgatttataccccaacaaatccacccaaggtgcattgaactagtgagagtaaaatgagcctaaattaaacaatttacattgttcttataaaactctagtagcaagacaaagttaagatgacttgaaatcctaataaacaaacatgaattacggattaccaccacgtgtagaaaaatctcttgaagtgcatgcaaggaaaaaaagagtataaaaacaacaaatccctgcaacaaattgaaacaataaaaaaatggaaatttaagaaatcgaacacgaagagtacatcttccgccaccacattgtacaatcttaaatttggctaacacaagaagattcaaagggggcaaaaaaaaccctagtttctaagtttcggagaagatgatgaactaaaaagagaatctacaaagaggagttaaaaagagtgagacctgtcgccggaggaggagttgtagagtttgccggtgga

SEQ ID NO: 25841 - DNA, 5027 bp, Arabidopsis thaliana landsberg
cgattagcatcataatggatgtccaaaatcgtatatttttttaagagaaagatgatcgttgtaataaagcgtgcaaaaggataatttaacataaagatcatggaaggagttaaattttgtcaacaattggaacattttcatttatgttctttcactaaaaccaaacgtaggtcatcctcactcatcacgttaaaaactgtggtagacaaatcaattcataaacatgtgagataagtaattgagcaccgttttgttatatggttccatatggtatctataaaacatagccactaagtaatcaaccagatacaaacaaacgaatttatttcaaataattcacaattattaacaatttcaattaaaaatttgtaaatgataacatggtattcgattcgatcataagcattatttgagttaaacaatcatatgctcttaaatgttaaacttttttcaagtaaacttaagatatcccccgccggtgattcaaataagaaaatcaccgtacattcaaaaagagtgtataggaacagacaaacggcacgcgtggcgatgctttaacggtggtctgaataaaacacatgggttagtgggtccccactccacagcctttgttcacctttggctaaagcaatctgttaaaccaagttggggttgtaagttttaccccaaccaagtattccttgtttgttaataccataactagatctagttaaataaaactactattttgatttgaaagcaatcatactagtagttaattaagactagatctagttaatttagccatccaatcccgcaaaatttgtccaaatagtctcattttacattcatttttgtatgattgcattaaatgacttagtaaaatggcacacaattaactgtttatttggaaacaaaatataggcaattaacacttttctctgactaattgacattgacccttaattttatactccaaatattatctctcactaactccttcctatttagacaacaccttacacgcaaacaaaaaaattaacacaaacttataaatagcgtttcccatctcacttctattcaaagatcgcatcaccaatcgcagtcaaaagaaacgcaaacgcgatctctctctcttaaaaactctgattcattctctcccgcagcagcttttcttaatcgatggcggacatagacatcgcagtcgggaaagagccgctgataaaccatgaaaacaacaacaacacgaccaagatcgttcaatcgctgcgtatctcacgcacaagacgagctccacagtttccggaaatatctccgatggatgtgtgtagatcagtcgagtccatggacggcgattctatcatggtctatgttcatcgtcttcacgctcgtcgttccggcgatctctcacttcatgctcgcttgtgctgactgcgacagttaccattcaaggccttacgactccgtcgttcacccttctccaagcagagtcgccaccgtctctataaactgactcaccagattcgttagcaagtatggtcttttattcttcctcttctttgataaactctggggggagagctaaaccgttcgacgaaattataccaatcaactcaatgtgagtttctctattttcgaatcacaagttttttgatttctttacaaattctgtaatcgcaaaaaaagaaaaaaaaataatcatatctgtcacaaactcatatctgtcatatctgttaatattctattcttttaggattatgtcaaataatttgtccaaagaataaagtcagatttgaaaaaaaataatagaataaagtagaagaatcatgaatattataaagtaaggaaacaactcgacgcatcttaaggattgagcaacaaaaacaattatgttatttttttcactatttgctgtaaacatttttgtgtaaaaagtaaaaacctagattttaccatattacttgtttcacaagcattacaattgttttttattttattttgcagacttcgcttcatattgtgtcctactttgtgattccttgtttctcagcaatgagtgcatacaaaatttggtggtacgcttcaggtggatctcgaataccttttttaggaaatgctgtcttaagtgatacagtggcttgtataatggagctttgttcttggctataccgaacaaccgtaatcttccttgtttgtgttctcttccgtctcatttgccatcttcagatccttcgtcttcaagactttgctaagctctttcagattgattcagatgttggttctatcttgtctgaacatcttcgtatcagacgtcatcttagaatcattagccatagatatcgttctttcattctatgtttattgattctagttactggaagtcagttttcttctctgcttattactaccaaagcctacactgaagtcaatatctacagagctggagaactcgctgtaagtttgtttagtctcgatgttcatttctcgataaacccatttcgaaaaacttacatttgtgtgcttttttttttatctcagctttgatctatgacattagttactgcacttctgatactattacgaagtgcatcaaagatcacacacaaggctcaggctgtgacatgtttagctgcgaaatggcatgtatgcgccacgttagaatcctttgatcagacagtagaatcctttgatcagacagtagagactccaactttggttgctagaaacaacaatgataacaacaatgtccatgatgttgttacgttgacagaatcagacagtgacgagtatggtgatgaagaagatgatctagacaataatgacatcattcctgtttatgctttcagtaccatgtcattccaaaaacggcaagctctaggtaagagaatacaaaatcttctgcaatgctgttttttggtcttaatggtttacttaaaatgatatctggttggtttttttttagtgagttatttcgagaataacagcgcaggaatcacagtgtatgggtttacacttgatagaggtactctccatacaatcttcggacttgaattgtctcttgttctctggcttcttggtaaaaccattggaatttcttgaatctgttttgggatctccaagaaacatccgaatgttttgggccttttggcaatgaaccactttcactttctaatttctttctactgtaaatcaaattatttgtgctttgtatacgccactgtattattaatgttgttatagagtcatgtcattgtaaattagattggaaataaaaagcctatacactctcgtgttttgtgaagtgacaaattcttctaattatagcaaaataagtaaacatattttcggagtcttgtactacaaagtctaaagtacatatcatgttactagatgatgtagaaaattgataaggttacagtgaattcaggatttatttcacaaagtgtcttaaaaaacgccccacctaaactaaatcagtcactacttctgcacagaaaattgaaagcccacacacgcccttcatagaatatagatttagaaattcaacctaccccaaaaggttaaatcaaagacttcatcacttactttatatatacttgaggaccaaatagagtgcgaataccgactgttgtggacagagtgagctgccccctgtaacttttgtctgaaccattaacagcttttgtcgtcctctggattttctgtgacatttttcggtatagtagcctcttcgacatttggtgtcatgttatgctgttgggaaatgatctatgttggattgcgaaggaggctgggttggtgagttctctgcctgagaagctgatttctcctcttcgacatttggtgtcgtcttctgctgttgggaatgatctgtgtcagattgcgaaggaggctgggttggtgagttctctgtctgagaagctgaaatctcctcttgtaatgaggattccgctatgatctttgagtttttatcttgacaatctgcggaaacagatctctcagtagcatctttcctcataacttcttttttctctagttctggaggattaagagtctctgagtgagatactggttccgaaggatcatcactctcagcatcatcgtttcctgtgggagcttgtgtttgaaagttagcatcaactgcttgattaatagctgcatcttcagcttcaactatttgactcattgctttttcaactattggattcatagctccatcttcagcttcaactattggattaatagctgcaccttcagcttccaccatttcattcatagctttttcaactattggattcatagctacatcttcagcttcaactgtttgttccatagctgaatccttaattggttttgctgtctcgagatgtggcattccctcttgactaaccttttgatccattttaccaacccccttctctgcgggtaattgaacttcggctgtactagaagacatttttgctgtagtggcgcttctcatgacacggccgtatttaggaggaaaagacttgccattgtataattgcacacatcttgagcaatgccattcagatttcggaacaccttttatattgtgagcatgtagacatttcaagtgatatcccttttcacaagcatcacagattagcaccgtttctatttcattgatagttccttgacatatttggcatgtcattgctttactcatgtattctcttgaaggtgggttccacaagagattttgtttagcccgcggttgcagaactttgtggattaacttagcaatttcagcatggttgttgtttccaaaaggtgaagaagtttgaccataagttgctcctttcatgcctgggaatgcacctggtggagtttgagacataaatggtctaaagctcggatctgagattctggaagaactcggaacaggaaccttgctatctgatgcagtaccaaatgatatggtggaggtactggaatgaggttgggcagaccaagttgtagtattcccaaaataatttccggcaggaactgctggtgtataagaaagggtaataacgtgagagcatcat

SEQ ID NO: 25842 - DNA, 1555 bp, Arabidopsis thaliana landsberg
aaatttatctttaacagagcgtgctctgagaaagatttaactgttgtgcagaatattgaagcagacgtaggtgggaagggagatagtttgaaaccaaatggtcctttagctaggggagctagtggttcagttaggaaaatcgaagacagcgcttttgaatcttctgactgtaaagaaaacagtaatggttgcaaagaagagaaagaaaaaggtcactaccaactcgctataaaaaaatctacacttgcagaagaaaggtctaacaaggattctggctctaggggaaatcattataatggcaaagatcaagaaagtgaagttaaaaaacagttaactaaacaaaaatctatgcctggcgaagaaagatatagtaactcttttgaagcttctggctccaggacaattcattccatttcaaagaaagctcaagaaaatgatgttaaaaagcagttgactaaacaaaaatctatgcccactggagaaagatatagtcaagagtcgagtggattggatgacaggcctctgaagaaacagaaacttgatggttctgttacagtacgagatggatgggatacaaccattttgcagaacattacttctgatggtaaaaaggatacaggatcttttaagagacctagagacaaagtgactatagaggaagtccctcccgaaaagcgcagctttgttaagaaccgagatcttgtagtgtcagtatctgaaggaaaaactacaaaaactgtaactgaaaaaggtatatccaagaagcccagctttggacgtgctgaggacaagatgtcggcagatgataatgaaagaaactatcaagtaactgaagtgtgccgaaggccggatgctgtaagtttatacttactatatgtttcctgcaatatgatttagtttacattggtttggaactggctgtttcatgagatttcagagcgtgttgtaaaatctttagatgcaaggatgtggttttgcaagaacacaattctaaaaggagcagttttgttttacagtccttcacactgtatgttgtatagttgtagtgatgttcggtcattcttctcttcttattatgttaccacaatgcttggtaacattaaggtttatctaacagatttttgtttccttatttatttcagggaaaaagtaaatggttccggagtcttgtaagtatcttttccttaacttttttttgcaccccagttctgtaaatgtcgtttttggttgcctccattttcgtgtttgacatgcttgttttatgatgttagtagagtgacctgttaatattgttaacgtctcgttcatatgctattcagaaagtagtgtattttcttgatcgtttctatgttcgagagactcagttgtttacttttgaatctgcagtcaaattgtttactttctctatccgcacctattttttgtttggctggcgtagtctcttctagctagcctgaattgttatcagattctgtacgtaaaatcagaaattatggactgactttttaatttgtctaaattatgtccagccttggaagaaagatatgagggaagc

SEQ ID NO: 25843 - DNA, 1261 bp, Arabidopsis thaliana landsberg
gaagaagaaataatgcggtggaaagaaggttgtatgaatgatgaacagaatagagtaactcacgcgactgagcaaaagccatgctgttgcttagcttatgataccgatcttactaaatccttgaaggatcgaggaaaaaatactgctcaaatttctcgtggtcgatgcagttccattcctgagagatcctctcatgttgctgcagaatgtagtgctggaagtttcagtgaagaaatagacgacaaacctagcacaagtaatcagtctgaccctgactttggttatcgtccagtaagatttatgcggactgcacttcaagagagtagaatctcatctgctatactaagcgaagaagaactattggatgctctattgctattataccatattgctgttgctccaaattttaagcaggtaattttaattattcccgtcttaattagattttgttgtattttttgtacgatacataccacaacctgaataagcttgagaggctgataggttctctttctgcttttcttaggcatcatattacatgtctcaccaatcgcaatcaatatcacttcttgaagaaactgataaacagataagagaacgggcttcttgtgaccaaataaagcgcttgaaggaagctcgcaacaactacaaagaagacgtgatggactgtgttagacattccgcatggtaagtttcacttaactcatggattgcgttaactccagaaggagggtgtagtgaagaggtttcagttatgattcatgtgaggtaacattacaatctatatttttgccctcattctgaatcattttgtcaggttccgcatctcattgttctctcgatggaagcaaaggggaatgtatgcattgtgcatgtgggttgtacagctacttctggttctcagcaaaatggattctgtgtttgtttatattccagagttctaccttgaatctttggtaaacagcttttgcacatttctggtacttcttgatataaatgtcaaatgaacatgtttcagtttctctttgatcaaagttagtagatcttccaacaacttattctgttgcgttttctctgtttctcaatgaaatccctaagtttacaatctctttgattatttcctcaggtagactgtttccatgtgcttcgcaagagcgatcctccgtttgtcccatcaacaacattcatcaaaaaaggaaattcatcatttgtatgcctaaactcttatcacacaatcttttttgtctgttatttttcctca

SEQ ID NO: 25844 - DNA, 1262 bp, Arabidopsis thaliana landsberg
ctcagatcgttccattcgctataaaaaagtggttcaattagtatcatttcagtaattgattttgtgacctggtttcccaacttgtccctgacctctcgctctcttccatttctccacattgatcatcctagccaagattttcctaatcaaagtcaacttccgcgattgctgtgaaatgacgttaacggtcgacgagctttggctaagtatgatcccatacccatcttgaaaattatcaattccgtttaccagaagttgccagaacaatcctcctgctgctgcacctcctcgttttgcagacccgtaaatcttgctgtacacggtgttgaagacgatgtctctctgcgctggggtataacctggtttcttcattgatttaccaaactctgctaatattattggtttgtgaagaacgttctgtgcgtcttggatgtgtgcgtctagccatttgttcaagaaatccatttgggattgctcgcttgagtctggaaacctgcacaagaaaataaaacagcacaaaagtcaaacaaaagtgattaatgattcaactgatttggccaaaacttaagttttgtggccttaccattcatcagggtaagagtgaaccgtgacgaaatcaatgccgggaatgcggttattggcgatgaaatcggttccaaactggccaggtgggttaagagtcttgctttgaggtgaagactgaccatagaaaccttcgaggccagcttcaagcagatggtttctgtctagtgatttcacatgagcagccatttcagtaatccaagcctgttttcataatgtaaaaaaccaaaccaacccaaacaagtcagatcccaaagaaagactagacaagtaacagagtcatggtgtgaaaatgtgtttaggtgaaagtgaaacctgaatggctcttccggaaggatcagaggggcaacggggctcgttcatgagctcccaagccataatggttgggtcatctttgtaatgaactttggtaaaggtattgaatctgttcagcacagcctgcaggagcaaacaaaaatccattactttttgcacttttttggttgaatctgcacaagagagaagattaaaggtttgattttgaaaccttgatatggttcttgtagaaatctttaacaagagagtcagtgaagaagtcgtcttcagaagaaacgggacggcctctgcttcgagcccaatccacatattgcttcctccctccgaagctctcgtagttattggcaaagctgagtattatcttt

SEQ ID NO: 25845 - DNA, 2373 bp, Arabidopsis thaliana landsberg
tactttgctgccaataccaaatgtaggatccttgacttgattgctcatatcgctgcatatataggtcttggcagagtcagactcatcaagagataatgaaacaagcttttgtacaaaaaataagacgtggggcagctgatcaggattcatgattcaaagataaaaacgcgtaaagactgtaaatatggtaaattttctaagaaatcagtataacgctgagacgggaggagtccatagaaattatctctgaagccaagttaataaaatgtaaggatttctagtgattacctgctcaacatcacaattgacatgacctaatttcacctttccctgcaaattttttgcagccctcttccactccggggcaagctttttgcaatgtccacacctttaagaagaaaggaaaaaaagaaagatattttacaccttcagatgtaccgaagaagttcaaaggcatgaccagttcattggctctataaggacaacttaccaaggtgcaaaaaactcaacgatccaaagttcattgctttcgatgaccaaatcatcaaaattgctagcgttcagttccacagatgcactaggttcagatttcttttctttagatcctcctccagttggtttacttttgccttccaaacggtcactcaaaagacccttgatctgccaatgcaagcaaatagcaataagtttatctgaatgcaggtacacaagtttgtttgatggagaatgttatatctgcagtgcaacttaagatggccatttgtggttcttcaattcatattcaaattttactaaactagctatattttggttgatggacaattagtgtgattccacaacgtatctaagtagtatattttgtttgatggacaattagtgtgattccacaacgtatgtttgtagtacttagcttcaagaaggtataaaaagtataaaacttcttctacataactatggcatatctatcagaacatgttatctgcttatctggccaaaagaaataacaaggtaaaggtcgtttgttgtagcaagaacatcttgactggggctttaaatacacccgatcatgtcacaggatgagaaatttcttgacagtaaaaaagagtgtaatgaagaatcaagtagtagcatatgaaaaacctgcttataagcaaaattagcaatggatttggcatctcttgctccttggtaatcgattggagcctttccaggaacaaaaaccttaattgttgggaaacctttaataccataatcctgaacaagagagtacatcatcagtatcacaaacctgagcctgagctttgtgcattatagtgagtaaaaaagtttttttttttcttgtatgattcacaagcaacggctacatggaaaaattgaaactttagctgactggtatcaacatcacaaacctgcgcggcagactgatgagcatctgcatcaattgcagccacagtagcaactcctttcagaatattagccactttctcccatgtaggtgttagagctttgcaatgaccacaccatggtgcaaagaactctaccaaaacaactccatttgaattaagaacctgccaaccatttccaaggagaacattaaacgaaattaactcattacgtatcactacatacgtaattaaaattatatataacacttaagccgaagctatacactgctaaacgaataaagagaagatcatataaatcacggtcacggacataccttagacttgaaattagaaggagtgagttgaagcacaggcgacgaagatccatagagagcattaccgcgatcgaacaaggcaaacaacagacagcaaattgggaacaccgttgatttgtacatttttctttccatagtttcttccctctctttcttctccaccaaaacacaaaaaagtgactctttaggacacgaactaaaaacattgtctacgtggacttacgtgtacgcaccaatgatattgtcacacgtcagcacactctcctctcatctacttggccatgttttttggttatcttgttcataaacagaggaatcctttttctttttcttttttatgtgcgaaaacagaggaatccttaaattttgatctcgatataaagattagctgaatcacatttcatagtccacactactagagtcaatttataacacaaatctatttgattttcgaattaggttatctcaatttcctcataaaggaataaaaagacagaagagcctttggcttcaagacaaaacccatgtgcacttttatgttccgatcagctacttctttagattgttcttcaatttttcaacctccacattctggtgccttcaaagcattatctggtgttttgttctgtcttgggaatggtcgtctgagaaac

SEQ ID NO: 25846 - DNA, 1354 bp, Arabidopsis thaliana landsberg
  unsure (1)..(1354): unsure at all n locations
agcctatccatggagtggtcgcttactttgtcatggcaaaacctacaagtgaacaactgatcacaacaagcagctcgaagcttgcagttacgcttgtaatgctcgcatccatatatctgcttctcgggatcccgaaaagacggggaacatccaagttcaacatcaccatttactgcagtttctgcttccttaggtaacttttgctgagccgcaatccatcgactgataaatgcaccaacagaagaattttaaaataaatgttactctagaacaaataggattcgggtatgagggacatgtgaatgagannnnnnnnnnnnnnnnnnnnnnnnnnnntcaatcaaggacacatatacatgcacagtggaaaataaactgagcacgttattttggattgggaaactgtaaaggacaggagcaccacttatactcttccgcattgcaaaagaagttcaagtaatacagggaaatgtattatctctttggggggttctagatttatgtctggcatgctgtatgcatgacaatgtggaataaagcatccatgcgtggaaatagtgaaaaaaatctgacctggtcctccaattctgtacgagataatcttttctcctcggatcaagtgttgagtcctgatagaccttcctgatttcagcctctagttcattctgattcatgcggaaaatatctttccaccctggcttaaatagttcaccactttggtccaagatttcttgatgatcattatctatatggaaaataaacttgacataagcaaaacaaacttagcacagagaaactatagttgccagcttaagtatgagttatgaagtccaaagaagaaacatctaaggttacattaaacaagttagatattaagttggtgagaaatagctaagcaatgcttttacctttctgtggactaggtttggatgtttctgttgaggatgagtcgggtgatcctttccagcattcattaagccattcatcgaacattgtgttcttggttnnnnnnnnnnnnnnnnnnatcattctgttttgctcatcttcagaaagggcagacgtcacccatggtaacatagattgaagaacttcagcacccgttgttccgattatacgacccacaatcttgtcttgctcttgaatggagaagtgtttgtcaaatagaggccaaagctccagttcctccaagaaaatgtgctgatccaaagtgattttaatggatttgcacatcccctgtagctttgtagccagttcattgtatttcttgttgcagtcaccgttatcgatatccgtccgaacagtgtcagtttgagctatgttctccatcatagaatcactctgtaacttcttatga

SEQ ID NO: 25847 - DNA, 1390 bp, Arabidopsis thaliana landsberg
  unsure (1)..(1390): unsure at all n locations
aaacaaaacaagaatcattaaccgctatcatcaaccacaaatcttaaatgtgcaattcaacacaatctctacaaagatacatattctctaactgcaaaggggttggaacagtaaatcagggagattacatgaatcgatcacaatcaagtcacaaacaactcaggaacgtaaatatcatgaagaaaaaaccagagacctgaagcgaactagacctaacgaagaacccgaaattgaaattcaatcagaaatcaaaatcaaacattaaaattcaccgtaatcgaatttgaannnnnnnnnnnnnnnnnnnnnnnnnnntcccaacaatctgagagatatttgttggaattgagaaattttctcttaagccattttatgcagcaagagaatttaagaatcttctcgaactgtgtttctacaggagtcgcagtttgattggctgatgggttaacttcgacaccgtttctgtaattttctcttgctcattgtcttaaactcatggattttcttctaaacatggcaaaattataaatattttctactgtttttctaaatccattttattttatctattctataatttatatgttcattagttgaatcgagttttttccgttcaaaatgagtttccgcatgattttgtacgttttaaatcttagatttaagccatattcaaaatatcgttaggcaatctaagatgaattctataaacattaatcttagattgcatatacaaaaaaagttacaagttgaacacaaactgcataaattaggaacaaagctcgagagtgattcgaaaaatcaaacccaaaagtaatacggataatcaagccgctactcattcggagccacaaaattacaaacaaaactttgaacataacttaaaataaccaccgaagtttaagaaaaaatgctaccaccaaacaaaataatgtgaaaaccacactcgcaatcaacagaaagcgcggaaagaacagtagatgcagaactacaaaagctcacaagcagccttcgagacaaatgtaaatcgcgaaaaaggaccccaaatacgacgaataacaagaagaaaaaatcacatataagaatcaaaaattgtagccatgcaatcttcatcctaaagagtctaaatttagaactttgcatgcccacaaaaggttagcctttacatacgcgagtagagacctcatgagaaaactgcttattagtctgagcttaggagtaagcacggtggaaggagcaacctatcagtataataaacggtagactccagatacaaacaaaaactaatgtatcatacacagaaccttgagaaaggactagcttcaagggctggtcagaaaacccaagagcggaaacatacataaagttatgctgtgagtcttctttttgaaaa

SEQ ID NO: 25848 - DNA, 1454 bp, Arabidopsis thaliana landsberg
  unsure (1)..(1454): unsure at all n locations
tcctcatatccatgagctcctgcggtccatatcacacaacaccgacccaccattttggatatacttattcgcaaacccggtacaattacaacccttagaacacctctgcttacattcattcaacccaattgtcttgtccacaattgctgtgcttgtaccaggcagcttcatcctcttcatcaaaagaaaaaacccatctctgtggcagttcagtcgtgacttcctcacacatccctcaaatgtatctcccaaagcccaagccgtcacattctttggaacaaagcctttgatacagttacacgtcggtgatgttttcgtgtcacaataactatcacgaccacatatttggtacaaatcgcatttctcggtcggtaaaacgccaaacaagttccattccgatgatgtcgtatcccatctggatatctgtaataatctttcggtagtcagtgtaaatctcacgtagtgcatgctatggtcggtgcctttgnanctatnngcgcatacactctattctctatgaagttgttaacaacgtcaaagtagctccagttttgcatcgtcggtatgtagagctgtcaaatggtccgtttatagaccattgggcgtgtccgaacagatagattttttatgggctgattttgtgtagtccacaatggacaatggtctcaaaaaatgcccatgcccaatatagctcatgtctagatggcaggaccttggacaaccaatttcattaattttattaaaggaactttactcagatgtcatagaaattaagtgtatttacgagaaccatacaaaacttttttatatttctttcatattttcttctttttttgtatacccatcgtgccctactaaacgtcacagaaaaaaacataattacaaagaacgccactgtcacgtcagcaaacccacgtcgccatgtcagaaatcactgacgtggattaatgatctcaaccgtaaggcgatacatcgacagtcacgactgagttacagttctgacgtggattaatgatctcaaccgtaaggcgatacaacggtagttacggctgagttatggtatgttgcggctgacttaagacaaatttatttgagttataagaaaacgacggaattatagtataactcagccaataattacggctgatttgtctgagttatgcgataatccagcctacatgacggctgagttaatgaattttgtctgagttatagatttttgagcataatccagacaacgttatggctgagttattagaaaacagctgacttattacctcgacatgactgagttatcttttttcggctggttgggttatgaaggacggcttagttatgagatgttgttacggctgagttattatcgagtgtcataaatcagccccgtaagagttggattactgaataactcagtcttgtaatggccgactcagttgcaaaagatgaattactat

SEQ ID NO: 25849 - DNA, 1329 bp, Arabidopsis thaliana landsberg
  unsure (1)..(1329): unsure at all n locations
cctacatggccgacttacatgtagtaggccaagcatgtataaagtggtcagcgacaacaataaaaatatcattcttagatcgtgatgctaacaggtgaaatactgaaatcctaatattcggattgaaatatatctagatgaatagttatataaatgatatcaatattacatatctaaattcatttaaaaattattatagtaaagaaaaatttattttgtttatttcgtaatgtcttctgaaaacaaattattggtgcaaggccttaagctccattcacatatacctatattgattataaaactcgtcgaatattagttaaagatgacttgagaaactcataaatcatgtatcgatatatagaattttcaattctattcaagatcaaacctagaaagatcaaatgactgatcttgtgacgacagcgattgatcgattctaatctaaaacagtaacacaaatgatttgtatagctttacaccctcttttttcttcttaaaattgcttaaaattgtactttttgtaacactaactatgccgacgcatgagatagaaaagaaaaacataattttatgaaataatataaagcgttttcatagttttatagattatatagcaaagtgaaataaataattgagaagcaaaagattggaaatagacaaatctcgtgacactttgttgtattgtagttgaatatatttcttgtggatgttgaagccggataggaaaaagttgggcgggctccggaaatgatccattggttcttattgcttctaacgagctgtcttaattctctattttttttattaaaaaatcctttaatgtcggctagaatcatcaaaaacatgtatatacaacatattcaccaattcatgtataaagattagaattttcgtagtggatgtaatcatgatataaatacgtagacagcgacattattcttcaaacgtacaaagtagtttgtccgttaattaactgtttttattctaaactttccttctcccctccttttttttttccggtccatgaccatatacatggtatataaatttccattattttccgtaattttttttgtgataatcaaaaaatttatgcataaacgcgactaatatcaaagactatagaaatccgagttttcttcttgttattttttgaatgatatgtctgtgatcacctccctacaatgtcaagaagaaagcacaataatacttttatacgaataactataattttgcactcaaaaacccccactaatcgattctttgtataaactctagtaagngatcgatttcctctcaaatgtataattatattggcttgacaaatgt

SEQ ID NO: 25850 - DNA, 1051 bp, Arabidopsis thaliana landsberg
  unsure (1)..(1051): unsure at all n locations
tctaacgatcagtattaaaccaaggttagatccacaaactaattgccatgaacttgtgctaaactagaccaaaatcaattcctatacgctcataaaacagcaattctaaagctatcttgcaaaggaaacaaaaaaacacaagggtcttggttaattaacataggttttgatgacaaatacctgtacagaactataaggagctttgcgggttgaatcataaacatcagctactgatgatggcatgaaggaaccagagtgaggaagatgataatttccagactttctatgtctattttcttgagttggcctgaaggatagaaactgagaagaagcagctgatactttgtttgagaaagaccagttcattcctctgttgggagctacagaagaaaaagaaaaaaaagaaaatcagtttaaagtcaaacatggagtggtaactgttaaccataaatgtctcgagatctcctaacataaacaacagaggattaattcaacacctacttcaagaaaaagattagtaaccaacaatgtagaatctgatactgttgacaaattcaacgagggaaaaccactttcgaaaaccgtgtctaattctaaaacatttgattgaaagtcattgtacgaaactccaataatttaagtttgttttaatagtttaaattaaagagagattcaaactttaaccccaccacaccacatgttgatgcactacttttatggtgtggcacgttttggcttataagaaaacaaagttgaaataattatattcctcgtggtgagaaaactattattttcacattgtaccttgaacaatattctaacgcatgtttcgcttaatcaacacacaacacaaatacacaatcaatatttaataatcttataaactaatccaactcacacaatcaagtagttaatcatcttataaactaatccaacttactctttngagtatatttaatctttctacctactaccaaccgtatctttttatcatttnttgattagcctctatacatccctctttccaacatttacgttttccttttttttt

SEQ ID NO: 25851 - DNA, 1420 bp, Arabidopsis thaliana landsberg
atttatggtttggtttggttttcaattgatatgtttttggttttctcttttttttttttttttgaattctatatttgatatctagagtctagaccttgatgtaaaataaattggaaatttgattcccttttgtttaagacttgaagtagtgtgtaattcaaaccaaacaaaatagttttcgttgttaaatgaagaaagcccattaaaaatgaaaaggcctcaacaaaagaaaagcccatttaaaatcttccaatttctctctctctctctctctctcttctctatgccgtccccttcctcagttcctctcagtctccttcgctttaaacctctcaacgaatttatttccgagtgattgattactgaatgatgcgaagactcgtctcttactttgttcgttctagattctccttgcatctatccacaacaccacctcaaaggtccgcacttttctctcatatattgagttctcatctagattctattcaaatcaacaaaaaaatctcatctttctctgtgcatcgattctgttccacgactatgttaaacccagaactagaaattacccgtatagagaaagtttccgaagatcaatcattggtttattgcaatgaaaatgatattagaacaaagggttctaatcatgcggttggaatctcacacgaagctataatggcgaatttgaatgcgtatgatgatatggaaaaagcccttgatgaatctagtgtagatttaacaactcctgtggtgtgtaagatcttacaaaggcttcaatacgaagaaaagacggcttttcggttcttcacttgggctggacatcaagaacattactcacatgagcctattgcttataatgagatgattgatatattgtcaagtactaagtataagaataagcagtttaggattgtgattgatatgcttgattacatgaagagaaacaacaaaaccgttgttcttgttgatgttctgttggagattctcaggaagtattgtgagaggtacttgactcatgttcagaaatttgccaagaggaaacggattagagtgaagacgcagcctgagattaatgctttcaatatgcttcttgatgctctgtgtaagtgtggtttggttaaggagggtgaagctttgcttagaaggatgaggcatagagttaaacctgatgcgaatacgtttaatgtcttgttctttgggtggtgtagggtgagagaccctaaaaaggcaatgaagctgcttgaagagatgattgaagctggtcataagccggaaaatttcacttattgtgctgctattgatactttctgtcaagctggaatggtggatgaggcagctgatttgtttgactttatgataaccaaaggctctgctgtttctgctccaaccgcaaagacttttgctttaatgattgtggcgttgg

SEQ ID NO: 25852 - DNA, 6458 bp, Arabidopsis thaliana landsberg
cgagtgaatggagtttcataatcctctatgcaaagattggattcttctctccaaaagtgtatcttaatatcaaaacaaaacttaggtctaacgatgatcttaaaaacctaattatatgtttaaaacacgtctttggcctaaatattaacttcagggtcttttatggcgaaactgagcccgtgcaaatttcgtacaattttcgtgcaaacttcgtgagggacctgtgtcgaccgacacaagtttggtatcgatggacactacattcaagactggttttctgcttcgttttgctccaaagtgtcccataatcgcctcataaccccagaacgtacgagacttgtaaatacaccaaaaacactccaaaagcactataaaggactcaagagactctataaaaacaatcctaaatcatagataaaataagtaaaaataggtttttatcaatatttaacatcaaagaaggcgaagtccacacctgaaataaaatgaacatctttcagcaagatgaatgtagtatgcaagttaaatagcccacgacgatcataaatataattgtataacataaggtatctattttaacacttaatccaattccaagttctgaaaaccaatcatcaaaacaagtcaataagtagatctggaatacaagttataccttcaccttttccatcattaaagactgctggggcgtcacgaccaaaaagtataagatcatcactgaaatcggagagtattgtgtttaatgcttcgggtgcccacccccaaaacagaatgttctgccgctgaagttcagttttttccacatcattgacaatattagaaacatgactgctccccttaaggaatctacgccttcgatatctgcattttcccgaatggtgatagcgggtggataggtggcatggtgaatggaacaagtagcaagtcatagtcattgtcgctagagctatctgtcacactggctctccttggaccagccttccctgccttcccaattgggtccattattcctttctctttgtcagtaggtggacattcagagctttttagtcggatgcagtcttcaagctctctaatattgatgcctcctcttgggaaaagttcccgcctggttttatgtcgttgctctgtctctgttgtagcagctgtttgctcttgagtaggcccaaccaaggcactatcaaatgcaaattggtgaagttcctcctctgagtcataatttgactcgttagtgtcctctgaattgaagttcttgtcagctacagcaacatgagaacttggaatagtatgttggacgacagtgacaaagagattcacctcctctatatgccgcctcatttgaatgaacattgtaacatcactattcactaatttattgaggaggagagtcgttcccttaatctatagccatccactctggatattggtatgccattttgattgtaatgtcttttccacgaaagccaagtttatttttcaccttctgagctagctctccgtacgtcatgttggtcctgaggcagatgaaggacgctcctttgacagtcttaggttcaaactgcgaggctaaattatcaaccctgaccaacttgccaattaccaacaatacttcatcttgtcctgccgtatacatggcgtagggaaataggtcattaggtattacaaagaatataataaaaaataattgtaaatctcaacccttaatgacagttttccaattaatttcagcgtaaacattaatttcgtactaaaacagaaatcgtgattcacggtttaattttagtaaatcctaacaagtcgtttaccagatctaaatcatggtaagttgtctattcgaaagaaaaagtcagtactttaacatggaaagtttatactagtcaaacgatggttctttgaaatagttatttagcaaaatatagttacttggtaaagaaattcagagttgaatatataattgtttgagatagtttcgcacagttattatatagagtttaatatatattagtttagtaaagttttctgaaaaatcttttcgacaaaaactgtcacatagagttattatatagatcttcatgtctatttgttttgtaaagatattgggtagagttattaagaaaatttgtcacgtagtaatgagaaaattcttagtaattactttctcatcattcatcttttctcacattcttagtaatttctcattatgtcacttcttttcttatgggatattctttcatatatatttgaaaattgttgagagttgtttcgtaaatttagtttatcacagttattatttacatcttatatattactatattttctaatcaagtattttagtacacttaattataagttttctcataaatttagtttacacagttattatatggatcttaactatatttgtttgctaaagttttatagtaaagttactatacaattttttttagtaatttagtttcacacagttattatctagatttctaagtatagttgtttgctaaagtttaaggtaaagtttatattttgaccaaaaaaaaaaaagtaaagtttattaagtaaagttagtttgtgaagttattatgtagagtcagttcgtgtagagttttttttttaatgaatggttattatgtagatatagagatattacattgagtttttgtgtagagtgttaaactaatttgtaaaccttttttctacagaaacatggtacatacaattgcagttttaggtgaatggatgttgaagaacggatgactttttacagttgatcaaaccaaaggctgcaaattactagttctagtggatgatatgtcatatgttggactacttcagatagttgaagaagaattccaattatataactcaaagcataatgtggaactcagttatgcactacctaagataatggtagggaatatgtcaaataaaacgcctcttcctatgtttctgacaagcgatagacaagtaaggagtttcattgaaatatacaaatctatccctgtccgactttgcaaaaatagagttgttgtgtgcaaaaataatggatgctcttgaagagtgcgagcaaccaaaaaggatgtaacaacagagtttttttggattagaaagtgcattgatgtgcgtacatgttgttctgaaaatagaagtttttcactaggatcaattatacaaaaaattataggccaactcatattggatcttttcggtggtattaacaatggattgtatccaagggatttggagaaaccactacggaagaattatggtttaaggcttacaatcaccaactttgggatgctttgtagcaagctcgtcaattgatgagaggttctcctgaaagtggttatgagcagctccctaagtacctctacaagataaagaaagcaaatcctagtacagtttcctacctagagcttgaaggtaaccaaagatttaagtacttattttttgcccttgatcaatgtttaagaggttttgagtttatgagaaaggtaatcgcagtggatgggacctctctcaaaggaaagtttaagggtaccctcatagttgcaactgttcaatatgaggataatgatatatatcctattgcatttggaattgttgattccgaaaataacgcagcttgtgaatggttttttactcgtttgaaatcagttatctctgatcatccagacttggtgtttatctcagacaggcatgaatatattgaaatagctattgaaaaggtgttcccctctgcaaatcgtgggatatgcttctttcaccttcagaaaaacatcgaaaccaattttggagcaaatcaattatttcacttggttaagaaagttggaaataaatttagtcgtgatgattttaacaatgtcatggatgagatacgtcttcttaatccaaagctgagcaaatacttggaagatgtggatattcaattatggtctacggctcatttccaaggaaacacgtataacatcaccacaacgaaagttgctgaatcaatcaatggacttttaaaataagcaagagaggaccccatcgtagcttttctcaatcatgtacggcctactctaactccctggttttgtgagcgtcaactaaaagctgcaaaacttgtcacgaacttggaccatatgctaacggtgaattgagaaaatacgtgaagaggaaaacacacttgcagtgtggcccataaatctaaatcaattcaatgtgactgatggctcacaagatgcaatagttgacatgcagaaattgagttgttcatgtcgggtgtttgatataaagaggattccatgtatgcatgccattgtagtggctacgaagaaacacattccatagcacacgctcttggatcctttctagatattctgagtccatttatcaggttccagggattcttaatgatacccaaataccccgcgaagttgaaaaagtcagtgtctacctcctcaaggtcgacgtcgttcaggtcgaccaaagaaaaaaaggattcgatgtccattagagattgcaatggagaacaagcgaccacgaaaagaacacaattgttcaagatgcaagcttcctggacataatagaaaattcttgctcaagatcccttccactttaatatagatgaaccatctattgcattttcagcgtgagctttaactttattggcaatcatcggaacaacctcataccccatatttagagaacttggacaaaaaccatcattggcgtaagcaggattacagaaatcatcttttacctcatgaattgaatcactaagaatcttaaaagcagtcttaccccatagataattctcatggagtgggaaatgggatctcgttactggctcgttactggatcaagccgataaaagcccaattaaatgtccaaatagaatatgtgacttgttaaatagtagccagaatagagacgtatcagcgactattttcatcagtttcaaattaaagacttattagcgactaatgtctaatatagacttatcagtcgccaatacatcactatgcaatcgccaaatttaacgattactaaatcagtcgccgaattaagttgctaattccttgtagtacatatatgtccgagaatctcaacgacctctccgcctccccggatctttctcctatgatctcgtgatcagttattcttgttcccgaagtcacgctcctcgaggtcgttgaatagccgagaggctgacagatgggcctacgttatacaagctcagccgctctcttactatttcatgagataaggcctggcctgaataaatggttttaatgggccggtgaggcccagtaccaacagtgaccaaacgagaaaaataaatagctatgttgttttgtggtcaagatctctttagccaaatggtttagtacctctcactatatatatatttttttcctgactgtatctttggcataacgagaaaccaattattaagtttcaattttctcgtaaagtcaagattgcagtggcaaacaaaaacatcactaacaaaggatacacggatatcctttaaacttcaactagatcataacccgtgttatacaacacggacattaatattttgtataaattaaattgtatactttgttatgtttgctatgtttgtcaaaattatttgttatatttgtcaaaatttagtaaaatatattcaaatataattaaatttattaaaacttaataaaatttaaaagttttttttgtttggagacccgctttctacatacaaatttctcgtttctatttttttggtatttttagggtctgaaacgttttgtgcaaactgacccaaacccaactggatccgacccgaaccagaaccgaatatttagaattattctattgggtagtaaattatatacccattaatcccaaacccgaacgggttctacccgaactcgaatgggttactcatatgcccaaccttattctctgatttaattatctaaaaactcccaaaaaaacatatgttttgctgactactttttattaaaaaaaattacatcctcttctgccaaaatcatttcataagacatcccaaaacccttggaataatgattccatgaatgaagaatcctaatttgaatataccaagagattttgaaaggttttaagtttttgataggtgtgtatgtgagaaggtacaaacatcgtgatggtaatctgcttatttataattttaacttgcattatacagcaggtaggcttatattttagttaaactaaaaacttttattgtaaagttgattataaatatatgatattattttatttgattttaaatgtatagtaaactacgagttgtatatgttttgttgatattatttatattgtttagtgtttaaaattatatacttgtattttgattgttaattttagagtttcacatgtagtataccatcttgtattaatattgatttaaacccgtcaattgtaggatttttccgttataccac

SEQ ID NO: 25853 - DNA, 1208 bp, Arabidopsis thaliana landsberg
ttggttcatcgtttggttcttgaggatttccaagatcaggagaaggaggtctttcaaaaacaggaggcataagaatttggtaccctcccatacgaacgtccgcctatcacgagtggtggacgcatctggcaaaacaaaaaaatttttaaaataatatgaatcacaatattcatggttgatgctatatgttctcggcttattgagataaaattatggtattaattttttgacgcatacaaaatcaaactaataatctaactaattgtgtatcccattgtgtatctcaaattctctgttttcagattacgttgcttctgggtaataaaaatgcagtttgtgtaacaaaaaaaaaaaaatctaactaattatattttttttaacacgccacgaagttttatctcaataatagttacaaacttttttgctttcaatagtctgtacatgaagaagaaatcaaacagtttccagcaaaatcaaaactcaaaagattaataatagaattcaaaccttgaaatcagttgatgtggaagtgacaaaggagaaaaactataaatttgatcccttagaatgagccacttcttcctttggctacactcgggccactggctccgtacgtcaccttcaagtacttgctcgtccttttgtggatcctccaaatttgttagtaatgatcgtcttttgatgaacaacgagtgaatcagaaaaaaaagaaacggtgggagagtaatgatcaaaatttgcttaagagtcttaggataaaacctaagaggaaaaggataaaagtcttatatatatatacacgtatatgagaatattcttaatcccattataactataagaaaaagtaattaaattttcataagtttatctaataacacatcatctttatcttgtataaaaaatattaaactttacatacaaaataatacaacatctattgaaacattaactacgtataagattactaatttttttaagtaaaagataatttctttttttaatcgttactaatgtttattagtcaccaatttatactatttcgtgacatccatttgtcacttttatgtcacaaactgtcactcacatttttgttatgatttcgtagtaatttgaaactacatattagtcaccaactcgtagcatacattacgatccgtataatataacaattacgtcattatttgtaacaaatttcggtcatgatctac

SEQ ID NO: 25854 - DNA, 1318 bp, Arabidopsis thaliana landsberg
tttttttttttaatatttgtttcattatacaaaataacaaagtgaatatgtgcatgacaaattaaaaactttactatttatttcattgagttataagatttatacagtaaatggtttgatctgtcttttctcttgagacccggtgtaactccaaatggatatctcaacctcggttttcaccttccgctgaacggatccactggtatttattcggttctttgaaaaatgagacaatggtgagaaatagattccttcaactctgctagatttaagttcaaacccttggtcacctatagttggtagaatttgagctatctcgaaaaggagttcaggcttggtagcattggccaaaagactttggagtttgagcaaatggtcaacaataaattgttggcactaattaaggtttaacatgttgaaagtaaacatgaaattggcactaatatttttgctcttgtagaagatatatgagtaatttgacttctagttgaaggctctctttttttgaaagattaagaggaaaacggctgtttacgtagcatactactctaaggctctcatgaatcatgatcatatatattaatgaactaaagtgtcgtgcctaaaactacatgaacaaaacaatattatgaatttactacatgacctatttaaatatgtagtcggaaacctacgttgaagtagatgtcattacccaaactattagtgctttcttactagaataccatgttgtactttaattttaatatgttttacgaaaacaaatcgggctcggggaaacgatattgttttatttgttaaatttgacttcagttaaaaaataatatatgaattagattataccatgttgtttgtatttcaccatgtatctcatccttgtatttcactttggttgctatttcatgaataattcagacggaaaaaaaaagattataccatgttgttttgcgtctccctctcttctctctcctctctaactccagtttcaccactacgagttagagaaagattctaacgccgataagtatgtttaatagcaagtgtaaataagagatcgaaagataaatccaaacttcgtatatcgatttaaatagtttttattttattttattttttcatttaaacttgggtgagaaagtgagactgtataattgatagcaaggtaaggtgaattactaaaatatgtgagaacgttagacatgaatttaaagttcaaagctttaaatttttaaattacggaatgttgaaggttattttttttggtttttacgtttacctttataaatttatttgatttaaaaagcctataattaaaaac

SEQ ID NO: 25855 - DNA, 1252 bp, Arabidopsis thaliana landsberg
ggaacatttattcttccatgccctttctctaaggaagtatgggagaaactggttcgtggtatcttgttacacaagttctcagacaagtggctagaagtgatgaaggaaattacaagcaaatatcatgataacaccaagagattcatccttaagtttgtgtttgagaatgcaatacatttcatatggacggagaggaatgatagaagacacggagagcgaccctcaacaacggaaaaaatggtcaagctgattgataaaaatgttagaaaccgtttgagtactctaaggcaagggaaggtagagaagcatgtcgaaggactccaagtgtggttcgcatcgagataatacaccgaggatataggaatttataagtatgctatgaaaaataaaaacagcgttgatgtctttttctttcttttcttgctaagaatgtaaatatcattaaaaaaacaattgaggtataacattaaatgctaacttagcaaacaatctcaattttatgcctaatcatcccgtttgcttgtttcgcacatcctcataccaatatcaataactctaattgattagcttttcaattgcagcaagtctcaaactgttttcagcaaatcgacggtcttctaaactactttgttttatcattttgtctcctgcaggatgcttgatttggaccaaacttggaacataagagcatggcgaacggtggccttcatgtactccgagatccaattttcttaagaatccagtctctccaatgatgttaagaaataacttgggatattctccatgatcaaaacccatgaaaactttcttctcttcgtcaacgtagaaactaagtggaagctttatctttggtctcatatccattctcaagaacttgatccacgacaccatttcgatgtcaatcttagtcgtaatccatatcacaaactcatattcgtatgaatcatggtgcacctggtgaataaataaagctgcaagcttctcttctttaacacaagataaactcacaaatgaacattcacgatccgtaggcagagctagaaggggtccaaatctctctcttgtaaaatcgaaaccgattatgtaatcttggaaaccttgtgtgctcctttctttagcaggccagtaagtgtttcccttaagggaaacacaagggtaagtcgaataaataccccaatgtggagtgacattaagagttgtccataaaccagagacaaaatcgtagatttcataccaaaaaaattcctcttcg

SEQ ID NO: 25856 - DNA, 1809 bp, Arabidopsis thaliana landsberg
taacaaacccaccttgatcatatgtcgtttctcaacttgcaattgcggtttcacttttctcctcccacaggttacttcaagggtgaagacaccaaatgcgtaaacatcagttccagtggaagctcccattgtgattagctccggggccatgtaccctacagtcccaacagctgctgttgtagctgcattgcctccgtgctcatgaaacctggccatgccaaaatcccctaaccttccatggaactccgcgtctaacataatgttggaagctttgacatctcggtgcagaacaacttggtcagcacctgtatgcaggtaccagagagcagaggctatacccttaacgaccacaagtctctgtgaccaagaaagaaccggtttctggtcatcaaacaaatgctcgtcaagactaccattgggcatgtactctgagacaagaagaagtctcgttttcttctgcaatacccaaacagtggtacaagattcctgtgtttcagacatctcatgctcacgacttcagccacaaactgcttcacaccttcatcaccattatgggacactcttttcactgctatttctctaccttgtgggagatttcctctataaacttctccaaaacctccttttcccagaaattcatctttgctgaacccctttgttgctttgaacaaggacctgtaagagaaccgatgcgcatcaaactccttttcccatgtttcagatacttctgaatacttgcgtctcctgcggaaataaagtcctgctagaacagccaacaccaaaatagccagacaaacgggtaggagaataatcagtgtagatactttcttatgtggagctctaggatgaggaacttcaggaagttttgagatatcaagtcgctgcagcgatcctctgtctatgctaaaactccaccagagaatatattgatcactgatcgctgtccctgttgctgcagagaacccagcaaacagacttgatctatttggaaaaagttctgtaaggttgatggggtgtgataaaagaggtcgagttggcttctggacttcaagaggagcaaccgaaacattgagcaaagtgccttcataatccacccagacctgtatagggtttccactcaagaggtttatgctttcattactccctttcatgtcggaatagtaagatgctgaagctattgcgacagatataggactgttcacatcaatccccacatgattgtggtcaatatctttgaaatctgggttccaaatagtgtcaagctcaacagcaagtacgtgataagaggaagatccatttgttgaagcattgaaaatccccaagtatctagttgattctgcgtgagtaaagtccatagaaggagacaatacaaagacaataccatggccaccttcaaaacctggcttaggcaccaaagcacacacaaagtgtgttgagaaggagagtggtccagatgaactgaactcaattggtttcttgtggaaagcatgacccatctggtgctctgaagcatttgtcaactgcaataatccactgggaagtactattgcagatttgtcaagataaagattttgtcggtcgaggaagctttcatagacaaagcttgtctcttgttgacttgatacagagctcagatgaagagaagagatgatcaggatctgaagcaaccaacgagccattgcagatgatgaatcagagagtctggatctgatgatgaatcataacctcgcaagctggagaaaaaatggacaaaaagaggatgtaagcttctgtatcagtgattcaagcctatcaaactttctaatagat

SEQ ID NO: 25857 - DNA, 774 bp, Arabidopsis thaliana landsberg
agctggaacatcgcgtgaaaagtctaagtgataagcttacctctgttgaggctgagagcaataagcatgagactgaggcgcaagaagcatttgttggtaactttactgaatcttatctacagaccttactttcctcgacttttttcctcttcacggtctcatgtagcttcctgttccatttgcattttgtgttaacaggctgggagaagacaaaagctgaagtagtatctctcaagaagaaacttgatgaagctttgaatgaaaaacacaggagtgaggaaaggtcgagtcacacggatgctggtctaaaagaatgtgtgcaacagcttcgttttgttcgtgaggagcaggagcgaaggatgcatgatgctttgacaaaagcatcacaggagtatgaacgtcgattgattgttataaagacggaattggcaggtactggtaagaggcttgcagaagcagaaggcgagaatgctcaactctcaaaggctttgttagcaaagaacaaaattgttgaagatttaaacagagagagggaccgtatcgaggttgatttcaattctttggtgagtagtttagagtcgaaagagaaagaaaacgtttcgctgagatatgaagttcgagtgctggagaaagagctcgagctttggaatgaagagagagagtttagcccgtcgaaccgttgaagcatcacataaactgcacttagagaatgtgaagaaagttgcaaggtagaatagagtgtcaaagttacgggttctggtcaggaaacgatta

SEQ ID NO: 25858 - DNA, 1768 bp, Arabidopsis thaliana landsberg
  unsure (1)..(1768): unsure at all n locations
actatatgtacgcagagttagctttctatgttcatcctaatgaattctactcggtatctggtaacggttcagcgccaagagattgggaatggcactactgaagttgaactggctccagaggatgataccaaggtggaccaaggagaggagaaaactgcagaaggtaacttcatgagcactatgtcttctttgtttgctgttaatctttttggaaagacaaaaacaatttaacatttttctctgtttttcattgcagagaaaggagttccaagtttctggctgacagctctgaaaaataacgatgttatttccgaggaggtagcctatatgcaagantggtgttcgatttataaacactccaatcataaccatggaatatgagcataacttattgtcatttatgtcaggtcacagagcgtgatgaaggggctctcaaatatcttaaagatattaagtggtgcaagattgaagagcctaaaggattcaaacttgagtttttctttgacacgaatccgtattttaagaacactgtcttgacaaagtcttatcatatgattgatgaagatgagccactgcttgagaaggctatggggtaactacttatactctcttgcaattgttgtatacttttaagtatattctgcttattagctgattgcattgagctgcttattttttttcttcgcttatattgcaaatggattcttattctttcaccattcattttcaggacagaaattgattggtatcctggaaagtgtctaactcagaagattctcaagaagaagcctaagaaaggttcaaagaatactaaaccaatcaccaaactcgaagattgtgaaagcttcttcaacttctttagtcctccagaagttccggatgaagatgaagatcttgatgatgacatggtatttccatcttcataagcagattagtttttagagtcagtaattaagattgtgttggattttaatctgatcatctaatattcacaggctgatgaactccaattacaatttgagcatgattatgatatcgggtgtgtacctttctatttcatattcagttctcttcacttagttcagttctaggatctgagtctgtccactgtttatcctgtagttcaacaatcaaagagaaaatcatctcgcatgctgtgtcatggttcactggtgaagctgttgaggcagatgaccttgatattgaggacgacgatgatgagattgatgaagatgatgatgaagaggacgaggaagatgatgaggatgacgaggaggatgatgatgaggatgatgacgaggaggaagaagcagatcaaggaaagaagagcaaaaagaaggtaaattatgtggttttgttctacttaaaaccttcctacataggaaactaaaacctctgaaactgatttggtggtttatcttttgttttgttgcagtcatcagctgggcacaaggtttaacaatcaatcaatctcgatctttttttcttgttgataatgcaatggctaacctgaggtatccttttttaatgaacagaaggctggaagaagtcaacttgcggaaggtcaagcaggtgagaggccaccggaatgtaagcagcagtgaagaagtgaagaatcttggcttagttatgatgaagaagaagagtgaagagtgtctttgagccgaggttgtgtttttttaatttgcagagtcatggtccggtttattatatatcagttttgggtgattgggttgctatttaaaaaaaaaaaatgggttctttggtt

SEQ ID NO: 25859 - DNA, 2662 bp, Arabidopsis thaliana landsberg
atgcggcaaccacacggtgaggcgatgattataaccgttggatgaatgtcacggaccgttatatataattccaccactctcgcgtcgttaaaattaattaaaaatctataaaggtaaaagatttcatctttctcctgacgcgttttggcggttcgttctgcacagtttcttcttctgatgctctttttttgtttttaagaattaagggtttctactttaatcgattggagcacaatggcattgacgagataccagatacggaacgagtacggcttagcggataaggagctctaccaatccgccgataaggaggatcctgaagctttgctcgaagctgcttccatggctggtctcgtcggcgttttgcgccagcttggcgacctctctgagtatgttttttttttttttttttttaattcaatttcggtccaatataccctaccgtttgaggaattttactgtagagaatgggacactgaaggttccgtggaattgaatttcgatgctatatactctgaatctagagaaaacctgaatctagggtggtctctttgttttttgcttaaaaatcttattcggggtagtgcaagtttcttgtgtgctgatgagatgatttttcttcttttggtatctaattctaatgaaacctctatgtcgctatggaatcaatcccttggcatttatgttcttttgtctcttttcatactaataaggtttgctgctgaggtattccattgcctgcatgagcaactaatgacaactgcagcacgaggtcatggtttggcgatgcgtctccaacacctcgaagcagacttcccttcagttgagatacccattctctctcaaaccgatcattctacattcttttatgagccaggccagtcatctatcttactctaatgtttagtataagagatataagctgctattggtgatcccaagcactgaattgttagttaggtcctcaggcttggaatggcattctgatctgcaaacaaaagaagacttgatttccccacggaacttgcctcgttgtataatggattcgtacgaggaatgccatggtccgccgcagcttttccttctcgacaagtacatttcagtatatcatgagaattttcaccataaggaaatatccatttgcagtttttaatcatgtttctgctgttattcaggtttgatgttgctgggtctggatcatgcttgaagcgttactctgatccatctttattgaagacacatactacatcagcagtagtagcaacatccaaactcgggaaagataagcgactacgtcaatcaaaggtattcaatcatgttacacatttcctaattctggttttactatgcccactctgccactgtctgtaaaaataagcatctgaaaaatgcacatttgggtattatgtgttacatatgatcaaatctatttcaaatacagaagaaaggatctcacacaactattaaagagacgcctgaggattcacggacatcacatgccaagtgagcactcttgctctatatctacttctgtttctgtcattcctatgtctaaagttcatatatgtgatcggcacttgatttggtgacatgagctactttttggatagtacaggttgcatcagctattctttttggagcatgttgagaacggacacagaaatcctgaattccatgtgaaactgaagagaagacagctgaatggacctccgattaactcaagctctggggcaagttacatggagaaattcctcaagaattcttcaccatactgtgaaagagttcatgggactatggatcagtcatctccggcaatggaaactgaagttacagtatgcagtgaacaagaagacttaccaataccttccttagtttattccaacagtggaggcactagaaaatacaatgagatggagatagaatccattgctggtcatgaaatacttgaaattccttttgttcctcacgagattacggttaatgagaagtcaccagtggtttgtttagaaagtagctcttctgtgaatttgtgttgcaagacgaacaatgacgcagattcacctgcttccacggagtcagaggtaaaggaagcagggagtgatgacaaggctggatgtgaccatggatttccaggatttggtcagccgcagatctgtactaatgcagaagtgaatcaaacagaggttctgactcagttttctaatgttttgcgccactcaccggaggaaggagaatctagtcttttgtgtactgatatccagagagcttctcctgaaagtaaaccacataaagctgaagaggctgctgtagatttagacgagtcattttcccagatgacaccggacatagattccgcaggcatggggactctggagatcttacaaacacctttcagtttgtcttgctacgagagtcctgcaaatcttcccgaagattctggaagtcacttggagcttcagtccaataaagcaaatgctgaagcttgtgaggtctttgaagtcagaagggatcccatgcttaatatttcccctgaaactcatcttttaaaggttacacaagtgccacaggacgcatatgaggggtgggaccaatgatgttcattctcaacatgttttcagtgtggagactgcatctgagatatctgtaagtgctttagtggaag

SEQ ID NO: 25860 - DNA, 746 bp, Arabidopsis thaliana landsberg
aatctacacacacacattaataaaaacagagttcaacaatcagaattagaaacttatgggagatgtgttgaagatgaagtaggtgatgatactgaatcatgatccttgactatctcttcttccttcatctctttgtgttctgctacatcatcatccctcactttagtctgactattatcctcaatgacatgaacatcatacacaatcggttctccatcctcatcgcattctctcttctcgttgtattccgtctcttgatcatcatcaatgtgcttgtaagtctcaagttctttctcaagaaaatgcttttctctctcccttttaaaaagaatctccttgagaatattcatctcttcctcatcataagcaaatttctcatcaatcattctctcatattgcttcccttccatctcaagcgaagctttatccgcttgtagccttaaaatcatagccatagcttcatcagctgctgatgctgaagctgctctttcttgttccaattcaaccattaaagcagctttagctactttctcttcctcaacagctacttccaacaacctaactctatccatcaattccgagttcttatctttatcaaccatagtcttctcttcttgttcttgttcttgttcttgttcttgttcttgttcttgttcttgatgatgtaaaacgcttggcctattagtagtagctagcttctgaactctgagtatgattctgaatggcccatcaaagagaagttttgg

SEQ ID NO: 25861 - DNA, 594 bp, Arabidopsis thaliana landsberg
ttccctagcagccgctcaacaggcaatgcacctttataggcaactttactctcttaactatttcccttatggtccatatttccccccttattatatgccgcaaccatacattcaccagtacttgagcccaaatgggttccaacaacagtcttacttaccacccggagatgatgctccagcacctccaggggctgaactacctctcactcacatcaaacccggaagcgacattggaaactctccacctaccacgattccattctcatatacttcatacgccttcaaccacatcccatcagcagccaccataaatgctactcacaaggaagaaaagaaggaaaacatgtacacaactggaccactggttagtttttctctgactctccccactgtcattgcatgttatgctatggttttttaacacggctccatgtagcagagtctagccaatctgcaggccagtcccatgtacaacttatcccttcaaggtcagcctatagctttcccaaccatgcaggctgtgatccgtgggttatatcaacaaacacagccaatactggcgcctctatctatatctgcgaggactgaacccat

SEQ ID NO: 25862 - DNA, 1159 bp, Arabidopsis thaliana landsberg
atcaaaacatgagtttttttttttttttttggtgaactaaattgacatatacaacaaaaagtttactttaaacagagtaagatccttgacaaaaaaaaaaaaacagagtaagattgtcgatttggcaaaataggattcccataattaaagtctactctattttgattagaatttctcttgtattacatgatcaacaatatatatatcttgtaagaagaatttgagtttggaaagaaagataacaattttaaatgtaagaaaattaaaatgaaataccaaagttaaagttatacagagaccagtttgcacgccacaaacacgagattcaaatcaaatacagcagaacaaataattcaattgggaaaaaactaaaaatgccttgtggaataaggacatttgaattttattagaagcaataaagtgaaaaataagccgaataaagatgtgtttaatataccaatcagatccaagaagggtctttaagttatgcactttggtataatgatgtttgtacattccttcttcctcaatagccgagttcttctgatgcagtggctgcaatgcagattctggcaacgtgttttgctttagactctttttgattgttaccacttccaacttgtgtctcctcttcaacttttccattttcttctttagcttctcgttttcttcttctacttcattgaacttttcctgcaaccaaacagtcactcagaaaacaatgtcacagtctcaatccaacagttcatcgattaaaacatgaaaaatttgtttacctcagcagctgatgctgattgttcggcttctctgagtctaacaagaacttctccagcagtatgaacagcttcagcagtattccttagttgaatcttgaggcttatgttttccttcttcaacagatctctttctcgttctctttctactctaagtgctgagagctcagaagcaagtgatttagcaaaacgagaaccgcaaccctttttaccagcctttgctactgccttcttcaactctgttatccattccactgttgctttatgctttgagcataagtcgttgtacttctcttgtagctctgtgtagtgttcaacaaacctggcatgaccaagaacagctctgcgaagtgcatcttctagctcctcagaagatagtttctctt

SEQ ID NO: 25863 - DNA, 936 bp, Arabidopsis thaliana landsberg
ttgcatccaaaaaatgatggattctaacattgagaatgtaaaattagtgatgcttatgatctatggattagatgaaattcaagatcaagtgataaccattattcatagtagttattgaagtaaggcaactgatttctggtcctgatacgttcgtgcagcaaaaccgtgtgaagccagagtttccatcagtggttacacattcttgaccagacatctcacttatcttcagcttcacctctaaccctttcctgaaaacactttccaaatgtgtcaaattcagagcttcttcctctggaacataactcgtaggaactggaacactgaaactcccatcacaaagtataccatatgtagagttttgaataatagagccaagacctttcactggacatgtgaaattcccaaagaaatggcgacgagggtcacaagcgtagaacacagtgaggcttttgtaagatggtaaattctggaagagacctgaagataaaagtgtggaggagaatgaagcagagcagaaaggacctgagaaatcttgtcttgaaagtccaagagtgacggaattgttgttgttgtctatatagaggacagtgtagttgtggcctgagaagataagagaggttgtgtttgagtgtttgttgcagtttagtttcagagaatggtgaccgcaaacttcaccgcgaatccctcccaagaaaggaaaaccagctgtgatgtttccacaccgaaacggagtaccacagccccataaatcatcttggcttagagcacaaggaagataataaaacaagaataacaagatcagtcagaacctagctgtttgagatgccatggaggacgataatccatgacgtgtagaataagttcctgccccaaatatttagacacttgttaaataaaaatcagagaaatggagctttataagggggagaactttct

SEQ ID NO: 25864 - DNA, 1367 bp, Arabidopsis thaliana landsberg
tatcgattcatttattcaactagctagtgactactaaaagttataattcctcaaatcttaatccatttttttttttcaagtttcgttacaaactaaaaacgaaaaacgaagtgggccaatttagaattcaaaaagaagggtcgaaatcaaaggaccataagactgaaaaagcttcttcttttgttgacccaatatttgatttcttcctagcagtattaaacaaaagtaataatataatctcttattctataaaaaatataacttcatcataacaaaaacattaagcgttatagaaattgtaggtccctgaatatatcattacgacaggctacagaatccaatgaaaagtttgttcctttttcttttttggtatcaccttcttcaagagttgaagctttgtgctgaagctttcttgagctcaagagctcgtttataaggcggtgcgatcggaggttgaatcgggtccaaactctggtatgatgatccatcttcttctctagggagtgggtaagaccggtctgagtcataaccggttaagtcaccacatgccaagaatggtatataaactttgttgggtccttcaagccaaccactactgcaatctgcagagtaccaagaaaatacaaaatctcaagcacaataataacgcaaaaaaaaaaagaggttaaaatattctctttctgaatctgacataataatacttaagaagatttctttgtcttgcccaaaaggttaacttcacatgaagagagagcattttttaggtgagagttacgttgaggaagagtaaattgaaagtgtactactcaacaatgcataagttagttgtgtctaactagaagagcttcagaattttgaagctgaagccaagagatttttaccgagatcgcttccacctgaagggcttccgactttctccaagagacgatgcagatctctcgggttaaatccttctgtcggagagtaattctcgcagcctgcaaaagcctctatagaaacagagtggagaacatgtaatcagaatctcttttaaaaagcaacatttacgtctttgatgattaagccttgagtaagcaaatcatatttgcacatgtgaaagttctattcttttacctatacttgaattgcggctgcttttcggtttcgcaaaagttacggttgggaaaaacaatttcagctacaaataaaaggaaataaacttatcagtaaaaacaacagttaatttcatcagcaaaacatctaaacttacttgacagtagagagtactgagtagagacttgtatctaacttgacagtaaatttcatgagcacaacatgtaaacttacttgacagtacaagagacttgtatcttttccacggaagtatc

SEQ ID NO: 25865 - DNA, 2959 bp, Arabidopsis thaliana landsberg
ctaagattcaagtacataacacttgcttgtaactaatctctctggtcaactctctggatttggattcgcagtcagagcctaaatcgaagatcatatcactcataaagcaaataatctctgtcagcaactctgtttcaggaccaggaccagagaacgagttggtatcactggtgactaaaatgatctctatcatcagctctagagattttgatctcaaggagtcagagccggagcttatttcattcactgctcaaatattctctatcctcctagcaatggaccaggattcagagctcttaacactcctttctcagctaggccgtctcgtccagacggaggaactgaagatcaccaataaccaacaagtacctctcaccgaagaaacagatgttatcgacgcctacacagatggtacgaattgggagtcggagctcattttatatatcatttctcaaatgatatctttaataaaagctgaggatatgtgtccagagctggcaacagatctcacaggatacgttactcaacttatccctctcatcaaatctctagatctggattcgaatccggagtcggagcaagagccgaagatcatatcactcattaggcaaataatctctctcagaaacacgtatgtttctggaccagagtcgcagttggtatcactcgtgactcggattatatctatcaccagctctacagacttggatcccacggaatcacaatggaggctcacgtcagtcacttataaaacatgccgtatcctcaacgaaatgaaggattcgaattcggagatggcatcactcattaatcaaatacgcgatctcgttgatgcagatgagagacgaaagccagagtcgaggctcatatcacgcatcactcaactaatgtctctcacaaactcttggagttatacttcagatagggattcgaagatcatatctctcattattcgaataatcgatctggtcaaatcaatggatttggattcgaagacgaagccgaagtcgaagctagtgtcactcattactcaaacaatctctgtctacaactctatggatttggattctcagccgaagccgctaaggaagctcatatatatcactcatttctcgaaaatatatctctcataccaacgctatatacgcacttggagccggatcaatacatgttcatggacctcgttgttgaagcagggagtctccagccggagatggagcttatgtttcttgttgcagaaacaatgaatctcgagcccaagacgaagctggtgacactcgttcgtaaaatattctccctcgtgatctcaaaaattcaaagttgaagaaacttacttcagtttgccctcaagcacaagtgacttttaaagaaggaataatccatgtgattggagaagtcttgcggcccacggataacaagtggaagtgtttttctttaaattggcagaaatttaggcaaccaggagaagaaggctatacacactttttctgcgaaggtggcagaaatttatgacggtgttatggactatcataaggatacatgttttgcttgtccttggttgtgtaaagatggtttcttctatgaatgtagtaaagaatggtgttgttttatgctacacatgcaatgcgccaagatttttgagccactagtccatgcaagtcatatgcatcctttattcctaacaaccaagccgggagagaagagaagacatttttcagtttgcaaagaggtaggacgttattccagaaaggaagcattcaattgcattgttgatactacttttctttgtgtttcaaatgtgctacattgcctcataaggtaatgtataagcatgataaacatatgttcactctttcttatggggatgagataagtacaacgatgtattggtgtgaagtttgcggtccgaaccgactgatgatgaaaaatcagcaaaataaatccgaaggagcggtattatatgtgtgatgagtactgtagtgttaccctacacattcaatgtatgtttggggtggacttatccttgaagcccgatatattattgtccgacggcgacctatttactccttttgcaagaagcattgtccacacaaagtagctctccaatgttctgtattaatatcgtgttccacatcttgtattgatgctaaggacttaagttgggtagccgaattttgtgaaatggaattttgatggactctgcatgcaatgtttttaggtatgacatgtataatgtgtctgatataaacgttgtataaaatttgcatcataggagaaatacaatagttagaatgaaacagctaagttatgtacacatgatcaaaccttaaaaaccatcaaaaagaagaaaggatagttactattacagtagagtttaacttagaatccaggtatataaaagtaacccggcaaagtaaacactgcacccacatattatattatgttctctactattacaaaccattgaacatgaaagaaaaaaaatgtctcaacaaatggttaaaacattcagatcacacgaagctctgtaagaaaggcggcgcatagatccaagaagagaaactgcggaccgttaactctctgtatatccagcaagtacttctcttcccgggctttgtatagctgtttcaaaatcaaaagtgaactcagaaagtgtataattgttcttcgaaaacagttggttcaagttctaaagaaggttttagtctatgtcctagctggtttagttttgttgaactactactagtgggataatcatcaggatcttagtctttgctccagcacaattctacgaatgtaaaccccgttgatcgattcatatccctaacaaaccgaactaggcagttgtttattttctccaaggaatgttgttgatacaaatgtatgtgtgagtttatagttacctgaagttcaaatttgatgacagtgggtgaagtcatggcacagtcatcctcaatga

SEQ ID NO: 25866 - DNA, 1429 bp, Arabidopsis thaliana landsberg
catacatagcccatagagatttaatactctcgtatcagtttcggtaacaaatcaatatttggcaacattatatcgatttgacgtcgactagacagatgctacatacagaatcaaacgtataatcctaactatacttgtacaataaaaaagagccagagatagagagagagagagagagagggagcgcgagagagaaaagagagaggtgaatgactccgtaccgggggaaacgccgcagcgccggagaagatttggtctgaagccaacaatactcggaggatgagtagagaggtcggccgtgaaaattcaaactagggtttctactttatcctttagtgaattaccggaactacccttaagttgattcattcagttctttagtgtttttatttttcggtccctctttaagcaatctgtttctcaatataacctctaagtttttgtttttggtcaaatagaaccagtcataagttgaagattttaatgacattttccccaatgcgtaatggttacaatgagtttttgtgaaaagaaacaattgttctcttgaattagtttccaaaattgaggtgtaacctatataattaacccaaaaaataaaactttacattttcaacattccgtggcaatttacaaccaatttcataaatctggacgaagattcatctaacttcacctgaaacataacaaaagaaagtaatgtgaaaattaccaatcacgagattatatcaacaaactaacacaccaaaatgctccaagatgaatcaactagattgcattttacatcatcaatttgattaagtaatggaaatgacaagaaacagtacctgtggtgtggactagtgatctttactcaacactaatcatcatcatcctcttcttcatcgtcatcattgtggtcatcatcaatggaatacaatcccccagattcttcctcgtatatctgaaactctccatcactcccatcatcaacagcaaagtctccatataaattaggttcactcgatggaaaactatcaaacaagccttgaaggtacgtcctcgagctgttctcagtatcaagatcttatcattgtataggaaaatttaaacgaaacagagtgcaaaagggtgttagaaccaaacacacagcttaatttctcggtcttaattcctgcaatgcaagaaaacgctaaactttgaaggatacatccatgggaatcaagagatatctcattgtctcctgcagcctgcaaaagaagaggagcagacaaacggtgtgaatcctagcgaatgaagaaaacaacaaaactttcctttaacagtaatattaccatatcgagttcttcttcttcttcttcttcttcatattcgtcatccaggttttcatcttctccatcctcattaacattagcatcaacattttcgtttacgcttttaaacgtttcca

SEQ ID NO: 25867 - DNA, 570 bp, Arabidopsis thaliana landsberg
tatgcacacatcacaaacaattttaaactatggagaagcttactttgtctttcatcactctcaccgttctctcagccatcttcaccgcagcttcagcggccgatgctacaccaagccaagtagtcctagacatagctggacatccggttcagtccaatgtccaatactacatcataccggccaagatcggaaccggaggtggtcttatcccttcaaaccgaaatttaagcacacaagacttgtgtctgaatcttgacattgtccaatcatcatctcctttcgtctcaggccttcccgtaacattctccccactaaacaccaaagtcaagcatgttcagctctcagctagtctcaacctcgagtttgattccacggtttggttatgccctgactccaaagtgtggagaatcgaccactctgtacaactaagaaagagctttgtaagcattggtggtcagaaaggtaagggtaatagttggtttcagattcaagaagatggagatgcttacaagcttatgtattgtcctattagctccatagctgcgtgtattaatgtgagtttggagattg

SEQ ID NO: 25868 - DNA, 499 bp, Arabidopsis thaliana landsberg
aaaagagaagggattaaagtaaatacaatgttagcaaaacactaagtcatataagttgaagacaccacacagcaatttctaatttgttacctggtccgcaagcttgtagctgtgagttcgcatatactccattccaatgtacagagttggcaaatgacacctggaacaagataatatcaagattcaacctgtaaaaaacaatttgtaacgtaataagaagacttctacaatgcttcagggctaaggatgattcattttagtcacaagttacagatttacagtcactagttttgaagaaaacaagagtaacttgattaccctggaaatagtctagcggcagtgcgataggcagacatggcttggtcaccctcctcctgggcggcaaaggaattaccataacctatccgagctggtgagaatgagccatcaatacccgtagctttgctgcaagaccattttaaaagaaatgaagctccaggtcagacacatatgcacctac

SEQ ID NO: 25869 - DNA, 874 bp, Arabidopsis thaliana landsberg
acatgtgaagtactagatgatgatttcttatttacgaagtaaggtgtggtaacattgtaattttaatacaaaaagatctccatcaattatacagatcagtttccttatttgcatgtactagctagtggtccgtaaaaattgttaaaatagtattaataacgaagatatatacagttaatgcgacatcgaaaaggtattcagtcgacagtttcgttgtaaaagtttatcaacagtcaacagaaattaatcatttgatgagatgatgagctcaacggtaagcttataacaaaaaaaggtggatcctttgataacggcaattagaaattgtaatttgatcgacatgtctcatttcatttggtaagcaataattatgtttataaaacatgattataaactcctgtacttccataatgttgtattgttgtaaagggtttggttaaagttttttttctttaatggaaaaagttgtaaaaaagaaacaaaaatgtttaaagcaaaaacaaaaaaagttacaaaggaaaaaaagcgacatgaaaaggatcgctacgaagagtcaaaggcgcgaaagttaactgacgactaacgtggcgctaaatcaagcctcaggatccgaccgagattcctttttagttttaccaagtggtaagaaaaagttacagttacagttactttggcgtcagtgaatcttgtattctgattacgtccagacccgtgagtgcgtgacgttcagcttgcaatttaaagagttttttttttcttctaaatatgatcaaattctctctcttttttttctttccaaatggtaataatcactaatctaatttttttggtatcaaaataaataatcaatactattcattttatacaaatatgt

SEQ ID NO: 25870 - DNA, 644 bp, Arabidopsis thaliana landsberg
atggatatgtcgtcagattcaagtttatgtcgcaacacaaaatttggtagaagggtcagtttataaatcagcacacatccaaggtccaaagcccacaagaatggcaacactctattaatcccacaaattcaagctgtcctcgtttttgtttgtttagcaatcgatccaattcacatcgaattcaaccgggtcaagaacaagcgactattttgattcacagattccaaatgattttgctcataattagccagtttcagacaaatgccaaatctggaaaacaaaaaacaaaggcaaaaacgaataaatgaaaatgaagtggtttagcggataattttagaggctaaactatgatgaacaagtatgcctccacgttaacaccgcagttcaatatatgcctcgaagactagctttgttttcgtgggtttatatcgaaaacaagctaaaggtgatgtgaggcaatctaaaaacaaatcctttctcccccaaaacagtaaaaccatgtacacaggtgaaaaataactatagaaatcgaacaatacaaagaaaatgcggactaaatgagatgctaggaggaggaagaagaaggtggcgacgctcccgtatatagggtcattgtgaagccctattacagctgaatctactag

SEQ ID NO: 25871 - DNA, 1077 bp, Arabidopsis thaliana landsberg
  unsure (1)..(1077): unsure at all n locations
cattgaaaaataatctcagcattctgctcatagttaaatcagttatcagtagtttactcaggattgtggattccaactttattttagcatgactcggatttgcttcagtttcaggatggggagtttgatattcagagaaattgttaaagatggggatacatatcaagctatgtatcaagtcgataggcttcaacttctctcagttgaggtaaattctagacttcattgaattatatagatcttggcaatctagccatgttctttagattggatggaaatgttttgttctcttatcttggttttaaatgactactatttggattttgagtgtggtaattgcagattattgccaatagagatgtgttagcataggtacatctgccaatggacatgtgttatcactttagcagctccttcttgttatagaaaaatgattgattgttaaagtggagctttccattatgatcttataccatgttggtgttgcctgatatcttaaaatactataagcattcctcaaagtagcttttaggtttgacttctacccacatacttagggggattagtgggaccttgttatgtgttgggtccattactctttccaaacacactgagttcatttctttatcattgcgacgaagaatcccttatttattcttaaccaaataactcactgtgggtcaaatggggctattgatggtgttagtctaccaagttggtgagtgagtgaatagannnnnnnnnnnnnnnnnnnnnnnnnnnnnnnnnnnnnnnnnnnnnnnnctgcttcttcatgcaccttggtcttggtgcccaaagcttcactgaaaccatttctttccagaccttagttactagttctactctgtgattgtgatttgaatatgcagaggaaatttctgaaaagcttcttggcagatgacaatttcgattgttagtcttggctgtgagtattgcaaagaagtagagattcagataattctgatgaacgtatgatgccacagaaagcttaaggtatatgttctgtactctttgagaaaaacaaaaggcaaaaaataaactctgctctgtttgatt

SEQ ID NO: 25872 - DNA, 1149 bp, Arabidopsis thaliana landsberg
aggattttcctgataagtgcgcgttacgccgagaagcatatggcttctatagaattggaaagaaagatcagagagtcggaaatcaatatgaaacaatatgagaaaacggcacaacagctatctctcgccgttgagtattgtaagaaagaggtagaaggaaagcagcagcggctagcaactgccaagagggatgcagaatctgttgcaaccatcacacctgaacttaaaaaggagtttatggagatgcctaccacagtcgaagaattggaagcggctatacaagacaatctgtctcaagccaattcgatccttttcataaacgagaacattctccaagagtatgaacatcgccaaagtcagatatataccatttctacgaagctcgaaactgataaaagagatctgagcatatgcatgaaagaaatcgattcgctaaaggagaaatggcttccaacgttgagacagcttgttggtcagataaatgaaacattcagccacaacttccaagaaatggctgttgcaggagaagtttcattggatgaacgtgacactgactttgatcaatacggaatacatatcaaagtgaaattagtttttttgggcaacttcaggttctaagctctcaccaccaatctggaggagagcgttctgtctcaactatcctttacctcgtctctcttcaagatctgacaaactgtcctttcagggttgttgatgagattaatcaaggtaaaaagtgtaaatgttttttttttaatgtaaaaactgtctcgaaacattagtcaaagtctcttaaaaatatacatttgcttgtgcaggtatggatcccataaatgaaaggaagatgtttcaacaattggttagagctgctagtcaaccaaacacaccacagtaagtttttcctttttctattcatacgaaaacaccctggaaactgctctcaagtgtcgtaaaaagtaagaaacaaatgtttggtctttgctgttgtaggtgcttcttactgaccccaaaactcttaccggagctagaatacagtgaagcctgtagcattctgaacatcatgaacggtccttataaagcggagccttcaaaagtttggagcttaggtgatagttggggcagtctcaatagacggagaaccgaagctag

SEQ ID NO: 25873 - DNA, 1515 bp, Arabidopsis thaliana landsberg
  unsure (1)..(1515): unsure at all n locations
gatttgggtattagggacggacaccaacatcagtagctgggtcttcttgatgttgttccacaatccaatcttcgacggtttcttcattaccatcatctataatcacatctattgctttttctttaatttttttgtgcttgttaaaaagtcttgcgttaaattggacataaacaaggctgtttagatgattgacatctaatctattccttttcttagtgtggatctgcaattcaagaagagatattaaaacaggagctggaacataaatagttatacaaaaacagagattaaaatgttgaaataagcactaagaacacagatttaaagaccaaccgcttcaaaactgctccaagttctttcacaacaagaagagctagaggtcaaagcaaggattcttgttgctagcttttgcaacgtaggtacatgacatccatatgttgtccaccaattccctaaatttacaatataagatatctcatagaagaacagatcttatacaaagacataaatgatcaaacaagaacaattaaattcaattaagaagacaaacctggatcaaatgcttcatcattttgttcacatcctcttaattcaattgagaaattctccgagaattgacgcatactttctccaacatggttttcaaagaaacatgaatgatgcagctcgatctctatgtgatgaagaaagacaaagatattctggtcgtgagtctgtacgttgatgatatcatagtcaccgacaacaatacgcaactcatcgacaaattcaaagaagaaatgaagatggagtttgagatgacagacatggaaatgttaaattactttctgggcatggagataattcaagatgaacaaggagtctttctttcacaagaaaaatgcgcatgtaaacttagtgagaagtttgatatgaaatgaagcaaaagtgtaagcacaccacttacaccacacgacaaggacgttgaagatagtgaagaatatggtgagccaacaaaatatcgaagcattattggtggattactatatctatgtgcatcaagaccagatctgatgtttgcaagttcgtatctctcacgatacatgtcgaggccgcttaataagcacaatcagaaagctaagagggttctaaggtacgtcaatggtacgtctcgctatggcgttcagttttcaagtgtnnnnnnnnnnnnnnnnnnnnnnnnnnnnnnnnnnnnttggggaggttcaaatgaagacaagaagagcacatccgagtacgtcttctctctaggatctacaatgttttgttggcaatcaagcaaacaacacacagtggtgcaatcaacagtggaagcagagtatatcgcaatttgtgcagcagcaaatcaagcaatttggttacaaagacttccggaggacattggttttgattctcaagaaggagttccaatttactgcgacaacaagtcgggaattgctattgggaagaatccagtacaacattgaagaacaaaggatattgagatcaagtaccatt

SEQ ID NO: 25874 - DNA, 1113 bp, Arabidopsis thaliana landsberg
aatcaacaacaataacaaaaaaaaaaaagaacatcaaaacgatcaagaaaacaaattcgattagcttaagaaacacaaatttcataagcaaaagagcacctttaatcggagaagattcgagagagaaagaggagatggaacctaacctcactttcttgatcgatcgtggatcaatttctttactccattttctttgatttacttctttttatatttctttcttttaaattttttaattttaacattcaggcttcgaagctcaggaagctgacacgtgtaaaatgtttgacaatggtggatcccatacctgtagagttatctgatcttcttattagccagccggtcaatattagtcaacgattcttacgaaataagaaaaccatacttttgatttgtgaaataattttgattcaaacttgttttaagtcttacatttgtagacattgagttaatgaactctcaatctacttgtataattttgacaaatatgatgattctgttattaaccaaggtattgacaaatacatggacaaggtattgtttagtaaggaaatacacaaaatctacatgaatgaataatattctccaaaacattcatttagcaaaccataatccatattgttctaacaacaaacaaggtaaaataagaaaatgcttgagtgatttagtcactcacgcttctttaatccaaactttccacttgggattctactgagaaacccagtatcaagcttcttgtaatgactatgaaacttcataatcatagaatccataaaaccatccacttcgtcttcgtatctctcatacagaaccggcattgtgtgtgccccaacaaacccttcacacacacacataaaatgcatccctttaaagtcttgtattactcaacttccaatctcaaaagaggatacactaataagaaccactcaccgatatacaaaacagttaggaaattgcaacagctcccgaccattgcagctacccatagtccgattacagcctgaaaaatgatattgtgatcaaagtttctatcttagcatagtaatgaaagtgctaatacattatacaaacaagattgtggttattgaaacaaacaacgcaccatgaggaact

SEQ ID NO: 25875 - DNA, 1074 bp, Arabidopsis thaliana landsberg
  unsure (1)..(1074): unsure at all n locations
ctgctgattccatggtctatcacgaagataacctggtacttaaatggataagggttacagacactactgctttagctaaaccctgcatatacattttgaatttatgaccactggatgcatgagttaactcttgtaaagcactagacagcctatgggcattctatgcaaaccaacatacactcgtgtttgacatagttggaagaaacttgcaagatctgcatacagcaaccagacttgctaatgcttacgcctatgatgaaattaattttaagtaggtttcctttccgttgagttatcataacaaaattggtaccatttccatcccagtaagctttcgtatattgacacgccggtttgttttgtacctttanaggggctagcccaaaagtcagtacactacattgttttattgctcttcttaggcggacccctactttctttctggggctatgtctgtcattgcagccaataccaatgcagctgtcactgacaaatgtctaataggtgttgatgatcatgattcatataatgagctttgtcagtctttccttccacctatctttcgagttatatatcacatgcccagacattcctcgggtctttattttacaactttttagtaacaacttttgcagagtgcattattacatatttgaccgactttccatacctttgccattctttttctttttttcaggcgatttcattcatatagtttcttaattatctactactaagcatttcatcatacattcgcggaaagcattactgcctggacttagcccgtcagataaccgtcgaattccgcccttaaagtgtgtgcagaaaggcttccattactcttatggtcttctacttggagatatattgctttaacactgcatgtttccatacatctctcacaatttcatctgcacttctgcttcttaaatgcagataccagtttttctttgcccttttgcgtgatttcccggacttaaagttcacaattaatggaggcataaactctgtggttgaggtgatctttctaaaacagatctttaatatgattccaaaatttgcactagcgtttga

SEQ ID NO: 25876 - DNA, 786 bp, Arabidopsis thaliana landsberg
ttttaaatattgaaactcatagtacggaattgaacaagagtataccttgttgcaaaaggatattaagtggccggtaggttggccggtcggtggtttcccaggtcctcaggtaaaacttctcccagcgatcaatctaaaatccatattgacctcaacactaaatttctttttataaaaaaagaacaaatctttgtcaatgaaaacagggaccgtactactgtggagttggagcagacaaagcctttggaagagacatcgttgattctcattacaaagcttgtctttacgccggaatcaatgtcagtgggactaacggcgaagttatgcctggccaggtttacttttacccctttcctatatttcttctgattcaatatcagaacaagaaaccaaatccttgaaactgagcttgtgtgggtttcagtgggagttccaagtcggtcccaccgttggaatcgctgccgccgatcaggtctgggttgctcgttacattcttgaggtaatatataaacaacactcatggcgatttatacaaatcttgatatactctgttttatgactctgtttcttgggtatgtgaaaatagaggatcacagaattggctggagttgttctgtctctagaccctaaaccaattccggtttgttttctttttcaccattacagttaaacaaaaatgtttggttctgtaaaattcactcaatccctccctacttcagggagattggaatggtgcaaaggcacacacaaattacaggtttttgtgctgttgaagattcctctcgg

SEQ ID NO: 25877 - DNA, 1523 bp, Arabidopsis thaliana landsberg
atccactgcaacaaacaaaaactgattcacaaaactgcaataaaaattctgtcactgtctgtggagcttattttccaaaagcaactcaaagttccaatatcttgcaaaggaaacagtctacaaaagttcatttcaaaagcaaaataaggaagttcattttttctattccagagatcaaacatgataagaaacagacctgagatccttttcgccatttctctttccgtataacaggaaacattttcatagtgtagcgattatctttatcaaggaagctgcaaacaaagagcaacacagttataacacaacaacagctagctgaggcaattatatctactgcttatgctctatatagttttacgaaacaaaatgaaacgcaaaaatcgcaaaatcacctgtctacaaaactctttggtgaagaaactagatatctgtaaatgtaaccaaagtcgtataacggaacacagctgcatcacaaaagagtaaaaaccaatggcttaacttcaacgtcaataagatcttctagtcagagatagaataaagagaccaacctatcagacaaaagaacaaatctttgattagaaggatcttccaaagcagatgcaagcaacaatctttctgctgcaatcatgcttgattctccccaaactacctgaacaagtgaatcaattcatccatcaaaatcctcagaacaaaaaggaactatctaaaatcaatgcatcgaaagagatattgcctcaatgctattcttcaattgacgattgtagaagaaatgtgatcttgtggatgattcatcgaatacgaaaccaggtattgaatgtacatagattgagaaattcctctgatctgcactctgcgaaaacacacaataacaatgagcaaatgttttcaaaattcaatgaataatcaaagttttttttaagaaccttgaagaatctgtcccagagaaaatcaagtggcaaatcacgtcgagcgaggaaaaggaaggcgagtttgggacgatcgccggagtatttaacgagagggatacgagatctcgcgacggagagagacgaagacagtgtcgtcgtcgtcgcagtggaattagactgacggttgatacagaagagagcgaggatgcataatgcggtggagatagtgatgagtatcttccatcgaaaccacacgacaccgcgacgagacgacggaagccgcggcattagtaaactcgagattacttatctccggcgatctgcatcagaactccgggaggattgggaattcgaaatcgaaaattcttaagggttttgttgagattttcaggagaaatcgaaatcgtaaggatttgacatgtgagagacgtagaagaagaagaaggcaagtcaccaaggaagacgttgaatctgatgaaaaacgacaccgtgtctttgtccacgtgtaacgttttttgttttaattagggaatcaaattaatactacaaaagagaattaaaagatcattgaatggtttgacctaggggattaagagtgtgagcttttattaa

SEQ ID NO: 25878 - DNA, 1566 bp, Arabidopsis thaliana landsberg
atttgcatagaaaaccttagctttgtatgtttaccaattcatgaaactttgaatgtctattcgtttcaagataaacccaaatcatttctagcattcgacgtaaatgaagaagaaaattaacctttttggtttttggaggagacgcctttcattgtttctgaggtttctcttttgataccaaacagagaagaaatcagttttgttcgtttttttttctgatgggttttttcatttttgtggattttctccacattttccgcagatttcttaaaaaagggtttatttgtttttcgataaatcctttttgttcgaatgagagattaaaatttttttataatgaaaaacaagtctgacacgtggggaaatgtctagctgtgtggaccacctaattttaaatgggccagatttagtaggcttgcgtgtcccagccttcacattagttctgccaacgagacatgtatgtgtttaattgcagcaacttacaaaattaagttgggttgatgactagattttttgttttttaactattaaaatagaagagtttaaaatcggaaaataaattagtttagaaattatgtgttaaagaaaataaatagttaagaaaataaaaacagaagaaacaaaaatattgtgagtagtttagttaagtacataacaaaaccgtttttctgatgaatatttaaaagaaattgtcaagtttgtaggaaattagtggatgaatagaaaattgttctccaatcatgcatgtacatttcctttatggttagaatttttgcctatggtaaactaaccgtgccaaaattgaattcaaaccaaaataaatcggtttgaactgagtttggtattttacaatccgagaaccaaaaaaccgaatcgttaacaaaaactgaatattcttaaaaatatttatgggtaaaatacacaagttgtagttggttccacataagcctaagatcatcttggcgtgtcgaactcaaaaaaaaaaaaaaaaaaaatgtcgtgttcaaatctccaagccaagcctggttaaaatcggtatttgatcggttttctatttattgataattgagagagtctatcgaaggaatgtcgaccaaccagatacaaatcaatgtcacgttttctttgccattttgtgcaactttggtccctacggtttttcttcttcgcctgctttccaatttgcatacatggacaccaaaaaaaaaaaaaggaaaaaagaattattgcacatgggatttttgtctttttcattatgttcgataagtaagtacataaaataatattccaaaatttcgctattattttttaaaaaggttatgtattttatcatgcgtatacgttcctctacaaatccaccattcggagtattttatatttaggtcctttactacattgcaatatttagaaatgagttttgaaacaaaagtttatttcatttttacccataaccccatttttattcacttcttgcaacttggtattcccttttaagtttaattttaaatttcccaaaattaaaaccggctctgtaatattttttaattcccaaacccccaaaaaaaa

SEQ ID NO: 25879 - DNA, 1620 bp, Arabidopsis thaliana landsberg
agctcgaatctttcaatgagttactcaaggatgaatctgatgatattgttttgttgtgaaggttaagttagtgaccgaaggaaaggtggtccatggctagcaagaacagggctatactcaggtggaaggagcagagaatgctaaaagagactatgtgccacgtgggtcttaccagaaccaaagaggtcgtcgaggtgctcgaagaggtggtggtggctatcagaatgggcgaggaggacgaggtggtggtggtggctaccagaatgggcggtacgaatcttatgatcaatctggtggaaacggttatcaaaggaactactacaacaacagaggaaggggacgtggtggtggtggtggtggagaaaatggccattcatacaacaactaccaagaccccaatgttgctgttgcgtcttagcttttgtgcctctgtcttttgggtgcgtctctttcattatcttgcgtttatgctataacgcatataagcctaatctcgtgtttgaaacgtttgacaatggctcggttattgctatgaactttttttttttttttttttgtggccatcaattttatcgtcttcgacatgtcaactattgatcttttttccatgaaagcgatagttaaataatattataagatattcaaacagcaggaataattagcatacggatcctaacttggagattgatcgtgtctctggtttggttcgatgtctagaagagacttctcctcattgaaatcttcaatttgcgaaccggctttatactggtatctatgggcacagtaccagaaatacacaaggttaaccacacccaaaacggcaatcagatagtagaagtagtccaacttccctctatcaaggtccttgttcagccagtcagggtggtcttttgtgcctgagactttatgcacggtggtcaccagcagactgctcagataattagctgcagcaaatgagagtggaaatagcgaattcgctatgcttctcatgtgctctggaaactgactgttgaagaactcgatcagtccaatgaaattaaatgactcgcagagccccatcagaatcagtggcaaagccagccaaaacaccgacatttgagtcatttcagtagcccgtgtccgcctcactccctctacaaaccctgcagtgaacatggagagactggcgaagacgatccctatccccatccgttgaaggagagtgaccctgaactttctcattcgccaaaggaacgggactaagaggtgttcgtagataggcacccaaatgcctatagtgatgtaagaaatgacggttatggaggcggccgggatctcaaagtgtggacccatgtgtcgatccatttttgtagcttgaaagaccatgaaagttgcttgcgtggtcattgcaacgattgaaattattccagcagaccaaaccggaacaactctgatcaggcacttgacctcttcaacttcttggacgctacatagccgccacttatttgccggaactccttcagatgtaagatcaccgtctagtatcaccgcagctttgttcagaaacctaaatataaccaataaattactaactcaattgcctttcaagaccaatcaaacttaaatgtttctaaaaatata

SEQ ID NO: 25880 - DNA, 4701 bp, Arabidopsis thaliana landsberg
ataagccatatataagcttaagcaattacttttataaatgaaaataacatatacaacatatcgtcattgatttgattgactgtcgaactaatttagacaatgttgaggaaacattttaccgcgagcaaaaccatcaacattctcgcacaccgtaatggatgaaccatcttcgagtccattctgttttatgttaatgtcaattagctccacatttttgcatggaaagcttttgctacattgcaaatttactgctactttgttctttgatgtgccatatatattcttactctccctggaaaaaaaaaacacaacttgtctttagtttttgttcttgtgataaaataaaataatatggagcttgtttttgcataggaagttaacctttctttcatgttcacaaggtgggtgaggacaatacttctgatcgatgttgattggtttcccaacgtcgatcatctgaatattctcgtacacgaagtttgaaacaaggatcttcgaagctgatgattcccaagttttgatccgaataccatcgcttgtaccattgaaaatgacgtctcttacgaataagtccttcacgtctttctcatctttgtttttccctaagcttccaacactaatcccatgtccaggaccacaattgatgttagagatattgagtttagtggttccagagagaattacgatacaatcgtctccggtaccgatgtttgtgttggagatttgaatgttcctacatgaacccatcttgataccgttggtgttaggactatcaccgggagctgttatactgacgccggtaatgttaaagtaatgaacggagaagaagttgaaatgtcccattttgctgttgagtgatgttatgtctttgatatttgagttgttcacgaatgcaaatcccatagtttataaaaaaaattcaagtttattataagacttgttaatttctcaaatgagaaaaaccaaaaattctaataaatttgtgtataaatatcacatgtacgttttgtaatcaactttaaatgtaaataagtgaaaaagtttaagatatgttaccatagctagtttaggacaattgggatttttgtggcagtcattgagtgaccaagactgttttccttggccgtcaagtgtaccggaaccggagatagaaagattgttgatgtacctaaagttgatccatgtgtcttgcttaatatcactaggatttgcaggagctaataaagttccatcgatgatgaattcaataggatttttgcatggacccacaaactctacaccaccgaggtaaaatgttccttttggtacatagattttactacttccacttatccttttgcaagcacggctccatatactcgtgaatgcctaatttcatatgcgttaagaatgacactggttaattactaaacaaaagaaataaacaaatatcagaaaaattgtatttatgtttcctgtttgtatattggtgatcatatatgtttataggtgtgtgaataatattcaaatgtttttatttttaaacttattggtggtaaaaaaaaaaataggaaaatatttgtttacatacattggcgttatcagtttttccgtctggtttagcaccatggcgttggacgttgaaaacttttggtctgacggtggagcgacttgcaacaacaatgaaaaagagacagaagcacaaagccttaaacgcaaaggaaatgcatgccatcttattattttgcttaaggtatatatatagaaatacgagaaacttgttgtttatcaatacttgttctgagagataatgagaattgttggcatacttagtctgcttatatagagttagcttgtctctatgaacggtaaaaaaaaacttgattattgttactaagtaacaactaaaatagggttgtttttttggtaaggcttgcgaatgatatttaggtttttgagtgtatatggtttatttttttggttctctcctttaaaacagaatcttcaatttggtgaatgtgacaatcacatttaccaattaattgtttttttgttgttttaatttaagttgcataaaaccaaattgtttttctaatgcactattttttatttgttccaattttaacggatattaaattttactattttagttattttgtgaactaatatttgttcaagatctaaaaacagtttagaaagaaattataacatgaaagatcattagcgaatgtgggtgcttaaccaatatcacatctcgccttcaatagcgggtgaccccgtcattaaccagatttagggttgggcaaaacaaccggatccgatacccaaccctaagcccgaaccaaaaaaactgggctaggacaggttagggttttagaaaattacttggataaaattttagtaaacccgtggataccgagtcggttcagggattacctgttttccaaacaggctatccaaaaacccaacataaatttaatatccaaaatattaattatatttaatcgtaatataatctaattatctaagattataattataaatctaaatatgtcaattaattttggacctaaatatccaaaacaactaaactattcaaaaattatttgttatgtttgtcaaaatttagtaaaatatattcaaatataattaaatttattaaatttattaaaacttaacaaatttaaaagtttttttggtttgaagacccgctatctaaatacaaaatatcgtttctattttttttgggtatttttagggcctgaaactttttatccaaactgacccgaatccaactggacccgacccgaaccagaaccgaatatttagaattattctattgggtagtaaatcatatacccattaatctcaaacccgaatggttctacccgaactcgaatggattactcatatgcccagccctattctctgatttaattatctaaaaactcccaaaaaaacatatgttttgctgactactttttattcgaaaaattttacatcctcttctgccaaaatcatttcataagacatcccaaaacccttagaataatgattccatgaatgaagaatcctaatttgaatataccaagaagttttgaaaggttttaagtttttgataggtgtgtatgtgggaaggtatagacatcgtgatgataatctgcttatttataattttaacctgcagtatatcgcaggtaggcttatattttagttaaactaaaaacttttattgtaaagatgattataaatatatgatattattttatttgattttaaatgtatagtaaactgcgagttgtatatattttgttgatattatttacattgtttagtgtttaaaattatacacttgtattttaagtgttaattttagagtttcacctgtagtataccatcttgtattaatatcgatctaaacccgtccattctagaattttccagcttgtattaaaaattgaatcacatcatacacattaaaaaatctaatatgttattaattattgtagtatataagattataaattttcaaaacaatatgtatgacccagtactcagtagaaagttttcttaaatctatttttgacccattataatatttttcatgtattgaacagtttatattcgtttttaaaaattcaaattagggcatatgcgaaaaaactctaattattttttataacgatgatattattttttcgcaaaaatagaatcatatatagatgagaagtgaactataataattaataaaaaattaatatgataatttagatatcaaatctaatttgttgattttaattggttacttttttaaaaattaataatgtatttcgtttttctaattaaattaaattaattaaaatttatatatcaaatcttatatgttgattttgattggttattatttttggaaattaataatgtatttcgttctttaattaaattagtatttgactttctaatctttaaagagataaattaatttactctttaaaattttatttctaatagcatacctatgtaattacttacaaaaattaaggttacatttaaaatgtacttcccaaataatatagtaggatatgacattattatagattgtattctattgtaatgatatggttagaataactaattacttaattaaagtttttttttggttatacactcaaatttccctatctaatatgcctaaatccgaagatctttaccaatttgtgcctattttaataagatactcttcaaacaaaacaacaataaaaatgttggtcccttaattccttaattttgcactttgcacagccaccagtgagacagagatcttctacgacagagataatacaactttcgtactcaacaaaaatctcagtcgatgataaaatacacgtgttaaaatctaacggtcttgataaattaaaggaaaaaacaaaagctggaaacaacagagacgtaaaaacgatagtttaggaaaacaaaacaaaaaagtggtctttgatcaatcaataatcattcatcagggccctgtgttctctgagtcaagtaagattcttttcgacgattccatttactttttgattagggttttattattctcaatcagggttttagtttaaacatcgaattaagcactggattagctgattttgtgtgatttgatttcaaagttcacagcttttagtttctctgatcctaatttatgatttgaagtttctatcaaaaggt

SEQ ID NO: 25881 - DNA, 1086 bp, Arabidopsis thaliana landsberg
ggattcgccggcgttggatatgtctacagggatcagatcaatactttcctcactcaattctccacttacatcgaaggtaacgatttgataatactgaattggtgattgattctattactgcttagctttctagtagtattctgaacttagtgacaaaagaactttagatactaatgaatgatgcatttaggataagtttttgatggagttttgtgttcttgatgaatcaacaataggttatggtacagctgggtatgcgctgttcattgccgtctatgctgggcttgaggcaagcttttttatacttcttcatctgcttttgatgttttttatactcttcattgaccccagtttcaaggttttgttttttgaatcatttgtgtttagatactagccattccagctctcccattgacgatgtcggctggtcttctcttcggtccactcattggcaccatcatagtttctatcagtggaactgtaagttatttcttcccaagaacacaaaatacttaatgtcatcaagtgagaccttcccatgttcctatatatttttttggttgtcttaaattggtttctctttgtgtagatggctgctagtgttgctttcttaattgctagatattttgcccgagagcgcatccttaagctagttgaagacaacaagaagttcctcgccattgataaagcgattggtgaaaatgggttcagagttgttactctccttcggctaagccctctacttcctttctctcttggcaattacctgtatgggttgacgtcggtgaaatttgtgccttatgtattaggaaggtctgtgtttttgcaactttgttatacttatttccctatgatattcgctgtagaagcttaatacttgagttgtggtttttctaaagtattcaattagttcccatcacttaatgtccacttggtgtttactctgaagcaatcttgaccaggatttaattcaatttgttttgcatttgagaagaagattttaacttgataagctatagtctgagtttacatactcattcatggatcatactgtctctgcagctggttgggtatgcttccaataaa

SEQ ID NO: 25882 - DNA, 1009 bp, Arabidopsis thaliana landsberg
ttctattctttatatacaagtcgactgtagggaatatgcttattcttttgttctttcttctgctacttcttatcatttgtgaagcatatggtcgaaggcctcaagcaaactttcatatgttctctactcttctaattctaaaaactttcatatgttctctactcttctaattctaatagatatgattgttttccacaggtctacggttcactcaactgtagtccattccacctcgcaacccaacttgggtgcaacagatagtagacgtgtttctttcgagccttcaaaaaatggagcttcttctgcaggacatccatcaacttccgcgtatcctactaaatccatcggacctccaccaagagttccaccatcaggtctcaatcatatctccaaatattatttcctaaagttagaaacttcaactaactttcaccctatgtttttacaggtagaccaggtcgtgttgtggaatcatctgtatcttatgagaatggcaggaacctcaaagaagcttatttcagaagcgcggtttcatctcctcattgctacttccgaccaaacaccatgacaaacccggagaaccgcaacatagaagcttcgtcttttccaccagagccacaaaatcctgtccaccaattcagtcccactgagccaccagctgctacaactaaccaagcagacgttgagactatgaaccacccaaacccttactttcaaccacagctcccgaagacagatcaattaaacaacaacacacatatggccattgatgctaagctgttacaggcacaatcacagtttggtccagcaggagctgcagcggttgcagtagcagcacaccggaacataggcacaattagttacagcgcagcatcatagacaacacttcagacagatctttaaccaccacatcttcctccaccaggtgattctctagtttttatgtaagtattattcagtccaggctctgatatgaactacgttgccatgatataagagagacttttat

SEQ ID NO: 25883 - DNA, 701 bp, Arabidopsis thaliana landsberg
ctaaacaaccaacagaaacttcatccctttgaggaacagactaacacatcacgagctaaacgcataaagtacaaggaaagtgaaaactctcaatgaaagattaaaaaggaagctccttttgttctttaattgacaatgtaatttcacaaacgtatgcaagaggcgtgatgataaatcaaagcaagttcatacaaaatcaatctccaataggattaaggatcgtgtgatctaaacgtttcaattgtttataaagttgtttttatccaatcacagagaaggtgagatctcaaaatggggactacctttcagacatggtagcaatggttttaaaagcttgaatcaaaccacgatcggaattggagttacgattctgccacctcccgagagaagaagacaagaaatcaccagatgaaccattgggcttagcgataacagtggttaaagcactatcagcgagaagcgggttggttggaccaccgacacgattgggatcgctgttggaagattcattagcgaaggtacgccactcagaggtctcatcaatggagtgagattccaaaaccaaaccacactcggagcaaagggtatctgcggctgagtgatcgacaaccaactccgtctcctttttacaatccgtacaatacgcatgcgacatgattccagatgaaaaccctaaaaaaatttaaccccgaaaattgaaa

SEQ ID NO: 25884 - DNA, 548 bp, Arabidopsis thaliana landsberg
agcttttaatatatatcctgtctctaggttatgtagaatgtagatgcactcatattgatgttggattctgaagactccacaacaacatggcataacagtatgcagggcgctgtctatcgggcctcggtaaatttaattttgattaacagaagatattgaactttacgtctatttatcaatagggcgtctactgtgagacagttccattgacggtatgctatttagctgattaaaattttaaagtttacttcaatatacagggttctgctcccatagccggtctttctgatacttcatctgacagtgaggagtcagaaacagaacagaaagatgttttcgatttgtctaacttggagagtgtatatgtaaccggtgtgcttgatgaactcaaaatatgtttcagttatggtcatcaggtaaattcaaactataaattccatttctagtttttagctggggcatgctttgactaagtatatgtttctataggatgatgcttctttcatggcggtgcttctcgccagagagagttaattgttcgagtttaa

SEQ ID NO: 25885 - DNA, 1234 bp, Arabidopsis thaliana landsberg
agtatcaaatgtcctccttcttaatgctttgcgcagaaaatgttatttgattatataagagtttaatacttccgggaaaatgggactcatttagtccaatgaaaagcgaccacaacgtatagtaacatctttattaatatgggaaaccgaaaattattatattatagctcatttgtctgtacttttttcgttgttattatatatttttaatttagactaagataagataatatatatttgtgtggaaagcaagtaagttgatgatatctaatcatgtacgagtgtctaatttttaaaaaagttacataaaaacaagacatgacaagagaaaacattatttgaaaaatgggacaaatgttgatgacaagccaaaaataaagtaaaaatagtataaacttatggttaattagtcttttgtaaatttatgggcctcgaaacaatataaaagacattccgtggaaagtgacaccacaccttcataacttaaccacaaaggaaaaaaaaagggcattgctttatttatctcgagatatgtttttataaccatatttgaatgaattgatattatgaaaccgcctcattgatccaaactaattttgtattacattacatgtgaattgattccattggaaatgaacgaatgtccttcgtctatatattggaaatgatacatttgacccgtaaaccaatcgagtcttcaagttacctaaattcatcaacttgtttgaaaatatccattgtttttttgcttttgaaatatccaatgttgttcaaaagtataacttgcatttccaatggattcttagtttcaacatatacaaaacatgtgcgtataaataaatacacaattttgtataaacaaatacacacttgcttttgttctgtgcatacaagtatgaagtgcgtcaaaagtacgcattatgtggtttaggtaaccagaaatgttgtccatgaaaaaaaaagaaattagaaaaaagaaagcctaaggagatgatgccaagaaagaaccttccattgactggtctccattttctttcttttttaagaatccaaatccttattcacctacgcaattatactttttgtatttgataagtaactacgtgtttgctaagcaacctttccacgcctgttcaaaatgtcgaatttattacttaaattcgggtagaaatttatcagatttgtcttaaaaagtagtaaagaaaaagttattgatcattctactctatgaagt

SEQ ID NO: 25886 - DNA, 1539 bp, Arabidopsis thaliana landsberg
  unsure (1)..(1539): unsure at all n locations
gtgaaaactctgtaacggaaatgaaatgaaatgaaaagaatcaataactaaagacgtcgtagtacattacttgaaatcagatgaggcttgagaatgtgaaggctggaagaaaggggaatctcaatgtagcgacagaggtatgttatatgagactggacattcaagaaagtgttggtgatggtttattgaatcagtgtgttttttgtttgtatggtgtgacaacaagcagatattccaagtagcgccaagtcttcatatggttcaagtatcgaagtcgaaaggagacactctcgaatttcacaaggtaagtcaaatagcttggtttcgactatatgatagggtaattaactggtttatgagctaagcagagatgatggtttgtttgcagttctataagaagctctctaattctctggagcaagtagtctggacgaataacgaagttaagaaagaaacagcaaagtgatgtatgagagttttcttttgggacaattcttgctttctttgtgtataagagcttttttgctttaccggctactttgtgtggatgatgagaaagggagtgggattggttttgtgtaaaagaaaggtgtaaatatgaactgcattactcgataaggtgctgcaatgccagttataaagtcatatcaaagcttgttggctaaaagtttgaaaatgcctcattgctctatttgttattctgtgccggcgaaatttgtctcgtttcaaaaaaactgtctgatccgttttgtcttttcttttacaacttgaagatggaacgtatcagaaatgtcatgatcgaaggactgcctatttccactcataaggaattcagtaaccttactatgacggtttcagatcattatgatagcttcatgtccatcctgaagttataagtttttagggcttttcattttatatttgcttattcttatttatgtaagttaagattttgttttgagaagcaccatgattcaaagattttagtttaaaatcatggcaactagttggtgctcttaagatgatctcatcttccctcttctgcctttcaggaattgtcttgcccaatttgggactttaattgccattattatagctaggaactatggttaactatttgatgattttataattgtcattagtttagttacaagtttgtaaccaaactgttttttttgttttgtttttttaattcaaaattctttgatgtaagttccaaaaatgacatgatagtgtagaagaaatagatgataagtagattgtgaactttgcttagttatcctctttcatgttttaatgactgaatattggcaatttttaactttgtaatttattttcccatggaataaccaaacaaaaattaaaccaactctacggatattataaccgtttaggatgagctcgattggtgtagaacatataagtggacttacactttttgtgagccagtcatattttgttatgtgaacttctaagtgagaaaggttcgaagcatgcgaatncattgttttgatgttagatgttttgggagatgcattc

SEQ ID NO: 25887 - DNA, 883 bp, Arabidopsis thaliana landsberg
  unsure (1)..(883): unsure at all n locations
tggttacttttacttcctctgcttctcttcttgttccatctttcatgtgagagagagagttgaattttgcagatgagtatgagaagaagcaaagcggaagggaagaggagcttacgagaactgagtgaggaagaggaagaagaagaagaaactgaagatgaagatacttttgaagaagaagaggctttggagaagaagcagaaaggtaaagctacaagtagtagtggagtttgtcaggtcgagagttgtaccgcggatatgagcaaagccaaacagtaccacaaacgacacaaagtctgccagtttcatgccaaagctcctcatgttcggatctctggtcttcaccaacgtttctgccaacaatgcagcaggtaaatttttgtcatcttttttcaaaactcctgcaacaataaccataaacaagaacaagaaatatgagaccttttaccttttgtttttaaggtttcacgcgctcagtgagtttgatgaagccaagcggagttgcaggagacgcttagctggacacaacgagagaaggcggaaaagcacaannnnnnnnnnnnnnnnnnnnnnnnnnnnnnnnnnnntgaaggttaatgaaacaggctttgcttactctcttctgtcagtctcttttagctccttgtaatcctctgtgtctctgtctgtttctccatattacctgtaatcaaagctatctgctaaacctacgacatggttaaataaatgcattgcaaccttagtaaatgcttgaagaaattatgtgtaataactctttaaacttgtccaatgttctttcaagccaagatcttaaactaaaccaaggatctgtatttgttttgcaatcaacaaatgaggagacagctaaatggctatcagaaat

SEQ ID NO: 25888 - DNA, 1164 bp, Arabidopsis thaliana landsberg
cttagcattgggagcccttgaagtgttctgcaccttgtcaagggtactctcggttatccttggaaaacgagtttgatcttctgttggaattcttgtattcctttcgatttatcaatgcaaccatttaaatgaacgattgtggatatatgttcagtcgtctaatcagttcctcgtgcaattctgatctggatacactattctgctgtttgtctaggtagaaaattgcttttagagaatggaagaatctgtagcatctgaaggcttagaatttaagtggggtaaaaagaaaggtgttggtgggaaaaagaaagatgtccagttctatgaatctttcacctatgatggcgatgaataccgcctttatgactgtgtctttagttggcaatgccagtgaaccagactctactgaacccttcattgtcatgatcataaaaatttgggaacacgctaataagcatatcccaaagaaagtcaagcttctctggttctttaaaccttctgagattgcgccatatcttgaaggagtcccgaatgtacttgccaatgaagtgtttttagcatcgggtgaaggtcttggccttgctaataccaaccaattggtaactaattattcttctgcatactatgttgaattttcattctccatagtacttattgagcatgtcatggcattttcttattgatatgtatctcatattatgctgcgtactaaattatattgtccatccacttttgttttgttgaatattatattctttgcggtaggataacttgttctctgttcaccaacatatgtgctccaagtagcttttttgtcctcttttgtaaccatggcatagatctcatcccaaagctccccaaacagaaatacgttgatcaattacttttgttggtttctaacattgttacaagcgtctttctatggtgaatcaaacatgtccttgtgtcttgagagatttacctttgcttcactttttggttgaaatattcgtttgaactttgtgccattgtgcgaatagctggtgcaagtgattagttaaaattacacctgctttaatactgatatgacattatttcactaggaagcaatcggtggaaaatgctctgttctatgcatttcaaaagacaaaagaaatccacaaccctcgggatgaaaattcaact

SEQ ID NO: 25889 - DNA, 1077 bp, Arabidopsis thaliana landsberg
tgaaatgagtagatgctccaatgttaagaataaggagcatgtgaatctgaatacaggagatgacttgcttagatcatgctgttgttcattctgtctcacaggtgtttgatttttcagctttttctgacttatcgtttctcttgatttccatgaacattatctaacttagctactgctatcaatgaattgcttcagcttcgtatatttggtcagatcttaattaccaggatagcaaaggacgattatccggtaagtcccgattatcttcatatgtataaagcataaatttgccacaagctcttgaagattttcttgttattattgtcataagatctgtgtgtttttttgtttcttctgaaccagccatgaagaagagtcagaaagcagctagcaacttgattcaagggaatgttaaagaaagatctacagattttcatgccacgggaaactcagtttctgcaaaacaagaatccaagctcatggcccagtggaggtcgctctttcttagcatgggcgatatcctcagtgaagagagtagccaccttgtaagtgcttttagaagcttttaatatgatctcatagcataatgctaattgtactgttaaccatttgcttctgagttttgaatgtgggaaatccaacttttgcagcaaaacagctttgtgagaatgaaaaaattgcgagacgattgcaatttggatttttagagagcaatgaaaaaacctgaacaactgaacacccagtaagtactcttacacatactgttatgaatccaacttctctttctggaaatttttataagtatctggatgcaatgtatagatgcttaaaatcgtaaatgattatggatgtgtgcaactattgttggggttgttaagttcttctatcaaactccttgtgttcttcaagaaaacagttactactacacacatgtctctttgtgttactttggcattgagaccgttctgttttactttgtgatgacatagactcaagtataaggttgcaactggtgtcctgtcgtagtgataattttacaaaattcttgatacgtaacatttaatgaacattgatgag

SEQ ID NO: 25890 - DNA, 1451 bp, Arabidopsis thaliana landsberg
  unsure (1)..(1451): unsure at all n locations
acacaaattggtcaagagaccgaactcgcaaggtaaagagacatcttaagaaagaaagacaaaatattggactacacttttgtctttgaatgtatcctaaaattttgggtcaaggaaaagatatggtgagttcaatttttcttagtcccaatccgacaatttgcatcattgagtggtcttaactcttaaaccccagatcataggggggctctcctatagatttggcttagtttttcctccttaattatattattgtatataaacaaatcaaacttatacacaagtagactcttgatataaggagataagagaaaatctaccacccatcttgtgttatagattggtccatggaacctattttaaatcttatgctttaagatggatcgctcatttttatagctataacaaagaattatctcatatgtaaatgtgaatgtatcttatgaatgaattctactaatctccacggggaccagtaaagaatgcatctacaaggcgattagtcgtattgcgatcaagttggcctcttggtaatggtaattgctcaataatcttttgacaaacaccacgaacacagtacaaagatgttttgccattgttgggttcatgtcatgctttaactcggctacaatcactttctgaatcaacccgaaatgcccttgtccaaaacccttccgaaaatagtgtcttttttcatgtaaaactacagtaattaataagaaactacaatgctggttttttccatatctatcttgaagaagaaattatatagcataacccaggctttttttaatccagagtgagattagcgattttttttttctggcttcgcgttcgatattagagaggtgtcacttgtaagagagggaaacctcataagcgcctaatctcctttggtggtttgaaattgttaggatgagtttctggagttgcattctcatcttctttccacatctttatcgtcttatcagcctcgcatgttaccaatcttgaacctgtattatcataacacgctgcatatatacccgcttcactctccagggaacctgccatatgcccaaccacatccaattaaagacccatttactatttgcttgtaagacgacgctataggcatttacataaaccataaacctacgtcaactttcttggtttccctagagctcaatcatagtatcatacacttctaacatttgagtctttaccagggttcaaacttgactacgtnnnnnnnnnnnnnnnnnnnnnnnnnnnnnnnnnntaacaaggagatcaggagcaaaagaccatgaaagctataaatgtacgtaccaggctgtacgatagtttctgactgttggaaactgtgaccactcttccagtcccagaaccatatacttncattatcaccttcattcacacatatatagaatcaagtttcagtgaaaatgattatgtctcacccattttac

SEQ ID NO: 25891 - DNA, 804 bp, Arabidopsis thaliana landsberg
ctaggccaacatgtagctgtgatcaataatacaaaaattaaacaaccttgtaatgtttagaaagtatgttttggttacataccttgatctggatctggccagaatgccaaacaactcataccatcatctagtataagtctttcatacccattcatgccccaagtattttcccatgagtttttgtacaatgaaaaagtcttgtccctctagagttcgtccacggcccacaatcatcaatgcgtgtctatctaaagatttacctgtacgtggccgtggcacagctctaattttgtaaaatccctgaaagcaagtaaaaaagtagaaaatgggctcacgagtttcacatccaatggtgtagatggtttagacagaagttgaagttgttggttagaaactaattaacaaaagcaagggagttacatatctatttctaagaagtagagggtcatctcaatgattctcttacggtaagtttttgagtcagaaagactgttagagcatattctaaagagataagtgtgttacgttgtctttgtttggttgtaaaaacatctaaaatggacatatatactcgatttaaaaaaatttctgaatccacacaatgaagacatatatatatatggataaaatttggcatactcttaaaaatatttcgttttggcgctgatgttgaatccttagaagtttttgacctccacgttgggggttattgagaggatttggaccttttcttcgcatcctccttctgatatgtgttttaggccagctccaatatttctctccataattacaaatgtttttttt

SEQ ID NO: 25892 - DNA, 1627 bp, Arabidopsis thaliana landsberg
gagcttaggatgtttgtggacacatgtttagctcattatgaccatttgattaacctcaaggctatggtcgctaagaccgatgtcttccacctcatttctggagcatggaaaactccagctgaacgttgcttcttgtggatgggtggtttccgtccatcggagatcattaaggtacatctcgttttttcttatagccatatacatatatttaggtttttcgagagatatttacttattctattcgagccacatcccacacaataattagtcatgatgatattgtaaactaatcaaatatggattaataaatctaaattttggaattttacttgaagactaatcattttaaattttatcttagaacctaaaatattccaggaggcaatcattcatacaatcaacactgtggattacttgcagaacatatactaataatgactgaaattgtgacattgttattatttatatcgtacatatatgtccacagaatatagtacttccaactttattttattatttagattttttttttttaatttagtctttgattctcgtaaaagaggtacgatatagtaataatagataagacagacaagagatagactatatagtgatattgttggacgaggtatatatatacataacattgcatggggtgactctagatgtataaaaccaacatatatacgtgaatgtctttataaataaaggtacacgtaaaattattttgaaaacaaattaagaatgcatgcaattgtgtgtgatggtgaagtatctctagaaataggtaggttttggcataatgcaaaagaaagtgcctgtctgttttttcgatttatgggatccataggagagagagatagacataaaccaccatggaattcaacagagacgaccataataaacaaaccaaaaataaataattgtttaacatttttagcacgctcgtcaattggatgattatcattttttttcttttctaaaatggttacgtaaagccattttaattaaacctactttttattctaaacaatatgagtacctacgatagccgattaataatacaaattaatatatggatggtgtgcatatctgacaagacctttggcaatgtctcaatcttatatcctttttagtgaaaacaaaaaggaaagaagagattttgggtgtagctagtaactcgtgcagagtacatacactacacactttaatgcattcaacgttctttatgcatccattaagaccattgttaattaatcctcgatatatcaacttgtgtgtattaattagaaacgcatgcatgcaggtgattgtgaaccagatagaaccattgacggagcaacagatagttgggatatgtgggctgcaacagtccacacaagaggccgaggaggctctctcgcaaggcctcgaggcgttgaatcaatcactttccgatagcattgtctctgactccctcccgcctgcctccgcaccacttcctcctcatctatccaatttcatgtcacacatgtccttagctctcaacaagctctactgctctcgagggcttcgttctccaggtacccttataactctttctttttaagtttatgtgcaattatatatcaatataccgatcttttat

SEQ ID NO: 25893 - DNA, 1799 bp, Arabidopsis thaliana landsberg
gaatttacaccaaattcgtttttttttcttggtttataccagattatatatagtaagtatatctcccacatctgatatgtaacatcctaacgcctaaagtttttcctgcatttcaatcaaaaaccctttaatttgttttattttattttaaaaagaggtacatatattattatacaagtatcattgtagaagattcggatatgatcgactttcgtctagcatatacgtgtccaaatggcaactgtatagtcgatattattaataatttgtgaaatctttcatatggtaatttaagcttaaataatatcgatcttgtttttgtagatggaggatcccttgaagaataccttgacaaaaaaaagcgtgtggatacgtacacgtgagaatatactcatgttagtgtatcttgttatatcttaatcggtattacatttttcgatagatttagtgaaaaattatctaaactttggataaattaatgacaggatgacgtcaggattggtttactcggtagtcctaaattttgtactcatgaccgcattcgctttgctaattttgcaagtttcgcgttcatatggttttgatccctaccagcttgccaaagttgttatgtttttctacatctacttgatggctggcctcgttgaaatatttaggagaatgtttccaaagccggacaataacattcctgagcttcatctggtgggatttctcgccctttttcagtgtacggttgggttaaaatattcatgtacgttggggttaaaatatcttaattttgctttcatatatgtcgaaatattaattgggtgttggtttctcttcgtttggtgtctatttcacaccgtctcacataactgaatcgccactttaaaatcagtgtctttgtaatctctacactattatttgagcaatgttaaaacaattttaatctttgttgatgtgttatattacaaataatgccatcaacattttagccgtattagagattacattagaatggtaattagataatttgtttttcaaaaacacgcgaatcttaaatgaaacaaataattatccgacgtagcatctttcaaagtgacccgtgacaacccgagcagatccgaccaactttggcccaagccttctgcaaacaaggcccattcataaaaagccgaacatttaaacaagcccatcgtcatacaattgaaattttagcaagattttattttcaatgccgtcccaacaatctttagctatattttcttacttccacaaatatagattctattaatattagattctctggcagagtaaactaaaagacaaatatttgaaacttgaactgaagggaatcttggagatattttctaatacacaccataacaattcaagtaatcatctcgctgctaagtttatttcgaatctggcctaagaaacacattatctattgatatctaattagttagcaagttgtttccgcagatatttagcattcaattccagtatcttctgcactattgttgtaactaatcatcctattaaggagactctattaccctataaatacacacattattttcaaccccaaacacatcatcatactaatcatcttaacagtaaaaaaaaaaacacagtttcaccagaagttctaagcaaaatgaatgggccataactacgactgaccttgctgatgttaagtccttcaaaaccagctggcgtgttcaggctaacgttctccacccctggaaacaattcactgctcagtcaaagagaacactcgaaatgaaggaaggtcgatgaaagtacatactctt

SEQ ID NO: 25894 - DNA, 891 bp, Arabidopsis thaliana landsberg
cataaatctatatgattatccagaaagaaaggcaaaacccatagcatccatgcaataatgatagatccaggaacgtgtgccctctgactataaaatgtgcataaacgacaactctcctgattgactagaaatcattctgcaaaatcgttaaactttgaatcatctacaatgttttaacactgaaactaccaaattcaaaaagaaacaaaattcaaaccccatcaccaaaattctctaccgataaaagcaagcaaaaaacactcaccggagaggataaccagaacgcaaactagtttcagcgaagaaaatggagtcccatggctcttgagaacactggagataaaatatccagagacgattaccactagctacgcatttccaggctttgcacgttaagcccaatttcacagcatcttttggctccatcatcatcagtatctggactagaatatccatcggtagctgatcaaacgcaccaagagacgatgaagaagacaataacagaggaggaacatcgatcgctctctgatgattcaccaaatccttgccactattcgatcggttccacaccgatccccatactttcttcaggatcatcgtcgagtttgcggatttttgttttttctcgaaatcagaaattttcccaagaaaatcgaatcaggaaaatttgataaacacggcgttttttttttggtgtgacgtcgtttctagttgggatgagactgactgacgtgtactgtttaatataatgacacgtgttcaatagcgttgaagaattttggtactggctcactaatgtcaataatcataacgattttttgtgagcccaattggaaaaaaaaaacctcgaagggtcaatatcacgtggctaacttttattggtggtggtgt

SEQ ID NO: 25895 - DNA, 1259 bp, Arabidopsis thaliana landsberg
ttccctggagaagaaagttctcttaaagtatcatttccacaaatggacatcatataatcagctgcatcgatctggaacatctccctcaggtttctacaaggtttagaatgaatgtaaacaccaaggacacaactaacatactactaagaaaaaagtatgcagtacacaagttctaacctgaataccatagggcaatagtccttccatttaaaatcctccgagtggtgcggaggagtcatcgtggagccagctcgaggaaaagtcatccaaaaactagcccgaggtccaaagtctgctgtccgaacttgtcgtctttgtattggcgtaatcttccccactgtgtatctaacgtttgaactagttcagtaacaacaatattcggtgataaatttagagctaaacacgctcacagggcacaggtttagaaagagcaagcatacctgattccaagctgcaaactgagcatcagatcataactccggtgacctttaataacaacttctccaggcttcttagcttctttaacaagtcttatgtgtttcctttttgctcttctggatgtgcgcgaaaacccgttgtttaccacaagctcactgatcagaacaccttgcatatattccctctccaagatcggtatgttagctttatactgcacactacttccgctatctaaaattgccgtagataaatccgagtaaccatgtccaataactttctcaatagatacttccagactccaacgtctttctaaagaaacccttccattgcgggactgttctaagtttattaagctcccttttgagagcttattacggttcacaccaactctaaggttttccatattaacagaagaagcaacttggttctgtcttctcatatctggcaaaacacctctttttctaagagcatttaaataaaactcttgcactgcaggaactctggttcccgctgaataaaacgagcctttaccatctttcaaaccccgtgtccatgtcccaacatagcaaccgccatcgctccatgtatatacaccaacgccatgcatcattccattcaaccaacttccttcataggagtctccggtaacccaagtcagtgtaccctttcctgacatcttcccgcctttcatatccccaaggtagacatttttattagcccaagtatacttccctggcccttctcccaacccctgaatccaagaaccttcaaagacatcgccattagggtaaacctgatatccgagcccatgtttcagatta

SEQ ID NO: 25896 - DNA, 3529 bp, Arabidopsis thaliana landsberg
attggcaattttctggatactcaagtactactaaatcagttcactttcacttgttgacaaaacgaaaaaaaatattatttaattaagttaaaaaaatttaaaaaaaacccctcgtaaaaattaaataaattacgtaatgtatcaggtaaagaaaaaataacggatatgtttagatgtataccattaaaccctaacaactaccttataaacctaaacaaatatataatttcaattaaatgtataacaataaaccttaattcctattttataaactcaaactgatatgtaaattcgtttaaatacataaaaatatatcttaaactcaaacaaacaagtgactatccatataaataggcgtctaatctacattaattcgtttttaaacatgtgttccatgctaaatggacacaaaatagttcagttgaaattgtataaatcgtatgagaaattaaacaaattaagttatgtcagatgtttaacctctttctccaatcttctcaaaattacgacagaattcagtattcttctcccatatataagacctttttaagccacaatcaacaaattatcaaccaagtaacaacactttataaacactagttgcattagatatgtgaagatcttaatcgtcttaagttctagtaacaaccacaagcacaaaatcgatttgaaaaggaatctgatccgaagctggagggtcaatatcatatccaaaacatccaatagaacaaaacttcaaaatactcataaacaaacactgcaaaaagcattcaatgaccaagtattacatatttatcaaaactttgaaatacgcataaacaaacactgcaaatatgtgtcatacctttagtgagaacttattttcattaaaaagtgttccatagcgcaaatgttccttaatattgttccaaaaattatttgtcttccgacatcataatgatttcgttgaccctcaaatccgcattaattcatattgttcaacctccacaacctccacatctaatatctcccaacaactcattgaaatctctttttgactttctataaacttacataatagtcaaacattgcattaacaaccccattccaaaagtctaaccctccactaaatcaaccatcacaaatcataactagatcaaacagagtaatggtaactttacgaaccatatcattaaatacttatgcctacacatttatataccaataactttgctaaacattatttttttacatgacaccactaaatatatcaaaaaagaaattatgaaaatgtagtaagaatttttctgtcaatctctttctcggtagtaagattaaaatccattcaaaagactactaaaaaaatctaaaactaattttgttatagaaaaaaatattacaaaaccaacccctctatttctcaaaatattacaaaatctaccaaactaattaattctttaagccgaaccaaacaccaaaccactcacgctaggagttatattctcctgcatcgtggactggtgatgacggtgctctccttcgtacgtcacaatcaacatcgatgaatcatccaaagctctctccacgtgtttcctcgctggacattctctaaatgtactacacttgtaataaaccctgaaatcgacaaagcaaatcacaaccgttagatctgtaatgtttcacaaataaatcagcggtggataacagcgatggtgtacgatagttaccgtggatgtggtgagcctttgatcggtttttgtttttactttctccatgaatattcgtctggtggtatatcggcgatctttgcacttaccgccggtactctcacggttctcttcatccgattttttcggctgttaattaaataataaaacattgtaattagtgaaatgatttaacgtgcgctgacacgactaacatgaacatgcatcaggttagcaaaagtcaacggtcagacaaagacttttaaaacgtaaaaactttctctacacaaaacgacagcacccactaacttgtccttatcaggcgtgcactttggtttaagttactgtcgttgactttcactaaatacattgaccgattggtttagatagtaccaaaccggtctacaaagtattaaaccccgatttgtattctttattttttactgagactaattaatataactactagacttgttcatgattaacaaatttgaggcaaaaaatgaattttgaaatctgaattcatgatatattttcactgagtacgttgaccgattggtttagaccgtatcgaaccaatcaattaactactactaggctagtcaaacaaatgattaatgtattatggagtaataacaataccttttcttgcagtggcacttgccgttgccggagccagagatcttgccggaaaagccttcagagtggtcatgttcaaagcatctctttctgtaaggaagaccagaaagcggcggtttcccggaggaagtcactggcaccgctggagccggagcaagaaagatcgaagagcctttagagacacttccgtcaccggtgatcgcagaagacatgaaagaagagttagaagatacgctaaagctctctttagcaaactcaacaacttccgagctcttggatttagcgccaaaaacgctcggtctagtgaaatctaacgtcacgctttgttgatttgcctgaacgaagctaaccggtgccggagcagagatctgagtgggagccggagttgtcactttcaccggtggaggaacggaggaggaaggaggggaatgaaccggaccacgtctaaaccgggcgtgaccggaacggttaagaagagagataactttcttgaacttagaaactgtgaaatcagtgatctcagagcaatcaacgttacgttcttcgggacggttagagaggacacgaatcaagtgttccatgctttttaagccttgtgatgcagcttcttgtatagccgtttgatcttcccatcttaggtaaacgcataatatcaacggtcatgatgagaaaccagaggagaaacttgaagatctgagaagatgtgcaagtttttttgatgaatgagagagcgaaagtgggaagaagaaagaaaggcgttggcgtgatatatggggttatgggtgtgaccgagtgaccggttgagtaggtttaagatcgagtttagtcaaatcggtgctttagatctaacggctgaggttgagttgaagatttctatggaataaagtaatcaaagtttggtctccttgagttgtgagatatgtagggtcttcttttgtgcaaagcaagaatttataatcgtgtctttaaaataaaggaatcattgtgcgtaaacttgaatttggggaaaatggtggtaaaggtatttcaaagaaacaaaaagtcaaataaaaaacatgaaaggatggtgtctaaagaaaatcataaacctttttttaagtctcgtatctattttttcttttattaggtatcctatgtcttcaagttcaagtcaataaattattacttaaaggtaataaaatgtttttatttgtatgaacaattgg

SEQ ID NO: 25897 - DNA, 410 bp, Arabidopsis thaliana landsberg
aactgttttcaatttgtttaggaaaatttttgaggttaaagttcaatgaagatgaagattatctctagagctctgaaattgactgtagaaactagaagcggctaggttagatgaacgttttctcttattgattccatacgattacaccttgatatatatacaagagaatatttaggttaactacacgtggagaggaagctatataatttcctaatctccacaaagatattttcctattttatagctaagatatatggagatctcccaatactccccctcaagttggagcatgaagatcacaaatgcccaacttggatgacaaaccttcaaacggaatacgacccaaagctttagtaagcaagtcagctatttgatcatgtgtattgacgtgaaccatcgtaagtatccca

SEQ ID NO: 25898 - DNA, 1396 bp, Arabidopsis thaliana landsberg
  unsure (1)..(1396): unsure at all n locations
actgattgtatatgataggttgcagtttattgacttgagtttcatgttttagtgacttgcccctcttgtgaattttgcagctcctttcagctcagctcttttacttgattgtataagttgcggttcattgacttgattttcatgttttagtgactggctgcttccctcttgagaaaattgcagctcctttcgagtgtgtttacttatgcttttggcatcaaacgattctactctgcgtgcaagctgataatctatgctgtcacatataacagtgattctcattagtatttctaggatgcttatatatctcatggatgtttgcaggctaatctacgccggaaaacagctagctgatgacaaaacggcaaaggactacaacatagagggaggctctgttcttcatctggttcttgcccttaggggtggctttggtcttctctgagaagtaactcttgaagatatctttttctctttgtatggcttgttggagttcatgggaaaaaagtgattgcaatttggatatgatactttgaatattatgctgtttcactgggtttggatcattttaccaataatctgttaaactatcgaatcattttgttttgtttaacatcgaatcgtactttaacatatttatttgggatttagctatttatgatgaatatctttcattcaagaaagcggctagacatgtgaaaataggatcgagctatgtgtaagatcggaccaggccgattgagattgctggttgcatgagtccatcaatagtcccatatttatttgcattacaatgaaatagtggttacaaatcgtcaaatccaatgagtgtccatcacatttaacaatttttactttaattttctaagtaacttaacttgtcaacttgagtttgattctctatactttcatagccagaaaagcacatgagacatgactaatgtgattataaaaactagaagaaatcgtatggatgggccgaccaaaaaaaaagatgaccgttgagatttaaacgttaagctttaaagctttattagacaaaaaccgcgcggacagaagcggaaccccccagagcctcccacaaacgcacacatataaagacatgggaagccgaancaaagcacgaacaagagnccaagaataaaaatcaatcagaacgaagattgactctagatctcacgagtcaagatcgatggggttgggtgtggccatatctctgcctctaattttcttctgtctacttattggatttggctgctacttcctaggaaaatctcgcggacggcgagagatccgtccaaatcctcaggagtgtggagcttctgctgcgtctcctggggctattgacggctcctatccggcggtgtctcctcacgccaagcccggcaattctcacaac

SEQ ID NO: 25899 - DNA, 1242 bp, Arabidopsis thaliana landsberg
cttccgcgcgaccaataaaactcagacatgcatgctattcaatgcccccactcattatgaataataaaaagagtaaatattttgtttgggaaattagtaaattccagcaactctagtagttggtatagtattatataataatggctcaacttgctaaagggaaaacgattgatggatatttcaaataattaatgtaaaatattagttttttttttggagtctacatattgacatcttttggcttcgatgaattactttctttctttttttaccgaatctgttttagttttattttattttggattggaaaaagttgatctttctaaaaccagcaacactttaattaatctcaacaaacttaggagagcatgcatctttctatatgttccaaaatctacactttcaaatgtatttttcttatatacgtaactgatttagcagtataaaataaaaagtactgctattttattttgagccatcgactttctacgctaaaaaaacgtatttaatttcttaccagatagagtatcaaatagaaacttgacacagcagacaaataagtttatttatggacaaaatatagaatcttctcaacatgctggacttttatccgtcattggaaagcaagaaagtgcatgcatcttcaatttaagcacgtgtctaattatttgggcatgattaagtcgccacacacgataaaaattgaaagcttgtttcttcttttatttgccccttcgtatatgagtggaaagtatgcattaacaaagatatgtattatataaaatagccacatatatatgtactgaaactgacataacgaaatttaacagatatatattgataataacaatattgtctctcttcaactgtctccgttcatcgttagacgccagtgacaaataatttagggatggttattaggaaggtgcatccaaaatattccagctacttgatatctatctatctggtcttaacataataaagaataaacggttaactaatatatgcacttacgcttcaaatttacgtaactaaacgtagtattaacaaatgatcaataaggttttaatataatgaggtatgataatagcgagtttatctagcaaaacactttaaattaacaatattgtggctatttaaagatggaatgacacgccataatataacataaaagtatacaaaaaacaaaaatgaagagaaaataaacttttttttttgtcaaacaagagaaaataaagtagt

SEQ ID NO: 25900 - DNA, 995 bp, Arabidopsis thaliana landsberg
  unsure (1)..(995): unsure at all n locations
caacaacattcttacagggtgaatgcgcaatagtattatcatgaaatggaaaaacaatgttcatgaaagatcacattacgagagactgaaaccaaatttgtatctaaatgcaggactttatatcccttgtaacctgatgcataaccaagaaaaacacatttatctgctcgaggactaaacttatgtcgatcttttaacaaagtagacacatagcatagacaaccaaatgatcgaagaaatgcatagtcaggttttttatgagttaacaattcatatggagtggagttctgaagaagtacatatggagttctactgattagaaaaactgatgtcaaaacacaatcactccaataagctaaagggatatttgattgaaataataatgctcgtgcaacattaagtaaatgctgatgcttcctttcaacaactgagttctgttgtggagtgtatgcacaagaaaattgatgaagcatgccattttgtttaattatgtcagtaaatgcaagctcaggagcattatctgttctaattgctttgatagagctattgtattgagnnnnnnnnnnnnnnnnnnnnnnncgaaaatgaccagtaacttcacttttatttctcatcatgaacaaccatgtgacacgagtacaatcatctaccaaagttagaaaatacttgtacccttcaacagactctatagaaaaaggaccccatacatccatgtgaactaaatcaaatggagaagcagacaatctataattagactcaaaagaaagacgcttttgcttagctaatggcatatagaacatggtaagacactgaaactagttttagacatgatacccggaatatgctttaacttgtcagaagataaatgtccaaggcgactgtgccaaagatcaccatcaacagccaaggatccagagaagaatggagttgtagatggatgttcaagttgtaaaatgtagagattgtgaagtaaaatgcccctaccaatcgtcaac

SEQ ID NO: 25901 - DNA, 1009 bp, Arabidopsis thaliana landsberg
tgagatctacgtttgaattaaaagaatggggtatacgactcttagaggactcttcatcagcagagaaccaacttggtaatccaaacagtactcttccacatgtttctgaagccggagaaggcaatatggggtataatacacctgttcaaggacttgttaatgagattgaacacagtgaagagtctggagatatcaatgtagtgactaagagaagcaagaagcgaatgcgggtaagcattaagcattaattgaacataatgactattcatctctcaattctttttgtattattgacaattggattcttttgcagctatagcacttcatataagtaatattagggtgtctacgtccaaattaaatggatggggactgtcatccgcgaagaaccgacattgtaatccaaaatctatgcagcatgtttgtgaagccgatgaaggcaatgatgggtgccattatactgataagaatgaggagcgaggagacagtgatgaatagcgatataggcagggagactggtcattttgaagagtgcgaagatagtgatataagcaatgagagtgatcagagtgaagagcgtggggatagtgacgatgatggtataggcaatgtgactgatcaatttgaagagtgcgaagatagtgatagaggcaatgagattgatcagaatgaagagagttgagacaaagagaaccagtacagaaaggcaggtaagtattaatcaagaactgaacagaatatcagatatctcacaatcaggatctttaatagtatagatcactgagttgttttcttttacttgcagattacgtgaaaaataaatgaatctttgagatacttttatggtgatggaatgagtagtttgctgccggttctatggaaccatcaatgttgttcactgtttggttaaagattttgatattatatattgtgggagtattagatacatgcatgagtcctagtattatttcaaaaacaagtcaatatttcttttaatagctgtctgaca

SEQ ID NO: 25902 - DNA, 1490 bp, Arabidopsis thaliana landsberg
aaaaaaaaggtcactgcttttctaatattataagatcaatgcgtgctctgacctatagattagtgaaaaattaagaccgtttaatgaactcatttcactacgattcctcggctacataaaatcgagtaattgattgtcaacccgggactaaatggcagttcgattgttttggttgatttatagtaacatgttaacataatatcattgagcatctatcaactaactaattaaacaaccgattttaaaactttgtaacttgttttcttatttcaaaactcaaaaataaaatgttgaattttagttgaaacctctcagtaatatcacattcttctggaatattataatgtctatatattatgtgtaaaataatctgtgtattgaagaagatttgaagagagtgaagagacaactaaggtataattaataaaagtaattaagggacagatctaatgaacaaatactgttaagggtcgtcaaagcctgaagagagctgtcattcgtcgcagctagccttgcagctatataaagtcccggtaactaaataagttagctcccacgaattattctgttttcaaaacaataatgttatctataacataaatcgaaaaaatattcaaagttgctcgtgattctggaacatcgttccttaaatcccatccgttggattctttcttccccaatcgctacaatacaagaagtcgaagtatacatgcaaataatgcacattcttagaaattatttttgaatttttttgagtatagatagagagaggggtcatgtgatacacagacaatcactcacttcattttgtcatactttacttcagtgagaagtagccgttaggtcaaataataggatctatcaatatcaatttataaacgacataacacattaaatttaagcctatagatttattgctgcctttaaataaacaaaccatctatatttaatactatagttttgcatgccataaaatcgatatagatctgaaatcaatgcatgttttttttttaccggacctatctttctcgtgtcgtttgtttggctttagaaaatactactaaaaaatctaaattgaatcacatttcaaatagtcaaatacattgtcctaaatcattaaatacatatcatccaccaaagattacataatgtgaaaatagaaagtgataatgaagattggtaattaaaaaagaagtaaggaaatgaatgagagaacgtgatagttcccagtgttgtgccctctgtaaaagattctctctctcccaaattgatactttaactctgctctttttgcatctgtctttattttcataataaacagtgtaacgacaaatggcttaagtagagaaaggccgacaaagaagaaaaaattagttacaaaaaatcgttctctacattactttactacatcaaacggcgattaaactcagataaagacataagctaatcataattaacacttaatcctcctttcttgatctcgttttctt

SEQ ID NO: 25903 - DNA, 1481 bp, Arabidopsis thaliana landsberg
ttttaagatggtaaaatgtttaaaaacattctaactcacttcttgcattctttgaatctttgtctcatgccattgttgtactgatgaagctaacttgtcaagtgtttcattacttatacttcttgacccttcagtatctactaaacttgggtgaatcttggtaacagtttctcgaaaattcaaaccaagaaccgaacaaagcgattcaagagttcttatattatcttgaatctgtttcacccggttcctctgagccaaaataaacagtaaagtattagttaactttttgatcaagaaatgaaatcaaatttaaggtaaagtttagaaaaaaccttttgttcttgaagtgtgtaaagctctctatgtaactcttcaagctttctaagagataaatcagattcatcagcagaaaaatcagatgaacaagtctcatcatcagattctccattaatctcttctcttacacatcttatatcatcaattacttgaataaactgaatcttcctctctgattttctcttttccatttcttcaagtttctgaagaatctttactaactcatctttcaagcttctcccattaccactttgttgatcagattgatggtgtcttccaagaattggtggctcttccattacagaacatatatcaataactcttgcttcagaatcagcaatctcttgttttatccgaatcttttcttctttaaccttttcgatttttcgattgtagacttctctgcattcttcttcgatctcaatcaaaatcttctccctttctgtttcagtttctccaacctctttccatataatctgcatcagaaaacagaatccacatcaaaatggaaatgcctttttgtaattgaaaaaaaaaagcgttttcttggagttgaaacaatcgtcacaaacctcaagttcttgtaaaagagatgacccaagtgattccaattgagatttggacattatttatctccaaactctgcaaataaattcaaaattcttccacattcgttatcttattcaatcctatgaggatgttttttttcctcaataggttacttcataaaatttctcaaacgataacaaaatctttttagaaaacacatgaatttttttctttctaaatgataatcattttaattgctgaaacttttttcttttgaattttcctggaagaaatacgagattctttacctggattgaaggacacagccgttggtttttccttgaaaaaaattcggataaaatttaggaatcaaataaaaataatctagtcaaaaaaaaattacaggtaagttgttaattgtaaacaaaaaaattacaggcagagggaaaacgcttatttcgtatatttgtttgcttccccctaatcttttgaaatctctcctttctcccctaataaaactttgtagaaattagattccttttgcttcatgatacatagattttcttgttgtcatgttttttaacaatagaaaaata

SEQ ID NO: 25904 - DNA, 970 bp, Arabidopsis thaliana landsberg
tctcaaacacacaaataattgatgtctgtcgcaatcatgttatattaataattcttctttcaatcttaaaataaataaggattcaacgaacttaacctcccacggtttcgtcaacaatttttatcaaacaaaaaaaagaatggtgtgtcaacaatgcatgtactcgaacctttttgcttccttcaatgtattcagccacttttgtcaacttttaactctcactttcattgcattcagacaattatatatattctttgctttccttttgaaacctcaccactgtcaccagcatttgcatttatttttctgacaacttgtaaaattatgacgcaacaagtgatcatcataatatacatatgtatcaaaatatcaagtaaccaagaccataacatagaatttcaagtgcatgacacaaaactattgcttagaggtttttgtttggaaaactaaatattccgttagttttgtgttggacgttttgggtgtgattggtaacatgagttaccatgagttatatatgcttgcacaagtgatctatcttctacacctagccacatacgtttatgttaatggtacaccttaaaaatttgtgtattataatggaagaaaaacttagttcatgtctatgttcaaacttccaaaaaagaatattggaattttggttttccctttactatttcatgattatatttgcccaaaaaacaattcttatcatcgcaccgctttactattctgggccatataatttgaaccaattctattagtgtacatagagatttgatgaataatctctcaaccaaaacttaacatgacgttgtgttggtgtttggacttgtaatccgatgatagcactctctatcatatgatatatataactctgcaggtagcgagagagagagagagccccgcccatatcttacatatccaattagtataaataaaagtacttatcttcagtgtcacggccaat

SEQ ID NO: 25905 - DNA, 7552 bp, Arabidopsis thaliana landsberg
catcttccttcccgacgagatttgagttcaagaagcaaaaatggcgagtttcattttggcatggggtttagtgatcatctcactgtgttacacttttttcattgccaaattggttccaaaaggaatcaaaaggctcatactatttttccctgtcttcctcattttcttcatagtacctttcttgatatattccttacatttactcggcatcacggctttcttcatcgcttggctagcaaatttcaagctcttattatttgcattagggcgcggtcctctctcttcaaaccataaacccctatctctccctattttcttagctgtctcttgcttgcccatcaagattcagctgagcccaaaacctacaaaaactcactcccatgaaggatccacagagggtcctttgatttataccataaaggcagtttttgtggttctcatcatcaaagcctacgaatacagtaccaaattgcctgagaaagtcgtgctgactctctacgcgatccacatatatttcgcccttgagatcatccttgccgccacagctgctgcggttcgagccatgtcggatcttgagctcgagccacagttcaacaagccgtacctagcgacatcacttcaagatttctgggggagacgatggaacctgatggtcactggaatcttacggccaaccgtgtacgaaccgtcacttcaactgttctcggttttgggcccgaactattcccagattcttgcagctttcgggacgtttgttgtctctgggataatgcacgagctcatcttcttctacatgggacggttgaggccagactggaagatgatgtggttcttcctcataaatggattttgcacgaccgtggagatcgccatcaagaaaaccattaacggtaggtggagattcccgaaagcaatcagtcaggttttgacactcacttttgtgatggtgacggcattgtggctgttcttgcccgaatttaatcggtgcaacatagttgagaaggctcttgatgagtacgcagccataggcgcatttgcagtcgaggtcaggaggaaactgactgcatatcttttttaccctgccgtgtgacaagcttgagtgatctctattttaacttatttttttctaacactgtaaatccgacatttctgcaaccccatcatttacatggcacacgaatcaagaaaattgtggaagttcataatactatacataaaaccttgcaaacatgatatgaaagtaaagatgaggggaagaaacccgctcgagtagaggcaataacatgcaaaatggatcagcaagatccgcctaagttacacatcttaagtctatctaaggcagttagaatttgtctacaactcctacagctaaagcttttcccaccagaaattaacgcacagggagttgctttcttactgatcatggtgttcataaaagtccaagcttttggcggaagatcagttccacttcaccacgaatgctctccacatctgcagcatagtctctcttgtattcatccgccattgattcctccagctgtagcttcattctctctaatgcttcttccaacccgcaggactctttgagaacctgaggctctatggatttaagttgaagaagagtttggattgctgtaagagcctgaaacatattttccgagtagcataagttagaaagagatgtgtgccaagattcatagaggaaaaaaaacggtcataggcccctgtaatagttctaccttttcttggagatcaagatcaagcaccacaatcaaatcgacaacagactttaggaaaagacgatctttgaaaataggaagttcatctttctctgtgttctgtagttgagactcagccaaatcaccgactaagaatacagctttccgtctcaatttcatatccaagctcccattgttcattacatcctgtaaatacgacgaaacatggttagtttttttccaatccagagaatgaatgaacaaaacctgacatgatgtatttctggtttgctcacccgaagcataatgtatccatgtgctgcaaaaaacaagtcctgaccagctatattatttcgtatcaaggcagaaacagcaaaaagtgctttcacagcttcttcagtagagctggagtttaccatctttattagtgttgttaaagctccaagttcaagaacctgtaaccaaattcacagaacaagaaacatgatgtgtttcagacggtttatacttcaacacacggttctgctctacaagtacaacgaaatcaaacctgctcttgaacaaaaggattgttttggctagctttcccgagcacccacgcagctagtttccttacttctgtgtcatcatgattaagctctcctgctacaactctaagccctcctgatttgctcaaatctacacaagaaaagaatgatgccacaattgatcagactcatgtgaaactgtaacacaaacacatttatatatacaagattcaatagcaagttacaagcttccagttaccatttgcattatcaataggttcaacgaggatcaaaagttcctgcaaagcacggtgacgatcttcaagagacaaggatgaattattcaagtcatctatcgctatttgcatcaacttcgcattcgacggcattttcagcttctccaccagctcctatataagagcactttcatgaacttccagagacaaagcaatcagaaattaaaaaccaaaatcacaaagtccgtacctttaactctaattgacgcttctgtaactcatccaaagacatcttctctgcatctttagctgcttccttcaatgtcgcaggatccgagtgacctaaccgaagatatccaacatagaatcagatctaaatgaaattagtgaggaagaaggacactgagaaagaaaatttacctattgcccagtgtaacatcccatcaagtgaagagaatccaccatcgatttgatcttgctctgcgatcaccacaccggaatcttctaccaattcggcttcatctctaacactagaccagaccattcccccggaagagttaactttctcagcgatcgaaaaacccaccaatgagatcaccaccaatagaaacacatatcggaaaaagaaaatcgtcggcatctttgtcttcccggcggtagacttaatcagtaaataaaggtttaagctttttcccgttttgcgactttaccatttatgttttcagaatttatatacgaaagtaactactccttaacaacgtgttcagccaattatattattacacgtcatctcatccatcgtcaccttctatcgcgctaaaacattaaagtgccaggtggcagaagcgggaccaattgaatgattaatcttatttacgtcaactaaaattagggtgtaaattgaaactattattatttatcagtacgaaatagaatttttaaaaactataagggtggatttgaaatatttaggaaaaggcataattaattagaaacacgacccctccacttccttgagtctaatcaaatgtgccttaatttacaaaaatgacttctcacgactcacgccattaaactccacatacacctttccctttcactttcatcttcttcttccctcgattcaatgggttatctctcctgcaaagctggatccgccgtcgcaatcgccgtttcatctgccgcatcaacctccggatccacctccagcaaagcttctgctcctcccgaatctcccattgaagaccgtcctagacttcgtcgtttcctccatcgcgatctcgaatcagccacaggaggtttcgacatcaacaatctcctcggacgtggaagccatggaagcgtttacaaagctgtcatcggttcacgtcacatcgcggtcaagagaccttcgaaatctcgagaaatcagccgtgagttccacaacgaattcgagattctctccagaatccgtagccctaggtttgtgaatctcttaggttttagcgccgataactccaaagaaccacttctcgttgttgaattcatgggaaacggaagcttatacgacgtgattcactcagataccgttttaaactccggtgcgatttcgagctggagtaagagaatcaaaatcgctcttcagattgcaaaagccgtacatcttctacattctcaagagacaccgatcatacacagagatataaaatcagcaaacgtattgatggataagaatctaaacgcgaagctaggcgatttcggattagcgatcagatgcaatgttgatgatcaaaaagtgaaatcaacaccacctgcaggaacaatgggttacttagatccagattacgtaacggctgatagattaagcacgaaaactgatgtgtttagcttcgggatcttgttgttagagataatcagcggaagaaaagcaatcgacgttagatattcgccgtcgtttatagtagattgggcgattccgatgataaaaagaggcaaaatcggtgggatttatgatccgagaatcggaccaccgattgatgtaagtgtgaggaatcatttggggttagtggcggctaagtgtgtgagaacgtgtagagagaaacggccggggatggaggaagtggttgggtggctcacggggttgactaagtcggttaggtcacgacggtgggatgagttaagcattggaaacccgtgtatgatggtcgagacggtgggtggtcgacccgtggaatgattttttatttgtttaaaatcaagtgcttcgctttgaagccattgttttttctcttatgggttggtcaatttattcatttaacataataaagcatatactgtaacatcatggttgcatatggtatttgactggatcatcatattcataactaccgcttgttctaaaaacatgccatgtaaagccttttgcactagtgcataactttctcatatcacaagttttttagcatctctttgtagagttggaacttttcatcattgacaccatttcttcgtgcaaaacacctattctcgatattgactcatatacacaagacatgcgtataaaccatatcattgatccaattatatatagttttgtttttttttctactacttatggaagaaacccaaagtagagtgtttttaaatatgttgtcttagtgttaattgaaaaaactaaactgttttttctaacaagaacaaaaaaactgatcgtcttaaaactccactgtaaggtaaaaacagttgacgaaaaaaaaggaaaaaaaaaagaaggtaaaaatagttgtatgaagacagacgtatatctacaaaatgctgtcattcattttctaaacctttcatctctcttgtttcttcaaattcaactcctaactcgtattctgagataactcgtagtctaaaatcatcaaactactcgaagcaattcttttaaattctttcattcaaacactcgaatcacatgttgtacaaacgtatatttttctctttgaatataatttgacattacattcaaaaaaaaaatcatcaaactacaataccaacgtccaagtgatttcataaaccttataatagacaataattagtacattcaggaatcaggagtttattggagtcctaaaacatgatttaaatgatcaatataccgaaagagtgaagcaagatgcatgttcagaaaccaatttagaaaaaaatctaaatcgattccaaacttaaaaacgactctaattaatcaccaaagagaactacttaattagacttacttcttgattgacttggatattggtgagactaaggtaaacactaagtacaatcatatgtacgactttgtaaagtttacgatatttcagctacattggagaaaaatgtaaattccacgaacaagagcattaatcgaccaatttggaacaataaactaaagagtaattaatatgatattcatgttatgattcctcaaattttacaacatttaattttaaagtgattattttgtttccaaatttcacacacgtgtctctaacatcacaaatccattgtagtagccaaacacattttccaagccacaaccgaggagttggtttgtcaagtgacacaagtcacttcaattctattagtcgcgaaaatgtgctttcacttaaggagaaagatctaatcaagaagttccccggacaacctttcggcattagtttcagacagtacggcggttatgtggccgtcaacgaaccagccactcggtttttgtactattattttgtggaagccatcaaacctagtagttctactcctcttgtgatctggtttaacggaggtacctatagaaaatatatattccctatacaaaactcctttacttggaactagttatatatttttatttttttacatctaattagactcttcaaaaacttgaaaagataagtcttctattaatatctagtttttgaggatgtataatttcctataatcgttgagaattatacaagaacaaactttttataaaaaaaaatacaggaccggggtgctcatctgtaggacttggggcatttcaagagcttggtccattccgcgtacatagcgacggcaaaacgcttttccgcaatctttattcatggaacaacggtacatgattgattgtttactatcagtttctgcttcttttgatgattgattgagaagatctaaagcataagacacaaagtatattattatattgtttactttcagtttctacttctttttaatgtttttaaagtttgtagatgttgtttagatcttgagtgatgtttgatgaatttagataaagtaatttgtcttctaaacccaaggcaagtgttcataattgacattaggatgattttacgtcatattttgcttattatgcttcatatgtttaatggcttacttattttataatgaagcaagtagagactaaaccagactaaacaaagactacagttcgatagaaattatatggatgacgtggtatagagcctataatgagcgtcgagcttatacaatgatatgcattcatgtgttaatattttcttcaagttgttatattgtaacattttaatttacattgaatcaaagaaagacataagtattaattctgatcaccaaatgaccaagtttatagaacaatgacatttttacaagttatacacatactatatatatatatatataatttatttcttttagaaaaactttaattacaaattgtcttttattttagataataattcacaagacctaatagattcttagattacaataaatctattttagttacaagatttatactaattttttgtgggtgaatatttttataataaatattagtaattaaagtttttcaaaataagtagatatatttacataatttactatattaaatttacccacgtatcgcgtgagactttttctaatatagtataaagtaaaattgattattattgttataacaaggtcattatctaaaacattgcaatattatatgaatcaatgtatcttaatctcacaattgtgctaagtatgaaattgttttttatttgtcatcataaattttattttagaaaccgatgaatttacatac

SEQ ID NO: 25906 - DNA, 2137 bp, Arabidopsis thaliana landsberg
acatgcgggtagacaagtcactatcgtactaaagaaagagacatgtcctaacgttgggtcagctttaaacacaggggatctggttttgacttgggcgcttaagcttcaacggctacatgaggagtcttctaggtcttctagaagagcttaaggtgaagaagagtttatatgggcttctctcattgtgatgttgtacggatgggcttctctcattgtgatgttgtacggatgggcttctcttcgtccgtacggtcgtctaggttaacttgcagaaggggtttccttcattaggttcaatactccccctcaagcttaaccggagatgagtcgagattaagcttggaaccaaattcaaccacctcattaaaaaccttggtgtagaaaaacctcttgggataaaactacacacaagggaaaaagagtatgggatatttgataagaggatcatggtcgggttagatcaactaggccaagtttgttgtgaatatattcacacaccttggtgctcgctcctttggtgaagacgtcggctaattgttcctcactctcagtgtaatgtggtaggatcactccgagttgtacttgttctcgtactttgtggcagtctacttcaatgtgctttgttctctcgtgaaacaccgagttggaggcaatgtgaattgcagcttgattgtcacaatgcattggaatggggtttggtgtatcaatgccaaagtctttaaggagagctttcaaccacatgagttcagtagtgagctttctcatggctctatattcggcttcagcacttgagagagacactactttttgtttcttgcttctccatgttactaggtttcctccaatgaaggtgcaatagcccgttgtagatcgcctatcttgttgatctccggcataatccgcatcacaatatccaacaatctccgtgtttctattgcatcccatccaaatgccttgaccaggagctcctttgagatatttgagaatgcgattcaccatgttccaatgatgtattgtgggagcttgcatgtgttgacttactacattaacaacaaaacaaatgtcaggtcgggttatggttaagtagataagtttaccaacaagtcttctatatcttgtagcatcttcaaatggtttgttatcatgctccccctttcgtttggccttgtaatcgtcctctagtggagtcttggccggttttaccccgagtttacctacttgggcaagaagatcaagtgtatatttcctttgggataagaagagaccttcctttgatctacaaacttctatcctaaggaaatattttaactcaccaaggtctttaatatcaaaaacacttttaaggaaagtttttgtatcttgaatacctaccttgtcattcccggagatgataatatcatctacatatacgagaatgactactatacctttttggcttggtaaagtgaagagagtgttatcggcttcagaccttttgaaccctcttcccatcaatgtggtgttgagtatgtggtaccacgctctcggagattgctttaaaccgtagatggctttcttaagcttaaagactttattgggagcattaatgtcttctagacccggtggtggcttcatgtacacttcttcttcgagttctccttgaagaaacgcatttttaacatccatttgccggagatgcccactcgagattggttgccaaggagagtactactcggactgtatgtaactttgcgaccggagcaaacgtatctagatagtcctctccatacgcttgagtaaatcctcttgccacaagtcttgccttgtatctttcaatctccccatcactcttatatttaatggggaagacccacttcgaggtgacagctttcttacctctaggaagctcatcttcatcccatgtatggttgttctcctttgctcgcccctcggatgcaggagcgttcctccatacttgacgagttatagcttcttcataagtttgagggatccaatgttggtctacttttccaagaaagacttgatgttcttcgggtagatgagctagggtgcacacaacttgaattgggtgttccacggcattgtcaaagtagactaggttgatgttgttagaccctcttgtctctaaaacgttcac

SEQ ID NO: 25907 - DNA, 1181 bp, Arabidopsis thaliana landsberg
tgtaaaaccaacatttctgaaatactaaccaacaataacttttcttttcttacataattttcatatactttccaattcaattatttacatgtaaaccaaattttaacagttaaaactaaaatatcatgtacaaacagttcaaaggtcaaaccatatataaaagaaatttttagttttgtaacacattaatttgtaattaagtatccgcgattccgcgtacaataatccttttaacgtgtgatacatcgattattactgcacaaacagtttttagttttataatggattgatttgttttctattatgtaataattaaattttattcacataaatcattttagatatagtataatttataatattttagaatcaattgaggttgcttttgatttgtataaaaaaatttgaagtaaggagaaaacaacaacacaagttcatatcattttattgtcatgcccattttctatatatacatccatgccacctaaaccctaacacacataaaattctcatcccattcgtacaactcccaaaaaaaaaccatgtccgccttcaccacaaacccttaccgtcgccgcctagcttcaaccaccacaagcgcaacggtagccgtagactgccataaacaagttcgttcatggcggctccttcgcaccatcgcccaacttctcatcccatcttgttactgcacaatcgtcgatccaaatgatagtcaagaagacaaattatctcaccgccaaattaaaccaagaacctcttccgtctactcaaccgccacaaactccacttttaccggaaccatattcggtttccgtcgcggcaaagcaaacttctgcatgcaagcaacaaactccaaaaccctaaacccaatcattgtcctcttagagctcactgtccctaccgaggtattagcccgcgaaatgcaaggaggcgtgctcaggatcgctctcgaatcaaacaataacgacggatatgattcacatgaagattcttcctcttcacttcttacaacacctttatggaacatgtattgcgacggtcggaaagttggattcgccatcaaacgagagccttcgaagtctgagctagctgcggtgaaggtgcttactccggtggctgaaggagccggagttgttaacggagaatagataaaccgagagaaagtgatcatatgatgtact

SEQ ID NO: 25908 - DNA, 942 bp, Arabidopsis thaliana landsberg
ttccacgcaattagggtttatgccacacagcgatcagctcgaattaaacctatttaactaaagcatctcctcaaaagaaacaaggccaaaacagttctaaacaagaactccagaaaacaaataaggaaggatttaaagtttcgggttcgagtttgagaacaatacagaattgaatttaaagtttaggttctctcttttctcgatgagctcttctacaattgatcccgattatttactacccagaatcaaagaaaactgacgaaatcgatcgaagaggatgaccaagataaattaagttttaatgggccttgtgaatactactaatgggcctatctatataacaaaaatcgcgccaatttgttttcatgaaaatggttgattagggagagatatatgcttgactgaccaaaatgtaaacaaaaaaagcttacgaaacgtttgatcatcatctgataaattgattagtactgatttattccatcaaaatcaaactcatacaaaccattacaatcttcttagtgagacacaatacataaattatatatgaatctactacgattatttatattatcatcattaattatattgtcctagagggcattatttaaatatattagccattgcatacagaaaccataataaatactatatgataaaaacacactgatgaaaagtgaatcaattaagtaagtagaatgttggagtcgtaggtggctccggcggtccaatcagcgggaatagcgttcggcgattggatccaattgactcctgcgcttccgtagactaagaacctcaatgtgagagtgcctctaggtggattctgcaaatcatgaaccgctccaaacactcttctcatacgtctccactctttgcaatcctcctaaaatcatacatatacatgcataccatagaaataacgtttaactttgtttcacaaaatca

SEQ ID NO: 25909 - DNA, 1679 bp, Arabidopsis thaliana landsberg
tatatacctcttcttggcgattcctcaggcccttttgggctctcttcattccccacaagcacatcttctttactgtccactttaatcacttctttttccattggagatctcatccttttacacattgaaccatactcgtacacgcaaaagtggaacacaccataaccatcgaactcaaactccaagaaaattggctcagtcacattctcgtccttgacgattttcttccacccgtctcggagaaacactgtgttaccgtttgctttcatttccatcctccaaatgttccccgaggacacacttttaacagttaccttccgaggaagaggcttccctgagatcttgtctgaaaccaaaggtagattctgtacaaaacaatagagaaacacacatcttactttgaacaacactaacataatttcaaaaccatatcataccaccgatggatttgtcacatcacataaacacacaacctaaaactcaaaaaatgtctgctaaagctaaaactttcaagattgttcaatacatatcattcaaaactcggaaaaagacaagatcttgcaaaaacagaacggaaatgctctgttctaagagatttaagcaacgtactaccatgtcatccgcggtttgatttggtatgtaaactctgaaaaacttcagaactgtatcttgtaagctcatagtttccgatagcgtttttttacttgagttctcttccatggccgtgagcccgtgaccgtgagaggcttgagtgttagaaagagatagaacagaggagagagagaagaagaagaataaagaagaaattgagattcgagattagatgatgagagagggagagagaaacattcaatacaacacaacacacaaagtcatgaaaatagaaacaaaacagagctctgctcacttagcgtttcaggtggttcaaaagggaaacaatgttggacgtaaatagtaatccctcatcaatttctgaagctacgtgctgatattaatagaaaaagcaaatggactatgcccatacttattgggcctcactgaaaacgcccatatatttttatctaaagacatacgtttcgtcatcgcatcatacacgaataatttcgtcatgttttctattattttgtcgtaacggaattaatcaattattttctgtctcaatttttcctattgccctatggaaaatcaaaaatgcattgaattcagaagaaccctaaactaaataagagatcttatggaattgtttccacaagcccaagccacttatctccagaagatctgctctgatcatagtcctctaatcaataacctcttaggggatacccggaaagcttgggcaggttttaagtatgataagagatgggtgcaacgagaaggcttcacggatctaatggagcagttttggagacatagtgaaactggaaatacaaagtccatgatggagaagctggctggatgcaggaaagagatttctcgctggaaaagacaaacgaaacctagttcagcaataagaatccaggaacttcagttcaaaatagatgctgctacaaggcaaattccctttaatccccagacactgaagatcctaagaagagagctcaatcaggagtattatcaagaagagcatttttggaaacagaaatgcagattcgattgggtccacgatggtgatagaaaca

SEQ ID NO: 25910 - DNA, 1806 bp, Arabidopsis thaliana landsberg
ctcgagctgtaacgccgccatctcatcttgagccttcatcaacgatttcatccttgaaaccgcagagctcgcttctccttcttccctacctcctcctcttttctctgactcatgatcttcatagaccgcgcaagaatgcacatgcgtcccataatcacactctttgcagtaataaacccaaagattttccgacattttttcttcacaaacatcacatatgaacttagcaccgtcctcacgacctttgcatggtgtgttgtagagaagcgtgagtgggtgttcgtgatcttcgcgctccacggtctcagggataaacgcacatcccacgtgaacatggtatttgcactctgagcaatggtaagtgaaagcagatccatactcaccgcacgcatcgcacgtgtaagtggataggccattcggtggagaatggagcaaggtcaaagggtgatttgtgtgagacttgtgatggatctcaccgggaaggtcgaaacatgacttgtgcaagaagtaatcgcactctgactttgtacacttgaaagcttgcccaattagatcatgttcgcatccggagcaaatgatctcatcttcttctttggagttgaagacccgcaacggatgattgtgactcgggtgtctcactgatggacggttagtttttcctgaacccatattgttcttgatgggattttgaggctttgagggagaattgcaaactataattatatataccaaaaactgaggctattgaccaagttgtagcttagatacatttgggaaactatttaactaacatagtattagtttataaaagagagttgactttgacatggagaaacatatattgtaattaacatcaaattttatattgttagcaacataggtattatatgtagggttctactaggtcaaaaatcaaaatctctcatactcaatgcttatcttctgcatatatactccattgactagactaggtacgggttaatgcggctgacgtgaccaaggaactttgtgggggataattctatacgtttaggaaggaataattcaaagttaaggaaattcttgtaattagtagtcatgaatatagaagttggactttgagtacttattacgttttaagaggtaaatgcaagtgctcagttccatgacagtattttaatttattgacgttttacggtagcttgtagcatgttagaaaatgacgtgtatgtaaacttaaactagtactgtaaattgcaggttaagtatggacagaacttgactaataagatgtccaaatctatgtgccttttagggccgttatgtgactttccgagttgatgatatatgacctttgggtttgattatgactttttgggtcggattgtgaccttttgaagacagttatgacatacatggtcagattgagatcttcatggtcgaccaaggtaaaatagtaaaactaatgtagaaataaaaatcgcttgttgatatattgaagtataggttgaattgaattgttcgttgacattgattttacatatgagtagatatgatgcccattctgcgtatatgtacaacattcgttattcatatttttcttatgatgcaagtgaagagtagttgtttgaattagtccattcaagactataataatagtataaactaaaatattaatttcatatagatcaataattaaagaaagtttcgtaatatgttatttgtttaacttacaaaaaatatattttttttttttcaaaaatcttaaagccccctcataattaattacatgtaagaattttgttttaacattttttctggtttcat

SEQ ID NO: 25911 - DNA, 3474 bp, Arabidopsis thaliana landsberg
tgtaggaatgtagctagtactgacttgtacaggtacatcacataggataccatcaggtctacgaacaaatcgatcagcaagaacaagagtgatttgcgcaggctctaaatttgtcaaaccaagccaaagtgcaactgaacgtggcatcaagttgacactagaaccaagattgcacaagcatcgctcaaaactctcgttaaggataccacaattgagaacaaagctacctggatctggaagtttctatggaatcttgttctgaataatgtcgctaacctgtgtagacatcgtcatcacagctttctcaggaagcaaatccttagtaaccatcctcttcacatactgtctgatcataggagaagacttcacaacatctataagtggtatctctacaatcaacttatccatcatacctttgcatctagcatcatcaagctcttgtttggacctcctgggactcttgggaaatggaaccttgggtttggtagcccttcctgcaactgaaatcgggttttggagaattcgcacgtttgggctgggttggtgttgatcgacaccctgttggtgtcggtcgacactgtcacgttctgtagtgtctaccgtggctggtgtcgatcgacacccagtagtgtcggtcgacactggtgtctggtctacaaaaactgcaacatcattttcttctaaattaacgattttggctgcaggaagctctcgttgaagcactggatttagatgttttccactccttaactcaataacacgaacatcttctctatacattctcaattgctttatttgattgttcaatatttgaatcttcccttacaaatcttcagataaagcaaccaatttgtgatcaatatcggttatttgcttcatttgacctttgagaaactgttcgagcattgattcaatcgtcttagtggtgtcgggtggagggtgggcttaggttgaagaagcataatcctgaatgaagcttgtagtttgctgaaccggtttctgatgtgtatattgttgattgaagctcatgtatctctgttgattcatcttctctgaagtggataaactgtcaacctgtgcaacatactgaacttgcgttttccttgcaatgtcaacgcttttggtactaatgctggaatctaagctgtcaatcaacattgttgcatcttctggatatcttgacatgaaattcccattactagctgcatccaaagacatctgattatgcaatcaactcctctgaagaagatacctaacaactgaacttcaccgaaaccatgatgcgggcaatctctctgatatcctatgaatctgatccaagcggctttaaatgcttcagctgcttcttgagagaaggtagagatcttcattctcagctcctcagaccttgcatcattataaaatttattgagaaaagcaacctttattgctttccaagttgtcagagatccaggctttaacagcataagccaagaagatgcttccctagcaagagaatatgggaagagctgcagggaagatagtcacaagcaagaccttgtgcttgaaccatcgaatccaagtctgcatctgaagcgatatgatccatcgggtgttagaccatgaaaagggtgcatactcacaagagtaaagtatgcatgttttatctcgaaatctgttctttcgaaggtaggtggtcgtattgcagaccgattggtttttaagagatctggtctgttgtagacttgtagtcaccaagagtcatccgacgaccatctgctctgatttcttcttggtgtcgagcgacacccaggttgtgtcgatcgacaccctcggcgatttctggtatcaagttcccatgttcatcaagtttctagccctcatcattgtatgcctgaccatctctgtctcgtaagactccagcagcattaggtctgataatcaatcttaacatatccactgattgctagctttctggttgttgcgttcgaaatccttttagctcatttcacaagaaaaacaagaaaacgtacgcgtgagtgacaaagtaaaagaaaaatttagattaaattctacacctaatctaatggtgaatcgaagagaacttcggcaacggaaccaaatttgatatgagccaaattactctctcaaataaagaggtcagttatagcactcagggatcgaattccaaaaagttcttaaaacacacaatatattaacagtttcgaataaagctaaacataaaatattataaaagtaaaagacaaaaaagcaataaaagagattatttgtagattcagatgattaagacgttgggtttagggaaattctcagcaaatatcagaatattaaatctagcagtaaattaggattattaacgaaccattctagaattcaaaacactaatatagagtaaccagtggcgttccgcgaaactcactatgcttaatagtatttatcccaacgctcttgtaaatccttagaactaagcaagcattataatcaagtttgataagttcacctaagtaatccacgctagcctgcatctaaatactaggctcatctaagatagttccagtaatagatacctatgtcgggtatacctattatcctacaatcaagttctagttacttactctagaactagcattaagaacaatcaaagatgaagaaatctaaatatattatcctaacggggtttttgatctactaattcatctaaatccgtaattgagaatccccaaacctaacaagagaactactcagacatgattatcaaagaacaaaacatgtttgaataagaaatcattgtaagaaacaataagagaatatagttaagaaagatcttctctaaagggagtctacaaaaggttttgctcccaagaataaaagagataataagtgttaggtctaaacaatgacctttaaaactatatatatgacctaaaacgtgatgggccttttttagaaataagggaaagttctaggctgaatttgaaaatcttcaaaacatcaataagttgcgcaattgaattgtcgtcaggaggggttgtgtcgatcgacacctacgtcaatttttgtctccgaattgctgctgcagcttaagttatctgatttgcaccagaatgctccataatctccaaatgcattccaaacatttaaagacctgaaaaagactagaaaagactctacaaataacaaaagactctaaaaactatacctaattcatagctaaaagcattgaaaatcgaggtatatcaactccccaagacttagtttttgcttgccctcaagcaaaacacaaaagccaaacccgtggaagaggtttgaaaacacaggaactcccaatcttctagcttattatcctgatcatacaaatcaattctatgcactaaatagttctagccaaatcctcaccactatgtaattctccgctagcccacacaacatcctagattccataccaaagcactcaactatatccattataaagtt

SEQ ID NO: 25912 - DNA, 580 bp, Arabidopsis thaliana landsberg
  unsure (1)..(580): unsure at all n locations
ccaccgttgaatctttatctggtagtcccacgattgttttgtccgaattttagtcagatcagatattgcatcaagcttctacggtcatatgaagttgctgtagcaaagttattttttcttctttttgctgattcggagatgcattgataactttattctgaaccgttgatttctcgatcccaccggttaatcactatctagtagcgtcaaagagctttctgtaaatttctagcgagatcggacgttnnnnnnnnnnnnnnnnnnnnnnnnnnnnnnnnnnnnnnnnatcattgtttcctgatttcggcagtttagatgattttgggccaacttcgaaggcaatttgcggatggggattaacaccaatttgtaatccgctaacggaaaatgattccttgtagtgagatattcgcagagagtacttatttaggccttaaatcgttctgatgcgtcaggaaaatgtctcgcaaaagctctagttgcacatcagatcttgtttcagactccacatattgcggactattccaattgtttcttgaacaggaagaaagatgaataacttcttgatcttaagtccgtt

SEQ ID NO: 25913 - DNA, 2044 bp, Arabidopsis thaliana landsberg
agtccactgtaagacagagcccaaaacgaattgttttttatcttcttaatttgcttttaaatttggggttgacattaagacatgactgggttttgcttgtcaaatccatgtgttgtccagcgggtaatcaacccaaagttccggatccggacccaacagtaagcaacattttacgattcgttgtttttgaatcccaatgaaaaaaaagatggttatttttaaggaatggaaaaatcgagaaaaatggtatcgtgtcgcatcgaggacttattacgtatggcgagagagctcaaaccaaaagatcaccgcctcgactgattcatcttttctcctggtatgtattttggaaaattcgtctcttgctttttatttgatccagatcagaaaacgttgtgcagattgattctgggtttatcagtttcttaccaccatagtactctccatgttcttctcaattggaaaattcctttcctttttgtgtggcaatttacacatatctgatatcctcttcgtgttgctcccaattttgcaaatcttggcaggcttttcttggtctaagtgaatttggagttatgcttctgtcagcacttttaacttcagtgggaatcaatcttggcctctgttttctcttcttcactttgtattcaatattgagaaagcagcctagtaatgtcactgtatacggtccacgtcttgttaaaaaagatggcaagtctcagcagtcaaatgagttcaacctcgagaggcttttgcctactgctggttgggtcaaaagagcattggaacctaccaatgatgaaatcctctccaatcttggcttagatgctttggtcttcattcgtgtctttgtcttcaggttgattgattcattgagcatctgcttcaagtttgactttttttttgtgaaacttcaatgcttttttgtttggcagcataagagtgtttagctttgcatctgtggttgggatcttcatacttcttccagtgaattatatgggaacagagtttgaagagtttttcgacctcccaaagaagtctatggataacttcagtatctctaatgttaacgatggatcaaataagtaaagaactcgaagctatgcttaaacagtatcccgatttctacttgtccgtaaccgatctcttatgcttgtatgtgttttgcttcaggctgtggatccacttttgcgcaatatacatcttcacggcggttgtttgttctctactttactatgtaagacgccttttgtttagtccatccattctactttatatcgcctatatgggaacataaaataatgtttggactatctttgcaggagcacaagtacattttaacaaagcggattgctcatctttattcatccaagcctcagccacaagaatttacagttctggtcagtggcgtccctcttgtatccgggaacagtattagtgagacagtagaaaactttttcagggaatatcattcttcctcgtatctttctcatatagttgttcatcggacagacaagttgaaagttctcatggtaagcttctacctactaaggattctataaggccttaccttttgatatttctggatttcatatatctgttaatatttgcagaatgatgctgaaaagctgtacaagaagcttacacgagtaaaatccggaagcatatctcgccaaaagtctagcggggtgggtttctagggatgtttgggaataatgttgatgaggttgaccattaccaaaagaagctggattagttagaagatgacatgagattgaaacagtctttattaacaggagaggtgacaatttgtctttttgtgactacttgcattcttacaacatattcattcctttttctttgcgcaaacccttataagaagttccagctgcttttgacccctttaggacaagacatggggctacgatcgcaacaaacattcagcaaagaatagatccaacacactggctaactgatgcaaccccggagcccgaacatgttcattggccatttttcactgcatagattgtgagaagatggatctcca

SEQ ID NO: 25914 - DNA, 1462 bp, Arabidopsis thaliana landsberg
tggatcgcctcggtggcttccgcaacggtctaaatttgctatcaacttttaagacatgactcaactcatatatcctattagttttatagaaagctttggagaacatatacacttagggacaatctaatcatagttaatgttgcatttcatttgatttggacgtgatgctataagtgctttatcaataaaatgtgtgaaatttttaattgttaaagatatcaatttttttttgttaagatatcaatttaggtttccatttttctgaatctctatataatatataaaatggcaaacataaatttgaagaaaatcatcaagtccagatgttattttcactttttatccacatataaatttcctacattacctttctatatggttttgatatatacgtacgataatatgtatacgtgtaaaaatacaatcataatttcaaacattacatgcaaatacattcacatcttaagcaaatgcaaatactataaatattctatatactgtatatgttggtttccgaccatgctatgacttacgaagtatttatcacttagtgataccaaagtatcaagggcagatttcatttgcaatacattatccgaagatctaactcgtatgaacgcgtgatatttcaaattcttggacatgtgttttctaatttatttaaagactagatatattatctgcttactgtatctagctagtccattttagaggtaataaaaattaactaagccttaagaaaacgatattttctttaattctgaacaaaagctgtaaagttattattttgttattagcaaaactactcactaactgggtcgaaaaccagccggccaaatcggtactcatgacaagctcacgaatgatatatcatatttggtttacttaatgcatactctatacttttaatcattattctatatcattcactttaagaaaatcttaaccaccatagctacaattcggttgcttactctagagttaaagctccttttactctgatttcgttttcatcatctaacggttagatctgtacgtgttttgatttgtcgatatcttggttctaataaaaaaaatgaaaaataaagaaataaagcaattaaatcatacaatgaagacttcttccttctttttttttgccatacggagaagacttcgttgttggcgactactccaacctcttaataagaagaaatatctttttctctaaagttgtggttttaggttatttctctttctttttatttaatcatgcaatatcttttcatataattatattattttttcttatcctttaaataccctctacttcctctctccaatgacaatccaatcttacaagagtgagacaagcaaaaaaataaccaaaaataaaaaacattctctccaaagaaaatagtaaaaatggaatcttcggtaccaaagagaggcttatacatggcgatagaacaaaacgcccaag

SEQ ID NO: 25915 - DNA, 1144 bp, Arabidopsis thaliana landsberg
actcttcattggcagaactggctcgcctcattaccgcatctaatgcttcggaagcagctacgttgcgggctttcctggcaagacaacagtttataacctgtaaccattggtgcagtaggcaacttttcaaatctggattattgtccagaggtatccatggtatgtgtttctcttcgctccaaaatctcctcaactgcacatgcagattatttgagtgatattatgaaaagggcttcaatatttcacattttgttgtagtaacttctcaaatgacattcaccaacagagttgaactatccactaatcataattcacgagttaattacactaaaaaagtgaagaaggagattttaaatccgaaatttgcaacacaaaacttacttcttcaaccaccctgcaccagaacaaagccattctcctgggtgttgtaaaacttccaattacttcagctagcttaacaacaaaactactagggggagcagcatgaagatcttttgcaaaagatgatctgttggtcggagactccaaatcagagacaatctttctgctgagaaagccactatctgtaaaaaaaaatatgccaaagttgtgggaagataaatagctataactggaatacaggttgatggagaaaaatttcttcgtctaaggcaaacctaccaacattaaacaaggcatttatcagagacacaagtttatcctcatctcctgaatcaaaaccaagcttatcctctttttcaccaagaaccagtgatttcaccgcagagaggctcaagcctcccctctccctcactggtgatgaacttccagatgatgcaacaaagtctttcacattcttagccctttttcctgctctgaaaaaacaaagttagaaaaaaaaaatgagaaagcggagaggaacattatgaaatgctttagccagagaataaggtgaacacatatacttcagcctcatggattactacagattcaaacccactaactaaatctttcaaaaactttttcgccagaaactacatgaaaaagaagtaaggaaagatctgaagtgtggtaaacgttatgtatcaagactcactcgattgctacagccagctgcttcacaacggatgctaaaggaatgctgttcgcatcaaccgcatttaga

SEQ ID NO: 25916 - DNA, 1161 bp, Arabidopsis thaliana landsberg
  unsure (1)..(1161): unsure at all n locations
ctacgaatgttcaacctctccaagtcccactcatagacctagccggtttcctctccggcgactcgtgcttggcatcggaggctactagactcgtctcaaaggctgcaacgaaacatggcttcttcctaatcactaaccatggtatcgatgagagcctcttgtctcgtgcctatctgcatatggactctttctttaaggccccggcttgtgagaagcagaaggctcagaggaagtggggtgagagctccggttacgctagtagtttcgtcgggagattctcctcaaagctcccgtggaaggagactctgtcgtttaagttctctcccgaggagaagatccattcccaaaccgttaaagactttgtttctaagaaaatgtgcgatggatacgaagatttccggtaatagtcaaattagcaaatgttgaaattttatcataaatgtccaagaagactgatataattggtgtgattttatccatgcaggaannnnnnnnnnnnnnnnnnggaggccatgaacactctctcactaaagatcatggagcttcttggaatgagtcttggggtcgagaggagatattttaaagagtttttcgaagacagcgattcaatattccggttgaattactacccgcagtgcaagcaaccggagcttgcactagggacaggaccccactgcgacccaacatctctaaccatacttcatcaagaccaagttggcggtctgcaagttttcgtggacaacaaatggcaatccattcctcctaaccctcacgctttcgtggtgaacataggcgacaccttcatggtacttatatatatagtcttcttattatggtcaatacatgcattagtagatcaaattaatgacacgaaacttataccatttttttttcaatcataggctctaacgaatggaagatacaagagttgtttgcatcgggcggtggtgaacagcgagagagaaaggaagacgtttgcattcttcctatgtccgaaaggggaaaaagtggtgaagccaccagaagaactagtaaacggagtgaagtctggtgaaagaaagtatcctgattttacgtggtctatgtttctcgagttcacacagaagcattatagggcagacatgaacactcttgacgagttctcaatttggcttaagaaca

SEQ ID NO: 25917 - DNA, 1222 bp, Arabidopsis thaliana landsberg
tgctcatgctccatctagaaaaaaatatgcaaaagcaaaagttttgatgagagagtagtgcaaatataatgaaaataccctcaaagagagtaaggatctaaaactatgatgcagcaacaacaacaacaacatcttccaagctaacacagattaataaagaaacaattctcaaagcgaagacattccatgccaatagaacattacattccgattaattcataatcgaaggaaaaaactaacaagatcatcaaaaactattacagagattctacgcgaatatataatgacattgagctggcaacgaacagatttgtgagtaccgaattggaaccttggagaagaagtggtgatcggaggaagatttcaatcgattacgttttttgatcgtctatgaattgctttttctttatcagaagaagaagaagaatcgaggagaaagattgaacaaggcaagaggaaggaggaggagctcagcggcgtcaagggtatagtcgtcattattgtctctaattgtttctttttttttatgacatcccaccaggccactcaccgaatctcagccgttggatctgcttaccaagtcgccggattcaggttcttttttttttttttgtatctatctgattattataaaaaccaaaattgcataaggtaataagaattatattcgttaaaatattttgtaatcaatttcgaataattgaaaacattgattgatagcactcttctgttcaactacgaatgtgacaaagatagttaactttctcttgatttctaggctaaataattaaaaaatgttactacattcttatgaaatctaacagaaattgagtcttatcaatcacgcacaatatcgagaattaaaaatacaagaagctggttaaaagcataaacatataacaattggcatctgcggttgaaaactgtgggcctatatgttccaaatgtggcccataaaaaaatgaccccagcccaaactaatatggatgtgacagttttaagagtgacaaactgaatttgcctgacactgttgccaattttgggccttatagtatataaatgataaatcagtggtattcactttttacgtttttaagcgtaattttgctatgctttgtagtaaaacttatttagtcagagtcttacagacaacaacaaaatggaactcccaaaagttgattattgtaacatcgttataaaatgtgcgattaggtttattttt

SEQ ID NO: 25918 - DNA, 1396 bp, Arabidopsis thaliana landsberg
cacttatatttgcaaattgattctaaatttactcgactttttttttggcttatcaatgatttttagttgccagagtctttctatcttttttttgtattctgacgttagactaagttgatgctggatgtactcaagttcaattttaaattttcacaggtagtcagtgtttttgtttcgaactcttccaacatgcagaaggaaattgctggtgatgctccatcagcaccaaccactcgtgttcggcatcggaagcgaaacagcgatgtatgtttgccattattcaatattttagctgtcaaattaaatcggaattcacattgtttttggcttagttaagttgcttttgttgtataaggatttatttggtccttttctacttatgtgatgtagaagctattctaagagtacataagctacttatttgcttcattttggttgtaaattcaatcaaatttctggctttttaggttggtgcaggggcaggcaaaccaaatggaaaccatttacttgtcaatgacagcaaaaaatacaaatcgtttctcattcgagcatactccactttctggatgataggtggttttgctcttatagtttacctgggtcatctctacattacagccatggtggttgttattcagatatacatggcacgagaactttttaatttgctgagaaaaactcatgaagataaacagctccctggttttagattactgaattggtaattatactgtctcacttctctcaacattctgagttattttttgttttgcttttatgtgaattatgctgaaatggtatcatattcttagtacttttctatttgttgaaacgattttgcatttgactactgattttgtttctgcaggcacttcttttttacagcaatgctctttgtatatggtcgaatacttagtcaacggctagtcaacactgtgactccagacaaagtcctatatcgactggtcacaagcctcatcaaataccacatggcaatctgttactccttgtatatttctggttagttgttatatgaccttttgggtttactgattactgtgaggagagcaatgatttttgttcactagttttacttaacataatctctcctttttttgctgtggaattgtaggctttgtttggtttattctcacgctgaaaaagaagatgtacaaatatcagtttagccaatatgcatggacacatatgatattaattgtggtgtttactcagtcctcattcactgtcgccaacatctttgaaggaatcttctggtagtcacctattccttttaacgcttcttacttgtctgctcccccctttagttcttgtgttattttctacttgtatcaaggttatgacctgactaaaagtctatttactatagtggttgctg

SEQ ID NO: 25919 - DNA, 1451 bp, Arabidopsis thaliana landsberg
cgtaattgtatttttatactctaatgggattatggataaccgaagtcgtcttttgcgtgcccttcttttatggatgataattgtttggctaatcactctaaacaaaaacgaaataaaggattattgatctatagtctactctgtaacactttgttacatttctaccgaaactgttccgatcagtccataaaatttatcccaaaaaaaaaaatgattttgatctacaaagaattccgtaaaattaatgaacaatctaaaagaaaatttgtcactttgcaagtattaattacatttattgtttcctcttttaatagtttcatcatacacctatactactttttctgttttgttaagatgattccaagattctacggttttgtaattttatcaatcaaaaacttgaattattcaatgaaaaacatgatttctaaaagattatatgattgataaattacatatcaaggaatgcgaaatctatatattatgctactctagatattagtatatatcccaaaccccaaaccttggaaacgtaattaatattttaaaagcaacagaccatagcatctatctctgtgtctagtgtaggttcttaggcacagtcttaggtaccaactctgtcagagttttgatgtatattggtatgataatagacgtgtgaacctccctattacagctcaaatctgtcatctataatctttggaatttaatctctttctaatctccaaacctataacgaagcaaggcccctttcatatacatatatatcaacatgcatttttttaattttagtctatatatatatttgaccaatctctatcatttttagggttgcttaatggcgttattcattagtcattcattacattcgcactttcgttaatcatgccctcagttttttattcacccaaaagtccattcactgtattctcatctgtttttgaaaatattccatcgatcaaaagtagatctatattacaaaactttataaaaatcttgttaattaatttaaacagctttaagattgacaaatattagatcgacgagttttcatgctttatgcgtacctatacgaagaactgcttattatttacagttgaatacaagtatatacatgcaatctatcaatattgtttcatagcatatgaattctgcttcctcgttttttctaatttctttagtacatatagagatattgtagattcacttataatacactttgatggttcttatggactgaattaaccaatctttaaacgattttatcattttcatttatgaggaattatgagatttataaattaaggaaattaattactgatatgttaacattgtgtagtggtgtttaaaacacgtaatggaaacatacattaccctacactggatcacaatttccatataatttgtggttgaatcaaaaacaacaaatattttggattgtgggggctctg

SEQ ID NO: 25920 - DNA, 1180 bp, Arabidopsis thaliana landsberg
ccagccttctcctgcaaccacatcgagaatcttaccctttttttgccctttacaaccttccagaagcagcagatcatccttagcagcaacttccggtattgacagaattatggcagcagccttggaaagccgcagctaccagcggcctcagcagagatttgcaaatccgccttatgttcctatgaggcaatttagatcgcaatgccatgggatggctccacctgtcacaatcagaaccgctgtaccggtcttctctgcacctccaatgcctcctccaccatgtacaaacaacactcagctaccttcttctgtgtatgtcccatcgctgatgcgaactgcaccacctgtgaggatcgcgccgcctgtcacaatcagaaccgcggtgcccgtatttgcttctgcgccaccggttagaattagaaccgctgtgaagcccacagttgaggcaggagaaacccgcatatcatcagtccaagaaaaggagagtataccagtcttgcctgatagtcttgaaattggagtagaaggaagtactataacaattacagattgtgagaaaacagcggcaaaggaaaccgagagagcagagtttaaggattcattgaaaggagaaccggagacagcaagagagcgactggagaacctaaagatctgatgccttgaagactgtctctgggtttagttttttttgaggttggtttctgaaaattgttacattagtaatctcgttcgttattatactcggtggatcgagtagtttgataatccgaaagatttgtattatattggggagttttaggaagaacctggccatctctggattgtagaattgtatcagtttcgcttcctattcagtttgtttgtgtcctttttctcatattttataaatctgttacccatcgttgttccagcagaatcaagctctttgtcttacacgacagctatgacacatatctcaatgagtctttggaacttcgaatttctcctttagctaacaaattcagacaaaatatttcagcacacgagccatatgttttatacaatatagcttttgcacttcagtcaacatatcataataatgcattcaacatctgaaagttcttcaatcatacaacagagccgaccagatagtgtcattgtacaacacagtgaatgaggtcgtggtcttccaaacaattcc

SEQ ID NO: 25921 - DNA, 1578 bp, Arabidopsis thaliana landsberg
aatttgaataccaaaggctataagaaattatgtagaacccttttaaatgatttcgtaactttagctacatgttacatattaatttaagttggcgagaaaaatatgacaattagtggttgaattgtaaatatatattacatgtagttttttttataaattatctaaagattaatggtcattgaatcattgatcgtgcatcaaagatactacaaaaagaagaaaatcaaatatataaagaaagaaggcgagtcattttatgacaacgagaaacagaacatcactaccaaacatctccagctcagtttcttcaaaataaaaacagttaatctctctaaaacaattttttgttttctctctctcttaaataaccagagagttcagaatcattttgattctctttgtaatctttagttgttgtacctaacatcatggctgaagaggaaccgaagaaggtgacagagaccgtgtcggaaccaactccaacaccggaagttccggtggagaaacctgctgctgctgcagatgttgctcctcaggagaagcctgtggctccacctcccgttcttccatctccggcaccggcagaggagaaacaagaagactctaaggctattgttcccgtcgtccctagtaatttgcttactatcttgtttttcaacagaaagattattactaactcaagtttggttcaatgattattaaaaacttctgccaaaatatgtttctattaatcaactgattagcgtcgtcaaatatacctgattttcttaaagattattactgattacatttccgattaaaaacagaattttataccttttctttaatatagaaaaataaacaagtttcaaaattctgtaattatgtaagttttaaggttaaaaaagaagaactcaaagatttttgttcttctctaatgtgttgttattaatttttctttattaatacttaataaaaaatttattttgtggcctaagaagttgagggaagagaagaaagaaggttcagttaatcgaggtaattaacgtaatagattcatgactaatattaatattatctgaaagtaaaggatcatgggtataatataaataattagtatttttgtcataccggggaacaattaattaggtggtttgtgtgtcgtgttatcatgggatgtgtctaaaactgaaagatggtttaataatattcactaattttgggtgacataaaaaggttgttatatggacatgtgtgtttatcattgtctcttatttttcccacaaactctgattagtgattgtatttgcttaataattttgggagtgaagatgctgttctggctagagttgagacagagaagaggatgtcacttatcaaagcttgggaagaggctgagaaatgcaaagtggagaacaagtaacgtttttcatgttaacatttatccataaatgtctattaacccgatttagtaatattttgcaatgaaaccaagatattatcattaaggtcataaagaatatattttgaaacagagctgagaagaagctttcttcaattggatcatgggagaacaacaagaaagcagctgggaagtta

SEQ ID NO: 25922 - DNA, 2697 bp, Arabidopsis thaliana landsberg
caaaaaagattggtttttgtgtttgaagctttttaagaagagaaaaagagagaaggagaagtgttgttacctgaagaagtaagaagactgagagtagaaatcaggagtgaaaggaacggttttgaagctgctctgcattgttgttgattcttagaagaagaagatgatgaaagatgatgacacaaagggaatcaggggaaaaagaagtgagctttcttaaggagttgggttatcagaagaagaaagtgaagttaaaagggaaggagggagtgaggagagaattcattaaagaggtgaaaagatggcgaatcagtacggctggaggattcatcattaataaatacgaaattactatattgtgtgtgagagagagaaagaaatcagagaagagattttgagatttatgtttaataaaaaaaaagtgtaaatgtattgcgtctgagagggtgggattttagtttcccaataaccaacacacacacccacgtaccctttgttttcctattttaaaaatatgttactctataaactaatttttccagatttttactacatctagtgtagttaattttgtgggattataatgcatcagttacctttgttttgctaatgaatgaggaaaaaataaaactaataatgttttgctaatgaatctattgtaatactccattttcaagaactttaaaaatcttaaacgatcaaaatattaaatgtatgtaaggttggatcttaccttggtgaaaaaatcaacaaagtgtctaagtataggaaaaatgtgtaagtttagttttagttgacaaattttttttaataaaaggttaggattagtgattattgagtcttttaattatcttacgtattatcaaaagcctaataaagctagtttctaagtttgatctcgcaatttctttcccatgtcacattgtatatattgtatgttaggacatatggcttatgaattatatgagatgtcaaatattttgtgacattttttgtaaactattctaacacaatggttcatgtattatagctagattagcagctaaaatatcactcctcaatatacgttcaatacgaagatagcaaaacaaaattgaatatgaatgagttcatgctaattttaaatcaaccatatgtgtcatgtgtgttaccgaattataataagatgtggtttagtttttaaattgagacataatggtgttatacgacacattagtatttggaattattatatggtctttaaccaagatatgaagatagaatcgagaatgacgataatttggatgtttgctgacaatgtgtctcttgaaacttgggagtatgttcatatctttctttctctaatatttgatttattatttaatttaattttaaagtttctataataagccttcttttttcttgtgcaagtcaaaatttagggtttgagaaaaataaaaaattaatttgccacgatattaggcttatgctttgattttaactgcttggggggattgttattctttaactttggttttcatataattgttataaaccttaacgcatggaataaatatgtgtaaaatttgtatgtatatgtaatgcagagcctggataattcagatacagagagtgtcatttccatcttgttttactgtgtctgccaaagttgaaaatggcctctcgaccactgccactctgagtttttattttttcccatgcacaaaagattacaaaaaatataattatttaatataaataacaaagctaatgaatttctctaatcaattttcaaatattataaaaacgcaattaatgcacgatttagttgataactggatatgctcatgaatcatgatgtattgttgaaagtttcttcatctctcatctctccggtaaaaatgtcaaaagcctagcctaagatgttattttctgaatgattatttttatgtatttaattatataactaatttgaagttaaaaaaaacacagatattaatgaaatctagttaccataaagcaggcaatagtctggctggctggtttctgctctgaagctgatgtgatgttgatggaaagctaattaaaaaatctgccaatatttttaattttgttttataaaatcatacacaaataaatgaattctaatagtatccttattgaatgataaaaaccaaataatttttgcagtattattaactttttattcagtagaccgatgaagaagagcattaaaaagaaaagctttgcttgaaagaaacatcttcctcattataaatgtagaaactattatgagctttgtttctttttaatgcaaatttattactgtctcctattctaaaaccagtaaactctcgtttctcccggaggcttcattgacttttcttttaccaaatatttacacataaccgagaattggatacctattttacaccaaaccggaaacgtaccaataatgaaattggttttggacaagagagtagtagtacatttggcagagtcaatgacgtctaggctctgtttagtcttgtgggtattttcttgttttttactcgtcagaatccgatcttggctctttcttctcttctcatttctttttggaacatttgggagaagtaaataatctttagaacatttctctgcatcatatgtaccattttttttctttcataaataaaaaggtgtagagtcttgagtgtttttcttttccgcagataa

SEQ ID NO: 25923 - DNA, 1628 bp, Arabidopsis thaliana landsberg
tccaccggcgagatccctgactttctctccggcgcgtgtgatacacttttttttctcgatctctctggaaatcatttctacggtgcggttcctccattcttcggttcatgttctcttctcgaatcactcgcgttgtcgagtaacaacttctctggcgagttaccgatggatacgttgttgaagatgagaggactcaaagtacttgatctgtctttcaacgagttttccggcgaattaccggaatctctgacgaatctatccgcttcgttgctaacgttagatctcagctccaacaatttctccggtccgattctcccaaatctctgccagaaccctaaaaacactctgcaggagctttaccttcagaacaatggcttcaccgggaagattccaccgactttaagcaactgttctgagctggtttcgcttcacttgagcttcaattacctctccgggacaatcccttcgagcttaggctctctatcgaagcttcgagatctgaaactatggctgaatatgttagaaggagagatccctaggagctcatgtatgtcaagaccttagagactctgatcctggacttcaacgatttaaccggcgcatcccttccattatacctgactgtaccagtctcatctggatttctctgtcgaataaccggttaaccggtgagattccgaaatggattggccggttagagaatctcgctatcctcaagctaagcaacaattcattctccgggaacattccggctgagctcggcgactgcagaagcttaatctggcttgatctcaacaccaatctcttcaatggaacgattccggcggcgatgtttaaacaatccgggaaaatcgctgccaatttcatcgccggtaagaggtacgtttatatcaaaaacgatgggatgaagaaagagtgtcatggagctggtaatttacttgagtttcaaggaatcagatccgaacaattaaaccggctttcaacgaggaacccttgtaatatcactagcagagtctatggaggtcacacttcgccgacgtttgataacaatggttcgatgatgtttctggacatgtcttacaacatgttgtctggatacataccgaaggagattggttcgatgccttatctgtttattctcaatttgggtcataacgatatctctggttcgattcctgatgaggtaggtgatctaagaggtttaaacattcttgatctttcaagcaataagctcgatgggaggattcctcaggctatgtcagctcttactatgcttacggaaatcgatttgtcgaataataatttgtctggtccgattcctgagatgggtcagtttgagacttttccaccggctaagttcttgaacaatcctggtctctgtggttatcctcttccgcggtgtgatccttcaaatgcagacggttatgctcatcatcagagatctcatggaaggagaccagcgtcccttgctggtagtgtggcgatgggattgttgttctcttttgtgtgtatatttgggctgatccttgttggtagagagatgaggaagagacggagaaagaaagaggcggagttggagatgtatgcggaaggacatggaaactctggcgatagaactgctaacgaca

SEQ ID NO: 25924 - DNA, 1464 bp, Arabidopsis thaliana landsberg
taacagatatagaaaaaacagatacaaacgctgtgataatcaatacccatgatgcacaaatctcctaagtactacggaatgtgtgatcaacagatggagatatagttgtattacataaaaaagcagtacgacaattgtgtgacattacctgtgcagccactggcgaaggcgtattatagaatgacatgttcgaaacacctccattaactccatgagaatggaaatttccggagatatctttaaggccatggctttgtgtgtgtttagactgccttggactataatcttcagaactcgtgtttttagtagaagttgaattacgttcctcgttgtaagtgtttaagccgagggaagttgacagttgttgcatgtactgcttttgaatggagagagcagctgtttcaccaaaaactgcagttgcttcctcagcagcacctgaaagttgagcagacagaaaagtgtaagagaaccataacaaatctgtgaagtacgcagaaaacggattatgttcacctaatatacataattcctcatatgcagcccaaagtagagggtctattgccaaggactgtttaaattgttgagcagcattcttccttctatcagtatacctgaaaggtcactgttatatatgaggaatcatctcatcgaagccattcagaatcaagaaaaaatgcatagacagaacaaaaaacgtacttgtaaataagtccaagaaggtaatggcctgctgcaccatttgggatctgcacaataatcagaagcatgttgttatcttcactgaactaaatcaataaataaggtccagaaactgacacactgtttttgtaaaatgacattcagtaagcgaataaaggcaaaataccagagaacattaaatacctccgcaccaggttcattaacagggcagagtgcagattcagcttcattgagaaggtccatctggaagcatgataatgcgaacaagtatcgggactgagccatttgtgttcctttacataacaaaaaaaaaatatatatacaaagataatcaaaacgacctaacaaaagaaggtgcaaaattctgactaaaaggctagcaagcaacaagtcaagaaacaatgccacgcaccctttagcagatgatatgcactgtaagcttgattattctgcaggtagctggtggctaatagctgcaaattaacctatataagaggaaaattcagaaagtgatcaaacaaaaaggccaatcatttattgacatgatttctactaactgaagctagaaactggacaaccactacgaatgttgaaaatattccagaccaaaggctgaatgaatgaatactttctcaactactattgaagctgtattaacccaaattttaacaaagcttgagataatcccagagacattcctctaacagttgactcatagctaagttccaaggataataaatacttaaacttgagatcacatatatg

SEQ ID NO: 25925 - DNA, 3766 bp, Arabidopsis thaliana landsberg
taacttgggtttagttggtttctaaatgtagaaacgaaatggtagcttaaccataatattagagagagcctagccggtcaaaataactctttacttttactttcgttttccaagacgggtttggaaataaaatgagacataaatcaatatacgaaaattcttaaattattatctctcttctattgataattatattaaacaaaacataagtattagcaaagtgggaaaaaaaggactaattatcatgtttcatctcaaagagagtaatttctctttaggtttacataagcattgaactcgatcgtctatttcacaccttttaaaagactttgggtgcctattcaaatttccattaaataccactaacgataaaagcattttactctcaaatccattgctaaattgtttaggcttttagcctttacaatagtaagagagaagagagagaagtagagaagaccagaacaagtgtgggtggggacagttgtatgtactctcatcactgctcctgccttgagccgtacatccgcttgccattgttgtgtttcaaagagtttcctaaatccatctacgaaaacctgtttgttgctatatgtgttgccattgcaactcaaatgtttataacctaatgtgatttggggatttggtaaacgtacgaattaagtttgtactacaactacaactccatctccatttgcttcataggttgtgatgtcttaactctttcttgaacttaaaactctatgtcactaagttcggttgcatctctcttaactcttttctgaacttaaactctatgtatgtttcaatttctcttgcattttgtaatgaacaaagtacttaatgttgtttggtttgggtttcaaatatttttgcattgtaatttttttttgcatttggtttaagttctgtctcagattcaatatagtcgtaacaatatagttagacaaaaaaaaactagttcactaatttaacgactatgttacgtctacaattatttacactaagtttttacttagtcgcttgttagtcgttaaacattagtcgtaacttagtcattaaacatttgccgactaatacacgactatgtttagcaaacagaatattcaatagagataatcataaattagtcgtaaaacggtcattaaattttaccgactaatgtacgactacgtttaccaaaacatatggtcaactgagtttatcgaaaattagccgtaaaatggtcattaaatttgatgactaaataatgactattcaacgccaaacttttcaacattaggcatagtcggcaattagtcgccattttatggactaagttaccgactactcattttagtgactactgatttagaactacttacattagtcgccaaatagtcgtaaaatccaaaataacgactataaaagcgactataattatagtcgttaaccccctgttctcttgtagcaaatgcaacttcatgttatagtcatatggattggctttatggtaattcttcctacacttagatacaaaagcaccatctataatgacgctagcttggaaatgacgagatagacgactaaataaagctcttgcaatggtagtcttcccaattccggaggaaccccaaatcccaaccatcctctcacttcctcatattctaagctcaacaatgaactcatctctgttatatgatcttcaataccaacaaaatcctcaacatccttggatggagttaaattcagtttaagcaaaacatcatttgcaatttcttctatcatttttgcttcattaaccctaacaacaagaaaccaatcaatacataaaaccaagttcaacacacaaagcaagctcaacacacaacgagtatgaataatcaaatcaagttaacgtaccaattcacaaaataatatccaagaatattagctacatcgatcaaagctctcctccgtagatttatctcatcctctgttctgttttgacaagtcttcttaaagatttttccaaaattgccgatttgtttcctaacatgagacagatccaagccatagaaaacaggaattaccaccaatcgattgctatcttctttgcatctaacaatctccagcaattcataaaaacaccagcttgaagaagcgtagattttggaaaagataacaatcgcaattctcgaatctctaatcgctcgtttaagatcgggattaagcgattggcttctctcaatctcgttatctttaaaagcaatgatcagcttccgatcaagatccttgagaaagtggctgaggaatgtttgacggatgtcttcaccgctaaagctcggaaagacatagagtacccaaaattgcaagccataatggagcgaggaatgagtttttttttagaaacgaatcagagaaagtgttagaaattgagctgcgattcgtttgaatctagcgatgaagatgatcaattttttgttacgtttgatcgatctcaacacacacaagatttaagaactgttgaagaagaacgaagagacaaggtctgtttacccggttcagcaagatcagtgtgattaagcctacgtccggagccgaatcaatccagcaaatctactaactttgatgaagagtacagctcaaaccgagcttacaacaatggtgattctctcaagttctctctctcacaatataagaaaaatcatagaaagaaacagatgaagaagataatgaatgtaacagactctgttactctttatatataaagtagtcaaaccctccactgcagttagagtcttcaacttctcttcttcaatttccggtttaatcagtaacctccttgttagatatgacttgaatagattgggcccatgactttaggcccaatcagtttagggttaattagggtttcttttgtataagtactcttcttaacctagcctccctgtattctcctgtaataaaatctgtctctttgcccgtggatgtagccaacagaaagtgttggtgaaccacgttaaatttgtgtcgtgtttatcgttcgtttatgcaatctcgcttgcacctgttctaacaaactggtattagagcacaaggttctttgttctgcgtccgtcgtgcgaatttcgtgcagttttcagttccgtgcaaaatgcgtgtcagagcacaaggtcttctttctgcgtttcgtgcgatttctgggttgaagaaagttcgtgcagatctgtgtagaagaaggtttcgtgcaaaatccgtgcagaaaacgttttgtgcagaatcaggttctgggatttccgcgtttgtaatctggtgagaagatgtctgcgatgaatgtgaagatcgacaagttttctgggagaaacagtttcagtctctggcagattaagatgcaagccctgttaaagcaacaaggcttgtgggcgccgctgtctaatgacagtaaagggaagagtgacgttgctgagatggctgtcatggaagagaaggcacactccacaatcatgttgtgtcttgaagatgaagtcatcattgaggtttcaggagaaaccacttctgccaatctgtggaagaagttagagaatttgtatatgacaaagtctctacagaacaagttgcttctaaaacgacgtctgtttgcattaaggatgcaagaaggtacgccactcaatgatcacttagatcagttaaattcagtattactagagctgcgtaatattgatgttaaaggtgaagatgaaaatgctgccttgcttctgttggtatctttaccactatcatttgagaactttgtggatcattcata

SEQ ID NO: 25926 - DNA, 3858 bp, Arabidopsis thaliana landsberg
  unsure (1)..(3858): unsure at all n locations
cattgtgtgattcaaggagatggtaaggcatatttaggaagagcttaccgaaactactctagagttgtcttctatgaaaccaccatgtccaatgttgtcgtacgtaaaggatgggatgcttgggaatatagcgaccaagtgtacgtaatatttattctcttcttcttatactatatgcatttgttacatatatatttgggagccatattttaacaacaatcacgacttacaaaaaaccaaaaatcagggataaatttacatatgcggagataaactgcacaggggaaggagcgagtaagaaaggaagagttggatgggagaagaatctttctgctaaagatgttgaatctcttatagaaccaaaaaatttcattgatgaagatggttggatagccactcttccttcttctctcgtctctttatatttaccgtcttccatcttttaaatgatcaataatttgtaaatctagtgtacgtgaatgacctttgtcattgtgatttacccataggtttatcgctgactcatttaaaggcaaatgatggatatatagagttttttggtttctcaataatatgtagtttcttcttatgttcgtgtatcaattatatcgttgatcggatagactacaatgtccaaaacgtttctacatcggtcgaggaaggctataaacaactacaaaaggtttgattctttacccaaaactcataagattttgtgagtactacagatttttcaccgtatggaactcacaaagacatttcaatttttaaataggcggagagaacacaaagagaaggagcaatggtgaaatgtgcaactatactccttgtactctgtttgatcatgattgttcttttaattcttaagaatattttgctttagtcatatgccaacaatttagaatgaaaaacagcttgtcttgtttgcaacaaacagtaaccctctcttttttctagttgaattctcttttccaatcgttttaccaaatctgtagaagtattttgtgtaaaccgtaaatggttaaaatcactatagttaagaaataaactgacactaaactacctagtgggaaaatgtgataatcactacaagaatcactagtcctccaaattcaataacacatgaaggaaatcaagtaatcaactcataatgaaaaattgaaaatgatctttttgtgcaagggagaaaaaaataaaacaaaaacgaatgcgttggcttcacacactttagattagcaaacctagacatataaactcatagagaaactcgtgacaagttgttttgaggctcatgttaaacaaaattttgtgacactcgtgcaagacgatgatcgtcctcttgaactagaacaatgagccgagagtactcctctcagtgctatgcaaacacaagctctttgggtaactagggttacctctttttgtttctttattgatttgcttaaaacaaaagactgaagaacaaatactcgatacaactctatttatactcaaagactcgattcctccttggaccaggattcaacggaaaaccttaacgaaaaataaaggaaaaatattcaaacgaccctaataatttcttgaacacagaaaaacgtgtgtgacacacaaagcccaaaactaaacatcatcagtctctctttgaaaaacgctttatgcaaatatcagagcaaagataagaaactgaggtttcaggtatcttatagatgataggggacatgcaatgcgacttacactgcctgcaaaacgggcgagatacatagtagaggagcgcaacgtgatatgatcccgtatcagacttgactacgcttcctggcatgagccctgaaaactctccatacacacactctgtatgcaaactagcctggtgatctttacatgtgtagaaccacgtctctggattggtttctttctcacaaatgtcacaccaatatttaccactagccttttcgccatagcatagtgagagaggataatcgtcaactctatgctttaccactttcggtaaagtggcgcatttgaagcataagacaaatccacaaccatcttcaatgcacctgagcattctagttcccgacatgttacaaccattgcagacttcttccatctctggtgaaatgtaatataagggatgatcgggatgacttggatggacaaatggctccaacactgaacaacatatgacatctaatttcatatccccatattggtaactgaaaccattggagattctaccacaaacattacaccaaaagtgaccagcctcgcgtgtaaataaagtaagccgttcattgtgtagcacatgtcgtttccttttaggaaatttagcacagttttggtgaagaatgaagtcacaatccatacaaccatagaaggattcgaggcaaacggaatgggtgcatgcgctgcaccgcttgttttcatcacataaaacaccattgtcgtcgagttttaggtaatgctcttcgtggctgaaatgttgtattgtgttgtcatctattaccacatacggctctatatcttctgtttcttcaataactccttcgagttctttcccgttccacacatcttttcttgtagcacatttggaatgaacgacatagttagaacacctttgacaagaataacctgcccaagtccaatccactttttggcgacaaactccacacacagaatatacaagacccagaagattagtgcgagcaannnnnnnnnnnnnnnnnnttatgtttataaggcgtggaagggtaagacactcttgatgtatcatgaaatcacattgaacacatatgtaagggcttcgatctccatttaacccacaagcattacatgtaaaagaatcaagtcttgggcgaaagatgagttggtgagcatgagctttcaaatccaaaatagactgtggtggtgggtttaaaagacaatccatatccaagctgaagttacaagcggaacaatgataaaacaatttctctttaatcttttgtgcgcaaagacgacatttaccatcagaatagtctggtggttgacctatgtggagcttaagagggtgtaaagggtggtaagagtggtttacctctaaagggtgatttacttctggcggatgccatacgcaatccacatggaagaataaatcacattcaggacatttgtaagcaaacccatctccagtctccccacatttgctggcatcacaatcaaactcaatccgcttcttgaaaagggtgagcttgtggtgatgcgtctcggaaatatcaataacctctggtggtgggtactttgcacagtatagatccacatcgaagtcacatatctcacaacgatagaatagatccttgatgctcttgccacataaattacatatatggtgtggtttacatagaagcttaagagtgtgaacagagtgagatgtgtgtttaatatattcagaggactcgtcaacacatttcctatgaacaaagaagtcacagatttcgcagtaatatccaccactggtaaattctgagcgtccacaacaatcacctttccgctgatcatgagaaggcatcatgacatgcttgtggatcaacggtagtgacactccctctgattccatggtcgcctactacaagattgagaagaagaagaagaagaagaagaagaagaagaagaagaagaagaagaagaagaagaagaagaagaagaatctgagatctcaacggtatgctcctttcaagtctatatctctctctaattaaaagtcaatgtttacgcttaaagatgctcttacataacttggtcaataacaattatatatattagtttttataatagttctataactaaattaagcacacaaaataactaaaactatcatgaaaa

SEQ ID NO: 25927 - DNA, 1154 bp, Arabidopsis thaliana landsberg
ttgttaagactcgacttatctcgacaaacaagccatgctcaccgacctactatattgtaggacataatataatggaatcatggaaaacatgtgtattactcgaaactattttgtaaaacactaataaaacgatggatagtagtcagtggattaaattcatatactctaaattacaaggcaaatactacaaaaaagatacttaaaaaatcacaaaacaacagaaaagtgaaattagttattatgtagacatgcatccgacaccgtatcgactggtcggaaaaacaagaaacaaagcactgcaaacaattccgaccattaacggaaaactctccataagttgatccatctccttctcttttcctggaaacaaacaccctgtgactctccgatccgaaaacgcgatcgccataaaaaccaaaacactcatcactgaatgcacaaagtcattaaccctcaacttatacctctcatccgtcaccggaatctccttctctgcaatcacatctccgcctccaaaccccggcgagggtggtttcatgaacaccgcgagtccacgtggagtcacaaaaccgtagtaaattttcccatcggaggctttgaaactgtcggtgaaatggaagaagaaacaagacattgcgcaaagaagcaagagaagatgaatcatgagtgtgttgattccgttgcagtctccgtcacggtagattgtcggaagaaccatttcgaacatcaagagtgttcctgtcggaaggaagttgacgagcattgatgtcttcgaaaccgttttttgaactccttgcgccaccatgcgacgttttcgacctcttcctcctccagcggcggctcctgacgggagggaaggcaatgaagagattaagacgggttttggtgaacgagaaggtggtgatggtgatggtttttgcggcggagtcgccgtgtaaactctgattccgacgctttcctctgttttctccattttcgcgcgtttctctctgctcttttcttttgcgatttaccagttcttcgtatgttgtgttaaatggtttaatggagaaagagatttttgaatttatttttcaaaacgcggcggttattgacggtttatagagttttatcggacgacggcttatgtgggaaaggttttaaaattcttgctt

SEQ ID NO: 25928 - DNA, 955 bp, Arabidopsis thaliana landsberg
gctaaaaattaaaccataattactaattagtcatccaaagaagacaagatgtacttggtcatgaatatattataagaggaagtaatatttagagcatgtctatatgtgtcatgtctgaacttcggtttaggtttctccactaaatattttacaaaatactcatttatatgctcagtcatcaggttttgggaatacatgtaaactgcaaaaagaaaaacggacgttaacgaaataatgcaattatagtcaaccgtccctctaccgaaaatatacctcaattttaacaaagaaagaagatatacctcaatgtttgaaatatgtgtaatgtataagtaagatctataagatacactaattgagatgatcgacattggtagctattacgtaattataagtaagaatacttccgaggggatgataatgggagaacgggctacatttgtactataagattcttttcacatataaataattcctagtataatagtacaagtgaaagaaaaaaacgaatccaatgcaagtgtgaagttaaggtattttgaattttgttacgcatgcatgaggtttttttccacagtttcttaggttaagaaaataaaagaaggacactggacacgtacacatgggccgccaaaaaggtatcctatgcccgaaactatatgtatagagatgtaagaaatttaaatttaaattgattttaatgatggccttatttctcaaagaatgtgtatttttttccgtacgagtcttgattttgtcttaaaacgctaatatgaaagtaaatgactgttttgcccacatccttcttcgctttaacgcggatttgactttttctgcccgtcttgcccgggtaattatggcggggaaaatggaagagagaaaaaaaaaattgaattaattactaagagaaacaaaaaaggtcagattcttggcgggagacggtaagcccgggaaa

SEQ ID NO: 25929 - DNA, 773 bp, Arabidopsis thaliana landsberg
cacgaagcttataagtatcatgtcctccatagatttcatcaacacacagattattataagtaataagaagtaaactcaccatagattgtttctcatcattcaattgcttatttacttgaggagaatttcgagcttccccatctttgagttcacgatcaaactccttaaccaacctaacgtgaagcgcagagatttaaaaatcgttgatcaccaaaaaaaactctttcctactcatgattacacatctcatccatctcaaataatacattttcccacaatgcaaaaacataatcaccaatagaacttccaagacttacaacattttagttctcatgaaaaattcaatccctcatctaacaccggaaagttcgagtagtaaaaaaactgatatcttggagaaagtgaataccttttacagtctctcatcttctcagcaagttcttcgagttgcttgctttgtctactagaatccttgatcttatccaacctctggaagccattcctgcatatcaatgttgaatctcacttttaaagaaaaaaatcataagacttgtgcctcagattcactatcccaactcttattttctcgtctgtgaaactcaaattcaatctcctaacaaatctagttcccaaaaaatctatagtcttgtcgataacgtacactcgaatgaaaaattgaagagatagttaagagaaagcatacgcgagggctcggaaatggtcacggatttctccgtgaatctgctccaaatgagggctcatcggcaattcag

SEQ ID NO: 25930 - DNA, 5444 bp, Arabidopsis thaliana landsberg
ctcaattacacagtctgttaacatgttatgtacagtatttgttaatattttgttctgttgcaaactttacacctcattgaactataacatctcactgatcttggttcgtcaacacaaattacttttgttggatcaggtcttgctgatcatgataattaccacgtgttctgccgtctacttgggcgttttaggctgaattatcaggtaaatttctcggttagattcctttctagtttacagattacggtttgtacaattttgtttgtgttgtagcttgaaatttatgttatgatgccatgtacttgagtaaatacacacatgttccttttttctgtatgtgacagttggacagtcttaactattcgtaatttgtgacgctatctatgattgtcatataccatttggatataatttattggtttatatggctaaattcagacattatgtaatagcatgttacgtgtatgaattcatctgcagctttcagagcttgtgaagatggaaggttatggtgagtggatacagttggtggcagagttcacacttaaatctctccagtcatggcaggttcgcaagtttatgttagtgaatgcattagcataccaattatagaccctactagtctttaaagttctggttatcctccagcatgatcgtttttagtatatagcttaaatatttggcggagattgtatcttgtttgcaaaatccatgtgaccttttttcttacagtgggccagcagcagcgtgtattaccttcttgggatgtggtccagattagtagcatctgtcccatacttgaagggtgattcaccaagtctacttgatgaatttgtacctaaaattacagagggttttatcatctccagattcaattctgtgcaggtatataacatcacttattctggaggattgccagtactgacttgtagtttttctttgatattttcctatttgaaatcccctttccaggctagcgtcccagatgatccgactgatcatcctttggataaagttgaagtcctgcaggatgagctggattgctttccttacctatgcagatttcaggttagtcttttcttcatatatgtgtcatgcagtaccctggttttgctcacatgttttgtttgattatgttgtatcttaacacaattgaactgcatctgagagtcttatcaattatcatgcagtatgaaagaactggtatgtatataataaacacaatggagcctcttctgcaatcatatacggtaaagtctactgttattctgtgtttagcgtattgttgttctgtcaattcttgtacgtgtcttcctaatcttgagctgagtgattgtgtaacaggaaagagggcaactacagtttgctgataattctgaactagcactcattgaagcaaaattgtcatggattgttcacattgttgccgctattgttaaaataaagcagtgcagtggttgtaggtaagttgatatcatatcttggggtttctttgcattttggtctgtttgaagaacaaaataatatatggattgaaatttatacgtattttgcagtgtggagacgcaagaggtgcttgatgctgaactctccgctcgtgttttgcggctagtaaatgttatggacagtggactgcatagacaggtgttacatctgttagatacaagcaatttcattaaatcaacttgaaatattattatataatctctatatgtatggttctattactgcatttctactgaacataaaccatcaatacagctacaaaatttagctaaaagggcgtaagcctgtatagccacaattagtaacataagagtgatttcattaatgattatgaaattaattttctgcttgaagtgcacctgttggattttgttttctctcaggtaagttcactacattaatctcatctctaattaatcaaaaacacttctttctgcagagatatggtgaaataagtaaacaaaggcttgatcgtgccattcttaccttcttccaaaatttccggaagtcttacgttggtgatcaggccatgcattcatcaaaagtaaatgcaaaccctgtttcttttttttattgtatttgttctatgtatatttctgatactacctttctgttgcagcagttgtatgccagattgaaagaactccttggactgcatgatcatcttgttctgttgaacgttattgttggcaagattgctacaaacttaaaatgttatacagaggtaatcttgtgttctttacttttttctagcatgccgctctacatcaacgtcacctactgttcaaacaatctatcttttgtttctccagagtgaagaagtcattaatcacacgctaagtttgtttctggagttggcatctgggtaactctgttataacctgattaagctgatgttacattagtttatatacattttcatatcgatttttttttatgttttgccgttctcgtgcagatacatgaccgggaagctgcttttgaagttggacacggtgacctttattatatctaatcacactgtaattcttctccaaggactttcttttgtggacatcattgtgcattgtaatttattacgagcaacactctgactatgtgaattgtctaattccagagggagcaatttccattcttagaagagtatagatgctctcgcagcagaacaacgttttactacactattggctggttgattttcatggaggatagcttaataaagttcaagacttctatggaaccccttctgcaggttatactttgttttctttcagcattttatcttttgcagctttccttttagaataatgattctgtctgaatctgcactgcacactcaccctatttacagttctaggcaaaatttgatatcctataaacagggattgttccacatccattttacaatatatcttataggcagattcacatagtggtcttagccagtaaaccacatttttattcaatcattctaggttttccgcaccctggaatcaacaccagattcgatgtttcgcactgatgctgtgaagtttgctctgatcggattgatgagggatttaagaggaattgcaatggctactagcaggttttgagttcatctagttactttgacatccatagacatgttacaatcttatgatttattgaagctttctctttggatttcagccggagaagctatggttttctatttgactggctctatcctgcacacatgccactccttttgagaggggtctcacattggttcgacacaccagaggtattaagttatgcattctgctccattggattgacagaacactggcctagtaataacctgagtccgtgcatagaaaaaatgattctaatccactgcttgtgattttacgccttctgccattttagtgtggttagtggtgccttcattgtctcatctcctcttcttggcttgttgatgtaggttacgaccccgttgttgaagttcatggctgagtttgtgcataacaaaacgcagcgccttacttttgattcttcttctccaaatggcatcctgcttttccgggaagtcagtaaattgattgtggcttatggttcaaggattttagccctgccaaatgttgcggatatatatgccttcaaatacaaggggatctgggtttcactcacaatactgtcaagaggttagaacatgattttgaccaatgagagctaaccattcgttgtttagtttattgttatgttataatacttaaccatcatctaatgggcagcgctctcgggaaattattgcaacttcggtgtctttgaactttatggtgaccgggctcttgcggatgcacttgatattgcgttgaagatgacccttgcaatacccttggcagatatattagcatatcgcaaggtatgtgtggcattgcgttttccacgtgcctccaataatttcatttggtgatcaaatcaacacgtttttgatattgtttgcattatctgaattatgtttactctgaattctttctttgtcgttataaaatctctaatctttatagtcttcctttcatccttcagcttacaaaggcatactttgggttcgtcgaggttttgtgtgccagtcatattaccttcatattgaaactggacactgcaacctttatgcatctcgtaggttcccttgaatctggactcaaggggttgaacacaagtatttcatcacaggtgagaattgtgacaaaactgttaagacacatcaatttatcaagaaattcttaaagctttaagctgcaaaagatattcctcgaaatgcaactttctgaagcattgatatctattatcctttcagtgtgcaatagctgtcgacaatcttgcttcatattatttcaataacatcacaatgggtgaggcacctactactccagctgctattcgttttgcacagcacattgcagactgtccgagtttgttccccgaggtaactcattacactcctcaatctctctttgttaaattgaacacaataatgatgggctataatgccttttaacaaatatcctcttacaagcagatattgaagacactgtttgaaatagttttattcgaggattgtggcaatcagtggagtctcagcagaccaatgttaagcttgattcttataagtgagcaggtatgtgtaatttatacatttatctctcttgtgcagttttctgttccgaatgagctttgttgttcattcatctaacttatttcaattgatttccccagattttctctgatctgaaagctaagatcctctcatcacaggtgatgatccaaaattctatatctatatatattttacccctgagtgttgctttttgtgtatgccttagagcattattctaatggtgcagcctgcggatcaacaccagcgactctctgcctgctttgacagtcttatgacagacatatcgcggggattagattcaaagaacagagacaagttcactcagaacttgacccttttcagacacgagttccgcgttaaataaaatcggccaaacacagtccctgagccacagtctactacattaggggtctcatcaaaaagacccacatgacacagtgaaccagaaatcttcagaagttaaaaaatggaaaaacaaaaaagtagtctcgagattgtggtactgtacagtttctttattctctcagaagaaagggtaatatgaagaaagatttacgttttggtggtttcctcgcaattgtggcttaattcatcattgggatttattttgtctcttgtcagccccataacaaggttgatgtaaaacattgaaatctagggtttacttttgcaaatgttgggagcagttaggtcacatattctttgtaatggtaaacaaatctgaaagaaaatgcagtatttgttttgtttattgtctggattttcgtataactctctagtatttattagcctatat

SEQ ID NO: 25931 - DNA, 2147 bp, Arabidopsis thaliana landsberg
atacactactatgtactaacctacgcaaataataccaattaatcttcagcttattcggaaaatttcggttaattcatgttagttacggacaacgtcggatttaacccaaatcctaaatgcaaatgcacaattttctggtttgtttcgtttttattttctggttaaaaaaattcagattaggtttgattaaattaaaaataataaaataaagattgagaaatcactgtggtcttggttcagtcttttgagatagagataatttctgagccgagccgaggaagaagaagaagaagagatgggttttgtcttaatctgtacttgtcctccgtcctcgggtgtcgtcgtctctcagcttcaccatcaccaggtccgtcttccttcttcgtcttctgattttgattttctaattacacaatctgtttaacaattctcttttgtgggtcacaattttcagttctccgccggagtcaaaagcaatgaactttggtttcgtccgactcgtagaaccctaatttcgaaatcatcttgtttcaatctccctcaagaacccattctctccgaagctctcaaggtacaattatatagatgatgacaaaattgattctttttccgtaatctgtacttgggatgagttgttccagatagcaattaagcaattgatatcccaattttgtgatgtgattgtgtgttgtttgttgatcaatcttggagggtttttgtttgtttgtttcacatatgtatccttagataagtgttacattgtttgttttcatattggatggtagtattgatgcatcaaatgctctctgttgcaatgtggtttgtttgtaggagccaattgcatttttgggtgggatgtttgctggattgttaagacttgatctaaacgaagagccgctcatggattgggtgacgcgaacagttgaagcctcgggtattacagaagaagaagtagatgcatatggggttgttttcaacgatgaagactcttctcaacagatagagattgaatgaagtatcttggttctgcagtatttaacatctgcaaggaccttatgtatgtaacccctgtgttctttatgtagaaagaaacagactctcttatgtataacttttacattacagaggtatgtcattgtcctgagtatgacattctttgctggtagttgaatcaagatagcgatgatctaaacagtgctagagtgttgttgatcagtcgaatcaaatcaagctaacaagatggcttttgcattgaggcgtaaaatctgacaaattatacaacacaaagattttacattcactctgtatcatccatagtctagtctctaaatttgagataggtatttgtgtggctatagtgtaggtcttactacttatttttgttggttgaatcttcaatgagattacaatcatttttgtggataatcagagatacttgtactgattactgaatccaggtaagtctctgcattacgcaaatttggaagagaccaaatgtacaactaaagacaatatcaaaagatctttttcataagagatatttcttagcttactgttgaattttgtccatgacgatgaaatgataataaccacagattattttcaaccaattcaacccaaccacgtcataagacattaagactcataaccaaacgactgcgttttgatacctctgatcaatctggctcactagcaagctatgccagaccaaaccggtacgacttctgtgaattcgattcgtgacttatggcctcgcgtttgctatcgacgacgacactcgtcacaccgccggcttatctcaacaaatcgccggcgtttttaacggccagagttggggtgagaagaggaagggctaacgttaaggctgtgagcaatagttcgcaaggagccgtcgatggaaccgtttacaaaggtgtttacggtccttggaccattgaccaagccgatgtcaaagaggtctcttctcttctctccttacgattcctgcccaattcacacttgggttcctcaaagttgaatccttttgatagttttaggccaatttgttcatattctcatagtcatgtagtttagaggtagctcaagttgttgatgagtacctttttctcttcaggttattttgtacagatcaggactagtaactgctg

SEQ ID NO: 25932 - DNA, 1319 bp, Arabidopsis thaliana landsberg
  unsure (1)..(1319): unsure at all n locations
tcatcatcacctttcttttttttcttccaattatccaaaaataagattgctcgtttttttttcttttttaaaacaatgtatttcttgaatgtaaaatatacacctgaaagatggcctggtacttggcttattttttgggtataaacaaattatatgagtgattcaaaagaatggaaaagaccctttattgttcactaattaaattaaatatccttttgctacttctcctatctttgtagatgttatacttttgagtaggaagaaaacccaaactaagtctacaaccacttgattgataagatggcctcatcattgttggggtctatagagtactttccgggtataccatttgcaaggccaatgttataagaaaaaattacagtagtatataattatacatttttttaaagctaatttttttttataaagttaagtctatctacgggttatatttagtactaaaagtttgaatggtgacgacggttgggatggacaaatccttatgatcagtttatgtttgttaattatttcttaaatactggcggtgcatggtttctataattttggattgtggttacgaatatttagttattaaaaaagaaatagttttatgaccaagtaactatgtttttataagagttagaattgagaaaaacaaaaatttcttatgacattttggtatatttcatacagttaagaatttcaaatgttgtcgtagtaaaatgcgacattgtaagatcaagggggtcaaaattagtgggttttgatcagaaagtgcattggtcgcaatgtgtgaactcggaaagattgggccagaaagtcaaataatttagagaacatgttgatttgctattaattagttcgtattagattatattagtataaataaaacaggagatgttcccaagcaagcacgagtgtgtgtttgtgtggatggatttttgtatttgaagcttttttgtaagttcttaagtgcgttctttaatctctctagcgtgtcttttgtgtatactttgttctctcttctcaaacatttttatctatatatgcacctttgtgttaatttccttttaaaaatgttcttatttattctttaatgtaaagtctttggatgtgtgtttgtatttatggggatgtctgtatgtgtttagtatatctgttcttccaatctatttgctttgggattcgccatgatgttatttntatatttaaaaccttctctttagacttctaaagtaattatttgaatgatttacagtgcaagatgttntcacatattattttgtttcttttaccatttcacatattgacatgggaaa

SEQ ID NO: 25933 - DNA, 1056 bp, Arabidopsis thaliana landsberg
aaaatggaactttttggttataggaaaatggatacttgtaatcagttatatgctcaatcacctatgacggggttgatgatgttgagagctaacttctcctctgaagcaaaacatgttgagaatcctacaggttgctaaattttgactctttagttagaaatggaatggcttttgagcttagttagaatgtttcctgatcgaatttagctgtgtgtgttgcagaggctgtcaaggaattacatagtaaaatacttgattctgtgaatgtcaagagatcgatgcctccaaatgcttggttgtggtcattgattgacaactgtcggaacgaggatgacattagttttctgtttgatgttctgcagaatctacggagatttgtgagtgctttatttcttctcccttctgtgttccttgttctgttagagaattctcactaccgagtctgaggtttagtttctaactgacgcttttacatgttggattgtagagattgtccaatcttcgtattcatgacaactttaattgcaatctatgccagcaagttgctaagacttgtgtacgtgtgggggcaattaaccatggtaataatccaaaccttatagttttaggagttagttttgcttcacttttgttcccacaaactgtcaaggctaatatattttaatttggaccacaggtaaaagggctttgtggaaacataacgttcacggtttgactcccagtgttgcatctgcacaccatcttatggtattggatatctatatgttttttcggttgtttctttgttaaacatagacgtttaagtcatgttctggattgtcatgtagtcatatgcactagagcacaagaattctgaactcatggaagaagtaatgcaactcctgaaaacgaatgatctgcctctacaacccggtgcagtagatttagtttttaggtgagtagaattgctatgttgctcgttctttatggttgggtggtgagaaatcagaacaattcactttcttatcatgaaatgaactgtgaactttatttttgcgggaactgacatgatacaca

SEQ ID NO: 25934 - DNA, 1263 bp, Arabidopsis thaliana landsberg
aaaaaaacaacaaaaaaaaactccctccctaccccattgcttcacatgtaatgagaattactcaatcagatcacaatctcaccaatcaaaggattgctccaattcattcgtctacctgtaccattgattctagcaactatatggctttcttcaccttacaataaaaaaaactcaccatgctgtacgaagtacgatattggaactaagtggagagaacaatacacgcaacccaacctgaaaattccattgagaaaaacaattgtttctctcaatccaaaagttgagaatatccacatgatcaggaattgaaacacctctttctctaatcggcttttgtcaaagagtaatccaaacaaaaaaacaatccagtacagaagaaatctgaattccaacaaggcagaagatgaaggaatcctaaatatacatatttaatcataaactttatcacgaatccccaaatcacggatcggaacaaaagccgtacaatcggaaacatcaatcaaactaaaggaagattacctcgccggtgagtccagatccaagaagcgccatggatggaatctgtgaagcaaacccgctcatcggcgattcgtacgacggttttaccaaattgcgacgaactcgcacactcgcaaaaaaaaggtcacttgtgttttgaatagaggagattatggatcattaaaagactctagctcatacacagactcttcgtaagaaatatttttatttctttatttgaaagataaacagcaaaaagaaaagagatattaaaggcggtaaatacaattattctattctatatcatattgttaaaccaaacccggtttatctaaaaccgccaagctgatgtggcaacaagtgctcttccatgccagcacagcaccaattctccttgtcgtttcgccacgtggaatcctctaacttgcgctttctccaataaacactcagcttgaaagtcggcgaactggcttagctgtatcggcctcatcccggcggcgcaaaacgcttcccgccaagtcatttcgccggtgtgtctcctgtcagccgccgtttctaccgcagcggagatcttcggtcgtagaacgaacgcttccactatcttcttcaccaaatctccgggaggagctgcagcgtcgagcgactccagcaccatcgtgtagaactcaagagcgctaacaaactctcgccggaatgatccagatccggcgatctccgtccatccttcactatccacgaatacaacgaccttaggtgatactctcc

SEQ ID NO: 25935 - DNA, 1591 bp, Arabidopsis thaliana landsberg
gagacaaaaaataatccagtgtggattattcatacctaagaaaattagtttatagaaagttaaaagaaaacggtaactatagaaaaaattatttgatagagagtgacatgaatgtaccctaagaaatggaaatggaatacggaaagccttcaataatttatcgagatttgcggcaatcgctaatccattgctagtgagatgctgccccttcctcatgactctctccatcatcacggccgcttcgctatcaatcccttcaaatccatcaatgcacgtctgttggtatgtgattgatccgctaagccacacacaaagatcctcaacgaagtctgacaatctagtgaacaaaaatcccctaaatttatccctcgtttttcgaagatcatcaatcgcatcatccataagctctctacaagtattaagcgcttctcttgtgtgcatatcggcatctgctctactctttagatcaatcatccctctgtcgattccacttcgaatcgagatgatagcaaggtcaaaagcagatcttattagatttcggggatccggcgacctcacggttgcgagactcgtggtgcaatcttgtttgtaatcggtggaggcacatataatactcaccgtcgtctttgttatcatcagcttgctttcacggtgaacctcttccattttcctactcgggctgttgccatcgttggcctctacacaaatgaccattgccataatgagagccgtgacgcctaacaagacatatttcttcatgttgcttgaataattccatccattccacattcttttttatttcgggaaattttttgggattttttagaatatcaattgctaaaagtaagttggtttcgaagtcaatacttatatgtggaagaagggagggaaagttaggtttttaccgttaaaaaacttgaggcagtcattagtttctcaaaaatcccaaaatatttaaaatttgtttccagtggtttttgctatacttgcggggaaattcataatccttttataccattggaggtgattgatcacaaaattgaatgtataaaacatatctttaaaaaattgtgtttgctaattctctatcacatgggacccttttttctctgtaaacttaagatataatgaaaaaaaatggaaacattgagagaacaggggcacacacaaaaaaaaaagagataggattgaacaacattttttaaaattaaccataccaaataaataaaaaatttagcacatgtcttcttttctaatcatttatattcatattcatattcgctaataactagttcttatttaatagtataagatatttaagagttcggtgaccacatatttttcctttcaactttcttgtcgtcgcccaaatctattgtcacctcattttcaaaactaccatttactttggaaaattccttcgaccatcatccacgacttgatgttagaattcacacaagatattagggtattcatggtgcatgtgactgtgatggctcccaattcatccctgaaaacaacatcttataattatgttaaagcaaactaaatttaatgtgagatgtaaaaacatgattaatttatatctgtt

SEQ ID NO: 25936 - DNA, 2370 bp, Arabidopsis thaliana landsberg
gaagaaatctgtttttcctttgatgggcctgttggctttttgggctacttttttagccttgtacttcctttttactttttttcccaatataaaaaagaatttttgacgatttttctccatacaacgttcgcgttgtagaaaaaaattgggaaaaatgtcaaaaaagcgccaactttcaaatttaggacgaaaaagcctaaatttcctaaatgtcatttaaatcataaagttttctttgactctttaataaaatggtcaagttttgttgactaggccatttcgggcacgccgtaaaatttccgttaacagagttaactttccattagaattttctgttaaatcaaaacgacgtcgttttgttaagaaaaaatgagagaaaaatacattaaatagatatcaaactgatgacctcatgcacacttaagggactctaccgctgagctacaagaacattttgttataattgttccaacgcatatatatatatatatatatatactaacaaatagcaatattcatttaattaaaaacatatgtaatcaaaaatgacaaaattaaaaagaatatcaaatatatacaaatattaaatatacttaccaaaaagttttatattttgaaatttttaatatttaattttacatataaagaattcttctagatttgaaaaattattctttcctaaattattaaaaaaatactaaaacttaaagaaaattgaaaattaaatatattaaattaaaaaaaaacttcatatttatggtatattaactaaaattaaatatatgaactgcaattgacttggtattctttttaggttgttattttaatttattgcatacgtttttaattaaatgaatattgctatttgttagtatatatatattagttgttattaattaattaaactgttgtcgtagcttagtggtagagatttctttaagttggcgtttttttgacatttttcccgttattagtattacctttttttcttttaattttttgttcccttttaaagtttaaatacaaaaaaggtattcagctttatataatttactagtattagacccgtatttcgtacggaaaattacttttaagattaagatgtaaaaagttaaacatgaagtggattaattttttcaaattcttttgtttttgtcagttcatctttcagtatgccgtctttgttataaagccatttccatcgagacgccatatacatgatagcatcgtctttcagtgacatttagtgcttaacgtttgaaatacgtttttgaattatttgtctcccctttatcgtaattgttgtagcccgtagtaacccaccttcaagagagaaacatatagttagaatttagacggatgagagagatgggtagataaccgccataagagtatttccagatttaaaggggtattagcaatggtatctgatatctctatatctttgaactgtataatatagaaaattgaatccaagaatactgaatcataaccaaacaaaatcattcattaaaagcagaaacaaattgtgctttataagatatcacggatgtgggtctgcaaacacattcaatacagagtgagtcacgtgtctatatacagttaaaaatgggcctacagccctaggccacttcatatattatattttttcaagccccatcaacaaattaatgtggttgagtttatttgattaatttttgtttacacgattaaagttagggtgtgattggtaaaataatagaataatcaagaagaaataaagtataagtaaatactcttttatccttttaattcttttttgtcagctaaaaattattttattgatttttttccggtgaataaattttgtttcacttaattagaatatgaaactaattaaattttagcctctttacttttactctaactcatgctactatattattaatccggacgtgttatatgctgactggagtcaagctgtcaaaaatgtaagtaattctattttactaatcagattgttaaaatattatccgtaattattactaagagaaagccgaaaagaatcaataaagataaacagagcatgggatctatcatctttttctaagtgccacatgattttgagaagcctatagctaaatttaaaaacactgtgaccttgttaattactcttataaactcaattaataaaatgtcatccaacgcggacactgaatatatgtgtatattcgtctgccaaccattctgttggttgctttgacctgctttttgactggcttatgtcccaacttttcctaattagtagtataatattcacttgagcaaacacagtctgagctcagcacctgatctgatctgtgagtactgggctgggggggaaccacaaaa

SEQ ID NO: 25937 - DNA, 1159 bp, Arabidopsis thaliana landsberg
attctaccgatctcgatataaatagctgccatattttgatttttctattagtcaaactcacatttgatccttatctattatttccaacataactcgagattagtccaactaactcaagccaaaggtttgaattctttgtacttagttcagattcattcagcagtaatttcactatcttcgatgagtattggtctagtttacttgcttcattcgagtttccaaaatctttgactatttctcatactactttcattgatcttttcgtactaatctataactttcaaatgatgtccaacttggaaaaggaaaaaaaagattgagttcctcgaaatttctctgctttgggctacttataaagtaatttagtgatggaaattgagtggttaccggataggaagcagtttatcaatatgacgaaatgatcttcatgtgtcacgtcttgattaagatccaaaattatttaaaaaaaatcgcattctgaaaaaatatggaaaataatcggcgcaaaatcgcatagaaaatagccttcatcttttttttaatctcttcttcatttctttcattttttatcgatacgactttttttggtaattccggaaacattgcaaataacagcgataaccttagaaattcttttaaaatagcgacagtcgctggtctatagatcttcaatctaaatacattacaattgatatttttctttagcaagaaactctcaaatcttccctctgtattaaattgtactagtataacaatgagaccaaagaatacatattacaaatccaaatccaaaatgtcataaagttgactaaaaaaacagtatttataataataaaatcaaaacctttcgtgaaatcttttaacaactgtcattatttctcaaagctttatcaactccacttataatggctttgaatgataatccatatcaaagcggtatagctttgatagttaccattaacaaaaattttatgaaaagcgttacaaaaagttttactctctgttttagtgtacagttttcttgtacaactcttttatacagttttacattgttccgaaaaagcttacagctccagctaactggctaaattttttgtaaaactttatgttaccaatcaaacccaataattattttttaacatattgtcttaaataatta

SEQ ID NO: 25938 - DNA, 843 bp, Arabidopsis thaliana landsberg
tctaggtttgaggtgttgaaatccggtttcagctttgtgtttgaacctgatgagaacaaaaatccattctgggatgcaaactctgttgcaagtccaaaggatgacgacgtctcatgtgaagcaacaatcgttaaagaaactccaagaactaatggttgtcttgcggatcaagcaaatggtgtgatgaatcaccaaatggcgaatggcagacctagtgaagctcattcttacaccacacttcagcagggatgatggtatccaagaaagaatatatccataggattatggtgaaaatcaaattcttcccaaacaactggtcatcttccaaaagcatttttgtcgatcaactttgaatatctctcttttacactgatttcagactatttattcattgatatttttgaattggtttctccattttttcatttctctctctatgtaatcatgccgtacattgcctggtttgctctctgagcctcatcctctgtccagcttggtcctgaccattcactcacctagccatcatatcagtgtcttatgaaatttagagccagatgaaagataaattgagctcgcgattacccctggagtcctggactggacctatacaaaggcatttacaagatgcttttccatttgctcttatggtcgccacaaagcaatagatcagcaatagcagcaacacaggccaacatagatatgcgaatcagagaacaaaagcattgcgaaattcttggacaaaccactttgaatcacttggcttaaaccgtagaagagggttagaccaaatgttgcaccaaggaggtaggcactctgccctttctcctgtttcccctagaaaaa

SEQ ID NO: 25939 - DNA, 1421 bp, Arabidopsis thaliana landsberg
ttagctttctaagtcaacgggtagcttcaagagtgtaagcctaactatctttgatcacactatgtggaagactccatccttcttttatcttttcttgatgctccaacgatatcttatattagttttgacttttgtaaagaggggaatgtgtatctatgggtaaaagtaaaactgtaaaagagtcatgtaacggctagatctagcggcccatgtgttgctgatatcgctagcttttcccatggttttgcacatttgtgaatgatgatgatatagctttttctggtgtaagaaagaatcttcatcttttctttcttctcacgttaactctttgaatatgtggaaacgagatgttgatataaggtccgtttagttgtttatgcattatacctcatatccaaactttaattagatgaaagattaaaaaaaattacgatatataaacgcaaattaccaaaatttattctttactagaatttggtaagaattcactagtacaaaccgtcagaccataaattccgaacatatggtttattctattacaatacaacacttattataaatatggtttgatttttactgtaaatacaaaaaagttaaaaaggcatggaggtaaaatgtatgtgcactccttaggtgtttttaattttaacaaggataattgcagaaacaaaacaacgagtcttttttgtcgtgtggcctgtctcctggacggcaatcaccataccctttatatttccgtgcacaattagcttcacaacttaggaaagaacacgtattatttttattaaacatacgagaaagacacggtacttttccttggactcctatttctgtaatatttcaaacataaaatatgagtttcaatattcaaattataagattgttatgataaaatatagtttatttatttgttgatccattgattattcttgagaaaatatatataggaactaaaaaataattattatatacatgtagtttgaaaactacataggatacctttgaaaaatcatggtatttgtaatattttccatttagaacaaatatatggattatattaaaacgagtttaaatgtaaaaacaaacctaacacaagaatggagaagataagtagaacggctaccgagacttgagagacatttttcatcttaaaatagataaatgaggatgatttttgaagattacaaagaaacgaaaacatgtatttatatatgtaaagttaaagttacatgtatcacacattcaaatatgtctaatttaagtaataaagtaccgatttaaaaggatcatgttttacacaattccggatatgtaatattgaaggaaaaatctaaaataggtttctaattaaagatatatatttattccaaaaatggaagtcaaaatcaaaaaataatttaacatatatcatttagctatgt

SEQ ID NO: 25940 - DNA, 809 bp, Arabidopsis thaliana landsberg
tctataataatcagggctagggcattccacttgcttttttgtatttagaaaaagataagagagaaatcaataatagaagataaaaatagttttttctataaaataaaagtacatcaacagaaacgagtttgcttgcgttcgcataagacatacaaacagcttgagaacaaaataatctcatagtgataaaaagacttattctcgaaagccctacatggctaaatactctttccatatctcacactatcaaaaacaaaacaaaaggacttaaaaacgacaaaacaaaagaaacatgaaaaaaaactctagtacaatctgcctcaaaacacaaaccttaaccataacccccaagaagaagaaaagaagaagaaccattacatgacaatgaagaagaaaactgaggaagaaggatcatctttttttttttttttttgggtttttgttgtgaactctccttatgtattaccgcctcgccggagcactgatacagtttcttctgtccctcattgaaagaagaaaagaaaacaaaaatagaaaaaaaaagaaagcagaaaaaagcccaggaggaacaatgaatttagaaaaccaaaccatgacagaaaagtctgcgggattctctggttagctctaggtgatgatatgatcaagtttcgtcctcactggctttgtatgaagggaaaataaaataatctaaaagattcgtcaaaagacacagatcgttcaccgtgatggcctccctacaatatcgtggtaaaacaaaaacgattgtactaagtagcaattcctgcaacaaaaccgaaaaagggaaa

SEQ ID NO: 25941 - DNA, 3105 bp, Arabidopsis thaliana landsberg
  unsure (1)..(3105): unsure at all n locations
gacatttggaaacatcaattcgtggatgcaataacggtaaaaatcttcaacttaccaagtgttttctagattcttctatatcctattttgggcttttgatcattatcaacacatctttcttaacttgtttctcttcatattcgtaatcaaacagttggaaacatcagaatcaaagaaagtggatagcatttatcttcgaatcgcgaaatctttctggcatttgctcctcgccccttggaaactgctttttgcatttgtgcccccctgcaacattgctcacggttggatcgctttcatctgctctctcctcttcatcagtggagtagcctttgttgtcacaagatnnnnnnnnnnnnnnnnnnnnnnnnnnnnnnnnnnnnnnnnnnnnnntcaaaaactgaagttataagattaaacatttgagctctaaaacattagaaactcttttcatcttgcaggaataaacccatatgtgatagcattcacagcactcgcaagtggaacttcatggccagacttagtagcaagtaaaatcgcttgagagcgacaactaaccgcagattcagctattgcaaacatcacctgcaggtaaaaatctcaaaaccctttacaaacattgaagatcttttcatgatctttttggtgataaattatgcagtaactcggagaacatctatgaggggattggagttccgaggctgataaacacagtctacaactactttgcatacagagagcctttatacatagaaaacgctaaaggattaagcttttcgcttctgatattctttgcgacatcagtgggatgtatcgtggtgcttgtgttgagaaggttgattataggagctgagcttggaggtccaaggctatgggcttggcttacttctgcctatttcatgatgctttgggtcgtcttcgttgttctttcttctttgaaagtttcaggcgtcatatagaagaagcaacaaaaggaaaaaccccatgagtagaagaaaaagtcttagcttacttgcacatgtctcagtttttgtttttcttacttgttaagggggttttatataattatcaaagttcaaaggcagttggctaaatatgtgttgcaaatataaatcatattgactatgattttggaggcttcatctttagttaggaggtgcatatatggagtacattttcattatcctgcagttttttttttattatttatttgcagtgttaccaatttgtggtacatatatgcaaactttctctaaagtcaagcaaataatcttagtcgattaatataaacttttatatgtaactttcatccaagtaactagtgtttagtacggttctttaataagtgttgtagaatttctaatgcccatttaccacgaagtgcatattctagttgctgctttcttctgatattagtgacatcttaatattcctgaatttaatattcatagacacaactacttcggttattttctaagatacattctcaagtcttaaccacaaaggagagcgtctcaaattgtagagactttttatggaatgagtatccgaaatgtttagaacagggaacggacaacttgattgagccaaaaaaagaagcttagattttaatctcctgacactcaagtttcaaaagagagcagtaaagtcctgtccggatagcaaattaatccaccatacaccagagtagggcaaagaaacaggtcgcttctaacttttccggtcacctgaaagttttcaaatgtttaagcaaaggcaccggtacaggctgtagccggaccagcctcgacctgcgtcttcgctgagctgtatttcttggttataaacctgttccaagtttaaacacacatcaaagagagaatcagacaaaatacaaattctacatttctactagggggcaagttaagaaagtaagagctcacctgaagaaatccctccatagcaactcatacattaaccagttgagtcctgtatctcccggtccgttcctgagaaaatcatttcaaagaatgataattagacacatacacttactatgttcaccagagttccctgaagtgttttgcgtttctgagacataccttggagttgtggtggtggttgatgcggagattgttttcttcagctcatcgaacatggaacgaggagagatgcttcccatggctaaccaaggtgatatcttgcaagagaagtttgcaccaaagacactgttgttgcctcctttctggtttcccttgctcaaccgagcctgacaatccgcggcaaagctctttagtctagtcaacgcctctgtctctcctccaaccattgtcggtttcccctcctgagcagaacaaaatgttaactcctaagagaaggtgtaagacagtaagagccgcagacgaatattggacctaaagagaaacgttcattgatcctaagaagaatccatggaccttcaaacagcactactactattaacaattgatagtacttatccctatcactctatgggtaagtagctcttctcctatagaaatggaaccaattggcagagtttgaattataagtcccacaagtttccaccttttctaaatgcctaaacctagatggataaaggaatcaatcaagctaagcaaagatgaagaactcaaacctggctagtcctaggagtggggctaatgccaagatccaggagagaaggaatatcgccaagctcaacgtctcctcgagagggcaagcttttcaattgatcaagcgctgcgatagtcttcctaatctccaatttctgaactttatccttgaaacctccgtaatttgacggcaagtcttcaattttgaagggcaaatcatccaaatgatagagagtgcttccccagaaatacttgacttcaacgccttcctccttcatcgccgtctctatcttcccttccgctttaacctcgtcgtgagacacttccctgtgagcataaaccgcgtctgctccaatctccttagccaattccaccaaaacagcttcaggtttcccgacacggacaactagattcgaccctctggcttggagattcttccggagctccgaaacggactcaatcagaaactgggcacgaaaagccccgttttgtcgaa

SEQ ID NO: 25942 - DNA, 2279 bp, Arabidopsis thaliana landsberg
gaaaaaataaagctttgagtatctccaaggttaccattacagagacaaaaggggtatttaagcttagtttctctgtttatgtgtatgtagtgcttttaaatcggggtttaaggtttataaaagtggtgtttctggtaacagttaaaactttttgaggggatattacagagttcaggaaataaaaaatatagaaatttgtgttttgtgtttaaatggaacaagagcagaacgcaaggaagattatgttggtgggtttggatttggtgttgtagaaaattcgcataaaaacgttatggtgctacctcatcatcactattatccatcatattcatcaccttcctcttcttctatgtgtaactgttctgctggtgtaagcgatcccatgttctctgtttctagcaatcaggcttacacttcttctcacagtggtatgttcacacccgccggttctggttctgctgctgtgactgtagcagatccttttttctccttgagctcttcaggtttcaagttctcacctttttgttgacttctgagctatgaaaaaattgaattttgttgttatgtgttggttttgatgtgattttggtggataaaatccaggggaaatgagaagaagtatgaacgaagatgctggtgcagctttcagcgaagctcaatggcatgagcttgagaggcagaggaatatatacaagtacatgatggcttctgttcctgttcctccagagcttctcacaccctttcccaagaaccaccaatcaaacactaacccggatggtaagatctccctagcctctcacttaaacgtttcccgtttttgtcaatttgtcttggtttcatgtgttcttgatctcttgttatcatgtttgatgcaactaaaagccattatgatggtattagaatgtcaagttttttaccagtgttacctcttagtggatacatataggagtggaatgtttagtatttatgctgattacaagaatctgccgttgtctatgtggatgacagtaacctgtggcagtggtgacaggaggctcattgcagctggggattgcttcaagcgctagcaataacacggctgatctggaaccatggaggtgcaagagaacagatgggaagaaatggcggtgctcaagagacgccgttcctgatcagaaatactgtgaaagacacatcaacagaggccgtcatcgttcaagaaagcctgtggaagtccaatctggccaaaaccaaaccgccgctgctgcatccaaagcggttactacaccacaacagcctgttgtcgctggtaatactaacagaagcaatgcccgtgcatcaagcaaccgcagcctcgccattggaagtcaatatatcaatccttctacagaatctttacctaacaacaggtgaaaacagatttttaatactctgcatattcattgttagttcatatctcacttactgactcttgcaaaacagaggagtttcgatatatccttccaccgtcaacttacaacccaaggaatctccggttattcatcagaaacacagaaacaacaacaacccttttgagtttggacacatatcctctgattcgttactcaacccgaataccgcaaagacctatggatcatcgttcttggatttcagcagcaaccaagagaagcattcagggaatcacaatcacaattcttggcctgaagagctgacatcagattggacacagctctcaatgtcaattccaatagcatcatcatccccttcctccacacacaacaacaacaatgctcaagaaaaaacaacactctcgcctctcaggctatcccgcgagcttgacctatcgatccaaaccgatgaaacaacaatcgagcctactgtgaaaaaggtgaatacttggataccaatctcatggggaaactccttaggaggtcctctaggtgaagtactaaacagtacaacgaatagtccaacatttggatcttctcctacaggggttttgcaaaagtccacattttgttcactctctaacaacagctccgtgagcagccccattgcagagaacaacagacacaatggcgattactttcattacacaacctgaaaactgaaaccaagtcctgcggcaggaaacaaaaaaagaaaagctctgttttttctctttcattatgttctgtttcgtctttctaaagcttaaagaggaaattagaaaatcgttgttcttatgattctttcttcgtttccgatttctgaatcatttgtttgataatcacttcatataatcacaatctttattctaa

SEQ ID NO: 25943 - DNA, 1678 bp, Arabidopsis thaliana landsberg
cattaatatcgttatcgtttcactatcattcatttcgcaaacgaacgattgttgacaaaaagaaggccaacttcaaacctttgtcttcacaacaatttatttcttttgcgatcaatcaaaatacaactaactttgggtatatttttttatattatgttaaattgtaaagtccattcaaatacagctaaattggtttatatgttaatattttggatgttatagtgtaatattatttttggtctttttatatttattgttatagaaagtcttgaattattgttttcactctctgtacgatctttttctattgacatgtgcttctaacaagggagatggacgaaagccatcgaagacggggaacatgtccagaaattcatataggacaatgttaattgtaacattaaggaaaaaaaaaactcccacttggtaaacgtaactataattactgacatatggaggaatcttcatgttgagcgattccatgacccagaagcttatctttttattataactattaaattttaatccgtggtacgcaaaagttaaaaaccggttcttcggggtctgattattttgtccaaacctacctaagcatgtatgctggcccaaaataatcaaaaaaaaaaattcataaaagagtgtttgtagatattacaaattaaacaaattttgtttgacattaactattcaacttttcatttgaatatctctaaaatcctatctaataagaaatacaaaaacaagaaaatggactaatcaaattgataaaatatattgtaaaacctcttttaacttcctgattccggtacaagtgattgaccagaaacttcaccaaaccggccttctctgtttctaacaagctcaccaaatgaaatacaactctctgtttgattattgttgtgtcttctcgtaaccttaatcttaacatgatccggtaacctcaaagtataccgatcttcttcctccggtttattcctcacaattgaatgacctgtcgttttcgatctcgagaatttatccggtaacgtctcaatctttctctcgttgttaccactactttgtctcgacaacataacctcgtttgatgttgacgtttgttcctgatcgcgattttcatgtgcgttttcttgtatgacttcgatgatcaactctttgatgttttctggcgcgtttggatctaaattccgacgacatacagggcatgttttgttagattcaagccattgatcgatgcattcttgatgaaaaacatggtaacaagttgtcaagagtcgtaggaggatgtgttcttcttcgaattcaagtagacaaatcgcgcattcgagaccgtatttgtcttccctgagatctttgacggatgagaatggaaacaaagggtaggattggatgatgtgtggctctagaccagggttaaccggtggttgaacgggttcttgttgtgcttggatttgattttcgggcaatccgttgtggtaatggtggttccaagcttcggtgagagtgtggtagaaacatttacagaaatagagagcgaaaaaaccgatgaaaaagacgacgaggaggatcacggttaggattatgactagaggcggtttactgtaatgttgtggtggatatggaacagtagtgttttggttgatcggtttcgctatcggcattgatgaaaagagtatcggag

SEQ ID NO: 25944 - DNA, 608 bp, Arabidopsis thaliana landsberg
aagaccaactatatataaaaaaacaataacccaacttatttctgatttttactgtatatatgtaggtacagatatatagatggagttatacgtacgtacgtatgcgatagggtggcgaatagtttcgacgcattaaatgtgtacacagaggctgcatgggctttaggccatttactgctctcatgcctctcttgcactttaacctcctcttccttcttcgtactctcctactaaaaaaaaactagtaattcaacgcctaacattttagttttttcttttttcctgctacatcactaaaagttaattatttcaaaaaagaattgctacaatactattcacattttaagtttgtttcatcctcgtaagtctcaaatatttatttttagtttatttcttttttttgtcaaacttttagtttatttcaattagtgttttttctgccaatatgatcaaatctgagattcaaaatggaattcttctgttgaaaaaatggatgcttttgtaataaattcaagatcgtaggttttttttgtttctgggcttcgtatatgggccataagacggaagtaaacttttggcccattatatattttatccccaacgagaat

SEQ ID NO: 25945 - DNA, 1184 bp, Arabidopsis thaliana landsberg
tcgtcgtatggagctgatgccggtacgaagacgtatgccatgtatgggctgacttttaatttgtcgcttctcttcaacgtatggctaagagcagtgttattgtaaggaagaaggatacatcttaagccttggccatttttaaaaaagtgctgtgtatgtgtttggtgatgtatttttgtgatacgtgtgtgtttatactttatagactgaaaaaaaatcttggattgttttttcacatttatactcttgcatgaatgcagctgaaatgacgttgcgttttcttactaagaaacgttatagtgtttgtgaccaatgcaatatttgttccgatcctctcacataaaaaggagtagatacaaacgaattccacgaaccaatatgtgtctgagaatttcaagtgaggagttttgtaccagatgatttaagtgtggtcgtctttgtatactattttttggttggtgggacaagtaaaaatggtcttcaaatcttccttcctaactagaaactgaaactttgtccctctaaaaatattcgagtgtttcgtaacttccgttcccttttaacagagcaggtacttgtacatctctaattttgtatacatcgtgccaaactgtttgtcttactaccaatcgatatcgaaatataaacataggaaatggtcaaacacttggtatttcattttaaaacataggtcggcaataacaaatgacaactttgacacaagatatagataataaatgtcaatgtactattcagacggcataaataaattcagttgacccttaacttgtctttcggatttcacatttatatagacaaactcaaatgcattattcgacaccaaaacccaaccaactcattaagtactcattgacttttaatcattcatcaatttagtcaactttactttcgcgagcaatccaacggccaccaagtcatttatattaattaaggaaaaaaacaatgaataatgaaaagtaaatgacgaacataagtctatatcatttggtgcgcaattaatttcataacctctacggttctacctaatacccatatctactaatcattcaacaacaatagtataaaacattgcaccaccactaatttttctctatttaaattgatttcttaataaaaaaatttacaaatttcaatccatctaaagtactcaaaaaatcaaaaaa

SEQ ID NO: 25946 - DNA, 1114 bp, Arabidopsis thaliana landsberg
  unsure (1)..(1114): unsure at all n locations
tcagatatcgtttctaaagtcatacatcctatatctaagacgctttggtatgaattaactgttggggtccccacaatcttccgtatggtttgggccttcagctgaacctcctttagatcagaatgaattgcaataaacaacgtcatatcctcgtcatcgagaatatggattgggtttgcccgctgccaatctggccccatcatccactgcggccactgataggatagttccacttcatcttccggtcttagcgtcagtctttccttcacagcttcaaccactttagcgaacgtgtctctctcacggagctttaccgccaagcataacccatctaactcggctnnnnnnnnnnnnnnnnnggattcatgtttttccactctcctcgaaccagccgaacaaccatcgccattgcacctgtcgataatcacccataattgcaaagttagaggtcgtatgagacaaagttttaaaacccttacttagcgctcactttttactcatatacacatgatgaacaaagtaacttgagaattaaattcgtacctgagccttcaattactctaatcttgttatcgtcgccttagtaaatgcagatatttgaagttaggtgtttacagtttttttggtgaagcaacatagatagaggcgtaataaatacataaacaagcaaactgaattatatctctcatcatcattacgattctctctctctttaagtctcggcggcgtattttcttgcagtttttgtcgtctcattaaatgcgggatatgcgaaaatctcttagcttacactacgcgtatcattagctatagggccaaatctgacatattcgttttgcatgttttctttcacctaatttttggttttacatgtacacatccttaaataaatccccgtagaagtatatatatttaactgacccatattagaactatattaatatacaataaagttataaaattcaaatctatatagaaagaaagaattaactatatcatatgaaagaaaaagaaacctaccaaaagcacgaatttgaatatacatttcccgtttgcatttttaaaattttcgcgagcgagaaaaattaaagccaaaatttcccagtccttgccg

SEQ ID NO: 25947 - DNA, 1232 bp, Arabidopsis thaliana landsberg
agtttccctttagggtaattagttaggttgcttatgctctcatgatgaatgacttgatctcaattggatatgtgcagattgacttggtatttcgaagtattcattcatagtggagatatggagtttagtattaattcatgtttagagtttccatggcatattcagactaatcgtgctttgaattgaaataaactttcgatatattgatactgacgagttggatgggggggggggggggggctttgggaaatgtcaggttatattggatgaggctataaccaaacttaaaccggatttcttctggttgggtggtggagaaatcgatctgaagctcggtgtcagaacatccgaattccttgaatttgtgaaaccattcattgttccttgcagttgaaatcaggaatatgtataacactatttttatcaccctgttatgaaatgttaggcttagctttaagattttagcttcaatgaaggtttttatctctcatacacattggtattctttgtaatgatacttttgttacgtgctacttggagctaaaatggcggcaaagagatctatttgagtctacatgtcgattattctagattggttattgttgatttagcttcaggctcggtttagtttctgtatttaagatctcttgtacattcaaagcttaatgaagaattttcacaattctgtttctcaaatgttgaaaatcttttatgcaatacccataagaaacagagtaattaataggaagcaccttgtttgttgtatacgaggagaaatagagaacaaagaagttggtcatgaatatatatagagatagcacaagagtcattacaaccaccaacatggtgaatgcatatgcatataacagtatgatatatttagagagactggtatatatggatcgggtaattaagacttctcgttgtggatcggaggcttacgatgaggctgaggataatccatgactactacttcttcccctgtctcgactccacccaacgcccgcctcctttctccaccattgaagacgtccaaagaagcaaccttgtgatgatgatgcttatgtgaccttaaacgacgagcggcagaggcacatccaacattgggagacaaaagcagaagaatgaaacagaacactatcacgagtccactcctcaaagagcaagacatgacttctcttattctccttcttgttcttgagatacttgtgtatatatgctgtgtctgtata

SEQ ID NO: 25948 - DNA, 1584 bp, Arabidopsis thaliana landsberg
agtagtcgatacttgtctatgggaaccctaagggagtatgaaaagagtatctgggttgctgcaggtagggtaatcttacttacagtgcagaactacttgggacacaagtcatcggtaaataaacaattattagggcttttctattgtgtaatataggcagcttacaacgttggaggtcgaagcttgaacttagataccattcagacttcaatccttggttgccgtgtttctcgtccaggactggcaagtctatgattgttttcgattctgaaaattgaacttgatgagggctgctaataaggattggcgtatttgcaggtatttaggttcttgtttgcttctagatcaaagggtagagctggagatttaggaagagattatgctataactcaccgtgagcctctacttcatttcgctctttgctcggggagcttgtcagatccatcagtaagcaaatcccctgactcaacatcgtttcttatcttacacgctattcatattgaaggattaggttataaagcaacacgattcttttaggttcgtatatatacccccaagaacgtgatgatggagctagaatgtggtagagaagagtatgtaagatcaaacctaggaatttccaaagacaacaagattctattgccgaagcttgttgaaatatatgccaaggatactgaactctgcaacgtcggtgttcttgacatgattgggaaatgtttgccttgtgaagcaagagatagaatccagaagtgtcgcaacaagaagcatggaagattctctatagattggattgcacatgatttcagattcgggttgcttctctgaaaagaaaacacgactcatgattcggattagttattttttttttcctttgttttccatctgatgtgagcaatgaattgaagaacttacaaagtatcaaactttctagttatgagatatgttaagtttatacctttattgttaaggaacgactacaggatatttccgagtagcttcaatctccatggaactagtccatctgtagagtttaaaagtgagctaatcgatcctcattctaagaattcagctgctccattcgaaatatcacgagtctttcactgtgacggcttgttgttatgcacctcccatttcgacgcatctagagtcttggtttggaaccctttaactggtgaaaccaggtggattttaaccggcgattttcgccaaaaaggccgtagctttgatgtcgggtactactaccaaaaagacaagagatcctggatcaagagctacaaactcttgtgctattatcgtggtaccaaatattttgaaatctacgattttgactctgattcatggaggattcttgatgatattatcgctccacgggggagtattggatactcggaacttagcgtgtctctgaaaggaaatacttactggttcgctaaaggtgtaacagaagagcggccccgcaccatatcattgctcaaatttgatttttatacagagaaatctgtacctgtgcttcttccctatcagagtcgtcgtcttttccaagctagtagcctttctgttgttagagaagataaactttctgtg

SEQ ID NO: 25949 - DNA, 928 bp, Arabidopsis thaliana landsberg
aggtaacttttgtttttttaattataattttctaatttaatgcatagataaatccaaaattatcttgtgatggagtgatgggttctggaaggtaaatctatctacacatacactttttcatgttcttaataacatgacttgtggcataccatggttaagagagccaatcgtgcagcggtaaatacaaaaagagtctttggatatcaatgcattctcaaagatctatttgtagctcggagttcttagctttgtgtatcaatgacttcaagttgagaaacgctttctctttattaatcaaaaaacaaccaagtctaacgaacccaagaagcagactacttatggtcgccacatataagagaccttagtcaaagcttgttgccaaagcaaacacaaaccgacgtataaaacccaaataaagcccaacacaagtttaaagaataacataattaatagcctaataataatgacgtagatgttgctacattagttaataacaatttcttcctccattcgataaagaatattctctagtatatttttctttgatatttattttaattttattttatttttgctttttaaacaagaaatatgattaaaaattttttttttatattctttgcattaacttggaatcaagatacatcattccaggatattacaaggattaaggttttagctctagcatccttagcaattctatccgctacatgattgatattacgtgagatcttaaggaagtcaaaagacttgtatcctgatgccaagtttcgtacttcttggaggtatgtcaatataggtgaatgtcgtagcccgtggattgctgagtggaggggttgataaagctctgctgcatctccacaaatagaacttcatcatatccgagccttcgcagatgaatcatagctaattttaaggcctcgacttc

SEQ ID NO: 25950 - DNA, 1602 bp, Arabidopsis thaliana landsberg
ggatagttccatggagcttagcttaggtacgcatcgacatagacttaaataccgtagactagattatcttttatcaagggttggtgatgatcaaaagtcaaaacaatataacattggttttggttagaccgactcaaaccgacaaaacatagaaattaaagtttattattccaacatacgataacatgtcgtctcccatacatcttccccatgcatgtttgcccttcacttcattggcctcaccgatccttcaacattgtctgatcccacatcaggcaattcaacggccacgatcgggacttcgttaacatcggttttatttgctagttggttctctgttggcaaatccgttttcgtggaaccttgatacatcatgtatagtatcatctgagctacaccgaatagaaaaccgagaatgtttggcatctgaatacaaagcgacatagagagacttattagtaaccaaaaactggttagaatattgaaagatgaatgtgaaaatgtcaattaatattacagcaatgaacttgtctttgataagaagtccataaaagaaccacatgacggcgttaagagtgagagacaaggagagaagaaacggcatgtattccacactctttgtctttataaccttcctctgcaacattacacattgtatattaatttccaattcactacaaaaaacggcagatgtttgaaaaaaagctgatagatggatcatcaccatgacgcttaagggagaagcaaagtctgcgagactgtaggcagcacaaacccatccacggttcgaaacgcggtgtttttttggaaccaaaagattatctagaagaattaagagaccaagtccgccgatgttgcatatcactatcaacttcaacgtggatatctgccaagtgtaccaccagattaattagttgtagatatagagtttcatcacaatcaagatttttgaaactagaggtgtacatactaaaaatatcaaccatactataaatagaaatatataattataggaaccttggcctctcttggtgcataaaggatatagagaaacaagtaggagatttcaatgaaacatccaaaggtgttaatactaatgatcagataagcatgtgtcttcatgattccgtagtagagaagaagagttgctcttgatagtgcccatacgcacggtatcgactgaaacccttttgatgattggttcttgtatatcccataaaacgttggcctaaaatatgtataattaatcaaatactttatataaactattttaatatatagcatttcgagttagaaacttacactggtgacaagaacaccccaaaagacacaatgttgcctgaaaacaaaagccagaatcaatattagcgttatgaacttctttattttgggtataaatgttaagtaatataaagaacatgtattctgttgttcaaaaaataaaaaaataaaaataaagaacatgtatactctgttggaaatatatgatacgtcacttttattgttgattttatttacatattccgaccataactcataagcataaaagaatatgggaaataacatacctaagagaccaaagagaaaaagcatttcatgaac

SEQ ID NO: 25951 - DNA, 1143 bp, Arabidopsis thaliana landsberg
  unsure (1)..(1143): unsure at all n locations
aggatggatttcgaagattcatccgattcaacctaaactctgagtatcttcgagctcttggatcttttaaactcgttgattctttgtttcttcaattttctacgttttctggaaaatttcaattgtttagagcttcattgatcttgcgatggtttccgtagagaaattgcggcgtcgtactagaagatcgagcaaaacttcagctgagaaaactccagattgtgttcaagcttcaccgattccaccgattccaccaatttcgaatccgtttcaacaaaatttcaattcaaaaccatcgatctatcctttaccacagttcgacttctcggatnnnnnnnnnnnnnnnnnnnnnntctcaaatggtgataatccgggtactacaattgtttctgaggtacttgatggatctaacttttcttcttggaaaatagcgatgtttgttgcgttagatgctaagaataagatcgcttttgttgatggaactttaccaagacctcctgagtttgatccgagctttagagtttggtcacgatgcaatagtatggtcaagtcttggatcttgaattctgttacaaagcaaatttacaagagtattcttcgattcaatgatgctacggaaatttggaaagacttggatactcgatttcatatcacaaacttaccaagatcttatcagttgacacagcagatttggagtttacaacaaggcaatatgagtttatctgattactatactactttgaagactctttgggatgatttggatggagctagttgtgttaacacttgtcgaaactgcaaatgttgttctgctactgcttctgtaaatgagcattccaagattgttaagtttcttgcaggtttgaatgatttttactcaaccattcggagtcagataatcatgaaaaagacaataccagaccttgctgagatttacaatcttctggatcaagatcacagtcagcgcaacattgttactaatccaacgaatgcttctgcctttaatgtctccattttgtcgaatgatcagattgctgtcaatgctactcgttcttttcaaccaaattcaaaaccaaaagttcagtgttcacattgtggatacactggtcacactgttgacacttgttacaaaatccatggcta

SEQ ID NO: 25952 - DNA, 1066 bp, Arabidopsis thaliana landsberg
aaaaaactttgtatcagactatcaacataagtgaattatgttccaactgacgtccacaatcaattatacatataacacgacacaaacagttgctaagaatgaacgaaagagagttcagctcaaacctaggcagagatgggaatggacgatgccttattaatttcctggccaaaaaaatgatacaaatgggcctggattgagcagtcaggggatttgggctgccatttggattgtgcataaatacaatctgggctttaataaaaaccttgtagatgggcttttatgattcttaatgttgggccgtaattcttaaagatggtcaacgaataaatcaacattgggccctggtgcttttgttggtaatgtgggccaagcccaatagaaggagcctccagcgagattagggttttgtcaatcgtcgtagctgacggttcaaggatttccagccaccagaaacaaaccaatagcttgggactgagccatgggggatccaaatgatgcgcatggggaggtggagctcttgtcatgcacgaagacgggtgggtagaagcttcactcggatttgaagaagcttctttgtccactttgacagataggttgagagcggagcagacaacaagaggatcaagaaagagctcttcctgtctctgtctcgaagggttgaggcaccgtggaacaaaggcaagcggttgaagatacatgtagattgaaaaaaacggccaaaagctgaattagatcacaccagggacaagaggaggagatctcccgatgccgacaagcataagcttcaccggtgtcgaataggtggttagggactgcgtctcgatgttagtgcccgagagaaaaaagagttttagtttagtcactctatttttctctctaaatatgaatgataaatttaatgtaaatattattttagttaacttttgtttttttaattataattttctaatttaatgcatagataaatccaaaattatcttgtgatggagtgatggggtttgggaaggtaaatctatctacacatacacttttttcatgtcttaataacatgatatgtggcata

SEQ ID NO: 25953 - DNA, 1265 bp, Arabidopsis thaliana landsberg
ccccctttgggtttatcagggtttttttcccacccaaaaaaaaatcttatcaaaatttgctctatatcaaaccattcaccattgactgtgtagcctatattcccaggaacagctcaacgaattttcagtcagattggacatcaatacgaccaccaaacgttgctgtcaacaagccatctaggactgccttttagggcttctgggtttgaacagtttcagttgtttcgtacacaggaagcaatgtccataactctttccatttaaatccgatttaagatctgtcagttgctgcagactcttggtttgataatgaacaattatgtacctttattattccatatcgatgtcagatatacgtgtcgagcctccaaagttgcctcccccacactattctattttcctttttcatctttcttattcttctcttctccatctctgatctgctccaactttgctgttaaccagcatagaatcttgccacagctccgccatggccaatcaagcccactagttgttttcaccacctacgcaacatcttgttctctatcctctcctcacttctctctctcttctcctccctttctctcttttcgaataacacacaccaccacaacacatccaaggtggcttcaagactcttgtttctcctcctcacgagtccgacgacaacgcaacacataaccgtaatgacaacttaacagtacaacaacttcgcagccgccatctcttccttcgtatgagcgaacgacatcaacatcaagaacactaatatagcttttcaagactcaaagatcaatgtgctggtctgttcatacacgaattaggtttgtgtttctctttgacggctcgtaatatacatgtatatatatactctacacacaaacgaccatgacctatgtcgtttaaggaataagatattgggcttattggggttgttttcttttaactaaacaaaatggtccaattactaattatggaattggggatgttacaacaaagtttgttacccaacctggtttgcattttgtggaaaacgtacatgaccaaacccatgcccttttcgagctcgtcaagtttatattttgtgttagccattgtttcgagtggtgggtgctggccacacatttatttgattttcttttgggtggaatgggtcaaacgaaacataatttttgaccaaacactatttgctctgataccaaatgatagattttgattttgtcaaagcttgaccgaatcagagtgagtactaaaactgtaagata

SEQ ID NO: 25954 - DNA, 4361 bp, Arabidopsis thaliana landsberg
tgctcttcagtaatctcttctatgatttgttgtgggttctctattgttttctatacgtatttccaaaaattgaaacttgattatgtgtgattccttttaagcaagatcaatgaataaaaaagtttgctctttgatctgaaaatcagcaatctattggatattgactttgttcttactactgtaggatcttgtttagattctgcaatggctttcaggcaaactttatctataaggtccaggcttttcgctcgtcgtaaccaaccagtttatcatattatccctcgtgagagtgatcatgaaagggattcattctgtcaagaaacatctcagagaagttaccatagctttcttcaccaaagatccgttaacaattctgatttctccaaagtttctggaggaagcttacatttgcctcttgctcctacgtctggttttgctttctatcgttatatgtcaagtgcacctggtgttggttcagagaagattggtgtgatgtctgacattgcagaagtcataaccgactcatcattgttagatgtgccagctcaggctgctgctgctgtcagtgaagttacacttgcagctgctgactctttcttccctatcgcggcccttcagcagtgcattgatatggtgcatacattcacaggctttgagtggtaagaaactttaatattgtttgttgtgtcatgtatcactttaatcagtctgctggagttgatcttaagtatacatcacatgttagctgagtactgttgagataagattcggatatttatgagttaaaaagtctgaaaacctcatctggaccaagatattactatatccttatattctttatggctatttacaggagggcatccattgttgtagctaccattttgatccgatcatcaacagttcctctcttgatcaaacatatgaaagacacaaccaagtcagcggtatggtgctcccttttggccctgtttcacaccttgcagatcatctaggatggtgcatatataaagtaatttcaaatatagagactgactgtagttagagaattagacatgcttctttcggttataaaaatatgaatatgttatatgtagactttgatctctgtatagaataggaagttgagatccacatcactgtagtcaataacacaagtctacataaatcataaactactgcaaaggatgtatttgtgaacttcatgaaaaaatttctactttccaaccgttacagtttcttcttgctttttgtgtttttacatactcaggttgtgaaacaaatttgacatacaaaaggaaagcaatgtctatgcacattaacttataacttctgtcatttatacttggttatttttttctgccttatgctacatccatcagtagtctattctgtgatcatgcagctgatgaggccacggttggagtccatccgggaggaaatgcaaaacaaggtatgtgaagtttgttattaatacatcatggaagtcatcctcacttttgctacctgctaatagcttttgtactgactgcatgtccactcagctttagctcagcatgttaattttgattttctccatattctttccctactatttttgttcagggaatggactcggttacgatggcagaaggtcaaaaaaagatgaagaatttgtttaaagagtaagctgcttttaaatttaaacattttctgaccagaaaaatcaaatttaaagatctctttggagtttaaacttcttttggtcgtaaaaactagaattctatactagttttaatataagttttccctcgtggatcatagttgggtagggagtgcgctatatgtagcttgtctgttctactggttattgtattggtgcagtctcctgacattttgaatatattggtagatatgtcctaataaccatatactgtttgtttataatttacagatatggtgtcactccattcaccccaatgaaagggatgtttattcagggaccgctgttcatctgctttttccttgctgtaagacgttttaatcttaagatgttttttgggctatgttgtttgttatatcattaggctttttgtctcaaatgagttattttttccccagattcgaaatatggcagagaaggtaccttcattccaaacaggaggtgcattatggtttaccgatctaacaactcccgacagcttatacatcttgccggttataacaggattgacattcttgataaccgttgaggtacagtttctgctaacttaataaactttttgacatcaacctttaacagacttgctgacttaagcttaaacatgtccacttcgcagtgtaatgcacaagaaggcatggaagggaatccgatggctggcactgtaaaaactgtttgtcgggtttttgctctcctcacagtcccgatgacaatgagttttccacaggttattatcatttatcggaaaaaacctcgaaagactttgtataatggatgttctaacgaatttgcgaaaatttgcaggccatattttgttactggatcacatccaacctgttctctctcatgtatggacttggtgagtgagtgtgtaatgaagattttaactgtggcatattcttggtttgaaacattaacaaggaatggttattaatgacagtgataaagcgtcctcaagtgaagaagatgttacgcatacctgatctgcctccacctcctccaggtcaacaaccttcatttgacctgttttcagctctcaagaaaatgaaagccatgacacaggaccatacacagaaccagatagaaccaccttcgccagtaaacccgaggctttcctcaacatcgctgagtcctgttagtaagaggctcaaggctttggagagccaagtaaagggaaggaagaagaatagcagcaagaagaagtgatttaaaacggtgcatactatttttgttaagagggccaaacgaaaaaaataataaagcttttgagtcgaaagtgaacacagaattttctcactgatgaaactactctgtgagctaaaaagctggaggcagctattgtaagtttgttttgaccaattacagaatagaagattgtttttatagaaacattttggataacaatatatacttttttatcttgttaagtaacagaacttgaacaacattggatctttttgaacatcttggtaatggttggatttattcagcacaagcatccataatctttgtagctatgttgaagtttattgtttatagagcagagttataatagatagagttaataagaaggacgtcgtcgaggagcagtttcacgttgggcgttgaagtaaacagcagcaacaggttgagaaagaccaaagtaagaagagaaagcgtttgtgttgaaacactctctagtttccggcgctgccttcacagcttgcctccctctctgtttgaatagcgcaaagacgtatctgtgtattcccgccaccggtttaggcgtctcatatctcactatctctctccctgcaatcaataaatccattcatgatcttatcttcatcaacatacatacatacatacatacatacatccctatttctcttcctcttccaaaaatgtgtttgcttgggaatgtgtttacaaccaaagatgtggtgggtgaaaaagtctatgtaaatgtgttatgatgtgatgtattcttaccaaaagaagcatcggttgtcccgggaatatctgtcaccatcctgaatttgatgagaacataaagaatacatattatacattgttgttgtaatatatgagaagtaatgtgatatcttcaatcgacttaccaatgcagatattcacgcatataaggattactaggactcggggcatcggggtccatcatgatctttcgagttaaaaagaaaaccacaagattaatgctacaagagagaactaaataaggtacttaacatatgtattttaagtttagaagaaagctaattacgtactaaggtgaagaaggaacaaagatcttggccaccgatctcaacgcgaggcttagagaggagaagagaaggcgcgagctcgtgaccattggatacgattgtgtggaattgaaagtgactctcattatcacacttggattgaacatttcgagtacatctcctatcactcttcccactattagtggctctatttctcttgacatttttctttgctccaatgtgtttgcgtttgtgattgatgctgatttcgttagaatgaaaacatgtgatagctttatataggctttctaaagaatctcgggacttggcacaaagtgagagatagattgtattttgtatgtatgtatatatctactatactgaaaaagatagtcttccataaatgctctattattttactattt

SEQ ID NO: 25955 - DNA, 1248 bp, Arabidopsis thaliana landsberg
  unsure (1)..(1248): unsure at all n locations
ttgagagcatcctcagtgtattcgtcagctaagcttggatcgagtaatttcatcatcatttcgcaggtcgtttcctagcttgagctacctagccacatgaatatgtcactgttttagccgcaatctgactcgagcggattcttcccggtccacaactccattaacgcctccccgaagctgtacacgtcgctcttctcgttcactatggtagtatatgtatattctgtgaacaacaaagaaatgatatgcaatttacaggtgttataaaactgtggattgaaatggaagaatttaaagcttgataagcaagaaacgtaaagatatgttgacctaatgtcatatggctattcagaagaaaacctgaagattctacataccgggggcaatgtaaccaagagttcctttgacaagaggagcnnnnnnnnnnnnnnnnnnnnnnnnnnnnnnnnnnnnnnnnnnnnatccaaaatcagcaatccttggtctccattcctcatcaagcaatatattgctggacttcacgtctcgatgtatcaccggccgatctaacccatggtgaagatactccagccctttagcagctcctaaagctaacgcttgtctcacacgccacccaatttcttgctcaccacgacgctcatgcagctgctcccacaagcttccattaggcatatactcatagacaagcagcttactgtcctcacacgttatgctgcagaacaacttcacaacgtttatatgttttatattgcttagcgtcgcgacttctgcctcgaattctccgttattacttctgttattgccgtcacttaacattgccgttgagcttctaaagctttcgtgggaactctccggacaccagatatgtttaacggctagtgtttcaccgcttcttagacttactttgtaaacattcccctgacctcctctgcctatgatattctctgatttgatctcatcaataatttccatttcattaaagtttagtaaccggaaagagctcacttgccagtcgttcttcttctgaaccgttttattcaacttatctcgtcttatcttaaagatcacgtaactgaataagaaaaacagagcaagtatcgctgcaacaatgaaacacatgtcgacttttgacaaatgtttcctcttcccttggctgtgaggttttccaagcggacatggacgaagatatctgatctttgagctgcatagtcctgaatttccttcaaagctttcacttacgagagattc

SEQ ID NO: 25956 - DNA, 612 bp, Arabidopsis thaliana landsberg
  unsure (1)..(612): unsure at all n locations
agaaacgaatcaatcaatccggaaactcttcagcatcaaagagcagcaagcagcttaattccaacatttaaaaaaacctaaaacccaaatgctttagagctagtagcagcaagcaaatgatttaaagttaccagctttcagagaatctccatatggactctgtagagcagaaactatacgtcttataggattcctacacaaatcaaaattcataaatttaaggtcagcataatcatttgagagtgtgtgattgcgtttagaaaagttagtagtacctttgattgtgagatagaaaggaagtgggtttagggtttcgagttcgagaagagaaggaaagaccgagaggaggtgaaattgctaaacccgccattaccagagctcagctttcagagtttttcgggttcaggcgtggatagatgacagaggacggcaagactcaaggttactgtttggccacgaactttaaaccgaacccaaccaaggcaacagcaacagtgacacaggtgggagagggtcaggtgcactcagaaggtttcacaccacctcataagcccgaatccatgattaaaaaagaccagattncnngcttaatatttttaacatgattccttt

SEQ ID NO: 25957 - DNA, 1051 bp, Arabidopsis thaliana landsberg
tagccacacttagaaaagagaacatttcctaatcaaactatatgctttttcaaggaagagttagatttatcgacccagttagttcgaaacatacctttactcataagtgtttcagataattgactttgtgtacacccgatagttccacgttgtgtacacctccttggtataactagaaacaaaaacaaataccataggacccgtaaaacaagagatagtaacaaatacaacttccttaaaatctaaagaaaactggtcagagatcagtaagatttggtgagaaagaaggataagagtttatacatggtaatttgaggaacgagtaaaaccctgtaattttctccaccgtcaataagagacaaatctgagagacgcgagagttatcaagttagcgaatatatcaaatcggaaatccaattcacgcacgaatctagggtttgattttattaggatgggcaaaatcaaacgatgtatacataaaagacgatcaagaacagtgaattctagagtatttgattctataaaacctaatcgctataaaagttagggtacagacaaaaacagaaccaaacagagaaatgagatcaaatcgataagagaagaacacacacaccgtaatttttgtcatcaaatccaatcgcccagatcggaatcggtagtgatcgatcttcaagaaaccgaacaagggattgttcgattacgattcaaattcctctggttcacgatctatataaagcttttctagagcttcgactgcgagattgcaatttggaaattgatcagaagctatcggtaaaaccctagctagaaatctctttgccatgaaaaatgagatagaagtatctttttgaattctctgacgtacaaatgaggacgtgggctcgtctaaagtaccgccaattttgttttctcttaatatgaaattatttttccagctgtctccgttaaaattaattaatataccaattttttctgatttaaaaaagttttcgaaacaattctaaatttggaaaggccacataaatgccattataacaaaccttttttttat

SEQ ID NO: 25958 - DNA, 1223 bp, Arabidopsis thaliana landsberg
  unsure (1)..(1223): unsure at all n locations
cgtatgacgttacctaatactattaccaaaaacgtcttatggaattgtcatttatttattcacatgggtttcaatctgtcactctctgtctactttgggaaatgttttaaatttgattggggacttttcttactcttctactaactacgtttgttttcttcaaaatctttactttctttatacaattgtgaagtgaatgaagtaaaactgaccatcaaaataaataaatacgtaagagaataaattgtagtagaagagaaagaagtctgaagtctgtgatgttttagaaataaaaaaaggaccattcaccaaaaacagcaataacaacagtattggtccgttcgaggtttaatttgaccaattgagtagatttgtctctttcgtgtttttaaaattggaccagaccgtttttggcttcccgaagtgtgtgactactctgccctgaaaccctctttctcgttcagaagcagagcgctccccattcctctatcagaaattttaacaacaatacaaactgaaacctttgattttcgtggttgaatggtcaaaacacacccaataaaaaaaaggttgtgatttttagtataatgcatttttcctnnnnnnnnnnnnnnnnnnnnaagagagaggcaattctgttatcctcctgcatgttagatcatttatccgaacaaaccataaaaatgaaaatattttgaaaaaattaaagtttgtttgttttcaaaaaacatattaatcccatgctcatgagtgtgacaaaaatggaccactagccgcatagaatcacaatgaagatttaacaaagcaaaaacaagatattgatattctaagatctacttgattaagacatgcaaatgcattaaaattaaaaagaagaatcgaccttttaatgcagtcatctaatgcgtgtggtaggaaatgctctgtaaacaaagtttttaaatgaagtcgaacaaaatttttagaaattgtaaaacatatcaaccaatagtttttggcagtaaaaattaaaagactttaatttgtaatatctcagtagatgactggaaacaaaaaagtgggtctaagcccatgtagcgaaccacgttgcaaaaggaaatgtctttatcagacagaggttggcccaaacccaacccagaggtgagacaagttgcctctgtaacaatgaaattgttatgggtcccataagatctttaagtgaacccttctgaaacgcttttcac

SEQ ID NO: 25959 - DNA, 1892 bp, Arabidopsis thaliana landsberg
agtcagattcaatcatatcgcatcttagaactaccaacttggacattgattttatttgctctacctgatgctttggttctgagtccccgccttcaaacctctccttcaactatgtcttcttatttgcttgagggcaagcaaagactaagtttaggggagttgatatgtctaaaatttgcatgttttcagtgtccattcatcatcgttttgagtccagtttcgtatcattcatcactgttttatatcatttcttatctttcttgcgtactttgcatgattaggatagctttgcatacatattgcatttctcagttgttttcaggtgatttggagctgtttgcgagcaaattggaagaaacgagccagaactagaagacatactcgaccaccaggtcgtgtgcatccaacaccatacccgacccccaagtcgagtaactttggagcctttcttcccacctagtcgaccccctggtcgagtatcctcagctcaggccactcgatgacgccactcgaccccctggtcgagtatcacttcgccacaccacctgaccacactcgaccattcactctaccaagttacttgactccctggtcgagtatcatcactcaccaccatcaccatcactcgaccggacactcgatcacgtcttcacactctacttaaatccgcactcaaccagacaagatgagcccaaggaagagaagaagagaagacaaagtgtttggaagcagcctggacctccatcggatcacgaagcccatctctgcccattatcattcgatgggccgggcgattaggttattggcccgtctactatcattttatttcgtttggtataagtagatgcgttagggttctttcctgggacatctagtcgacattgagtttttgattcagttttattttctgttttactctgttgcgccgctttttctcctgcaacctgtaattcgagatttttccaagttaatcagattccgcatttgatttcatctgtcatcttgtttctctactctttatctctttacatatgcaatattatcatttatctgcgtttatgtctttgagcatgttgtctgagtagtgacatagagttcttaaggatgggatagagtagttgttgaacctgttgtctagggataacttgattgcgcttgttaaccattcgaataggctaggataccactctattcgattaccccatccttaggaatttctcttctatctgatttctctgttttattggtaccgctaaatcgttctcattgcttgtttcttcgtttttgcaattactcgatcaacttactcgaccacacccaatgtttggcaacagactgtgcagtcgagtacggttgtctcatttcctgtttgttacacgacaagtatactcgaccacacccaatgtctggcaatagactgtgcagtcgagtgtatctgtttcatatcctgtctgttactcgacctgttactcgaccatatcctacttctggcatcagcctgttgtagtcgagtgactttagtaattctgtaattatttctgttttctgcatgttcgcttaagactgttagaaaccccaaaactgttattgcttggcttgacttagtgatttctgatcacatctcatctgtttgcatcacacccatttggattgacacctaaaatactacaacgacatgattggtgttttaggataattgactaaaaacctattatcaatttggcatcgttgccaattgggtgtttgtttgctatatttgagatttcagaatatttaagatcaagttctttatcatattttctgaaagttactaactttgttttttcagtttgtctgttttgattcaggtactgcgaatcaccagcttcaccagttggtactcgttgtatgca

SEQ ID NO: 25960 - DNA, 560 bp, Arabidopsis thaliana landsberg
ttatatattgcagcggatatgatgctgatatacatcgagaagtctcctaagaccaatatttcaggtggtctgttttggcgaccagcgcttgctgcaactctagcttcaccaattggttatgagtcactgaaatacatcaactatcctctcatgatccttaccaaatcatcaaaaccgttgcctgttatgttggtcggtaccgtattttacaaacgtgcctacaattggcagaaatattttaatgtgggaatgctgtgtgtcggcatttccatcttcacattcggtgtgaagcggagtgcatcagcgatgcaggcggtcagcagctatgctgtattgtggcgctggtacggtgttctgcttgtatttgtaaatcttatgctggatgggtacatgaacaatgagcaagaccgcatatacaaagaacatgcaaacgttacgcccacacttatgatgaaatctgtaaatctctggacctgtatatatcagttagtgtacatgctggcagaatgtgcgctctatggccacaagagccagtttctgggagccatggaaatgtttct

SEQ ID NO: 25961 - DNA, 1333 bp, Arabidopsis thaliana landsberg
cttccttgttttgtagtgcctccgatgactcgttggcgaattcgcatcttttctacaagagattgatgttgatagtgtttggtatgcaggaggacgagtggccctataaggcgagccaaaggtgggtggactccggaagaggttagtattgagtattgactagtgattgcttttgaccaatatcaattttggatcagtagttcgaaattcaagatgtgagttgttttacttaatgcaggatgagacattgagacaagcagttgacacgtttaaaggcaagagctggaagaacataggtaagtctcttcttctttttagattctagttctcatattaacaagagtaatgtcagtgctacaacatagtccatagatttgtggttcgaatattaaagttggagcctacttgcttacagtaactattagttccatactcttgtctctgtagttttatgagttactcttgtatgttaacttgatcatctgaggctgagcatctagtagaaagactttcttttacgtttgtttccgttttgttcggtgaagcatttagtattgtttgaattggtgtattcatttttgcagcgaaatctttccctgatagaactgaagttcaatgcctgcatcggtggcagaaagttctaaatccagaccttattaagggaccttggacacatgaggttgattctgtttctgattttatttattgtttggctttcatttttttatgtgaaatacgaaggcttaaagtttgttgttttgcaggaggatgagaaaatcgttgaactggttgaaaaatacgggcctgcgaaatggtctattatcgcacagtctttaccaggtcgaattgggaagcaatgtcgagagaggtagttaattcatatgagccaagcatttttcttatagttatattggaagctttaatgtcttttgatatgtatgcaggtggcataaccatttgaatcctgatattaacaaggatgcttggaccacagaggaagaagtagctctcatgaatgctcatcgaagccacggaaacaaatgggctgaaattgctaaggtcttacccggcaggtatttttacttttcttggcatgcgtcattggagttgagactttagagaagggttagcttctgggtttaatgaaggttttacttaaaacttgctgcaggactgataatgcaataaagaaccattggaatagttcattgaaaaagaagtcagaattgtacttattgactggtaggttacccccaccaaccccaacaacaaggaacggtgttcataatagtgaaaccaaacgttcatcgtatgctcacaaaagggtttgggt

SEQ ID NO: 25962 - DNA, 1354 bp, Arabidopsis thaliana landsberg
acagattcatgcttgtataatcaggaccaattttcaggatcacatttatgtaggtagtgctcccattgacatgtattgcaagtgtaagtgtgtacattatgcaaagactgtttttgatagaatgaagcagaagaatgttgtgtcttggacagcaatggttgtgggttatggccaggccgggcgtgctgaagaggctgttaagattttccttgatatgcaaagaagtggaattgacccagatcattatactctgggacaagcgatcagtgcttgtgccaacgtaagtagcttagaagagggctcccagtttcatggaaaagctataacttctggcctaatacattatgtcactgtttcaaattcattggtgactctgtatggaaaatgtggagatattgatgattcgactaggttgttcaacgagatgaatgtcagggatgcagtctcttggactgcaatggtttctgcgtatgcgcaatttggaagggccgtcgagactattcagttgtttgacaaaatggtacaacatggtctaaaacctgatggagtgattttgaccggtgttatttcagcttgcagtagggcaggattagtggagaaaggacaaagatattttaagttaatgacaagtgaatatggaatagtgccaagtattggtcattattcttgcatgatcgatctcttcagtcgatctggaaggttagaggaagccatgcgttttataaatgggatgccttttcctccagatgcaattggttggactactttactcagcgcatgtagaaataaaggtaacttggaaataggtaaatgggcggctgaatcactcatagaattagatcctcatcatcccgctggttatacgctattatcaagcatatacgcttcaaaagggaaatgggatagtgtggcccacttaagacggggaatgagagagaagaacgtgaagaaagaacccggacagagttggatcaaatggaaaggaaaattgcacagtttctcagctgatgacgagtcaagtccatatttagatcagatatatgctaagcttgaggaattgaacaataaaatcatagataatggttataaaccagataccagttttgtccatcatgatgtcgaggaagctgttaaggtaaagatgcttaactatcacagggaaaggcttgcaatagcttttggattgatatttgtaccctcagggcaacctattagagtaggaaaaaatcttagagtgtgtgtggattgccacaatgccactaaacatatcttcagcgtcactggtagagagatacttgtcagagatgctgattggtttcaccgatttaaagatggaacttgctcatgtggagat

SEQ ID NO: 25963 - DNA, 1129 bp, Arabidopsis thaliana landsberg
  unsure (1)..(1129): unsure at all n locations
tagaagtatcaatatggttcgatacccaatcaaaaaaaagacccggacaggtaataatttgagctaaattaaagagttatttttttttctttaaatatatcgtaaaacatacaatctctctttcaaaatataaaatgtataaggtaaaggcatgtttattaaaataatttgttttttttctttaaaaaatttattttaaaaaatcaacaaatcctaaaaaagactacataatataaaatcgtcgcaagttactaaatacatttaaatttacatagaactttccaagacattctataatatgaaacaaaataaaattttctaaaatatagggagtactaatttaaaccaaatctgtataaacatgtctttcttgtttaaaagttgtataatcaaaatagactattgattatgtgattggtaatgagtgttaatgactatatataataaagttttcggtaaaatacagtagtatttccaatcatagttttacaacatttgattgcaaaaactatcaccaaaaagaaaaagaaaaaagaaacattggtctgtagaatgaggtcttgggaactttgtcaacaagatgtattgtatggagagccgcatgattacatgttcctatatcttcacggttttgtcaaactttgttgatcacacnnnnnnnnnnnnnnnnnnnnaatgctctacttgatcattccgggacaaactgcaaatctgttctcaacttggcattctaagctaccattattaattaatttatttttttcattatgaaatatttttggtgagaacgtaacggaagacgatccacaacaaactgaacaaagtgatccagaacacaattcctctctccagacaaacgtcaaggcttcggattgctttcatcagtttttgcaagattagtttcctactcggacgtatattagcttttcccatttctattacttttgctctgtgagcaactccctaatttttgtgttcttccgttgtgttagtaagttttttttgctgacaaataaaaactgaaatttgttttaaagaaaattggcgactattttttctaatcaacaacgtattataatatggtagcttgaattcgagtgtagtggcgtgacttgaacacaaaccatta

SEQ ID NO: 25964 - DNA, 2374 bp, Arabidopsis thaliana landsberg
  unsure (1)..(2374): unsure at all n locations
aaggaacactaggaaaccatttcctttaagattaaatcaatttaaaggatagaagaataaacgattttgaaatacattcaatttaacctctcacaaatttggttatcaaccaataacattgtaaacattccaggtgtttttttttttgtcaaaattatttagttcacttattctttaatatatttactgtttctcatcaccttgaggctggccacaaactggttctattctatatgtcaaatttgtacatcggcccatgcttgataaagcccattacactgcatcaacataattacatgggcttgtttgttgttacccatcttgttgaaaccaaagattaattcccataccagcaaggcagcaattttaaaaccgtctaagaaactctcgatcaattcatctttctctcggctcaacgtcgttttgacacatacatctccacatccacaaaaaaataataaggaacgtatgcgagtgacctaagatcatctcagcctcatctaaacttaattgagttttttattatcaatttcacgaaactgcaaatgtaatcgaaccaaacacattatgaaacatatgttgtgtattgtactattcatattcatttatcacattacaatcatcaaccaaaccaaaaacacaaacataacaacaagggacaagaagaacaaacattgatccatacctaaagtttcataattcgaacatcaaaaacatattttttaattatcataagtacgacactcatcagtctcaggattatcattgcaatactcttccaaaggatcggagccaccagctttcttcttgtccctagcatgactcgccgccgcactcagctcctccacctcgtcccaagccgctacacactccccgctcaccggatcatcagcgcatgtctccttagcttcttgtatactcttctccaccttctccgatatctctccttccgatgtagccttaaccacaaccatccgcttcatcgaaccgaatttccacgggtaattcaaccggaccggacctaatacacgagccacaggtcgaacgaccactcgtggagtcgcgacgttgaggccagctgcagctatggttgtcatcgtcggaggattttgatggaggagaaaacctttttgatgtgaagagatgaagaagataaaatatactcgttcacgttattaaactctgtgaacacaatcctcttatcttctaagaaccaagcatattttgccacgtgtacttagactttttcacataaagtagtattctaccaatttgagaaacatacgtttttccccggaatatttattttatcaaccggggaacattttttcttgaaaattatagaagctttttttttaatttttgactgaaataataaaaatttgttatcattttctcttctgtaattttcatagacataaacttctcatgaaaagtagcataataaattaataattactatatttttgagtatttcattttgttgagaaaaagggggaggacgactgacttataatgggccatattccaggaaataagcgctagttgggccatagataaggcccacataagcagtgaccactaccgatatttttcctgatattttttgttttcctggttaaaaatacatacagatacagtcgtcgttttgattagtgaaccgtcgaatagaaaaagagagaatcattcagagcactttaaaaaggttaaaaaagtcaagtattaaaaaaagatgatgcgctttcataaagcttgtcatcgtttctctctttcacctctctgccatttatctccgccgtctccgtcaccggcttcttctctccttctacttcccaagctttccggattctcgactctgagtacacgacgttgcgtaagagttcgccgattctccgaaaacccgttgaccactgtcatggcttcacgttctgcttctaggcttcgttctctcgcatctgcctgttctggatgtgctgaagacggtggtggaacctctaatggctccctatcagcctctgctactgcaactgaagatgatggtaacttggatttgaatatttttgtgtatagagttacttgtcactggaattgaaatctgagaaatcgtttttgattgtttgtttgtgtgttgaactatgtagaatnnnnnnnnnnnnnnnnnnnncgtctgcctccacctgagatcagagatattgtagatgctccaccagtcccggctttatcattttcaccacatagggataagatattgtttctcaagcggagagcattgcctccgctcgcagatttagctagaccagaggagaagcttgctggtgttcgaattgatggatactgcaataccagaagcagaatgtcattctatactggttta

SEQ ID NO: 25965 - DNA, 954 bp, Arabidopsis thaliana landsberg
ttcctagaattaacaactgcatttatgttgtgcgttatagttaaattgttaggaattatgagttgaaaatttaatctttgtttaacctcttatgagtagttttagaatttataaaactattgcagttaaatctaaatttttcttttactaatcgtgtgtgatcggtttgatttggttgagaactcatttctcaagtctcttctttatgttttatacactttgtgtatttgttattctctatctctttaagactttaaccatacatgatacaacgtaagtcaataaaacaatttatttcgccttaatgttattagcattggaaaaaatgataaatttattctgttttataaggtgcatcttgcatgattcatggcaattatttcacttggattcacgagacgatatatattgaaattaaagaaagtggtgaactcgaatttgttttgcaagactctttgaaattttaaaatagatcaatgttgataaattacgtagaaaaatgatgttttctttttccaaatttacacggttcatgtcttgtttaatttattgttcaatactattaatttacgtttatttttgcctcggctcaaaatagtttctggatccatgcatcattgcttgaataaatatacagtacgtcaaccgactcattaagatgttaatagttcaagatttttcaaagtaattcatactgttatgtaatctcctaaaaccataccgataccaaatttggagttagaaagtttatggagaaaagcattgtttatgtaaatgaaattatttttctttcgacgagtcaaactcagtggtttctgtaaataaatgagtcagtgttttttaccaaaatagataaaacactcacaattttattaaacaacgcaaaatctaaaatatagtaaaagttgcttttaaactggaaatattaagcatcattaaccatcttggcgtgtc

SEQ ID NO: 25966 - DNA, 3781 bp, Arabidopsis thaliana landsberg
atatattcaattgaaacaccagcagagatcaagaagatagtggaaggccatggaatgtcctcctcgagctcctctgtatttcaaccctcattaagaaacagaggaaaaatgcaaatgggattatctaaatcttgtttggcatttctccatggactatatcaaagcctctgggtgatctataaaaggcctgagaatgtctccttcatcttcatctccaaagctcgttctcaccttacttggcaaacactcaacgaagaaaggagagagagacggtaatggcgatcaagaacattctcgcccttgtggttcttcttagcgtggttggagtttctgtcgccattccacagttgcttgacctcgactactaccggtctaagtgtcccaaggcagaggaaattgttcgtggtgtcacagtacaatatgtttctcgccagaaaacccttgccgctaaacttctaaggatgcatttccatgattgtttcgtcagagtaagcttggttcacttgttcgagactgttaaccaagggatatgaaaaaactagctagtcctaactctcgtttgtaatgattcatgtagggatgtgatggttccgttcttctgaaatctgcaaagaatgatgcggaaagagacgctgtccccaacctgaccctgaaaggttatgaagtggtggatgcggccaagacagcgctggagaggaagtgtcctaatctcatttcttgcgctgatgttcttgccttggtcgccagagatgccgtggcagtggtaacattccattttctcaatggactagtgattttgtcattccaaaactaaagactatagtatgtatataacttattaattgtctttgaacagatcgggggaccatggtggccggttccattgggccgcagggatggacgcatctcgagattggaagatgcaagggacggtttaccatctcctttcgccgacataaagaagctgaagaaggactttgccaacaagggtcttaacgctaaagaccttgtcgttctctcaggtatgtctgcagctagcaccttatgatatgcaattctcaaaagagttatcaattcgaacaaaaatggtttcttgagtagggggtcacaccattggaatctctagttgcgctctcgtcaacagtcgtctctacaacttcacaggaaagggcgattctgacccatccatgaaccctagctacgtgagggaattgaagagaaagtgcccgcctacagatttcagaacctcactgaacatggacccaggcagtgcgttgacattcgacactcactacttcaaggtcgtggctcagaagaaagggctcttcacatctgactctacgcttctcgatgacattgagaccaaaaactacgttcagactcaggccattctccctcctgtgctttcttctttcaataaagatttctccgattccatggtcaaacttggtttcgtccaaattcttaccggcaaaaatggtgagatcaggaagagatgcgccttccctaacgcattttgatcgatcagaccgggtttcggatgattttgagtctacacgtttttctctgcttattttctttctttttctttttttctttcacggaagtttgagctttggtgttgtcttcttctgtttcttccatgaataattgttttttgttgagtaactttacatttgtattctttacggtgactgtgttttgtaatggaaaaagtttgtttcgaattcatccgttaaacttaaacctaaattaaacaaaaattataattggaaagcaaaacatttgtaagcttcgtggtgtttttactatgaattaatatttatgtttttttttttttggtaaaatatttatttatgtttttttgtcaaggagttttcatttttattgataattttaggatcatactttcaatcacagtccatactttccatattaggatcataggtttatggtcttgtacaggaagtcctgtcttcttgatggaaatagtccagagaagatccgaatccgattcgactgtgattatctcttctttaaccaagttcgatgtacttatcaacccaccaaatctcatctcagtgttgcctgtaagacgattataaaaaaaaaccagaataattagatcgatctgataatgatgatgatgatgatgatggaagatgttacttactgagatcccatttaagccctgaggtagtggtattggcagatggagttccaatgggtataagtccacagtgaggtccttgaagagaagagtgaatatgtatttcatgtcgatgagtctttggaaggagttggatgagacaatcatcagataaaaggactatccttgtgtctggatatcgatataagacgttgagattaccggcttcatgatcgaatcttcccccgagtgctccagtggcaagaatctggagctaacataaaacagatagtgaaaatgttgcacagaaacaaacgcagggagctagcattcctctgtaattaaaaaaaagaacttactctggaactgtcctgattcaaagtagagtgacggatatacgaaatgcatttatcaagatcagtggtatcttgatcatgagattcatctataaccttagttccctggagaaaaagcatgttagatcaaatacagacactgttgtgatctaatgcataataatagtaagaagaaagagcttacccagtaaacataaaagtcgaggacgtcacggcgtatagaatccatatctcccttgataacatcgggcttatacctaaaaagtacaattctcagaactatctataaaataaaaagacaaaactttccagtttcaacttcttcttcctgaaacctttctctatgagagaaatagagacataaatctgagacctgtttcgaatgacaaaagggtcttcgtgagggaagaagagaggtaattcgtcgtagatgcgattagcgcctccatcagcacagagacgaagttttgctgttctacacagaaaattcgaaaccaatcttagaataaccccaagaaaacagagtcatatatattctgaagaatagagcgattcatcagtaccatgttcccagagaagaggagtgaatcgtggcaaactctggttcagaacaacgagagcgtatctcgtccctgtactagtttcgtcgcaagggaggagaaagcttgaagagtgaatcataacatccatggctgacatcggagacaagaagaagaagaagaagaagaagaagaagaagaaggaattgtgtttctgataattttgttgttatgtattgattcattcaataaatcactgtggttgctgaaaaattaaatatagacagtgtacgtcaccgattgcgaccaaacgttgacttttcaaagatggccacgtctctatctcattaaactagcgtttcgccaaaacgtgactttttttccaaccacgaaaaggtatcctctttacaaggaccaacagagccaattaagccaatctactgaaactttttgaaacttttctaaaggaaaaatcaaatcagagcctaggtatcaatcggcaaagcaaaagccctaaaaccatggaggacttggagatcaaaagagggagatttagagatggtattacaaaatattttcaattgtaaaagacttcaaaatatcacaaaatatttaagtttaaaatagaatttatttctgcgtggaccgttgatttcagatctgtctgtttcgctcaacctattaatcaacctttagtatccagttgaagacattttataaaaacaataatgaatttc

SEQ ID NO: 25967 - DNA, 855 bp, Arabidopsis thaliana landsberg
ccggattgacgggtgaggagaagaaagagtgtttcttggtcatggaactgatgaggaaaacccttggaatgcacatcaaagaggtatgtggtcctaggaagaagaacactctctccctcccggtcgcggttgatctgatgcttcagatagctttgggtatggaatatcttcactcgaagagaatataccacggagagttgaatccatcgaacattcttgtcaaaccaagaagtaaccaatccggagatgggtatctgcttgggaagatttttgggttcgggttgaattctgtcaagggattctctagtaaaagtgcttctttgacgagtcagaatgagaattttccattcatatggtattctccagaagttctagaggagcaagaacagagtggaactgcaagacgccttaaatatagcgataaatgtgacgtgcatagctttgggatggttagctttgagcttgtgacaggtaaagcaccatttgaagattgccacctgcgaggagataagatgagtagaaacattagggccggggagagaccgctttctgcatttaattcaccaaagttcataacaaacctgacaaatcgatgctggcatgctgatcccaatcagcgtccaactttctcatcgataagcagaattctacggtatatcaaacggtttctagctttgaacccggggtgttacagtagtagccaacaagacccgtccattgcgcctactgtggattactgcgagatcgagacaaagctattgcataagctgtcttgggaatctacagagcgtactcaagtttcacaggttacattgtaaatgtgtgcatatagggtagatgaactcgcaaaaacta

SEQ ID NO: 25968 - DNA, 1244 bp, Arabidopsis thaliana landsberg
  unsure (1)..(1244): unsure at all n locations
acatctgctgattcagaagatgaagcagaggattctgatgatgaaaggtttccattcttcttgtcacttatctgattgttatgatatctctatgcctttgcatagaaaattaattcttctctgtgttgttgggggtgcagctgccctgcatttttttcttgagatatttaacgatgttgagattctgtccatataatgatatgatatgttcataaataacatgcataaatctgggctatttccctctcttgatacagcatggagaccattatcctgggcgacaaaagaatagggatcaaaacaagtgttctagaggaaaaggccacggcttgtaacatgctttgttgctatgctgatgagttaaaagaaggattttttccttggattgatcaggtttgtaatgttaaataactccaaattgtgtcaatatctggtattgctgctgggttcgggagagtaaatttttatactgtaggttgcacctacattggttcctttactgaaattctattttcacgaagaagttagaagagcagctgtttcaggtatatcagaaaatatatcatctataatctactgttttgatcattagaacacangtttctaagaatttggataatttttctttctagccatgccggaactaatgcgctcagccaagctggcaatagagaaaggggaatctcaagggcgagatctatcatatttgaagcagctctctttctacattattccagccatgctggaagctgggggggggttagtgtgtgttctgttcatttttacttttctctttttggctttgattcactttttttgatggggcggaggattgtattttatgtaggaacctgatacagagatctgtgtgagtatgttggaagctatcaatgaatgcttgcaggtaaattttcattaccagatgttgggacttcttttttatgtgcttcttgaatgctgcattttccttggtagtcgtgctgttttttcttcttaattaggtcacctatttggtttcttgttgttgaaatcctctaaagaagacatggtggccttttttgttttctttgcttcgtcacttgtcaattttccttctgagcatagattttcatcctttcctagggttagggtatgtgatagagatgttacgttgaacaagtctttattgtgtgccctcttggagtaaattgtagcattacaatggaaaatgttatcttataacctttgtttccagatcgttgact

SEQ ID NO: 25969 - DNA, 1162 bp, Arabidopsis thaliana landsberg
gcttctcattactcttttctcgtcatggagtattgtcccggcggtgatctctacgccgtccgcctccgccaaccgtctaaacgtttcactatctcctccacaaggtcccctttcccacaacactctcttttccttcttttaaccatgcatgattaatcaatttcattgttaataaagatttaattgtgttttcgcttctgtatttaattagtgggttgttttgaatgtgtaccacggcttttttttaatattgttctatatttctattaatctttattttttggtttaattaacttatactaaacttatttactagttgtatgtgttttctgtatttgttaaaatatttaatgaaaaaatgaaaaatatttttaattatagaagatgtgaaattttatcattttttccaccttagtttttggttgaacaatttacatttaatatttgctttcttatccactacgatgttttagacgtaggttctggattgaaaattttcgggtaacaaaataaaccaatctttaattttactagcaacaaatactgatacgtatatagtaataggtctatatagcaattttttttgtttaatagattagcatatctagtaactaattaccaaatgcttaataaactaagatactatgtaggttttacgcagcagaaactctagtggccttagagtatctccacatgatgggaattgtgtatagagacctaaagccagagaacgtgttgatcagagaagatggtcatgtaatgctctcagatttcgatctctccttcaaatgtgacgtcgttccacaattcctcagcgacaacgaccgtgaccgtggccatcaagaagacgatgacgacatcagcattcgccgtaaatgctctacaccttcttgcacgacaactccattaaaccccgtcatctcctgcttctctcccacttctagcagaagaagaaagaagaatgttgttaccacaacaatacacgaaaacgcagctggtactagcgattctgtgaaaagtaacgatgtttcaagaacgttttctcgatcaccttcttcttgttctcgtgtttcaaatggacttcgagacatctctggtggatgtccatcaatatttgcccgaccaatcaatgctcgctctaagtcattcgtgggaacacatg

SEQ ID NO: 25970 - DNA, 1230 bp, Arabidopsis thaliana landsberg
  unsure (1)..(1230): unsure at all n locations
cgtatatagatgatagttaataacacagtcacaaactgaaactgaaacctctaacattgaaatattaaatatggatttatagatagtattttgacaaccaatgagttttctcttatcaatggtgttcgaatgcatgatcttgaaaatttactatttttaggtgatcatgtgaagggtttcggtttgatgagctattcaaaaaaacgaaaatatattcaaactgattacaagaaaatagggaacataaaaatttcatcaacacataaaaatcttatagagagggatacataatgaatatgtttaccactatacgtgtgcatgcatttgaagtatcaataatacgaatatataagtgggtaaaaaatgatagctagctgcaaattttgaattggcttctcaatgtgtcggacgcaacaagcaacaatttaacaagtttcatattcatcatcatacgaattataaaaatacaacataatcattagtttcattcagtctcacgttgtattgcttttagtttacattaaattaattacactaaacctcaaattaaacatttgaatgaatcttttgcgcctgtaacgtaggctaagattgttttaaattgtcaaaaccgtgcaaggagcagttatttgttgtgtttaatctcacgtgagagaagttaacgtcgtttgaccaataaccattaacgaattgaattactgacgtgtcgtagtggaacttgaaaaaaaaaaaaaaagtgatataatgacgtttttacccttgaagtgaacatagagaaggcacagctttatttgtcgaggaagcatcgaaagagagtccccaccacaaatccaaatggcaatagcgttaattaaggaaggaacaaacctacttctttactatttacactatttatttctccattatttaatttattagtaagtattaattatttatctagctggaccaccagactcttttatgggtcccacctttacccaccacgaacatcttacgtcgacctccgattattattacatcacattttctctatacttctctcttgaaacctaaaaccaatagtagagaacaaaatagtttgaatttctgtgacatgttccaagttntattgcttctgttctgtgtatatacaagttaatacgaatatcaaagctatagtcttcagagatcgcaattgataaatttgctgttatctattgataataggggggcaatcatgtatattattat

SEQ ID NO: 25971 - DNA, 775 bp, Arabidopsis thaliana landsberg
gagggaacaactgtaggataaaagtggtaaattgagtaattacaaaatcaattttgtaccaacaacaatagtggggctgaaactggggaaaagttttcacttcaaatcttttatttataaacaagaaagagagagagagagacaagagcaaggaagacgcaaaagccttggtcataccacacagattcaagaagatgcagctagaacagacatttgtgttgtccaatcaaacttatcacgactgtatttgctgctgcgtgaagaaatctgcttcttgtctttgctgctgcgggaattgctgcttcccttttgtcctttctttccattcttcttcaggttgtctttgctctttgatttctgcggttgctgtttcttgcttcttgtgtgagagacaatggagggaggaggatcatacacatcagccccccatgacacactgagcttcctcagtgacaagccatacttctctcgactgccttttatggctgggataagaacaattggtgtctgctgcaatttaagaaacatgtgagaaacaatcaggatagagtaggaacacacagccttgacttgagagatatgacaaggatctcactatgaaatcaatctgactaacaacaattccgaggactcttaaaactcttactaatgtacaaactatggaactccagagacactgatttcttaaatcaaatgtttcctcctttcatggactacatatatggagacttattctttctaaaactttctggactggttcagtgaaaatcaacca

SEQ ID NO: 25972 - DNA, 1281 bp, Arabidopsis thaliana landsberg
ctcaccacaaaaacacacacatacgaacttttgttatgaatcttataacggtcaaatgactcagatttctaccaaaaaacttggaatttgatatgccattagacatgtttgtattcatgatcatctacatgagatgttaggcatggtaacgtatagcaatttaaaagtcaatcctaattaaaaatttgtaggtatatctcactaatacatatataagacaagaataaccaaaatagttgcttcaaacaatagatcattaacttaattacctgagcaattctacaagtaagaatatgaccttctttgctccagcttcggacagaagaaaccgaacacaaaatcagtatacctaatacaagaatcaacctcgtggatgatctaaaagccgatgccatatcttcaaagtttgaaacttatataatgataaactcttttgtataaaaatgtcttctcttgtctataacaacctcatcgaatttgaaaagaaaacacacagagagattataaatagagagacaagaatggacttacaagttaggttaaccggaagcaacatatatgatgttgagtttgtgtgcaagcaagacattgcgagtctcatacgttcctcataaaagttgacaaaaagaacacgagtataaacataagatgaaagagtcgtcaatttattagttaaagcacattccttatactcttatagtatgtaacagcatcatccatgtgtcatgtgtggcatatcttacaataatttaattaacgcctaatcttgtcaaacatttgcatcttcttaacttgttattttctttgttcttgcttgtttcacaaaataaatcaaaccaaaccgcaatttaagtcctaaccaattttgttttaatgaataaccaaatttcaattcggttcgaacttttaaacggaaaaccaaaccggccggcaaataacgacggaggacttgggtatatttcttggtcgcaaagaggactcggctgattttgaaccggtcaatgatgaacagattctggtcaaaaaaacaattcttttaatcaaacaaatctataccattgatgaatcgtacaataacaaacaactcggtgaagttctctacctgaatcgtcttcttcgataatctccctcttgtttcaatcaaggtttgccttctgattctctctacttcttcttcttgttcatctcttaagttcagtatcacaaaaagtttcgattttgatgatcctaaagagcttgaaagtaatgggctttcggcgtatagttactcctttgggcccc

SEQ ID NO: 25973 - DNA, 3559 bp, Arabidopsis thaliana landsberg
tactattttggtttcgtttttaattctgtttgaatattatcgttattccaaaatgaatttacggcaacgaaaaaggcacgtttgttcaacttttctgtaacatgggattgtttgattttcatcgcataccaaacaaagtttttttaagggcgttggcgattgatttttacaatttacttttttctactgcatattgatttttttctccagttttcatgagttgaaatatctccgaaatgccaaaaaaaatagcccgaattaaaaaaaaaggtcgtttttgtttataagcacttaatttgattttctctttaggtcttatttctcgagttgaaaatcgtcctaatgaaagggaaagttaaatcacctcacattatctaagaccatatatctaattatatcgggccgtcggttaagtcatcgcatattaagatatacaaatctccactaattatccataacaaagagatcagatatatgaatgattatatagactgattccataaaagatattaatcaataactagttagttggagagcgacgtgatcacaacatggtatcaccatgatgcaagtatacatcaccaactgcttaaattattaatcacatttacgacaatatcattgtataattgcgttgacctacaatggtaataccacatcaaggtcttgttaaagttgactcattagagataagtttgatctcgtattgattttagtcatttttacgaaagatatgtggagcttcggttctacaaatcttaaattttaatacagaaatgtccatatatataaaacctcaatgatctaactcgtagactcgatcaaacttttttttttttgttaaaggacttaatcaaacttgggatatcaaattagcatgacataaatgatcataaaccacttcctaaacatgatgatttatccgactaatttgtttcgtttataaaacataaattttaccatcacaattcgcaacaattcacttttggattatatatatctcttcataagagatttgcttggttgatataatataatttatcaatagtagtgccttttgtacgatctgaaaagtcaaccatctttgtaggcattaagcaaagcaaaccgtcccctaaattaatgtatcacacgttcttataatatcatctcctatgatcttaccatcactttttttggtttctttcgcgaagccaaaaaaaaacaagacaaaaagaaataaacgacgaggcttttgtttattttataaagctccttcaccggtaaaagccttggtcctcatgaaaccgggaagcccaagtacttacttccaccatcaaatcgtcaaaccatttgcaaccatcgatggtggtcatgtcacgagtaagcttctactcttctttcttgctactactgttagaggtcgttgtcgctagcagcgagtttgatgatgaaggaagaacatcgttcagtccaaccacggctataatcatgatcgtactcgttagtgttttcttcgcacttggatgtatctccgtctacatgaggaggtgtctccagcacgctctggggatggacagcggtggtggtccaggaaactggcttaacgtgaggcaaacgacggagcctgggctagacgcgtctgttatagaaacgtttccaacgtttccttactctacagtgaagacgttgaggatcggtaaagaagctttggagtgtcccgtttgtctcaacgagttcgaggacgacgaaacgctgcgtttgattcctcagtgttgtcacgtgtttcatcctggttgcattgatgcctggctccgttctcagaccacatgtcctctttgccgagccaatctcgttcctgtaccgggtgagtctgtttcttcggagatacccggtttagctagagaaaccggtcagaactctctcagaacgccgattgatgataaccggaaaagggttttaacttcacctgacgagcggttgattgactcagtggcttggacgggtaaccaaagcatgccacgtaaatccatgtctacaggttggaaactagctgaattgtacagcccggctagttcaccgggccaaccggaggagaatctcgaccggtatacgctgaggttaccacaagagatacatgaccagcttgtgaactccagcctgggaaagcaagggtcaaaaggccaactggccttacctcaagaaaggagctcggttagagggttcagaaccggaagcctagggactgaaaagaactatttctactttgaacggtttgatcaagacggtcggctggaccggagaccattttctataactcctccataccatacccggtcgatacagtctccggatgagattatcaacgctagtggtaattatcaggatcgtgctggtgcacctaaaggtttgcttctagcaataaggtcaccgtttgatcggttatttactgggaagaaaaatgccggtgagcgttcgtaccttcaatccggcgatgcgagccctgtctaggcgaattactactattggggttattaagaatattctgaaataaagaaaatctgtatatgtattttctttcttctagtttctttatgttatatgagaaattcaattccttcaccaatataatgcatctgttactgaaatagtaataaaggaaaggaccatttcgttttatcatccaaatcaagtttcctaagtctaacagtcaaaaagatagggtcaaacaagtaaaccatggtacttcaactgtgatgattaatgatgtgaaaacttcaaagaggttcacgaaccaccatgacgggaatagagaacggatcggtagagagcagcgacatggaggaaacaaatcagggctatgagaagatcatctagtaaaccgataacccccaagactcctgacaagaaatcgatacaaagtattggtcagtaatatgttgatagaagagaagagtgtgtgtattgtatgaatatactgaagagatgaaatgaggattaccttccggaatgatatctattgggctgattatgtaaatcgcactgagtatcaactgcatcaaataaaaagcagtgaattttgtgttagtcagagcattctttagttcagatgtgatcaagtgctcaaagttgtgaacatttaatcacagaagatttacttaataagggtccagaagtaatgaatgtgttaaactaaccgcaatataaacacgagctctgatgacgagtggaagcgttctttgtggatccatcatttctcgcaacaaccttcggagtaagaagggaaggtcttgcatcctctgcaaaacaaattgaagtttcatgtaagaacgttccagcaaactctagatttatgtgtagacaaacttatgagaagcatgactttgtaaaaaagtaacaacaagatgatgaaatcgaaagcatccatccgtcactagctaacacgatgaaaacaatgagaaaaccaataaaccaccatagagttaaagaaaacaataagttatacatgtaaataaataacacatagagttaaaatccttcaactgcaaaatttgttttactggtaagcgacagttgaaaa

SEQ ID NO: 25974 - DNA, 3488 bp, Arabidopsis thaliana landsberg
aactaattcatatgcatggtgaaactcaacggcatgtagacatgtggcctacaatttactattcgtagacaaagtgacattaatgcacagcctcatttatgcatatatcatgctagaccaaagaaagagattatgcaataaaactttacacgctggcggagagggactcaacacgttcccttgctactaacacgtaccttaactacatgtctccccattactcttctctacctatatactcaccataattctatatatagctgaggaatatgataaataaattgtggccgtttataccgttgtgcacattgaagtggcaatcatgagaaaaaactaaagttctgttaaaagtttgaagatatatatgaaattgttacaaagaaagaaaaaaggcagtagcacatgttgtcacgtactctttgtaagggatatactgatcgttttttgtactttaaaactaattgtaaaatgtttaaactattggacaggtgtcagcatctaaggtactacaagagacttgcaactacatcaggaacttacacagagaggttgatgacctcagtgaccgtttgtcggaactcttggcttcgacggacgacaacagcgccgaagcagccatcattaggagcttgcttaattattaaatccgcattacttaatctgagagctattaatcatccgtttccggccaccaaatttatcttattatgggtatcgtctgtttacttctacatcatatattatgagatatagctagggtttcgggtcattgttaggccaactcatatatttatatttaatatatggttatgtatgtatgtatgcatgttaattgtatctgagggtccagacctggcgtatagtagcctgtgtatcatgagatcctctaatatttatgattaatgacacggtccgtttccttttttactatactgatctactgttataagtttcgtttatcatatctttttctataattaacaagctgaggagattatcggtgtatgctcgaaatttcttagttgaagaaattaagaacaatatatgtgtatgccaaataaataagttatacttggaagaatgtcaatacaattttatcaaaaaaaaaaaaatggtatgtatatacaatttaaaaacgtggagaagttgtgtctgaatttaaattgtttaaaatatgatagaaacagacgaagacctcgatgttttcgaagtcgtttagtttggattatctgttttttaatgttatctgtagtatatggtatggtcgtgccattttatttaaatcctcttgcatgtgatcattaatgtgttatcttcgtcgtgtatattataacacgtattgactcgataattacggtattagtgtggtgttattaatggagtagataatttatgattacgtgttaaaagtaaaatgtattgggatataaggttacataccttttctttgaacagacagaaattcttgcgcctgaaagttaaatataatcatgtactgtatcagttcccgttttttttcggtcattgattttttttttcgggcaacacattagttgtttttatttatgagcaccaaagactaagtagaattttaaaaacatgatgaaatattaattatgacttgaagacatttgaaagtgtgatacatgtttaggagctggtaacacgtttttaatgataatctctcaatttagtatagaataaaatatacatattttgtattattctgacaaatcaaatagttttgagttatcacaaactctacaagaaacccatctaaattatagtataagaaaatactccggaacgccaacctttacttaatcaaccctaagttgacgacccaaaaaaaaaaattaacctttaaatcatttgaataatggccataggcccaaatatgttaacaaaagagccttggcccagttcctggctagacttcctttcattttctgttatttttttttttggtaaaccaacgggagggactgccgtctttattcaatagaaccaaaaataaaaaattacatgggcacatgtctagcccgagcaacacctgcagcatcctcacgcataatcgaatcgacaaacggaagacctgagtcaaaagaaagaaagcctaaaagtaaactaaaagcatagtttgctaactcgtcagcaagacggttagcttcccgataaacatgcgaaactcggactatccagtcctttgatgaaaagccatagcacaaacgtactaggaatgacaacagatgagagtcttctatccctgtcgtgagaaaaccagccaccaattttgaatctacctcaagctccagccgcgttatacccttctcccaagctataaccaacccgtagtacacaccccaaagctctgctaacggagccgtgcaccgccctaaattcagggcaaaacttcctcgccaatccccgtactcgtcccgcaaagctcctctttttctgttattgtagtgtgtgatttggcttgttctcgcaaacatatataccaacattaaacaatactcaagtttgtccccccaaaaaaactaatactcaagaaaatatacaagttgtttttccatttcaacaattggccttagccatatgtgtatactacaatttaagattgcataatacattaagaaggaataggcttgcaatgtgattttttattaagcaaaaaaatgaaaaaatatatattttgtgtacaccttttgatactaaatgaaaaattgagcatatttatttatatgcgtttgtttgtatgtcgttgaattgcacttttcatatctcatgcaacataaaaaattcatagaataaatagtttatgcttttagataaatacaattgaggttaaaacacacaaaaaagaacaactcgtggtaatttataaaatagtttcaacaaaaatatttaaacttgtagaatatagacttgttgattacaaaatgatttgatagggagaccaatttatacagtagttgggcctaattaaagtattttatcataaaaccgaccaaaacgtctaagaaagttgataagtgggggacctgagaaagagaagaagaagaaggaagaaaccggcctcgcatataaaatgggctttgtgtcaaaacacaatctgcggtgatgaagagctttttgtgtcccccgaaagtatgtttacctaccatagagaaaaagtcatgttatgttgtaaaaggttttaaaaagaagaagtctaatcatatcatagactagtgagagttaccatgtaggaccttagagtttgctttcatttcatatcattgagacatagacaagtgataccatgtagggacctctaagagtttgcttgcatatacttcttgacgaccaaaatcactagttttagttctcgttagaaataaaattccattgacttgaacacttatgcatgcaaccatccaaatgcttatgtagggcatgctgttaaaagaaattttaattagatatcaactttgaaatatttc

SEQ ID NO: 25975 - DNA, 2432 bp, Arabidopsis thaliana landsberg
atactattaaagaactagacagggtttctggaacatggcccatacgacctgccattccattcacggtattcttctcttacatggtataagttggtttctgattagatgtcaaacggttctttgaactgattccatttttatgtgcgtggatatatagcccccaaaggaaaaggtggaaccgatatatcacaatgagtgcagtttcgatgataaagctcatctgggagtatctgacagcgccctttttgtacaaggatttgatacttcccatccaaggcatgaaatcaagacagcattgtggaatcatttctcttcatgtggtaaggtctatctgatttatgttcccattgcgtgttctaccggtgcttcggtgggatatgctttcattgatatgaaaaatgaaaccaaggggttgacactcaatggaagtcatttgggaggacggaagatcgatgttatgttcgccatagatagagaagagttttacttctcttctaacttaaaacactgtcaacgctgccgtaattataggccatggcttgttttaaaagccatgtcagatgcctgctttgaatatcaccagaggtacacaaaaatcagtttcttcttctttattcattctttgataacaaagtctgtaaagtaacttctcactaattttttgcgctctaggattaaaccgcggatcgttggcactccccatagcaagattggtcgttttacagccattattggtcgtcgctcttacagctagtatttggtcctttttaccgttgctgctaccttgttactccaccagctacatgattttaggtctaagtagagttgtgtctttatgattttaggagttttaaagtctttttcttacatgactggcgtgattagcaagcatgttctctattggtgattgatctcaaacgtaaagaaaatagtaaccgaatactcacaatttatatctgtttgactttaatgacatccgtatttacaaaactgtgttagtttgatgcaattaactgtcagtgaaatcgagaagtttatttattcttaaatgagaagataggtcatgaagagctttattacagtatgcaagaagagtttgaatgattaatttaggaaaaaaacacaatacattttccatggcttggtaagctgttttcttcgaataaatctcatcaattctgtttttttgtcttcggcaaagttaatgctggtggactttggtatggttagtaacattcgaaacgaacttcaaataaaataaaaaatgagaacctagagtccaaagccgatgattcgtttgatctaaggatgcgacaagttgcagagcttgaatttcatttagtgttcaaattcttttaattttataggacaccaccctatttgtggttcttggacaaacaacaaaacatcacaaaatcaaagaataatatttagggataaactatcgaaatagccaaaatcatatatagtttcgatataaataataattggtattacaggtataagatattaaaatccaaggttacaaaattattgatttataacaatatgccgacgtcaagaagcatagcaagagagtccagatttggagtctctctttttctcttatcttccttctacttctgagttgagaaaattcgaccaagaacttctttttcctcacgtttctcagtcaacacactcagaaaattccgcgaattaattattcttgtctgaatcaagaatctcttgattcgatgcgatagtgattgttggtttgaacgagctaaacccgctggtttagccaatctaatatggctccagcgatgatttctcgttcgggttcaaaaagaagatcgtgcaacaacccgtcgtagagcttgagtgatttgtctgacgaggcagcttcctcgtagagcttctttgaggcgctaggatcggtaactgtgtcgtcagtaccgtgcatcacaagaaaggaaactttcactttgttcaggttctgttgcaagtgagcagtgattctaaggatctcgtagccggttttaacccggatggatccggtgaagactaatgggtcagagtatttggcgatgagagctgctgggtcacgagaaaccggcattcctttcttgtttgctgcactgatttggtacctgggtagtagaaacgccatgattggagcaagaacctgttgataaaatacaacaaagagaactgatcagattgctaagacttggctgaaaacgcgtaaattatgacttgacctttcggattaacttacagcgaagattggatgggatggttggactccaacagctggtgaagtcaatgcaatgcctgaaactcgagattcaatctttggatccagcatagcctgcacttgagttgtttttgacactgtttaaatttgtgtagttatcggatgaaactatgatgttatttaatgggtctaa

SEQ ID NO: 25976 - DNA, 566 bp, Arabidopsis thaliana landsberg
  unsure (1)..(566): unsure at all n locations
tcacagctgctaagatgattcttcaagtatagatatttttcatcaattacttttgtcctaacttggggggagggtctagactactctttaacctgctttttcccttactgcagaacagcgaggcaatggtctcaatcgatatgcctgctggtccttcagaagtcctagttattgctgacgaacatgctagtccagtttacattgcagcagacttactttctcaggtatttccatgaaaaagttgcaattttcaacataacatatcgggatgagtttgtgtctgccttatttgtttaattcagacctacagagagcggctaacttgtacatttctttttttggtttctctgcaggcggagcannnnnnnnnnnnnnnnnnnnnnnnnnnnnnngtgggcgatagtgtagatctcaacgccatcgaagaagaaatngccaagcagtgcataagccttcctagaggagagtttgcttcaaagcactagtcacagttcacagtgttgctcgagatatgatgggtaccatcttttacggtcaccttctgtactattaaacacattgtacat

SEQ ID NO: 25977 - DNA, 831 bp, Arabidopsis thaliana landsberg
taagaaaagctgtggccctcaaaaagttacatggaatcggaacaggaaaaaaaaaatgtcgaaaactgattaatttaggcaaaaaaaacgttatcgcattttcatatcttacaaatccctttttcaattcagatttggtagaaatgcaaggagagttccatagtgtatatgtaaaatttgtataaaacgtctagaagaattacaatgctgaatttgttggaagctctgtttttctctgcttagacgtttccaacgtgttttgggtttctctgatcactgtaaagcctaaaccacaaagaagatgaccacgaagctttgggctttaaggcctttttgggccctagccacaataatggaagcctatcaagaaaagacaagacaagacaataagacagaagaggacaagtgtttaaagtggaagttatctttctcacgtggtctaaagaaaggttaaaaaaaaagagggaaaaaaaaaagaagatgagagaaagcaaagtgttgaagactttttagaaagcagaaaaaaaagcagagagtgtattcaaagtcggaaagaaaccctaaagaagaggattatgggtgctgtatcgatggagtcgcttcctttaggtttcagattcagacctaccgatgaagagctcgtcaatcactacctccgtctcaagatcaacggacgtcactccgatgtccgtgtcatccctgatatcgatgtctgcaaatgggaaccttgggatcttcctggttcgtctctttattctctcagaatttgactccttttattctcagattctgttttccctctcaaagattccacctttttttctttactca

SEQ ID NO: 25978 - DNA, 990 bp, Arabidopsis thaliana landsberg
  unsure (1)..(990): unsure at all n locations
cgagaaacatacacatacttagaataaattgttccccgcaggctcaggtgtcggcagggggaggagcagcaccctcggcgtcgttcctccctacggcggattctggcccggcctcggacagtgacccaggcggaaggatctccacctcaaaaaaggcgcctgggccctcgaaagccacatcaagcctttggacctcggccagggcggcgtcctcgtcatcaggtaggcagtagcacttgctgacccgctccagatcacacgtcgtagtgggaagcgaggacggcgaaggcctgcctaacgccgtgatgcaacgcgccgcggagtctgctgcgcacgtggctgctgatagtcgcctagagggggggggggtgaatagggcgaaactgaaatttacgaatataaacacaactacaagccgggttagcgttagaattaaattcgagtccgaaagagagggcgaaaacaaatcacaagcgaataagagtgtgacatggtgatttattttactgtggttctgttcttgcaaacctactccccgttgaggtggtcacaaagaccgggtctctttcaaccctttccctctctcaaacggtcacttagaccgagtgagcttctcttctcaatcannnnnnnnnnnnnnnnnnnnnnnngatcaccacaagattggtgtctcttgcctcaattacaagtgagtttgatcgcaatgaaagaatcaagaaagcacgattgaaaaggccaagcgacaagagtgacaaataacacacagatcactttctctctcaagtcactaatcactaatgatctcttttcttaattgtgaaacttggagagatggaggctttgagtgtgtcttggaatggattgctagctcttgtattgaatgttgaaggttggaatgcttgggtgaggtgaatggaggtggttggggttgtatttatagccaccaccacttcctagccgttgctccattctgctgagcgcggacggtcg

SEQ ID NO: 25979 - DNA, 1359 bp, Arabidopsis thaliana landsberg
  unsure (1)..(1359): unsure at all n locations
gctgcatcagaaaaactactcatttctgaaatagcgtgttgcaggactagggataacatgggccttgactgagcaaccttgaagtatatcgctgaaagtttttccatagtacaattgccactaactttgaacttctctgtccaaagaggaggattcccaaaccaaagagagctaaatgataatccaatctcattctcagtgccctttaaatctattggttcctcatcttgtttcttacaagtctccttgggaacatctgatgatgactgttgtctcctgtgtgaaggaaatgctcccaatacgtcagctctcaactcttcaggtaattcttgtaacacagagacgtcgacttgactaagggatgaaggcaacaaatccgtcatttctattgtatgctgattagacgttctggcaatggaaggatgcggcacatatggttctttatattcctaattttggaaatataacgaaaactcttagaagtctatactcattttcagggttctactgttgagaatagccaaacatatgtgaaatgaatcgttccaagaatgaatagcaggatctttaccttttctccagaggtgctcaagccatgtatcttaactgagagagattttaattctttaatgctagcagcagtgcctatgggaagaaaaagtaatcatctcaggtgcactgcactggggaaaaaacatttattttcatcatgcttctgatacagctgacataactaaccatccaaggagacatgtggagagttgcagttgattcttcttttgcctcgttttttctcaatcaactcaaaccgcttcccaccgtaggttccatctaattatgaaaagagctctggaggaaggttctctagaacttccatgtcgagatcaccacatgggcggtaagaatggatttgaatcacccgactgaattgaagattattgtgaattagattctcggagtctagaaactccaccagtaacaggcctgttacaatctgtcacaagtcaacaagtaagtcagaagtttttcgcagctagggcgtaagtaagagctcttcatttctagacccataacatcaataaaggaaagaaaaaagaaagctgactttgggtcagaatattttcttttcgcagacataataatacattctcgaagagaacgtcgggtttgttatcaaagacatatatagcaaataagcacgtctttctgggcatcacttgtaaaggttttatttacctgagttttccataacctttgcagcaaaaacacctcatattgctccattggccccnggcaggtgcagaggtgaaaaaagatttcaaaaacaatgaacgtaacaaacaaataccactgataggg

SEQ ID NO: 25980 - DNA, 1221 bp, Arabidopsis thaliana landsberg
ctagaaatgattgacagcactacacatggtcctcagattgaatgtgctcaagagctcaacactttttttttgagattttggaagggttattaggagccgaactttcatgccatgctccatgagcctaaagggaactccaagggccaaactataggagacggaaaaaggcgactttacttgccatgctacactattttggatgtaagaactcaatacataactgtcattggagagaactctattcatagcagagcgtgatactaatatgcaacttaatgagagcgcaccatgaaaataattaatatgcagatttatgatacaactattggtatgagttagttagaatggagttatgaattgggccaccaatacaatgacacaattaaagtggttcaacgttggtggttgcgaaactgccaaaactataaatcagtctctcaaaagtcaaaaagtatctgttcaattttgtcgacgttaccgagtgaatccctcccggaaatgatgatgtaacaaacatatgtcgttgtctattaacctttgaataaaatctgagagcatttggacaattatgaatctcaaagaatgatgagatctcattacttaaatatttacaaagatgttctaccatttacagtccaaacaaaagagaaaactgacaaagttgcacaactacaaacatttggccattatcatacaatataattctacaactaccaagtctaagcttcaatcgttcaatctcttaaagagaaatttgcaacaccagatcattttccaactctaattgatgcataatcaagttcaatcaaatgatctgctttgaggttgaagctatggagggtttcttcacaagggactgtgcacaagtatattctgatacgaattttggaggttctatttctgatgggtctaatactggaatagccttgtctatatcttctgcagagaaaggaatgctgcacacaacaacaaccaaaaaagagactcataaatgttatgtagataacttgtgaactacatctgagttaagcaagattaacttgattaatgagactcttaatctttcaacaaaaccctagaaatgttaaaagcttttctcaatctacaaggattttcagaacttctcatgccattgaccctttcgtaagagctagagatataacatttctgttactaccatatgaatctatctacctacgtattactacacttcagagtcga

SEQ ID NO: 25981 - DNA, 1324 bp, Arabidopsis thaliana landsberg
aatttcgtgtataattaacaaccaataacaccctcctcacctaggaaaaaaacgaaaagtaaaaaccacatatttatcttcacgggaatttataaatccatattattggaaaaggaagaatggttttaagagaagaatatacattttcttgatacatagcgtaacatatgagccatttgatgactccaaaaatgaccaatcaaccgagaaccatttgataatattaatggtgaaacacacgacccatcaacaaaccctcctccaatggtcacaccaccacaaaccattagatcctttaatgactccaacaacaactcttatgttgtggattttttttatagacagtcagaccgaaaacacatcaataacacttaattttttaatatcatattatacaatttaataatttcgtgtaattattttctaatttaaaataattagatattaaatgtccaaataaaaatggatcgtggtttttattgggttttaacctgtaagggctctcgttttatcaaaaaagaaaaaaaaactcaggaagaatctagttgcggttatcttcagcccaaagagtaaagacccatccatccgttgctgaatctgctgctttgatcgaaaatgacgtcgtcctctccaacacagcgtactcacgtctcaattcctcctgaaccaggtccctttattcttcttcaatccctcaatttcctgattcttaactcagactttgataattcgttacttatcgctgttttcattttaccctaagcgatttgctctatcccttcaaattcccccgaagaattttgtgttattacgcctttgaatcaatcaattaaattattaagcaattaaatgcttaatttaacttcatttctgatccaaatgtctgtttagtcatcaaatatttgttattaatgcatcatatttcttcagattagtgatttgaaatgtcttatggaactgtagaatgcatgagttttgattagatcatttgcagtatcactcttttgcaatttggattgtgtactaaactatcaattgttagttagtttacatttgtgttatgcaagtactgtagtagatattgtcatgaatctcttgtctcatgtttgagtttttcgcttcaggaggaaggtcgccgacacaagaagctaatgagccaccagttccgatttacattgtgacggatccgtttcaacttcctgctgatttcctaaacccttctcctgaaaagaaattggttatcggttttgactgtgagggtgttgacctctgccgacatgggaaactttgtatcatgcaggtgtgaccctttttttgtatgatt

SEQ ID NO: 25982 - DNA, 1025 bp, Arabidopsis thaliana landsberg
tgatagaagcccccttcttttgctggtgctattttcttgtatcgcgtactctcataatgtatgaaaggttgattctggcatatataatatacagccccacaaccttttaacccatgttgtagcatcagtcatcatctaatatgtggatcatatcatatcactgaacagaaactccttctgttgagccatggcaataatcaagagtgtttgacgttggtagactgtttctttaccgtctgatctccatatctggcgctcatcgaccgacctcgcaaaaacaagaggaaccaaagacgcatggattttcagggcagtgcgaacctgtagattgcgaattccaaaaacaaacaatgtacccaccgttaaatacatctatatgcaattcggagcacacatagggaacaaaagagagtacgctgtaactaagtcacattggttgattttcatcttaaaaagttttatgagtctctagatacgctacatataggtaataaaagcataaaagttgcgactaaaaatttgtaagatacaccataatcatctctccaacaaaagatggcaagaataaccacaatatgaagatatgatgagacacaatccatgggatgtacaagttgcgcacactggcagggccggaatatctattcattgatgtcaaataaatttttacaaaaactgcaattttcttcttcatacacttgtagtatgcaattagtatatggcatccacaaaatactaaacatttataccctatttacttctgaaaactgaaatttctataatagattttttaagtaataacttgttttggaaagaaaaaaacataatactttatatatatttctaacattaaataatatacaattaattttggatttattcatgatttacatgttagacccaatcttaacgtctaacaatttatggagaattagtgctaaataaatttacattaaatatccatatatatactacggatacagatattgtttaaaattcggattatcttttgcatgtaataattt

SEQ ID NO: 25983 - DNA, 2624 bp, Arabidopsis thaliana landsberg
caaacggcccgcatggtgggtagattggtccacatatattaccatgaattttcaataagaattcaggtcttttattcccaattttagttggcgatggccttattatgagttttcattgagaacatgctttacatgaaactcaccagatttaaatattttatggtttttcaatgaatggccattaaaattttgcacaattttttgcatcatgacttaaatgtacaagtaaactcactcgagggattgtcactcgagtttactgtaacattcgatgcgattatatttatttttgtgcaatataattgatgtaagaatgggagctgacgtaccggctgatgcacttgttgacagattgcttgttagacttcttgatggactttctgacggactacctgaagtacttcatgtatcaaatcagcttgtgcgaactaaggaaagctatcctttccttcccttttgtgcgtcccagagccacatatggaagcctgaagatcctttacgccacccagaaccattcacacttaatccttggtgcatctttccttatgtgaacccgctgagccaagactttccttttccggatctaaatgagatcaaatcacaacgactctattttgatcatcttttgggaattaagaagcctcctacaatgactagacgtcccaaaatcacatcacttccagcccaagttgtcaagactcaagacacatcacaactttccttatttggccgacttcgtcattaaagttccaacggccatattttcatttattgttgcgatttctttacttttttagagcatatgaatgttgtatgagcctctatataagctcaccttagttttcatttgtattcaagccttttacgaaataaacaagtatttttttcaaagagtgtctttgagttttatgcattagaagttagtgtggattcaataaagtcttgtgtgtttgcggatcaattatcttgtggattcaagttaatttgttcgtggtttgattgtggattcaatcaagcacgttgagtgtggattcattcaataaaacctccatctttcatctctaccatcattcatcgaatcattcaagatttaggtcgagaaatagagaagcgtaaaccctaggtagattccgaggtttgcatcattggtatcagagctaaaagctcctatcccacaaggtgaactcgttcccttttatccctttcaatttctgtttttgttattttcagatttaaatcgaaaaaccaaaataaaacttgtttcttgcaatttgttttgttttgattccgcaaccttaatagaaaaacaaaataaaatttttccttgtttagtttgttatttgtttcatttttgctattttcgttaaaaaaaataaatcaaatgttgttatttttgacttatttgttgacttacttcctgagttaagttctgattcattgtcttctttgttttactctcttttacgaggtaccacaaataaaatctgagaacgatggagacaatagagtactctcgctccgatgaagaggactcatatggatatagtcaagacgcgtacttcaatgagactaaatttgttgagtcatggcatgatgatggctactcatcaggctcggattttgaggaagaaccatatggtggagcacctgaaccagagccaccagatcgttatagtagcagctacaccacaccgagttatccgaagccatggatctcatggaaccccataccaaagaccaattcctatcccactttctaccccactcgcaaagttatatacaaattatttgtgcataatggtagtaaaacttatggacccgaattctttttgttttcaggattgggctatctacagtgggaaagtaatatgaattactatttcgagtaccattccacaccacaagaagataagctttcgattgccctagggcaactcaagagtagtgttttgaggtggtcggatcaagatgagtacaaccgttgaggtgatgggagaccaaagatcagaacgtgggagaacctaaagtggattatgtacgaaaactattgcccacaatgtctgaatcaagggaggaaaacaactttccctccaaagcaagccatccaaggagacaagatgcctaaaacaaccttaaatctgactgaaaaatcatggtaagttttctgaacttgaatgttctatggaactaacttgctacaggtgcaaaggacaaggacacatagcaaaggattgtcccaccaaaaaaagttcaccaagacaagaaccaactctttgtcttcatccacaagtactccaaaaacaagtagacgtttccactcttcaacatgatcaggttcaaactgaagcttgtcaaattgattataatgttcctatgactcttttaatgcacttgtctagtgccaaaagcattgagaaagtttcaagtacaaaagagatcattaaggatcaaggaaaagtttcaacaatggagaaagtgttcacgaaagaaagtcaaaaccaaggagaactgacattgaaaaaagttgttgtgaacaaagatgagagtgtcgaagacactataccgatcaaagaagaaccaccgaatgctaacaaattctcaaaactcaatgtagctctaaaccc

SEQ ID NO: 25984 - DNA, 1309 bp, Arabidopsis thaliana landsberg
ttatttttgaggtggcacagatgatgtcaactattgcatattgatcactttatccacattaccaaaatctttaaagtgtagagatctcatcttcaacaacaacaactaaactaaagtagacatgaagatggtctacatcacatcataatcaaattaatcacccctatatttctaaaacacgacacaaatacatgcatttagtactcctttcttcaaaaaaaaaaaaaaacacagttatcttcaatcagacctaatcttctctattatattcctacttttgatttgacatatatttttcagaaactacaacatctttttttccaataagccttaattatatattagttaagtgatagtggtcgatttatcattgtttcaatgacttgaaataatgaatcaaatttcactaaacacactcttttctttgattttgtagaaaatttatcaattcgaaaaattaaattaaagttcaatctaaaccttatatatctaagtgtacgactttgtattgcattatgaacacaaatcgtagatactagataatgattttgaagaatataaataaataaataaatattagtttacacaaatgaataacgttggaaacttgttgcgagactaaaatttaaaaatatatcgtttattgaggttttaattatattatgatcaagacataattttgatgaacaagccccacattttcaatttacacataaatgttttaattagaactcttttctatttgcgtttacaaacatctaaaatcctcaaaacctgattataatgtgacttaactttcaacatgaaactcataaacagagcagaagaaaaagcagagaagcataacaaacaatcacaacaccaaacaaaagaagcaagagtctgcagagctttgtgttgcagcaacaaagcaagactcagcatttcttcttcttcctcggtggaagcagacaagagttcaagattttcagaccatcacggttcgctctctagtctagcacactacatggttcaggagaagctagagcagatgatcagagagacacaagaagccacacatcaagagaagataagacaacaaaagatgagaagaagaagaagaagaagtgagggtagtatcagtagcactaagttcattgtcatgatggcgatggagaaatgttcttttgatccaagaaaggattttagagactctatggttgagatgattgtagcaaacaagatcaaagaagcagaaaaacttagaagcctcttggagtactatctatcgatgaatcctcgcgaagagcggtctaccaatcacgagatc

SEQ ID NO: 25985 - DNA, 1543 bp, Arabidopsis thaliana landsberg
gacttatgccttcagctttaggcccaaatatttattctttttcgtttttctcacctccttttatttggtcacgagatcgtggttgatcacaagatcatattttacaattaatgtttcaaaatgtatagtatataattaaaacgccttcaatcattgattaatataacaacatttttttgaagaagcaacatttgataattgatgtcttccctaacggacaaaataatcttatcaagaacaaaaacaaaccaaccaatggaaacataatataaaaatcgatgtaccaaaataatataaaatcataacattgagaaatacgtgcgattccctataatacaaaacgtaagtcaaacaaatacgttactattgatattgagtggttcccactaattattctcctaattttgtcattttgtccattttaatagcataatgtattatcacaaaaatgcaacatttaatatttatatccaaatttgtgatcttctcaaagaacaagagttcttgcttaagcatttattgattggagccattaaagcttttatatttctcgtgaatttttgagccaaaacggttatatatttcttgaggttttttttgttgtaacgggtccgagtcacgatgagtcaactcggagatttgcttagagaatcagaagatggaacaagaagtgagaggacgatgatgatgagtttgctcgaagaagatcaaatcaacggtggagatagaacgatgagcaaatggactacgttaaagcaacggctgacatttgattgggttggttgttgtggtaagcctcttactctgcgtctcagacaagcggagacaccaatcgtcgtcgatgatgatgacgacgaagaagaaagtcaaaaccaggttgttgacttttcggatccggcttcgggtacggggttggattgtttgacacgtggctcaacgaggaaccttgcagaggctttagcggaggagagattagcacacgtgacggaggaggagacttcagttactaaagtaccgttgatgaggttgcttgcggaatcggacggttgtgattcgacgacgacgtggttgggtaatgatccgctgtgttgtgtgtgtatgggaagagagaaaggtgcggcttttattccctgtggacatacgtattgtagagtttgttcaagagagatttggatgaatcgtgggacgtgtcctctttgtaaccgttcgatctttgacgttcttgatctttactgagaaaaaaattcatagatcgatctgatcgacggtgatgatatgttaaagttctttgtgcatatttatattagtaattacatgatttggtgatgaatcttgtagtaaagataaataaatggtgacttatcaaagggtaccactaattaacgttgtgaacaagtacttatagatctttaaagaaaaatattctatataattttatgattaaatttagtaacttttctcttattcacaacaaaaacaataattcaagtcattatatattttcaaccgttgttacttgtttagtagagtgtttttttaatag

SEQ ID NO: 25986 - DNA, 520 bp, Arabidopsis thaliana landsberg
acagcctgcgcacacagtgagaatatgttcaacatgtaactgtgctcgtcaatggaagagtgcgtttgtgttgttgaccttggcaagtgacatcttaatgcggcccgacttttgctctggtcttccatacgtgactgccaaatagcacttctcaacgatgcctttcgctctatacccctcgtcagcgcaaatgcaagaaaactattgactgcggtcactcactcactcactcactcactcactcactcactcactcactcactcactcactcactcactcactcactcactcactcactcactcactcactcactcactcactcactcactcactcactcactcactcactcactcactcactcactcactcactcactcactcactcactcactcactcactcactcactcactcactcactcactcactcactcagtcactcactcactcactcactcactcactcactcactcactcactcactcactgactcactcactcactcactcactccata

SEQ ID NO: 25987 - DNA, 1665 bp, Arabidopsis thaliana landsberg
atgaagatggtcctagttaaacccctatgtgagacttaactagtatcttgcaaagacgcccaaactccaaattatgggcttctttgtctaatgggttagaagcataaagggaaaagggcaaccatggttaggccacaggtcttgtgaaacttcagaggcatgtggatgaaagtagtaaacaaagctttgccttaaggatttaaatgaattggtcccctacatagcatcatggaactatgaaccatgagccttcatggtcaagcctgtggaactgcaaagcaaactgctggagaacatcagtacctctagttttccatgttgtgtatgaacaacgaaaaaatataaagaaactaacctgatggtatgactggtgaaggtgcaagagacactggtgaaccattgtgatgcgggtagtttcccccgggagcagaatagtgaaacatgtggttggggtagtggaggggagcataaccagtgacaggtccatttccttcagcaaactggagatatgggtagaaccctgctgctggtgctgctgctacaccagtcattggtccgcttccatacattggatgctgagcagttgcccctccataaacattgtaatagctctgctacaaaaacaataatccaataagctataagagataagagtagagtagggagagactctcgtagttataaattattaattataatcctctcccgtatgccgcatatatatcaagtgcaatgacaaaaataactcaaaatgcagttttttttggtgttattttgtatccacatggaccacatcacgtggagcacatatgaataatcaaatgtggtgttactatcactggtaaacgtggttgtttcaaacttattggctccatgttgcagttaactatgtgtttgatgatagataatttcaaatcacagaatatatcttcgtgttatcaaatgttgagttaattacaaattagaggatatatatgctatcaaatattaatcctaaacctgaagtaataatgaacccaagcctgatatctagattcaccccaaaaaaagaaaaagaaattgtagctatgtaaaaaatatcatagcccccgtttttttttgacacaaaatatcatagtccccttatcagataaagttgttgaaatcgtcttaccacggtcaagtctcttcgtttagtgacgacaaaagtcaaaaaatgccagaagctttgggaaagtagtacgtagcttagctaaattgtactatgcatataattaaatttgtagagttgtgtgataatattctcgcaactcgcaagtttcgtcatggtgcatatgactgcatgcgggattgtcaattgttttgtagcgaagaacttaagagttttttcagccgtagaattcgaatatacttggtatttaacgaccaaaattctatatttaactgtgaacataacgtattgggattttgattaagtaccttaactatagaaccacccggagattataaaaacaaccagtttaagatagaaaaatatgatagtaaaattgtttagttgtcagtcttatgcataataaatagattggtgtagtgttttttcgtttttttttttgttgaatgtgtatgtttcattttgttactatatgcgtgcgtgcatataccatatgatccgtaatttatttacac

SEQ ID NO: 25988 - DNA, 921 bp, Arabidopsis thaliana landsberg
tgatagatgatgctgatctcagagaaagggaaaaaggatgagagaacgagagagagagagagagattgtgtctaaatagagctttagactaggactttagtagtgttatagaataagacaagctttctctcattgtacgatcttaaaacataaatggcacgttcttggatgcgagattgagtctgaaaattgttgagttggttttgttgaacaactatactatgaacactcaaaattggcgaatgtccgaaacaaaactagctataaaccaaaataatgacgagagtaaacgagattgtacaaatcttgacactgatgctcagcattttccgcttcccttcaccgaacttgagacctcttgacgcaaaaaaaagctgcttaggctttgtgtgtgtgtgtgtgtgttgtagcttggtaaaaagctaatctttatatgtacatgactgtctccaggtaagctttgattgaagaaggctttagttgttaaatatttaagaactttacatttagaatcagagatcataaaaattgtaaccttgacagtattccaataactgtctcatattgataaaacatcagacgcaaaagccataaagtgatcagaagtagtacgaagctgccactccattgtttatatttggaaccgtcgttgctagtttgtttgggcctagtcaggagttattttgggcctaactaagagtcagtgaatctgagcccaaagtttggtaagatgtgtaacttgtaatgggccaatcaaattttgaaccaattttagtattttacaaaccaacttcgaatagctgtctttaaactgaaatatacttgatcctaaacattgaacacatgtatacctaataactaaaataattcaattgaaattaattaattaacagagtagtagtagattaaaaccaaaaagtc

SEQ ID NO: 25989 - DNA, 3294 bp, Arabidopsis thaliana landsberg
  unsure (1)..(3294): unsure at all n locations
gctctagattttaccttcttctttttgccgtcctttgccatgaggacttgtggccgacgttggggaagaggaggcctttgttgacggcgatgttggaggcgtcctcgtcggaggaggagtcagtggagctctcatcggagtcccattcccgacatacgtgggcatcaccgcccttcttcttgtagtatctcttcttttccttcttctttcccttcttgtcgttgcccctgtcactatcactagataatggacatttagcaataaaatgaccgggcttaccacacttgtagcaaactttcttagagcgaggcttgtaatctttccccctcctttgcttgaggatttggcgaaacgttttgatgattagcgccatctccttgttgtcgagcttggaggcgtcgatggagagcctacttgacgtagactcttctttcttttcctccgtcgctttgaatgcgacaggttgcacctcgggtgtggaggtgcncctcgctccaagatgacaatatgtttggagtctttgatcataagttcaaagctcacaaacttgtcaattacttcctcgggagacatctatttatatctagggtctccacggattagttgcacttgagtgggattacgaaaaacaagtgatctaagaataaccttgaccatttcatggtcatcccacttggtgctcccgaggttgtgcacttgattgaccaaggtcttgagccagttgtacatcgcttgtggatcctccccttggtgaagcatgaagcgaccgagctccccctcgatcgtctcccgcttggtgatcttggtcacctcttctccttcgtgcgcggtcttgagcacgtcccaaatttcctttgcgctcttcaacccttgcaccttattatactcctctcgacttagagaggcgaggagtatagtagtggcttgggagttgaagtgttgaatttgggccacttcgtccgaatcatagtcttcatcccctatggatggtacctatacaccaaactcaacaacgttccaaatgctagtgtggagtgaggttagatgatgcctcattttgtcactccacatgttataatcttcaccgtcaaaaccggtggtttgcctaatggaacgaaaagtaatggagtacgtttagaaatgcgagggtagtgtaggggaatcttactaaacttcttgcgctcatggcgcttagaagttacggacgatgagtcggagccggaggtggatcgcgatgaagagtcggtctcgtagtagaccaccttcctcatcttctttttcttttcgccactccgatgcgacttgtctaaaggggattccttctccttgcccttgttgcgggactctcccgatggagccttctcgtggcttgtaacgggcttgtcgccgatcaccatctccttctttnnnnnnnnnnnnnnnnnnnnntcgagcgattaggctctaatgaagcaccgggctctgataccaattgaaagtcacctagagggggggtgaataggcggaatctaaaaattataaacttaagcacaactacaagccggggttagcgttagaaatataaacgagtccaaaagatagggcgaaaaacaaatcaacaaagaaatgaagcgaatgaacacggtgatttgttttaccgaggttcggttcttgcaaacctactccctgttgaggtggtcacaaagaccgggtctctttcaaccctttccctctctcaaacggtcacttagaccgagtgagcttctcttctcaatcacttgggacactaagttctcgcaaggaccaccacacaattggtgtctcttaccttgattacaagtgtcgtgagaacaagaatggaggaagaagaaagcacgattgcaaaagccaagcaacaagagcgacaaatatcacacgggtcactctctctctctctcaagtcactaatcactaacgatcacttgtctcaattgtggaacttggagagattggaagctttgattgtgtcttggaacgaattgctagctcttgtattgaatgtgaaaggttggaatgcttgggtgtggtgaatgaggtggttggggttgtatttatagcccccaaccacttcctagttgttgctctttttctgccgaccgcggacggtccgcgccactggtccggacggtccgcccctgcacatcaacgactgaaatcgcaacggttagcaataacggctatatcaacggctatattgcatttaatgcgtcgtcagatgtcagatagacccagtcgcggatggtccggtcgtgcaccccagacggtccgtgaggccgctataattcattcttccgaacccgtcaccttcgggtttttcggatccttgcctaccggacggtccgcgcctgaggccggacggtccaagcgaggtctcagacggtccgcgcttatcctccggacggtccatagtgcagactcggtttttttgcattggttctgtccgagtgtcatcctggtgttgcggacggtccgccgcaagggtcccggacggtctgcgcttggcctgtttttccaaaaagcttctcctgtccggaataatctacggtattccggacagtcgatttagtagttgtagatgaacctttggcacctgtagaacatataatctagagcaaactcgttagtccaattatttgtgttgggcaattcaccaccaaaatcaattaggaagtaggagtaagcctaattcccttacaatctccccctttttggtgattgatgccaaaacaaactagaatggaaataagaattaaaagttacaagtacttgcgatataaaatttttgtgtatgtgcagctccctctaaatatgtgcatgagttttgtgatattcattttgacttgatatgtcaatttgcaacatatttggagagagtgaaaaaccaacacaatacacaaacactgagggatgcaacataattatataagatgtgatgatataaacaagcattactctaacaaatccagcattgtatagcataagatatgaaatggtactggctattacaataaggtcatcacatcgttaaaatgtttgtggctttaggccatcaccacatgcatcacaatagtcaggcgaataaaattattacagaccaggtgttcattacaaaaattaaaagcccctgagggctactaagccaagctgccctactgacaatccttctccccctatttggcaactagcacgaaaaatggagagaaccatcaaccacaaatcaccactgaggaggaggagggccaaagaattgagacgccaagttagatgcgaagtttc

SEQ ID NO: 25990 - DNA, 1296 bp, Arabidopsis thaliana landsberg
tttccctaaaataattaatttacacttactaagattttatgatgctattgcttttcatgctatttaaaaattcacatatatatgatcttgtattgcatataaaaatccttttatagtctcatcttaattcatatagttttctatggacttagtgtaataatacaacgtaatggtaatgccaggttcccaaacgatgcatatgatcgaatatgggtcttttaccttgactcaaactggaagatgatttctaccgagaccaaagtgaacgacactggtagctttaacttgcctcatgcggtggtcacaaccgcagcaatacctacaaacgcgagtgaatcaatgacatacactgactttctcccctttcctagtgataaaattttctatttcctccacttctctgaggttcaagttttaggggccaatgagaccagagagtttgacattctcttgaatggaaaatttattgccgagagttataggcctgaatatatgcagccgaagacggtattgaactcatatccagttacttgcggaggagggaaatgcatgttcgagctgagaaaaactgacaggtctactctcccacctatacttaatgccgttgaactgtatattgttgtcgagacaccacaggctgaaacaaatgaaaatgatggtacgttattaagttagcaagagttattacatgttttcatgtatatatcaaagctttcatcttctaacatatgttaactctaacatactatcgaattcatgctagtgcgtactatcagaaacattaacgccacttacggattaaagagaatcaaatggcaaggagatccatgcgttccacgagagtttatgtgggaaggtctaacttgcaacgttgtagatgcgtctacaccaccaataataacttccttgtgagttctatctacatcatagttttttttgttttttttcaaaatttctttgaaacgattcctcaagtacataattacttttataaacagaaacttgtcatcaagcgggttaacaggaaccatagcagatggaattcaaaatcttacccatcttgaaaagctgtaagtacgatcattgactagcatatatcaatggaatattttttttataattaatgacttcttatttcttccgaattacagtgacttgtcaaataacagtttgataggaccagtgccggaatttctagcaaacatgaaatttttgacgctcatgtaagtttcatgacatatgtattttttggtatatagtattactcttgatcttgtctcatatatttaacgattc

SEQ ID NO: 25991 - DNA, 1555 bp, Arabidopsis thaliana landsberg
tacttttagggagaggatctgagtagcaatcacaaggtgagaaatacgaagagttttctcgttactcttggctgcagatgcgggtgttcgaactggagttcagtggatgtcggctgacgacaagagaagaagctctggtctgaagacgatcaagactcaattgagtttctctggagatctaagctcggagatgaagattcatcaacaacaactagaagcaatgctagagcacaggaagtctctggaaatattcggagctcctcttatagagaagagaatcattcagaagaaatttccatgggaatactcgagctctgcgaggaaagaagaacatggattctctgtgaagtatgaagaagaagaagatgggagtgtgagcgatgtaagtacggatctttttgagattgagagcttaacagggaaggcaaagccttttcttgcaaggcaaggaagtagtgatccagactcaccagatggttatgcaccaagtgaggtaagcatacaatggagtgtagtgacagcaagtgtagcagatttctctgttatgtcagaatgtgctacgagtcccgtcaaaaagaaccggtcttttcagattcctcgaatccctatcatggcaaaatcaaaccgagaaatcgcgcctcagagacggaaatctagcagtagcggtttattaatgggatgcaagagtcataaatctgtcagagtttctggtgattcatacacaagcatgaacagaacaccgagctatgttccaagattccctgtagaagctaatccaacaagcactgaaacaagaaggaggatcagcagtagttctgtttctcacacgcaatcgccttttttgtatacttaattatgccaaaaacctgagctcctttcgttttacatgtaaaatgtctattcagtggaaaatatttgatttgctaataccatcttcatattgttgtacctgacaacagtagtttttgatttaactggtttattaaggaagaatgtcgatagagaagtgtaaatcaatctgtatcatcaatcaatacttatctgctgaccacaaatgagtaaaagatgaaatgtgatgccaagaactcatctattgttgccagagattttaaggaactgcaccatgtgaacaatagacacttgggtctaatccgcaaataagacataaccaagagtgcaattccatgtgaaatattaagatgtgattgtaaccttttgttgacttaggagacataattaaatgcagcacgtagactagacacaaaacacatttggtccacctcattttcatgtgcttgtctcaagaatagaaagataacctcattaggcttagatttaacggtttaatcaaagaccgtacgagttgcctaaaagagcctttaatgaggaaactcaatcaaacaatgatagtgtcctttcacctaacatgtcttaaaagccactccagagtcttctggtccagaactcatctccagtgtcaagaccatgtgatgataatgagataaaagagacgtcgaccaaaccttaattgtgtcattgatgatgatatgtctct

SEQ ID NO: 25992 - DNA, 1346 bp, Arabidopsis thaliana landsberg
aaaattatgagatatattttattaaatattagccggcttttatgacctcatattcctatgaatttacagaaatgttaccaaaataattgcatatattttaggtaaatttagaattttaggaaaaaacatgccaagtggtaataaaagagaaaagaatccaaaataaaataaattatccaattatcccaaaaaaaaaaagaaaagcaaagctatatttctatttctttttgcctaaatctggttgatgcgacgactggaactgtgatctaaaaaaaaatgtctgaagcagtctaaataattcttcttctctccagcaattaaacactacattacagccgtatagacccaaatcctttttcgtttttattctattttaataagacggcatttctctctcaatccgttcttatccaagcaaagctccgtcattaaattcattagatcttccaaattgagttacaaagtccaaagtcggctcttttttggcattttccggcttagaataggcattttacctccaggggggctaaatagtgaagcttttttgtttgttcttgaagatataaagaaagatttgtagattaggatttgagaaactgtagaagatagaatcaaaagatgagtttcagggatgataatgaggaggctaggaatgatttgcgtcggccgtttattcacaccggaagctggtaccggatgggttcgagacaatcgagtatgatgggttcctctcaagttattcgagacagctctatctctgttcttgcatgtgttttgatcgttgctcttggccctattcaattcggattcactgtaagacaaattcaaaatctcaactttttttacatttttattccctttctagaagaaagttgtgacttttggtggaaaaactagtttgagctggatttgatgatcttgggtttggtttgatttgtcattttcaatgcaagtctggtgatttgaaaatctcaactttgaagttcaaatttgatgcgatttttttttttaatttatgttttgtaagcattagaaaattgagaatttaattatctgtttggtagattcttgctttgatttttatcttttgatcaaaatgttgttttggtataattttgtttaattggaggccacataaacggggaagttctaaaagtttaggtgaaaaggtccgttattgtgccatatcatctatcgtgccattattcaggtgtcttttagtttaagagatattgtttaattcatatattggtagaatggaatccgaaaggatttaaatatattataagaaaagtgactaggtgagttcattagacactgtttatatgtgccttgttggtaccgtt

SEQ ID NO: 25993 - DNA, 375 bp, Arabidopsis thaliana landsberg
tctatgccttctccgcagtcttctccaaatgataatggataagtagtgtcttagtcagggtttctatttctgcacaaacatcatgacaaagaaacaagttggggaggaaagggtttattttggcttatacttccacattgctgttcttccctaaaggaagtcaggactggaaatcaagcaggtcagaaagcaggagctgatgcagaggccatggagggatgttctttactggcttgcttgcttcccctggcttgctcagcctgctctcttatagaaccaagactagtagcccagagatggtcccacccacaaggggcctttcccccttgatcactaattgagaaaatgccttacagttgtatctcatggaggcat

SEQ ID NO: 25994 - DNA, 1003 bp, Arabidopsis thaliana landsberg
ggaaaactagattcaaaaaatgtcggtagagttcggctctattctgatcaacattttcactggcaatggggtcattttcaactttgtctaatgccttatggcatcctattagcgtttctcataatgtctccaaaagccgctattacatgacgaccaatgaactatggtttaatcaaaccctagatcatgaatctcctaatgtaacttctcttcattgtcctgatttcgtaattttgtccaaatgcatctatttgaggtagattatttgaatcatatgagatttgaaacttagttattgacaggatcaccgcaaattcagacagcgatactatgaatttatggactactttcgatctccagatgggcctatgtttatgataatatgcggtgaaggtccttgtagtggcatagctaatgattatataaatgtaagattttacaaatttgattattgtaaaaaaaatctaaaaagattgatgttttataaacatatataggtattagcaaagaagtttcaagcaggtgtggtttcactagaacataggtactatggaaaaagctccccctttaactcattagctacagaaaatttgaaatacctttcatcgaaacaagccctttacgatttggcatctttccgacaatattaccaggcaagtcttgcttgctttacttttatttagtgagatcatatcatatgctagaggaatggtgactacatttaaaaggatgtttcatgtacctttattatgatttgtggatgtaggaatctctgaataagaagttgaatataagtagtggtggtagtgacaatccgtggttcttcttcgggatttcttattctggagctttaagtgcgtggttacggcttaagttcccgcatttgacgtgtggaagccgtgctagttatgcagtcgttagtgcaatctatgaattctgtgaatttgatcagcaggaaaatatattagtagcatagttttctttattgtcatcattctggcat

SEQ ID NO: 25995 - DNA, 1172 bp, Arabidopsis thaliana landsberg
taatgcccggaatagatgtgaacatcacattttttgtcccgtttcttgcctgtcgtaagccacatgcatataaacactagacagaggaagaaaaagaaaaaagagaaacgtacataccaagagagctgtgagatatgctgatacgttataaagtcacccacatggaaatgccaataataacgctcaataaaccaaaacgtgacatatattacaccacaccaaatacatacggccgaaaaaccctaatatatgaaaattataatgcgttatttaattacatttttttttcttaatcggaagatctagaattgaaacctaaactatgatcttcgaacttttcaacttccatgtaaagtcctcatgcgttcatcggtagtccaggatttaacaaagaggacgatgatatcacttaattacaaatcacttgttctactgaccagaactcgattttacacagatccaaaactagacttttgatcaagttttcttctttctttaccgaagaagaagaaatcgaggttgtaaagtagaggaaccatcacgaccgagcacaaaaacacaagcaccggtccaaatatccaaagcatcaacggcaaagccgcgtagaacaaccgattccccacagtattcaaaataaaccctctctctagcaactccgccacgtactcctccgcggtcatcatcatctcgtcctccaactcctcaggaggaaaaggagtgttgatgaggatgttaacttggttgatgaaacgaattgagagagagtgagagaagaaggagaagaggaatatggtgagtatcgtgacgtacttgagagccaccatgaactctccgcgagctccaaaaacagcgtcgtttagaggcttcttcactgcatatgtgctgcttaaaaccgcagctagaccagcgcagaggaggatcgatgttgttgccatcaaagtcgaccccattatgcagtttctaagcgtttgaacggccaagatgttcttcttgtcgttgtcctaatttaatcaaatacataaaattaaaatcatatatttatgtgtgtgaagatgtttatataagaaaattgaagttaccttgatgatggaagcgacccagaatcggcgagctctagcattagtccgatgataatggtagaagctgtgttcgtaacttatgccacaagtaac

SEQ ID NO: 25996 - DNA, 746 bp, Arabidopsis thaliana landsberg
aatgaaagaaactcataagtcttaggtccgatttaaatttccgattatttgaattttggttccggatttggtaagtaatcacatataattatattctattttaagaagtcagactcaaaggaacaatttcttattttttaaaagtttatttcaatatccagtatcaaaaattcagcaaaatctttaagaattatacattttaaatatttgatttgtcgagaatattgattttgataccaaaatttttaaattgttctttaagattcgtggtaatagaagattattgatgccaaagattttgtttctattcaagtatcagatattgtgttcgtagacgttccatcgttagaagatttaactaaatatttgattttattacaatctttctcaataatcatttaacaaatatttgaaaacccgtttgataatccattgatccgcaagattatgattacattttgttgaatggcattttaagataatttgttacacttctcaacgttaaaacctatgatgtaattccaaaatagtagtataggatacttattcacgtttaaatgtaaagaaattcacgtataaatgttttatgttctaggaggctttggcttttctcggttaagtacagtctatgactctatgttgtgggagtcttttgcgatctttaatttagccatttccttcattagcacctattcatgctttagccttgtagcttttagttttttggatgcacttagcctttggta

SEQ ID NO: 25997 - DNA, 1535 bp, Arabidopsis thaliana landsberg
  unsure (1)..(1535): unsure at all n locations
tagagtggaaaacacgtcaaagaacaccacatctcttgagacaaagaattgacacttctctagatcatataattgccacccctttttcccgtacggatatcccatgaatacacatcgacggcttcgcgatgcgaacttatcgcctacatgtgattggtcgtaagcatatcacgtgttcccaagaattcgaatgtgatcatacaccggtttagcattgtatatccgttcataaggagtcattcctttcaagaccatactcggtgttcgattgattaaatatgccgctgtgagaacacattccccccaaaactcaatgggcaagttagcttgaaactgtagagctctagcgacgtttagaatatgtctgtgctttctttcaacccgtccattctgctgaggagtgccgacgcatgatgtctcatgaacaatctcttgtttcttgaagaactcattcaaactaacaaattcagagccgttatcacttcttatgactttaacttgggtttcaaattgtcgttcagtcatggctatgaagttcttcaaaacatttggtgcctcagatttttcgttaagcaaatataaccacactcctcgagagtaatcatcaacgatagttaagaaataacgagcaccagagtgtgttggagttcgatatggaccccataaatcacagtgaataagatcaaaaatccttttcgttttattgtcatttattggaaaagacaaccgggtttgcttagcgcggagacatatatcgcatgctttattcaaaatttcagaagaaataacatttgagattacaggaagaagaccaactactttagctgaaggatgtcccatccgttgatgccacaactcgaatgacttctcatctctaacnnnnnnnnnnnnnnnnnnnnnnaaactccaaaaaaggaaggtccctccctttagcttactaactccaatcaccgtccttgtagtgcggtcctgaacaacaaggaaatgatcagctaactgcactacgcaacgattttcatccatcaattgacaaagagaaatcaaattcgattgaaacccatcaacataataaactgattttagtgtccaattcggcccaagcctcactgatcgttctttaactaacactcgttgtctcccatcagctaacacaattccaactggttgaatatctttaacatccgttaagatttctaactaacccgtcaagtgatgtgtagcccctgtatccattatccaagagggaaaagagtacgtacctgtcagattttcggattcatagactttgctagtgttagcattgagcagattcttaatcaccttccactgtgaatcggagaaaccggtcactccgtctctgtcattgtcggtgatgacgtagttagcggctgcataacctgttggttcattaactccgacggcgttgacgtacgaagtgctgccacgactctttccagtccctctgtttgagccttcacgtccacgaccacagctagacgtagagcgagatctcggtctatcttcccaccactctg

SEQ ID NO: 25998 - DNA, 3054 bp, Arabidopsis thaliana landsberg
gtctgctggtttcctcctcagtaaaggatatctcgggacaatcagttcgacccgtttttggtttctttgcgatcggagtgacagttcttctctcatgctgctttatcgcgctaatagaatcacgaaaaagttttgaacctcccataatcactttgaccattttcttcggccctttaggaattacaagggctgggtcacttttccatttcttgctcgaaggtgaagcttcctctgattctaatgtttcgttcgcggtctaagccaattcgatcgctgtgatgtcaaattcggaaatttctcctgaagcgtacttcgcctttaacaatctgcccaaagctttgcagtccttggttgcatgaccattcatcttatgaatatcacagtacgcattcggatcttggacctatttgttactcggaaaagcgccgtttttgcccttaggagagaaaggtgtgaagctttaggagaggacttcgatgattctttctcaacggaaaaagttcctgctgcaggttttcagggctcggcgggttttttggtggttacgggttgaggcgcctttggtgcaacatttgaagcactgaactttttggctagaaaagctcgttcttcttctgcgtttatccagttcgttgctcaatgaagtgcatcttgaatcgtctcaggccggtttactgtcaaagactcgcggaagcgtgactcatgccaaagaccattttttaacgcgaattgagcagttgagtcagataagctaggtatttgaaccatgatctctttgaacacgataatatacgtccgaagtgggtcatctgcggattgagaaagattccaaagatgggcttcagtgatgtcactcttaatgaagtatccgtactgcttaatgaacgcagtagagagttgcttgaaattgtcaatcgagcctttttccagttgggtaaaccaggtgagagcgggtcctgacaaattttccgagaacaacttgcaaagcccagcatcttcttcgtatggctctagggggacccgtccaacgatgacttggaaggaagtcaaatgctcattcagatctccttttccattataaacgggaagcttgaaatctcggaactcacggatacgcaacttagagatccttggggtaaaaggtgttctcctcgttgcctcaataaccttttccacttcgggagccgaagtagtggcttgatggacttttgcgttcatggcccaaatttgatcttgaaggctttgaagctctgaattgactacgcttggctcttgtcgaggatcggagattggtagtctgatggcaggatcaagtggaactggcgtccgagctattgtctcatctgaaactgcggcaaatcctgctggtgaagacgaggtggttggattctgagtcgatgtcgtcccgacttcaaccgggggcggcagagtctgctggtcagaggcttcctgtgaattttggacactcgggctgacggtgcccttaaaattgagtcgcttttgagctccagtagtccgcgtggttaatgcagaaagtgaatcgactcgctccgcgtacgcgttgttggctgatctgatttcagaatggttcgccgccaatgctgcgagctggccgttgcattgctcttggaaggacacgaacttgtcggagagggacgtcacggcaagctgttgttggtcagtcttatcggacaattgctgaagaagttgcttgatgtcgtcgagggtggaggcttggtcgccggaactttgactgtcgttgctactcatggtgactttgatcgttgttctgaagtaaaagacttaaagtcccctccttctagcgccaaattgtggatgtcggaatccacaatcagaattttgtgactgtgtttcgaggatcttaagacatgttaaacgaacaaagatcaatcggaaaagtgtttgtttatttctgtatagtttccgtgtaaaatcatgtccccttacaattgtatccagactatatttatacaagcattgcgattcgaatgaattaaacatcacgctgattttacgccgagaatctcgcttcattcacttcggacgttacgaactctatagctcgagcaattaatgagtccctttaattcgagatccttccgttactcgaatcaaagttaaatcgcgccttgaactgatggacttcttttaatgggcttactttcttgatgggctctccactggactcaaaaccgcgtactgggccggatacgaaatccgacatccacaactgtctaccaaaatgccttccgattaaagacattacaactactctagcgaagctttgatcaaacctgataagcctaacatcctcatattgaggtaactgacatcgatgaaaccttatactgaggaaattgggaactaacagaaggcaatttctagaccattgcactacacacaagagggtcatagaaaccaaacctttcagcgtcatattgatggagaggggagaccgtgaaaaccaaggctgcaagctgaataaagagcagatctcgtggtaccttgtacaagtgtaaaccaagacaagactggaacaggagctgcataccgtagtacggaaggctacgtatgtgtcacttggggacacgaaaggcggaaccaagcctaacgaacccaaagagttcacgccgagagcaaggtagcagatggtcttcacagaagaagtctctaacaagatccaaatccaaagggtcttcgtcggcaaggtctgaaacttgacggaagaagaggaggcaacattgacgacacaatgaggagcaaacaaaatgatggatacgaaggagaaagatctcaggggtgaatctccgatgagcacataatacgagacgagcaagatcattagatatgggtgacaaaaacaaaacaaaaatctagatctagcaacgccggcaagagctgacctcgtcggaacatgactcctcgaaggttgtgctagagagagaaatagctagggcgaactttttaaaaaacattgcgactttcaaatagcttttcaaatattttagattagatttctttcgaatgatatat

SEQ ID NO: 25999 - DNA, 705 bp, Arabidopsis thaliana landsberg
agaagagtcacaagtcaaccaaaaccctaccaaaataacaaactgatcaaatatgacacttctattcaaaaaattacaaaatgatcaaaaatctgtaatgtgtaaatcttttatatggaaattaccatctatcatgttttagggaggaaaataaaaccaatgacaaagaaaaaagggactgccagctccatgtcaagctcgagctcatgtgtataatgcttatttttgttgtggcgcctattgtttttctccttccagagggagaagatagtgacttgtaccgtgaggcgtttgagagttaagctctgtaatccgtaggaggaggataaccacgcaatgaggccaaaccaatcagcaaaattgagatgtggctgtcctagtattgacagaacaatttgagaataattcgtttatgttttttcgtagtatatgaaaagagcattttttaagctttgcgtaggacacttgcaattgtcccaccggcactgatgatgatgacacgtaagtcttgatcaaaggatctgactttgaacactttccaacgctaaactctaaactcacaaagcatgttaccatatcactatactctcatttctcatttctcaacagcatagttctatactctcatttctcaagcgttccttaaggttaatgactaaaaacaattgcatgcatatattataactgattcgatcatcgtatcca

SEQ ID NO: 26000 - DNA, 2789 bp, Arabidopsis thaliana landsberg
agctctctcggattgagcattcaatacgtgggtgcctccttgtgtacacccccaaacatattcgtggaccaacaggtaaaaacaccaaatctcttctgttttccgctttcttcagttgtataataaattgtgttttgccaggacgatgttatccagcatttggagcctggacctgtacgatccacaatagatcccgactcactttcacagaagaagccacctcagcgtcaacaagtaaggatcaatccatggaagctggcaaaacttgactcaaaagaagcatctaaagcagctgcaaaagcacgtgcatcttcatcagtgcttcttcctgtaagttcgcggcaaaacccttacaaaaccagcagcaatgtaagcgggagaagcagccccggaagaggcaaacctgctgattcagagtcttgtagccttagtagtccaggtttgacgagagatcacttcaacccaatgtacatgtcatcaccagctaacgagtcacctttaaacgaggaagaaagcagaaatgctgttgttgcagctagaagaaacttgccgtcaagcgatgagagttcagtagtttgggatccagaagctggccggtttgtatcgttgtctcggattcccggaacagatgttggaggtcctcttggtaatgaatgtctcaacaccataacttctactgggactgatcgtagcagaagggctagaggaaacccattgactggttattttcaacaggttagatcacagagaggagaccaacttccagtgtttatgcctactgattctcaactgcacagacatttatctactagattccattagaaacattttgtagatcaccaacttatatgtttccattcaagttttgtttcttatttctctttttattttcttgccaattaaggagacagttttattggtttaatggtagggaagaaatttaaaacaagatttagaactagtttgtaacacctggttattattgaaaattgccaagaaagaaagaaattaacagtattgccgtgagaataaggatacacatgcattacgcagcatctcggaatagctagatgagtgatgttgcatacagaacttggatctggtttaggtaaataagtagagttgatgcaaaaatgtatctcctctaccatcgtcgccattttttgtttttttttcaagaatgaacaaagatctttggaataaataaattagggtttaatttcttcttatttgtaacgtctttgagaaggtattttaggtctaatcgacttctctatttactatttagataaaatatttaaataaatacagaaaaagggtatcaacaaggttggtctatgtagtatagtggtaactggtaagccccgatccgattacgattcaaaaccagtagaactacacaatgaacaaacaagcaaaattttacaacaaagagatagaaaagaacacacaccactcccatcatatagtggtttcataaatcatatcaacaaccgctaagaactcacggcactaggctctatcttagtcgtaacccaaatctccatcacatagccttcaaaaggttgaaataaaactgcaagctgctcttctccaaatgcagatagagtcgcaatatcataattagcctcaaacggcagaggcagagtcacgtctcagtttacaattacaattacaattaaaatgttaaataagatttacgtagcaacaaggtcgttgtagtatagtggtaagtattcccgcctgtcacgcgggtgacccgggttcgatccccggcaacggcgtcttttttattttgaaaattttccacaaatccgctgtgtcgttcatctttctacatttccgattcaaaaccattagagctacacaaagaacaaacagagcaaaagtttccaaaacatagaaacaaaaaacccaaaaaaaaaaaaaaaaaaaaaaaaccagaaaatcaccatcaccggaatccgtctagcggaacgacggagacatcttccttctttgcatgttaccgccgtttcttggccgtagaagatataaatattgatagtcgtatataaaaaaaaaacatataagacaaggtacataagaaaaaaacaatttcgttaaagaaaaaatggctggaggaggaggtggtagcacttctggagaaggtcctagagagctcgatcagacaccgacatgggccgtctccactgtttgtggcgttatcatcttgatctctatcgttctagagctcatgattcacaaaatcggagaggtaataaaaactaacacaatttctcaaagattgctctacattttatgatttcttattacaccagtcattgattgttctttcgcaggttttcactgaaagaaggaagaaagctttgtacgaagcgcttcaaaagatcaagaacggtaccaaaccctccaattgatttttttttttttttttttcgtgggttacaagttttagaactttttgtgttattgattttgcagagcttatggttttgggattcatttctttgttattaacatttggacaaaactacatagcaagtttgtgtgtggcgtcaagatacggccatgcgatgtccttttgtggtccatacgatggtccaagtggtgagtctaagaagccaaagactaccgaacacttagaacgtcgtgttttggctgatgctgctccagctcagtgcaagaaggtcaaaatctttctatatatatatttttttttgcttaattagataacatggttgaaattgatgaagatgaatgtttttgatgtatgcagggctaatgtc

SEQ ID NO: 26001 - DNA, 1340 bp, Arabidopsis thaliana landsberg
aagaacctatgataacattaataagcatctctcatcttatcatttaaacatttcctctttattctttttctggatgatttggtggttggatagcttaaagtagttatttatacgcatgaggacttataatagattaagaagcttcatatcttcagctacattgttagttatttaagcctttgtctctctgtttgctgcactaaacacgtgaaattctgaagtagagtatagtattctggaatcttttgttgttatatgaatctctttatgcttattaatcaattttcttagcatttctttacattaaacaacttaaaggaatttattcttaatccatagacaaagaccacaccacccatatatgcttattagtgaagaaaaacagattcttgattctgtagattggtaacttacagatgtattgagattcttcaatgactttaggagaatttcaacagtgacttgaaagaggttgcataccgtgaaatgttgaaggaaagaaagaaaatgaaaagtgttgagaaacccaatcgttgaatccgtgaagcttccttgagctacatgcctacatcatatgcttctggaattagataccataataattgtttaagcttgtttttggaaagtgaggctttccaacatgagtctcttggctgggaatatatggaaaaagaagaggaaagctaagagcactgagcaaaaagagtaataccactataattataataaagtatggaagaaaagagaacgacttatatttgatttatgagtatgaagttcatgccaaatatgcaggagttgttatttaactaaattgcaggaactttttgaagagaatccagcggttgaaaaatataaatagaggttggctggtgtgattgtgaagtatctgggatgaagagagatatgggcagttacaaaatgggtttgtgttgcagtgacaagctcaggatgaacagaggagctccacctcaggatgtggtgacgacgtttgtagagtataccgagggcaggagccacatgacggcagagcagctatgtcggttcttggttgaggtgcaggacgagactgaagtgttggtttcagatgcagagaagatcatagaaagaatcacatgtgaaagacatcatatcactaagttcttgaggcatacgctgaacctcgatgatttcttcagtttcttgttctcagatgatctgaatcatccaattgatagtaaggtatccagtttcagtttcttgatctttttcttgaaacttggaaagaatcaatctttgagcttttgtttttttcaggtgcatcaagacatggcctctcccttgtcgcactatttcattta

SEQ ID NO: 26002 - DNA, 3076 bp, Arabidopsis thaliana landsberg
cgcgtatgtcaccggattatttagggttccaccaatttttcgattcatctgtgctagtcttctggaatttgaaaaatgggaattggatgggtttgaaattggaattctagtttctcccgtattgatttttgctggcaattatgctgatctagattgttttcttatagctggattgttgttttgcatatgagattctcgcaatctctttgaattgcttaagatttgaccacaagtctagtatattggatatttgatttttgtaatgttctctgattaatttctcacatttccttttatgactgtgctctgatgacattttatgtatgtttgcatcgtgaacagggtcttacctctcatggaagggaacttcttcatcaggtctgatgctcaacgagcacatgacaatggcttcatagccaaacaaaaacctaatctcaccacggctccaacagcaggtcaagctaatgaaagtggctgttttgactgcaacatctgtttagacacagcccatgatccggtggtcactctctgcgggcaccttttctgctggccttgcatttacaagtggttacatgttcagttatcttctgtctccgttgatcagcaccagaacaattgccctgtttgtaaatccaacattactatcacctctttggctcctctctatggaagaggcatgtcttcgccttcttccacgtttggctccttgaaacaagacgcactgtccactgacataccccgcagacctgctccatcagccttacgcaatccgagtacctcagcatcatctctgaacccaagcttgcaacatcaaactctgtctccttcatttgataatcatcagtattcccctcgtggcttcaccacaaccgaatcaaccgaccttgccaatgctgtaatgaggagtttcctctaccctgtgattgcaatgtttggagacctggtctacaccaggatatacgggacctgcacacacacaatagcttagccttaccaaagccagaggatgatgcacggggagaagcctatcaagcgggtatcgatatggatcctttgatgcatcatcctttgcctccttcttttctagctctctctctctctctctctctctctctctctctctctctctctctctctctctctctctctctctctctctctcttcgtgtatagtacgtgatgtacataggctgtaaaactcgaatttactgtggtataaccactactgcagacaccgttgttccgagttaggtctcaaattgcaggccaatatcttgttgtgtattacaaagatatcgataaaatgtgcttgtatctaatcttcatgaacccatgactatgtttgagaagcgtatgaacactttatcatctaatttttccacctgttgttgagttacctgttttgtatcagagtaaatttatttcccttagtccttctaacaaaagatgaccctgagtttcgtgacgaagaggtagaaacgctagagggaaagatgaagggaattggattattattctggcttagaaaatagtgagaaatttccataatgtttgtcagtttgcagaaagaattatatagactaattggacatggatctctaaagcgcatatgaagcctatctacattgcctttgagtcaatttagatgtcaaaacaagtctgctaacaagcacacgaagcctgttagctccaggaccgggcttgatcttcgacggatcaccaaccctcgagcattttggttcccctgcacaccaaccaccaggcgtgaagtttccgttacctctaccgagcagctctttatcgatcttatccaaggcaggatcattgtgtctgaacttgcgggaaaacgcacttccacttgcaatcatcctctctgtatcgttgatggtgagcgcccgaggatgctgtttaggagggcggtcccatgagatgaaatgcaggtcgtggttcagcacagtggaagagtactctggagcgttgcagatgacagtatggaaatatccttccggtgtagagaggaaattggtgtaatacattagaagagtccgtggaagattgtcccatccccaaatgcaatattctacgaacgaccgagataagaccatccaagcggaacctgcagtttcacagattagtcaccatttttcataatcattactcactaatcactgaattaccggtaaatagtttgaatgcagttggcattgttctgcgaggtgtaacccagaagacatctgacttctttgtggagtaaagccccgggtctatgatcagcggctttgctcgtttttctctgcgaaaaaaccgcatttggatgaaaacagaactaaaaatgtctcaaatgtactatacagagaaataatcattactctttccagcctagtttgctactgtggtcgataaagttgaggttccggtccagtcccgagaatgtatcaatcagatctgcaagcaaggggcattgataatccgggcagagattatttgaaacgaagaaagagagactagatacataactatattaccatcttgagtgactagaggataatccgaggcactgagattgatgaaccaatcccattctttactctgcttcaagagaatagcgcaagcgtggagcgtgttagccaccattgtgggtcctcgatacgtaacaaggttagcctttgtgatcatgtgaacatttccaacatcgctaaaaacaggatcttggctcacacgtttagccagctcaagcctctcttcagcaggagactcgagatcaagatgaacaacgtactgattcctaggatggtataatgttcgtaacactctccacagactctctaagtcacctcttgaccctgaaactagataaccaaagcgaggaagactaggctgtactggaggaggatgcgaggactgattgatctttgactctgcaaattcgactcgtgtctcgttggtggtcgatagattgtaggagaagatgagtgagttaatagaacggacagaagagaggagacccatgttgaaggatgcagctataaggaatatgaacatgagagaagccattgctagagggaatatccatctc

SEQ ID NO: 26003 - DNA, 3656 bp, Arabidopsis thaliana landsberg
gcacaaagaggtaggaaccaaccaaaatagtttttatattcaatccaaattagaatgatgcagatcatgcaactagtgcttagatcaacacattggtctaactttgatataagagaatgaacaccaagcaaaaagaaggcctattaccgttcttactagaggctttctaaaggacttgtacaatccatcttgaacatattggtctaagccaagctaaccgcatttgaattgatagcactagttagtcgaaatgctcatagagaataaactatgtatacgtttattaagcttaagagatttgtgtatatgtatatgcaccaccatctagaaaaagggaagagagttagtacaagctagaaaacaaagttaaaagaaaaggaccatttaaattgacaagctacaacaagtctaaaagttcagttttcattaatcaagaggagaatataaaaagctttaaatcatgttagaactgttttaccatatatttgaagcaatcacaattgcttcatgaaatgaatcaaagcctgaaactagtggatagtgaatgaacaaaaaagattgggcagaagcatcaacaaacctctggaagttaagagagtcggtcttgttcatctttgccttcacaggcatgaagaagaagacaatgagaaaatccaaaagacctgcacaaataacatttgttgcttttaaggaaatagtagttgaagtaaaacaggctaaagagtatggactttacgaaagcataagatcaagacaaacactgaggaagctttttgcatgaaaagcaagtcacatgttgtgatccagaagtaccaaagatctttgcatgaaaactatacgtaagacacttacataataaaataatcgtgtcaaaagcatcatagaaagctgtgcaaagcacatgactggagttggtaagacaggtcttcagaaaaatagttacaaataaagcatacaaagctattcatatgcaaacctcataaatcaaccttagatatatgcaatttttgtcttaagtctcttgtacttaacataacaccgcatagctcacaaatctacgctgaaaagttgacgacttttggtcagtaaaaaatgcaggataagtgtaaactgatgtatgtgaacagcacaatgcagctgtcaaactcaacttcagataaactttgcattaaaaaaaatatacagttttgaccattagtcatataaaatagttgtggcagatagatcttttgacttaattatatataaggtattaggtgaatcatcgtggtccagatcattgctatatcaacagttttgttatccaactacaatggtaatgagacatcaacatgtgaaaatctactactgctagttaacaagagcatcgatctcaaatcaaaaacattaaattaacaaccatctcagtatctcacatgtttgttttcttccagaaatgactacatacctgtcaagaactcatatatagcagcctcgatagcaaactactagtaaacgaaacatgacttcttattgaactatgtttatatcagtcgtattcaaacttttaagaaaagaaaaaacaaagagaagaaactactaatttgagattattttatgactagtccccacttctgaaagacgatttcaacaccactgagtcagaaaaattattggccagatcttcaatatactaataagaaaaggacaaaaatagtaaaacaaaaaccaaacccattgttggttgactaacaaaaaaaactaacaatgaagtctcaatgagatttaccaagatgagatttttctactacattcgattgcataaacggattttattttgaaagtgaatcgctgaaatctagggtttcatgcccaaacaagaaacatcatcggaaacataatcgtataagtgaatccttaaatctgtaagaatatcacttacctatagactcgccggaaaaaaaaatccaaacccagccgcaatctgccaccgaatacctcatctacgcacacaaaggcagaaacgttaacgcaccattctatttctaagcccaccattgattcctcaataagttcctaattttcccgccaatgttttggatttttccttttatttatttatctttattcttatttcatgtttttcgaacttcgaatgattactagtttctttgtcagattggatgataattctgatgaaacatgaaggaacgatttctatctttaagggattcatgtaaactacttgataaggaaagtgtttacaccaaaagaaaaacaaatacaagatggttcagcaacaaataacagaggttaacaacatctcgaggaaacaacaaggaagagaccataaatcaatagcgggttttttcaagcagatttagcagcttcagctgcttcttctgcagcttcttcttcttgaagtttcttcagagacggaggtggtcttggtactatgcttttcttccattgtctgtcaagtttcctcgacaaccttttctttatcccttctttgatctccctctctcttttaaccgtcaacatccgagcaacctaaatcacccacaaccaaaagatcacatcttcagtaccagaaaagagacggacgtaagccaaaaaaaccaagaaatttctacttgaatttagtgtcatctacagctaagttgggtggattagtcacttagagctcaagattcatgtctgattgaaatcccagcaatcagtaaaaccaaagcaagtaaattctcatctaaagctagtttggtgcattggcacacttaaaagactaaacaaacgatatcgcaaagctcaacattcatgtctaactgaaaccgtaatatcctaagaacatattcgaagcttgtgtgcaagaatctataaaaggggatggattgaactcaatattaaatctctaattccattccaccacctaccaaaaacagtattagatatcacaaaacagtaacttacaatgttgccattgttagagtttagaatcaactataatgtgtagaacaaacaacacaaaacattgcttatagagttcgctaacatcttctacaacttcatattaaataatcctattttccatggtgatgatttcaatgtttccatcaataaaccacatatcccaattttgttaaaccctttcaaagactgccaaaatcgaccagataacacaaagtagatttcacaatttggaataattctgcattaaagagtaagaaaaaagcttacttgtttcttcatacgacgaaagtcgctagatttgaactcattccttgccgatttctggagacgaagcataaagagctcacctttaaggtcaacaacctcctcttgtaactgctccgtcgtcttcgatcttatctctttcaattccgcctctcttttcgacatcatcaccaccgacggtttaggagacgacgacgatatcgtcgccgccgcggggacgcgagcagaaacctggtgctggattctgacaccatggaatgaagacgaagttgaagtcgccgaagcagttcctctacgaaaaatcgccgccgtccccggcgtagctattgagagactaagcattgtagctatggcggaggaagaagaagaagagcagagttctcactctcgagcgatttaagaaaaatgagagaacgaattctataggataaggcttttcttat

SEQ ID NO: 26004 - DNA, 641 bp, Arabidopsis thaliana landsberg
tatgtgataatctactctacggatatatagtacatgtgttgaatatgtgtgttgatcatgcaggattttttcctaggagggatagatacagtggcaataattatagtgtgggcaatggcagaactcagtagaaacccaagagtgatgaagaaagtacaagaagagattcgagctgtcctcggaagtaaaagagagaaaattactgaagaagacgtagataaagttgaatacttgaagcatgtaatcaaggaaacatttagattgcatccagcagttccaagtatacctagagaatcgatgtctcatcaaataaagatccaaggatatgatatccctccaaacactcggatccaaatcaacacatgggcgattggacgagaccccaagatttggaaaaaccctgaagaattcattcctgagaggttcactgatagtgctatccattacaagggacagaactatgagttgttaccctttggttctggtcggagaatctgtcccgcgatgccaatggccagcaatatagtagaattggggctcttgaatatgctttacttctttgattggaagttacctgatgggatggtcgaaaaagatataaatatggaagatgctggaatgatctctttttcaggaatgct

SEQ ID NO: 26005 - DNA, 1214 bp, Arabidopsis thaliana landsberg
tcagtttatgtttctctcagttacagaattgtaattttgtattatgatttaacttaaccatcaatgcatcgcttgcgacgaccatgaagagtgaaggtgatgatagattgatattgattcgctctccttctctagtttccatttctagcccattgacttgatcttggtgaagtattgttgtgaagctcttgtctgtgtgtgtaacaaatcctaaagtagggttttcgttgttcggtgcacgattcttcagcacacggagaaggtaagtggttgattcgatatatggatcgtagtatttctcgacattatagctttggaaaaccatccgagtcaccatttgatcaagctcggctgcaaactccgcatacttatacaaacattcactaacatatataaaccaagcaaagttgaatgtttaaatatcggacaatgatagttgaggattctaaaatgttactggatccttttatacatacctaaaatgttcatttccttgtggccacatcaaaccggtgaagcttctggttgcttctaacgaagtggcattatcaatgccaagactttcatgaagaggaagagctggaatctgaccaacgtagccatttaagggcttatcgtatttgttcttcattttggtctgtgttggaagatcaaacaagtcgaccaaagaaccaaagactcgatcaagaagatctaaaggagtcttgtctttaagatctatgatgaaacatccatattcttcaagtgcttgtctgatgttgtctcttgttgattcccaatactttgtgcctggtttcaaatcttctcttgagaaatctaaggttggaatcttaggggacattttgatacttgttattttcttttaagattttgatacgttttttttttaatttgcctatgtggtgaatcataccttatatgtatatataatctcttatgttaaagttagacatggattttagactattgtggatgatggaataatctctcagatgaaaatggattttgaatgtccattagaaaacaaatgttgaagggatcttacttcttagatttcaactatccgtttttgaatgaaagcaaattatttctatagtagtatttctagtcaccggaatccatggaccacaatatatagtaatattactagtcactcgaatccatggacaaagctataatgataatattactagtcaccgtaatctacatggacc

SEQ ID NO: 26006 - DNA, 960 bp, Arabidopsis thaliana landsberg
atctttctatttagaagttagggatagaaggtgagtaccaactcgaaaagtatactcacatcccatgtctttagccaaccgtcttgattgtctgcataatctttacaaaagtaagctaagattaaaagtcgtattctttagttgaatttttttcaaattacaataataacgccatattctccaatggttttaagaatgtgatccatgatggatcatccatcgtttctgtagggtgttttattgagcttaacgatcttacaaaatagccacaaaatgcctgtggttgtcacagagtggaacaacaacaaaaaaaaattaagttagagagtgaattacaaatggtacgtatatgtagtagaacacatataggaggcgacaaaccatctttcaaaaccaaatcttcggaatttggcttaagacacacaactcaaccagatttctcaatgaacctcagtgttctctcctcggttttgagttgaaacaaagccactttatagcaaagatgacataccttggggagatttctccatccaaaaggacgcttctctattgcttcatgtctgttttgaacacataaccaaagagtttcttcatatctagttatctattctctacagacaagcgtttcgtccaaggacttttctaccaactcaggccttctccttggagatagccctctttcgatcatttcctcctcatattccctagccatatccaacattcctttctgaatcaacgcatcaatcacagcattatacgccgctgaatcaggagtatccccagactcttttattgtcttccacacatattataccggctgaagaaattcccatctcttaaacttcctcattagcatcacataagtatccatctttggcctcactccacttcttatcatactaccaaacagactcaggatctcactcggattctccaaacgggaaaagagacacatgtaag

SEQ ID NO: 26007 - DNA, 1123 bp, Arabidopsis thaliana landsberg
tggtcagatgtcttgtgaattttaaaagacaataatcaacatgtagatgattattccattatatgtgttgttgatgtattaagtcatttatcgatgagaaaactaactggattttgatttagtctgttaatcgttacaaagttcggtttattatacagatttaacattgttatgtaaaatttaacattgttatgtaaaatttaacatttaaaaccttcaagatgcaaaaatctagtaaaatgcaactatattaaacaagactttattaattaaaaaaataatgaagaaaattacaatcagaacttcttccctcaggtttaatcccatggtccaatcaaagttatacaaatatcaaaaagatcccaaaaagaaaacaacaacaaagaggacgaaatgtattagggaaaaacagagagatctctcaaacaaatcatgataagaaaaaacaaaggagagtgagagagagagaatgatagagtaatacgcaaggcactctttaagccaaaacggcgtacaaggctccggcaatgactgtgctaacaaggaaagctttgttagtcaatgctgagtcagctaccggcccgtctgctctaggagcgggggccggagctggtgttggacctgatgggcctggagccaaagcatatggtttaggaggagaagcgacaggtttatgtttttggcgacgtggtcgggggtgagacggttggtggagttgttggaaccggagtgggttcgttggctggaatagggggtgaagcaacgggagccggtggttctgcagttggtgtaacaactggagaaggagactctaccggagggagaaacgtgataggtgccggagccggagcttgagctagacatgaggcggcaaatagaccaagaaagatcagagcttgcaatgtcttaagagccatttctctcagtttcaatgtctttcgttgtgtttgacgagagagatagaaacctgagaaaactcttgtcttttgttggtggtggataaatgaatgaaaatgtgtccttaatatatagctaggaagatgtctattttattttgatctttgagactttttaaacatgcaggcacatagagatatacatggcttatttatttatttgattt

SEQ ID NO: 26008 - DNA, 1039 bp, Arabidopsis thaliana landsberg
  unsure (1)..(1039): unsure at all n locations
gagatgtctcatatatatgcacacatcaaatttcacatgatgattcaggaatttgcgtactttagtttccaacaaaggctcttcagatgcctaatactaagtaatactacatgataaagaggatgtgctggctcctgcaataaaagacaaggatgttccaatatgattgttctgatcaattattaccttcacctctttccattcacctttcaaagtagcttgatacagaggaatacaaagattcaggtctttctctctttcaggggtttaaacttgacccggtagtgatgtgctcgctcctgcaatatccactctgagtctctcacagcttcttgagatttattccagctgtccagattgttcttcgttgtagattgagttaaagcacctgatcctgagctatagagaaaagatgggaagtttaagactcactggttaccttcaaggactgtctctggtgtggcataggcatagtctgcttcgcttctgatcttgcgaaagggatctatatcctccattgttgctaaataaacgataaagtcaaccaagaggggaaaaaaagcttgagagagtgctcgttacaaattgtgatatacaattcaatatgcaagacacaannnnnnnnnnnnnnnnnnnnnnaaaacatgtaacccacaatgcttgaatctccaatgcaattgctccttagaacaagttagctctcatgcgcacaatacaagactaatatgacaagtaatactgtaacggaaccaaacaattgtctaataaacaaatttatttcattaatcttccaattttgggaagaaaaaaacaacactatgaaattacaaaggaacagaacatctgcaatataagtctatcccccaaattaattcagattatgcaaaagctaatacaaacactatagaaaattacaaacattacaacttacaatgacaaaccgcaaaaccgtttcttcttcatcatcatcatccaatccatttaacgattaaatatcaaagtttctccatctgaatactgctctttaacggcacatagt

SEQ ID NO: 26009 - DNA, 909 bp, Arabidopsis thaliana landsberg
tctccagatttttcgtacggttttactaactagacaacagtattggattaaaaccttcaaacacatggtgtgcattatgaagacactcaagaggtagcttatgaggcagccattgatgtgaaattacaaaatcacgaagaaattcacatgatgaaatacgaaacacaaatgtatacaattttcagtcagctaacgaacaaggccatataacttaacacacaaaaacccaaccaggagcgaaatcaacaaacagataattctgaaacaaaagcgcagagcagagtttccaaatcagtaaacaacgaaattccaaccttacatctcaactcctcgtgaaatcgaaacacgataagaaccatgcgatgacaaaaccctaggaaaataagcaaaaggcaacgactgaaacctaaatgctcacttaaactggaatcggagcttgatcaacagagaagttgagtgagagcggtgaaaaatcgaagaagacgaggtctcggagagaaagagagagagggagaagaagcttaggccatcatgactgatggcaatgcaaaagacgatgacaaagccggaggagcgacggaaactgagcgacggaatttttagagccttttaagctgcaaattttaaatataccttcttcttcttcttttttttcaatttcttctgctttctaatatacaactttctccttttcactttttctacggtaaattttgaaagaaattagacattagtcaaactgtttacaagtatttccttctgcggaaaaatagacatcgatgcaaaatattttttttaaaaaatatatctattaatttatcatttttaagaaaaaattatcctttgcatataaaatgcgcgtaacaatgaatttcctcgatgaatttgaagaaaaacaataataggtca

SEQ ID NO: 26010 - DNA, 2325 bp, Arabidopsis thaliana landsberg
gcaacaccactatacaaccacaattagccaatatatacgttattatatatgtctatcttctaccattttacttttttttgtaccttacttttgttttatctgaattttgatatttttcggcattatgagtgattagacatctatagatattcttttgactttccaattcaatgattacactatactgaccgcacaacaaatccaataacgcacaacaaatccaatactataattgtagatagaccaacatcaactatagtattggatttcattaactattaatgattcgggtttccagtttacaatattgggcttataatgatcggatatatgtttttgttaaatttgggcctataatgggctttactttaaagacaattaaacacaattctgacgcgttgacaaaacaaatcagatacaacctttttttttttgaccgcaaagaaaaaaacaattatacaaattacaaagcagtcacgatggaccgtttataaatacgaacgtgccttgcataatctcttacttacgagaagattaatatccaatggagccctccttaatcatatgattaaattatccattgttttgtgctataaattcttccaaaagatgctataaaaaccccaaattgaccataaaaaaattatgcgtatcaatcagtatccacgtggcaatatctgaggagatacagagagagacaaaaaccctaagacgctttttagtttcgtcctccgtcaatctctctcgccgctttatccttgttacaaatcccatcgatcttttcggaatcttccctcattatgctcagccaccattaccagagctccattgtttcagttctccgttcaacgattatcggaattattcacaacactattagtatcaccgtcgccaaccgattttgattaccagctttggtgacgacagtcgtgattaaggaggttttggtaaatttcttcgttcctgtttgtttacaaatatggctgctttgaaaggttatggcttgtgttctatggactctgctcttcaattccccttgtctaagctattcaatagctacaagaggttatttctcttctccctcatattttgcagacatataacgttttgctcaagcttttgtgtgttttgcttattccaagctaggcataataatatctggaattggcttgaatagtcagtcactgtctagttgaaattgaatgctagtgttctagggattgaaagctattagttcaatggtgattctgtcgtaaacctgtctaattgaaatttgcaattgaatgtttctggtttggatttgaaaaactattacttcctttgtctaatcatatagaaagacttcagttttataaataaagttgctttttttttcttacattgagacgtatggactcaagctcatgtgtgttgttaacacagaaggagctcgaaatgggtctctcccaaagcagctgttgtacccaatttccatctcccaatgcgcagcttgcaggttaaaaacaggtctgtcagatagagtttagctggaccaacgttatatgattgtacaatctcatagtatatactctctgttctggaagtttatgccatacctgggacttgttttgtttttgtgcttgtcaggacaaacacagacgacattaaagctctacgtgtgatcacagctatcaaaacaccgtatctacctgatggaagattcgaccttgaagcctacgatgacttagtcaacattcagatacaaaacggtgctgaaggtgtcattgttggtggtacaactggtgaaggacaactgatgagctgggacgaacacattatgcttataggccataccgttaactgttttggcggaagcatcaaagtcattggaaacactggaagcaattcgactagagaagcaatccacgcgactgaacaaggattcgcggttggaatgcatgctgctcttcatataaacccttactatggcaagacttctattgagggactgattgcacatttccagtctgttcttcatatgggaccgacgattatatacaatgtgcctggtcgaacagggcaagatataccgcctcgtgccatcttcaaactttctcagaatccgaatttagctggtgtgaaggaatgtgttgggaacaagcgagtcgaagagtacactgagaatggggttgttgtgtggagtgggaatgatgatgagtgtcatgattccagatgggattatggagcaacaggagttatatcagttactagtaatttagttcaaggtttaatgaggaagttgatgtttgaaggtaggaattcatcttgaactaaagcttcaccttt

SEQ ID NO: 26011 - DNA, 773 bp, Arabidopsis thaliana landsberg
ttcaaaaatgtttagctgcacactctcactctcttaaatctcatgttcgtgttctaataaattattgagaattgtgtgacataagcttatatatatgtatacttgggacttacatgcagcggattaggataagatccacatgattagtcttggattgagaccttgacatggttcttttctataaatagatttggtactgaaaagattaaaagagtgtttgaacaccattacagctattgtcttcatttgatgatctttccggccggtggtcttcttgtactactttaccaaagacaatttcataggtggatagtgaagcagagagacatggtgatgttttacattttctcctacagtaaaacagaggagaagtaacttgctcgccaagttttcattttagttatggtcaaactaattatggacttatggtcaaacaccctccattaattagctacttagtgagcctaacataagcctaataattattcaaacatcaaatgtcgtatattgtcctccggtcagttttttgagctagtgaccggttcaactaaaccgagtcgaaccaaagtattttatttaaccaataaactaattaaaaacacattagaaaaaattaaactaatgaaaatcttcatctaagactagcgcacgtcacggaaaagaaaaaagataagactagcgcacgtcgtactattttcggtggattttgattggtttagtttatgaatgtaatacatataagctaaattagttcaaactgggtcttttttttt

SEQ ID NO: 26012 - DNA, 919 bp, Arabidopsis thaliana landsberg
ttcatgagctgcaaagatatgatcttgatcagctgattctcgtttgagacaagttccttcaggtttagcctcagcaaaactcagattctcgccagagacatcaccagttcttggatgcttgaaggccttctcagctggatgattcaaactcgacgaaacatcgatgtgagttccacagcctggtggaaagtctcgaatggcgaagactaaagatcgcttctgactcattcttcctatagagaaacatcacaaagtgcacaaaaatcaattctttgagtaataaaatcacacaatacagttctacgattccgattcctaaaactatcaaacacacaccataaagcaaaaaatgaagaaacgtttcacaaatgtccacacaaaaagccttgaaatttagcacagagattgaatctgagactcgaatttgacagatctaaacagagatggtatcaaacagagtattgaatatgatatgaacttgtgtggtgagatctatcattgaagagtgtaaaagaagaaacactacactctgatgatgttctttctctatgagcttcttcagatggtgataaaaatccgatttttccacctgatttcaaaccaaactccatagattttgagaaaattcgcataaacaatccaaaatcaaaagacgaaaatgagttttttcactcgattgtttggagaaaagtagatgaaacccaagcaaaatcagaacatggagatcaaaagcattcagatttcattttctcgagaaaacagaagataaatttagatgaaatcgagagcaatgaactcagaaactcagaaaaaatctcaaaatcggtgaacggaaacacaaggagagaagaaaatgttgactgattgagaccgacgaagaattttagtgtatacctgagaatctgcgatgttgagttct

SEQ ID NO: 26013 - DNA, 999 bp, Arabidopsis thaliana landsberg
ctttagtgactttcgttggtgctgacaactctatattttgactgtgcagatttgacagagtccttgttttcctcgcacaaggatgaataccctgagcatgagcgggcctccttaaaacaactatatcaagcaaaggtttgatatggttatttcaattttctagattgaaattagttgttatgttgttcattaatgtgaagtgcttagatttgaggttttctctacagatggaagaattgcgtgctgagagtcagcaagtctcagagtcatctagggacaataggacgctctaagggtgcttcaatatcatcatctctgcagcagatatcagtcaccgttgtcacagattttgttcgatggaatgaagaagcaataaccagatgcacattgttttcatctcaggttactgaacttagcaatttatgagaaactttttccaaaataagttagttgttgtgtattttgagaattgatgtcggaataggatattgacaaagaaatgatctacaatattgaacttggctgaattatctaacagtaagtaaactataatatctgggattgtatatctgatgtatataattatttctttgtgcagccagccacacttgcagccaatgtcaaagctatatttacttgcctgctagaccaggtatgctgttcatgagattctagagtcattcatattaatagagctgatgcaatgatgagttcttgcaggtgagcgtatacataactgagggacttgaacgggcaagggatagcctgtctgaagctgcagcattgagggagagatttgttttgggaacaagcgttagcagaagagtggctgctgcagctgcttctgctgtaattccttctcttctctctttctcactatttgaattgttattgttaggtggagttatttatagtttctttgattgtttctcaagcagaaactgctgctgctgctggtgaaagtagctttaaaatccttatggttgctgtgcaacgttg

SEQ ID NO: 26014 - DNA, 1095 bp, Arabidopsis thaliana landsberg
aattgtgtttcttcaagaagtcaatgatatgtgcaggaagttcgtcgagtagtgattcgagttgtctgcccaatctatgcctctccacttctgtcataagtggcttcaccggttctggaacactctctctaacgggtgaagccatctttctcttcttcgccggaggtacagatatagcagctttcctttcatcattgggctccaatgttactgcaggcaacgtttgcatgctacaaggtggtaatttctttttgatagttttccaccgcgcttcaaataatttactaaggatatcccccataatgtgaacatcatgtcctggagggttatatgtcatcgcattggtaaatgtaagcctcacatcagcagcaaactcatgtgggcttgagtatacaccagacgctaagttcttctttactgtccctaagtccatgggatgcttgatagtagtgagatagtcaggtatgttcagtttcactacatcaactggcgcctgaaacacccaagaatgcggatgagaccacagttttctcagtagcgtgtcacattgcttcatcagtgtaatgttaggagtgctagtcatagtctctttcgaagactcaaacttccctgaggtaccacgattccatccacgagaagtcccattctgatgccgaactttcttccccgaacccacagcaaaatcagatggtttcttcgaattgctgactcgagatgatatcttttgaccagtgctaaaacccaccctatcactagtagacgacacagcagcagggttcattctctgcaactcagcatttttaagaactatctttgtctgctccaactccagcttaagccgataaatcaaatccttcctctcagattgtgacatgttatacaaggaaatgacttgtctctgaacaccataaggatcttcatcattcgaattcaacataatacacttccgtgcaggagtacttgaattctcagacgcagtgacctcagtatcaatctgtgcagagctcccagagccctctaattccacaggcgcttcaaaagtattccgataataccctcctgggaacgcagcactttcaaccattgtttggcaag

SEQ ID NO: 26015 - DNA, 1063 bp, Arabidopsis thaliana landsberg
gtttctagctcttaccttgtgtaatttatcgatgggatagtccgaagtataactatcgtatagtaaagaaacatatgcatctttttgatatggtacaaacatataatgtggcagatgattcactgtaaaaaaatacagtgattaaacatcttctcttagactctacgattaagaattgtatgtgtaatatgtgtagaaagttgaggtagagagtaatatgtgtttacttgtgcttctctttctgccttaggtttgtttgaggttaaggttacaggagtgattacgtatgatttagctgttcctctttttttctgctgtgttagggatatgaatcatcggagaggaataagcaacaaatagcaatcgaaaagatatccataccatcgaacatgagtcttgggtgagtacactcttgttctgtagttactgaggtgaagttttttcttctattcttttattgcattggtaataaaatttctgcgtagctaagaagcttctggttttttttgatcatcaggcttgtaaagaactatttgcttcattatgggtatgaagagactcatcatgctttagacttggctactaacagtacacttcctcctatcaatggagctcaagaaaatggtattgatgatacatcatatgcattgcatgagagaaaaattcttagacaggtattgaattagactgctatcttgctcgttactactactacatctctttcgttaagtattgaactgatccatacgtcggttggtaaagcttatacggaagggtgagatcgatgctgctcttgcgaaactccgagatagctatccccaacttgtacaggtggattgaggaactaatcatatcaattgattcatattgttacattgaaaatatgaacttttacctcaattgtataatctgcagaacgattaatcagaagtatgctttcttctttactgtcaaaagttcattgaattagtacgggtatgctctttattccttatatattaatcagatccactggggttagactgacctctctctaagtaaataaatactaaaatgtgacata

SEQ ID NO: 26016 - DNA, 2965 bp, Arabidopsis thaliana landsberg
tgtaatgtcctgtcttcgtgatcaaaattttagcattacgtaaaatttagaggatagataaaagtttcttttaaaaaggatcgaggtttaacatatcacttatgcttagttcccttaaatatatttaaaaatgtataatccgccatgatatgatgataatatagtagaagagacttcatacgaataaaatacaagatagctattatatttttctcgattaagaccaaaaaataaacataatccagcacccattttcaaccattttgcacttccacggattttctaaatggcttaacaatctgtatcatttgtttcatccatatacgtatagaggttttttaatgtctagctctctaggtattattatgtaacacacacgtttatttttgttggcttgttaataaaacattcatatatataagatttaaacaagaacgaagggcatttaacataatgttcagaaataattaaaaacgaaggacgcatatcataatgtcaaactatttggcaggaatctttatataaattaaactattgtgttgtacaaataatgtaataaaaaactaagaatgggacaggggaaacgcagtaaagatttccttgtatctggtggaaattgcaactacgagtcgcatcctccttcacatcctttttttttctgcattttattttgtttttcaaatagctcttttaacttaacatttagtaaaaaaggaacatgaaattttattgttttgccaaaaaaggaactcaaaagtgtacgacgaccaaaataaatatgagaatgagattattgggttctatgcgttaaagaaacaaaaacttttcttttgtttggtcggtccattggtccacatgcaagtaggcttgacaaggtttttcaaaactataaccaaataagtattaaatcaagtaaataactataaatacatgttaagagatttaagaaagaaaacaaacatggtagacactcaaaacgacatactagtttactcatgaaacagttttagacaaaatatataacatgttgcttagagaaataatatacaattaaaaataaaaataaaaaaaattaataatgattatatgcaatttgattatttggtttgatcttatagtgataccacgctgtttaacatatgattatacgaaatgctaagggtattttgctcaaaacgtaaaaaaaatctgaaggcttgaagttacagctttatcattgataatttatatattaacatttatgatcatttatctaaataaatcatttaagtttaccaaagtcacaaacttaccaagttaacgaggataatgggcctctccattctgactagccaaatcgtttcgagtttgaaaacattggtcgtaaataaagaaaaattaagcagaagaagaagaagaaagctgcagttgttagaacttttagattgggtcagaataatgggcctctccattacaaatgcaacaaatcagcaagtccagactccaagtgtagcccaagttaacaatagcaattatgcataaagaggattgaggattatagtcgaatggaaagattttagcggtgaagatatagatatttgataactttgtcaagaataaattggtaatgtttctcgtttcaaatcttttataaattttgcaataaaatgaattgtttgttgtttacaaaaaaaaaaaaaaaagttgtttgttctccagttatctttaacagtaataaatctatccaagatctctactttgatattttgtatcctccctggaataccataaaaaggagaagagagaaacgaaataaacccatctttttttttttttgtcaacgaaataaacccatcttattaatttaagtttccatgtttcacacttatgaactccttattttgacaacaagaaattaaattttattattaaaaaaaaaaatcctctttaaggaataaaagaaagaaaacctcaaatcacactaattaacacgtgaacaatcccgtcttatctcacccgcgttaccggttttaactccaacccgacccaacttcgttatagccgaaataaaagcttgtctaaaagttgcttcactagaagcaaatgaattgacagttgatctagatcgttcatcagagaacaaaacttgatctgacgtgaacaaacccatccctttttggaggtttttgaaataagcattgtcaaatgtatttggagaagtaggatccatgttaattgcgatcctcaagtcgacccgaatggggcacatttgtctcaattgtaaggcgtaacgaatattcaaagttggatcaattggacgtttaggactaaaattgtaaattcttttcgaaaacttgccacaatgtgcgaatcctatagtatgtgctcctgcatatcataaaaataatctgttagacttggttataatatatgaaattaaaatccgtctactccggttttgcttcggtttaaatacctgagagtgcaatcatatcggtttgggatagaccgtgacgagcgaacatagtgttaagttggtccaatttgaaactaggctggggtagactgtgttgaacgctagccactgtcgatagtctgccgtctctcctccctagctctaccggatagttcggtcctccggtctacaatatattattatctttaatttcacaagtcttttagtaataatgacacaaaatgaaaaagaatataatcacacaaaaagggaataataaccgaatcgttaggacacgttagctaaataatcctactatatttacttaattaggtaatgaacattttttcacgggttgatcaacacgtacgtgttccatgattttgtttcttcatagtaaacgaaacagtaatgaattcaagttacttaattagtgtagatattccttcaagcctagatttttctttcgggacatttcgttttagcctgcattaataatagaattttgaagagatgaataaggtgtcaagg

SEQ ID NO: 26017 - DNA, 1639 bp, Arabidopsis thaliana landsberg
gcattgaattcaaaacactgcttccagtacttgcagatacaccaccaaccatgctactaccagagcttgtaaatgcaaaagaggaagtgccaaatacactatttccagtattagtagctgcagaactcgcagaaattttgctggtctctgtcccaggggttgaggacgatgtcacaccaaatattaaacttccagagctctcaggtgctgaagctgcagcagtagaagggtttaatgtgctgccaccaacaacggaggagctcccaaacacaaaaccaggtctgcttttattttccgcagatttagcaccaaaaacgatgccagtgctctggtctgctgaagccatacctccaaacttgaaagtgcttgtatttccaaatgtggcgttttttacttcagtctcctttgagatctgaccgctagattcagacactgctggcgcagaaaacggagctgcaggttgcccaaacttgaaaggtgatgtggaagagaggggagatgctgaagttgattgtgagttgctgtcgttactggtaggcaactttccaaatatactagaggaattgtgagtagcagcaaaagattgaacagtggacggcatatcacccacagaattatcagaaggtatatttgaaatagaaggtgggaaggaagggcttgaagtaagagagccattactcggaggtggagtgacagcgtttgctccagctgagaatatactaccattgagggttggtgcagctgaggtagatgactcagctccagaagcactgttgctgaacgttttctttgattcagttggctttgcccaagcctctgatactccaaacgcagtgctgtaacatcaagaaagagagtcggaagcgagtaaaccagaaaaaaaaaatcataaccaatatggatgaggctcacttaggcacaagtagtgatataaaagcctatcaagctgagaggaaaaatatcatgccaccgacctgttagtcttttctaacttgatgtctgcagatgcaccactgttttgatttaataagcccgtggcaggcggtgaaaaggagatattgggaaatacagcagcaggttttttaggctcttccagagggatacgtttctcttctgaggttggcttgccagaagaaatactcgatttctcagtcccttggatgaactttgaagttggctcagaggccatattactttgctgaacagcttcaatggggaaagcaacaaacttgtttctttcagtttccagagacccattagaagtaccctgagaggcgtcaccattagaaatatatgatgtagatggcatggcttcagatggagtaagtggtttctcccctataggcatgctgatatgacttttctctacttcgaaggcattctgtttttctgctacttcacatggagtagatgctgcaccaagatcatcatccagctccaagaaatcctgcattatcacagctgtatgtatagatggtcaaggtatgccataaaatattaacaataaaacaaaaggaaaacaataatatgaagaacagcagaattgttcctacagaagggagaaatacatatttgccgctactggagctagagatggcatttctagaattgcccgctttgacactcttatttgcagctc

SEQ ID NO: 26018 - DNA, 1409 bp, Arabidopsis thaliana landsberg
  unsure (1)..(1409): unsure at all n locations
tacaaaagatttatcctggtacgttcttgattctagtcaggaccagctattcttttttttttataattacattcaagtttactgagtggatcttacgtgaactagatgagtggaccaattatttggatcgcttaaaggatcctaagcttcctgagaaagacaagtcagagttccttcgagagtgggtatcttacagaggtcagacgttagccagaacaggtacaaatgattacaacggaaatcataattgttcatagttattgtcttgtctataggaatattcatttgtgtctctctgattacttctgccagttaggggtatgatgtactatagacaggctctggagcttcaatgctaccaggaagttgcaggggaacaaggttttttattttctgagccagttgccaataacttgaatgctttcaccgaagcttttggaaccaaaatatgatatcttaatttactatatgctacttcttgcagccgagtttagtgtctttcgggccatggcgtccaacgatgaaaatcagaaggctttcctggaacgtgccagagctcttgcagatctgaagttcacttatgttgtttcttgtcaggtctacggaaatcagaaaaagtccggtgatatccacaaccgcagctgctacacgaatattctgcagctcatgctaaagtatgtcaaagtaggattgattttgatgaagtatcatgatatatttgcctaatcttgtcaatcgttttagatatccatcattgcgggttgcttattagatgagagggaggagacagcagatgcaaaatctccgaaggtcttttactctgtacttctaaaaggaggtgacaagtttgatgaggtacaaggatttccgagcaatcttataattttgcttctccgtttttctatcagttactcttttgtatatgatgtttccattatgctgattggatttctagacatggtgttcttctttaacgtgaatggtcttccatattaggaaatttaccgcattaagcttcctggtcctccagctgagattggtgaaggaaagcctgaaaatcaaaatcatgctatcatatttacacgtggtgaagcactacaaactatagatatgaatcaagtatgtattcttcttcaatctcaataggcagaacccatttttggaattcggggtcctcatggttagtactctttgcaggacaattactttgaagaagctttcaaactaagaaatgtattggaggaattcaataaggagcgtgttggtagacgcaagccaacaatattgggtcttcgagaacatatatttactggaaggtaaacccaccttgcaggatatcattttataaacattttaaatgattaaaagtttataagttgcaactacgaattggngtattcttacttttc

SEQ ID NO: 26019 - DNA, 700 bp, Arabidopsis thaliana landsberg
tagttcggcgtaaggaaaagcagaagagaaacacaatgtcttgagtatatatggctgacagacacttacaccatcgcatttaactagcattatatcgctgacctattggtcctatatagtatatgacaacgcgcctatctgtatagaaatatatttgtgttttaaaaaatcaattctcaaaaactcgttaggtgtcatctagttttgaaaaacttcttttgttttttttcatattaagtttttgattagtttagtatttttataagttaaacaacaatttttaaaaacatatttaataggcatgtaggtgaattaatcatttgagtttctatggacagattagactaaaactaagtggtccggatggtattaaccaccaaaacaatccagttttcaaaaatttagaaataaaccatagattaagtcaacaattcattatgcacccaaaaaagttgaaacaggcgtagagataaagaatatggcgactaaaagcgatcgatagcaataatcttattacattgaattgaaatcatattaacttaaggagagttgtttgactttagcgttttgattgaaaccttttggaaacaagaaagagctgtttttttgtgtcaaattactaatatatgaccggccaatctgctgcatagatcatgcaataacgtctacatctcaacctcatagcctatagtaataattt

SEQ ID NO: 26020 - DNA, 1262 bp, Arabidopsis thaliana landsberg
atcgcgttgtcaaatccaaaattgatttgatttaattaatctattacttggaaattagtaaccttttgttagtggaccagacaatcatagaacttactacttatctataaactatggaccttaaatacgtaatcataccgaaagagaaagccaaacaaaacttggcaattaaagaccagtctacatcgaattatttcttaagaattttttttgagactatgtcatctaccgactaccgtacattaattaattccaatattttcaacaaacaaacatcttcttcaatctttcattatatttctagtaataatacccaaatatcaaacaatagcctgagaatttaatagtttccctaactaaataaactaacctctaacaaactaaagaaactctgaacttgaatattttatgtaataaacgtacccagtaagcagcgacgaaaccggcaacaccggaggagagatgaataacataaccgccggaataatcaataactccccactgatacagaaacccacctccccatatactataagctccaactgtgtagctaaagatcaaccacaatggcacaaaagccatccatgctttaatattcatcctccccaacacagatcccgccacaagtatcgtcgttatcgccgcgaatgtgaactgaaaatacaccaacgtcgccatcggaaaatacggcgccgccacattactatttgggatctgtaagaaaaaaatatcaaatcaaattctcattcaggcattttatcgaacactttgtgtgcataaccaaattcaagacctttgcttgtcccttaaggtatccttggttgaaagctggaccacctttgccccaaaacggcaaaagctcttctccaaaagccattttgtaacagaggaggacccaacagagaagaacggcggcgaaagcgtaaagagccataaaagctgaattcacagcccatttcttcttgacgatggaggcatagaggataacaagacctggcatactctgtagaccaaccagagtcgctgccgtgagctgccacgcgttgtctcctttgttgagccattcaggaacctccggcaagcttggatcgtaagctccggccattttgttattctatctttcccggagttgatgaaatttttgttgggtttgtgatgtttatagtcaatggtacgacttttttttgtgtaggtgtgaaagcctttaattataataatgtgtgtagaatagacaagacacaagttgggtttggtgtgttgtt

SEQ ID NO: 26021 - DNA, 1361 bp, Arabidopsis thaliana landsberg
cgactagagaatgaagcttttcaggtaaattgtcaatttttttagaataccactagttaagtctacgcttaacagcgtaggatttgaaacttttttcttgtgggatacttttcaatgtcccagtggatctaggaataactctgtttgaatgtccttaggttcttaaaggggttcctgacagaccagaggttgctcttgtcaaactcagagaaatcaaatgcaaacttgagaagaaaatcaatgttcaagatcgctacaaaaatgtcattgctgtgaaagatgacgtcagagtgatcgagggtcctagcaaagtaagtacctttgctgtctggttgttgttgcttaccttgctcaattttcctgatatcatatcaattaatatttatattctagggtaaacaaggtcctgtaaagcatatctacaaaggagtcttatttatatatgatcgacatcaccttgagcatgctggatttatctgcgctaaatgcacatcatgcattgttgttggtggatcacgttctggtgctaatagaaatgtaagtgtcttgttgtgatgtggccatgttttgttatattttcatcaaactgttgcttcaccttatctagctatttttctactctagggtggtgattcgctttcaaggtatggcaatttcaaggcacctgccccagtaccctcatctccaggaagatttcaacgtggcagaggcggaggatataataactgtatgtttgatcttttctttctattttggttatgagtaagaatacgtaatgttttgtttagttgatatttgcattcttcactggtctgctgcacttaatacttcttcaggataagaaaatatttccactatatatgacttgtacatttttctggtagtacaatgttttattgctttccatatattttgtgacatgcttatacatcttatctacgtaaagtttcacatactcttatttgtatctttaaatgcagctggagggaggcatgggggtggaagaggacggggagacgattctttattgggtactactgttaaaatccgtctaggacctttcaaggggtataggggacctgtagtagaagtgaaaggaaattcagtgcgtgtagaacttgagatgaagattgtgacaggcaagcccttgaattcacttctccgcgtgtgggtttctacatgtcgaacgaattctaacaatagttcatatatgcagttgatcggggtgcaatatcagataatgttgcgacaacaccgtttaggtaatctacttatttttatatcattggttattttgacttcaatcattatgaaggactttgattttatcatttgaatttacacagagatacatctcggta

SEQ ID NO: 26022 - DNA, 1226 bp, Arabidopsis thaliana landsberg
tatccagctctgaacatgagtttggttttggagagattgattatctttgagatgattctttaaagcaagcttctttataggagaattgcctttccgattgaacaaagtattcacaaaatccacaaaatcaatgaattctctcggattttcatgttgtctagcgtaatcaaggtgaagactaggaacaaaaacaaacacattcttccacctcgtagagagcgatgaggttaaagcagcctcttttgtggagagaaaggataaaatgtgctcaagaatctcatctggtaaagagctgattctatccataattactctaaacaccctcaaacacagactgaacaaaaaactaaattttcaacagctagaatcaggaacggcagcaacagagttgataagcttcaaagtttcgttctttttgctgttccatccattgtctatagtgatcaagccatcgatacccaaagaaaagagatacctttgctaattgcaacagaggcggcggcttcaattcacgaaagctctccaaattcagtccccaattagggttttggcaatccgaaagaagagacgtcgaaaatgtaacatgtgatgcagtgcaattaaaaagactcttcgagtatataataaaaaagacgcgcctagtcgtgtgctactactaaaacgacggcgagtcgtatgactattaaacgacgccgattcatgtgggctaataacggctccgattcatgtgggctactaaacgacacggttcataattaaataaaacactcgcgaaggcgtgggcttcattacattgattatgaagctagaaatcataattgccacaactgtggttatagattgtgggtgattactcttatctgaaaggatagttgtaacgggaaaaaacacacaaggggacaaaaatttatgatgttttattcaagtgaagggcctctatggaaagtggatgataagctctcaaacaacaaaaacaaaggagaaaaggacagaagccaattcgatcaattgagcaatagactacctaagagacaacaaatcataatgttttcaaagattcagcatttggaaaacagtaaaaaaaacttttacgggatgattaagattaatcttttggactccactagctcacttgagctgcaatttggtatggaggtacacgctgctctggataacgactgtatcgatactggataaccctttcccatctgcaaaaagcaattctt

SEQ ID NO: 26023 - DNA, 1551 bp, Arabidopsis thaliana landsberg
tgtaaatgactaaaactatagaatgagaagattctgtgtacttttgaaaaggtaaatttcatgaagcctcgtggatatcatgggataacacaataataataacaggctacaatagaagttggattacatgaacacaggaggtagtatcacaacagttaataatatacacctcaaagattcaatgagattggtgaagatcatcacaacagtgaaacatatacacaactaagattcaacaagaatggtgaagatgcgttacgttcttaacacatgatgaaaactatgcaacaacgcttccagaatgattttaatggtttcagctggaattaatgcagcaatacaagaagtgtaaagcattgggaggacaaagtttgatttgctttattagcttgaagaatttgtctaaattgaattattagtcgaatcaaatagacatcttctgcgaaatgtacaacactaaagctcagtggtttactaactttatggaagattagtgaaattcttgagtgaagaacgtaaagctctgtgattttcaaccaaacagaaatttgtacgcttgaaaatgaatttcatattcttcagttcgaggggatggttccaatatgataagaaccaagggaacaaagcaaataaataccttgagagtttttaaataaaactaaagcctcttcttgagtgcaaaacttaattgtttggggagaaagaagaagcagcttaatacacctcttcgactactggcaagaaaagagagtaacaaagttagttagaatagtttttttaaagttttaaggatgcaatcttagtaaagaaacagagaataaagatgatgattcttacatccatcatcctcgttattataatcgtcgtcatcatcatcaaagtcttgattctacaaaaaagcattcaagaacaaagttgctaagtaacttgagatgaagaagaatcacacaaggtttcaattcaaacattaatctggaaaataagcaaaaacctgatcattatcttctttatcagattcttctccttctgagtccacaacttcttcatcatcttctccttcttctttctcttccttgccttcaacctaaccaaacataatccaaaacacattactgtcaagtgctcttaaaaaaccattgaaccgttaaaagtttcactagttaccttaaacttagcttcaagcttctcaaacacatccaatttctgcaaatctatgaaacaaaaaacacagaacttaaacttctcgttacattgttgaaaacaaaaactaataataaacacaatgtaccagcttcttgactccatttagctctcttcacaggccgctgttctcttcgagtatctgaaatcgcataatccgcaagatgaaactaaacacatctaaagagtattgagatggtggaaacaaaaacaaacctccaagaagttctttagggaagttatcaggtctaagaacaagaaaatcaaagaaagatccattcttattagacttcatcttctgcttcaacgagtctgaatacctctcaatgttcaaactctctttctctgatg

SEQ ID NO: 26024 - DNA, 3232 bp, Arabidopsis thaliana landsberg
aagcaatcgtgccttcaatcatctcacaagcttgttggtcccatgaaacacatgcacggaatatagatacagaagcaacttctgtttatcttttttttacatatgaatgttaaggaattagtttcgagactacaaatgtcgttgtttggcacttggatcattaatcgtttacttctcgtatttctgaaacaatctattcctagctcttgtcaatatgaaatcaagatatgaatgccaatgcctttttatagactaagaacataatttacagtagaattggtgagcaacaactattacatagttctaatacacatgagatctgtattacttgggataactcaggatgagtaactgttttattgctttagtggagctttcttctctcggtctgcaattctagcaggtgcgttcgagtgtgacttgaaccgtccccttcccccttcttctctcacctgaaatttcgacaagcatcaacatttgatgtagcattctcatcatgagacagagatcagaaaatagtttatgcttctgtacctttttcttgacaatttgaacaacatcttcatcctcaagatgatgaaaaagaccacagtgttgagggtagtgcctagcgcttgtgccccaaactagtgcatacttcatatccttcaccagagttctgtggacgtggttacagaaatcttcaactgtgcagccacctctatcctgaggagtgacacatgtaatcaaatattactgtcacagatgttattgtgaagtacaaacatgaaaaacatatctgtaaattcttatctatacaaaataagcctgaatagtgttgaggatattatacttacagctgagaggacaaagggttcatcgaaatctggttgctggctttgaggctttgagtaaactctcacaagtcccatttcgtcccacattcttgcaagtagtctgtctaagtttagctgtttcaagcaacaccatcatttaccattagaccagactgttccagtatattcacaagtttcagactatacaggaatcagaccattatgaagaacctagaaccgcactggataggattcttatttagacactactatagtcaaaataaaagaacttgcctttaggttgcagctaataacaatagaatttggctgccgtgccagcctatcaacgtcatcgattccaacaacatctattttgttgtagacatatacacatttgatgtatttgcgattgccttcaacgacatcaataaagtcatccaccgtagcatcttcacgaaatagaacctgaaatttttattactgaacccattggagttcttctcctaactagcggacaagagaggcacgtaatgattcttgtccgaggctgaataaaaacaagattaaagatggacttaaaaacctcagcattgtgaatcttgtattcatgcagaatttgataacagagcttctcatcaatgcgagtcaagggggttgtagtgttgaaagaaatcccaccagtcttcttcttcttaaagtatatctgttagaccagagaaagcaaaacaccactaaatggtagcacatcaagatagtgcagcattttcaaagatggaaaacagaaattaagcagataaagtgaaagagaatcaagagtttctagtttataagatattaagggagaccattgataaagatgagatttacctgtggaggtcttttgttcagacgcagaccaactgcttcaagctccttagtcagtatttgcctgtggccttcactctaaaacgattttgggaagaagaagtactgagactaaaatagcaaaaacgaaaaaaagacagaaccagcacaatacttatatggaaatctaaaccatagctcgtacttttgaggcatcaagaaccatcaacacaaggtctgaagactttgcaacagcaataacctgaaaaacaaacagtttccatctaagtttatttcatagcaagggattagagactaaaaaaaataagaatcaattcgatttaaacctgcctccctcgtccctttccttctgaagcaccttcaataatcccaggaagatcaagcaactggattttgatgtcattgtagtgaataactccagggatgcatgtaagtgttgtaaattcatatgaggctgcttcagaatgtgtgccagttaacattgtcaaaagcgtagactttccaacactgcaaatcacagccacaaacacatagtgagggactctgaagttggaacaaatacatatacatggatcatggatgggcgtgaatttaggatagaccttggaaatcctataagtgcaacacgtccatgcccatactttgtaacttcaaaaccatccccacctccactagagccctgttaggtagatttgaaagacatttagaaatgaagactaaatactctgcttcagctatatacaataagaagttgcattacttttggaggctctaagagttgtgttctgagctttgcaatttttgccttgagctgaccaagatgatactctgtccaaaaaatgtaacaatattttcattagctgaccatttcttctgcttttgtttcagaaatatatgacaaatcaatgtctatacatctatacgttatataatgtaaagagaaacctgtagctttgttcttctgcgtccgagccatctcggcttcgatctcttttatcctttccacaattcccattttctttcagaatctactactgcaatttctggagataggtaaggactgaggtatcttcactagtttcagcataaaaagaaccaacaacaatcagacagaattcaaaggcaaatcataaaatcaccaccaaattaaccattaactcaaaaagacacaaactttaaactgagataaatcatctaaagaactctaaaattagtaacatatctaacaaacaaaatctcaccactttggcatcgattgtctaccgatcaaacaacattaaaagatcgaagcttttgcatgaaaggagagaaattttgatgagttaataggggtaggatggttctagagaaagcgagaaagatacatgtacgtgttggtcgagaaccacctccaaggaataatggatcgaatacaaaaaaaggcccaattcaagtccgagtcaaacttccatggatattatagagaatcattcataccaattcaggacacagacactacttaatacttttctcataaatatatataacccacaaagcctccttagaaagttaca

SEQ ID NO: 26025 - DNA, 8133 bp, Arabidopsis thaliana landsberg
aagcttgatagctaaataagggtcgtgcattcagcttcctccactgtgctacgtccttcaaattgtcctataccacaatccaaaacactcccatcggaatctcgaattatccaactaagtcctgaagcccagagccctcatgatgtgacgcatcataattacatttaacccagcccctcggcggtggttgccatttatctcttcttgttctatgtacttagtttggcctgatgaatgacattgtcaatccattcttgagtatctgttgttgccaactgaattgtctctcgtgcactaatgacgtttttgttgaagactagcacattgcgacctttcaataatctccacattatccagaacagtagatacctactgagttcatcaactttatcatcattgtgaactttaaataagtacctcattttatcttctatggaggattgtgcacactagtatcaagacaagttgccctccacactactttcgcttgtggacaggaaaaaaagaatgtggttcccaatttcaaattttgtgcaacaatgtgcacaatatggattgatgatgatgttccgtcttcttaggttatatgcaactccaatggctctcgaagctgttctccataagaaatgtttcagtttaggaactatattcagtttccataatccttctacaatatccgggtgtgcagctagcgggggagcattaggcgagtcactattctttgttgctggtacccaatagcctcacttcacggtgaatcttccatccttcatgtaactccatacatatgagtcaggtgatcggatcggaggaacatatatttttctgataataggatggtttatcggttcaattaactccgcaggttttgttcattccattgagatgtcgtcgggtcgagaagatcactaaccaacgtttctggatctgtcattggcactaacattggagggcgtggtgggtttgtcagtagccatgggtctagtcctattcttgtgccatctccatctccgatattcttttgagccccaagttttaacaactcgcatccaaatctgagtgagctccagccatatgagggtcgtgttcctcgtgacgcatttaggaagaccccttgtcgaaaatatcttacttaagcattatgtacagtaggctttttggcctatgtaacagcttccatacttgatttgctaataaagcttgattaaattggtgcaggtcacgaaaccctaagccccccccccctctctctttggggttgacatttctttccagggaacccatgatagtttcttttttgttggggttgttccccaccaaaatcttgatatcatgctatttagttcagagcaaagttttatcgggagctcgaagacattcatagaataaatcggcattgcgaaagccaccgatttaatgagattctcctttcctgcagtagtgaggaacttgttctgccatccattaatctttttctgaacagattccgatatgtattgaagcatttcttttttccttcggccaaattgctctggtattcccaaatatttccctccacctccaatgtttggtatttgtagggtccgcattgcttgatcccttgtttgttgatagacccgactcccaaatgttatggatgatttatcaaagttaatgacttgacccgaagcctctccatactcattgaatattttgaggaggttggtgatgtttttttggcctgcttttaagaaaaatagtgaatcatcagcgaatagtaagtgagagatggatggaccgccattgctaactcggactccttttatatgccctgtctgttgtgcattagtcatcaaagagcttagaacatccgcgcataggataaaaaggtatggtgacagtggatcgctttgtctcagatctctagatgactcaaatctcccatatgggctaccgtttaccaaaacagagaaggaaacagagcggacacattccattatccattgtatccaacgatctgcaaatcctttctgtttgaagacatcctgcaaaaaactccattatatgcggtcgttagccttgctgatatctattttaccgccatatattcgttagcacatctttttttgacccgtagaaaatggaagacttcgtgtgctatgaacacattatcaatgatatgacgttcatgtataaatgcagcttgattttcagagacaacatgagatagaaatgactttagctttttcaccaagattttggagattatcttgtataggacattgcatagactaatcggtcggaaatccttcattgtttttggttgttcaatctttggtattaagcaaagatttgtgtgattccatgctgtgtccatagtccttgtctcaaagaatttcttcacttccaccgttataacagggcctataatatcccaatagcgtcggtaaaaagaagctgtaaacccatctggtccaagagctttagtagcaccaattgcaaacaacgttgttcgtatctcatttgtggtgatgtccttcaatagaagttcatttgtcgttgtagagaccaccggttgtatatgttgcagcacatttgttaaatcacgttgattcatattcataaaaagttccccaaaatatctctcagcttcctctacgattttttgattgccgtagatatcactaccatccattccttgaattgaagttagccgatttctagcaattcgattcttcgtagaagcatgaaagaaacgtgtattgaggtctccttcattcatccattgtattcgacatttcaatttccagtacatctcttccttgagataggccaaaagcagttctcttctaagttgacggagttgttcagttgatacaaggaaatctgtgcttgcttcatcaatgatcataaccagttccttaatccgtttaacagagtttgtgttgtttgttctcttccaacttgaaatgtacgatctgcagtttctaatcctttttattacagagcatcgataagccggtgtattattccaagcagcttcaataatcgtttcgacctcagggatgttacacaatcttgagtcaaagtggaacatgcgtgtacctttttctgatgttttccggattttgatgattgtaggccgatgatctggttcaatcacttccaagtattcaactttagaagcagggaagttagctttccattgatcattagccattgctctatcaagccagcattcaatagtgtgagttttcctttttccaacccaagtcatattatttcctgtgaatggaagatcagagactttgaaggtgctaccatgttctgaaaatcaacaaaactccaattttgtcttatacgacctccacgtttttcattggcattgagtatttcgttggagtcaccacacattagccaaggaccttgtctagtgatcacaattctttcaagtctttcccataagatatttcttaactttctcataggatggccatagacacaagagaaataaaaagacgcatctttattacttatcttacaatcaatgagtcttgcatcaaacgaaaagaaatttacagaaacagatttcttccacatcaatgtcaaaccacccccaatgcctaaaggcgacacacacttcacataatcctattccaactgaactgctacatcccgaactacatcatccgggttctttgtctcgagcaaaaagagtaagtcaggggaatacgttgccttaatccctttgaggcgtcgaactatcagagacccttttaagccttggcagttccaaaatgttgtattcatggcggctccggtagcttttggcccatcgtgccctctcggtaagtgtgtggggtggtcgaagtggttctcccatggttgctagttgatataaccctatttttactggttttagctatgatgtaggtataggtattagagttcttttgttatttctagagtcttttctagtctttttcaggtctttacatgtttcggattcatttggagataatggagcattctggaggaaaacaaagaatttatgctgctgatgaaatccggagacaaaaatgcacgtaggtgtcgagcgacaccaatacgtgacggcaatttcgagacgcaacttattgatgttttgaagatttccaaattcggccctgaactttctcctatgtttaattaaggtccatcacgtttttaagacatatatatagtttttaggtcattgttttagaccctaagctttgggaggctattccctggatctcttttgtactttgggagcaaaaccctgtgaaaaatcccgtttggatctttcttactctcttctcttgttattttcatcattaatttcttattcggaatatgatttgtgtttctttgatcatgtttgagtaatccacttgttaggtttagggtttatcattagggatttagatgatttagtagattgccctcctgctaggttatctgtaggattcttcatcttgattaatcttaatgctagttttagagtagctaactagaacttgatattagatgataggtatgcccaccataggtacttgctatttgaactatcatagatgagcctaggcatttaagaaagaacatgtaggctcatagaagggctctggtttagatactaggtgaactaatcaagcttattaacaatgcatgctttagcataggatttatcggcttctctggttatcttagctttaagtatagagagtttcgcggaacgccaccggttactctataatcatagtttgagttcgagaacggtgcgttaacaatctttatattagctagatctacaatttatctatctccctagacaattccttagacccgacgctttaatcaattgaatctacaactcatttacttgattatttgtctttaacattcaattacttcatttagcttattaaacaacatcataagtctattttgtgaacatcgagagctcagtggaattcgacccttaagtgctaacgacgatctcttatttgagggagtaagcttaaggcaatttgagctatatcgctattgttgattctttcttcatatgctttgatttgtccaacaatgtcttcgaaacctataacttttaactcaagtacttgttccaaggcagccacaatttgtatgtatttgtctcttggcaagctattaagaaacttcttcaccagtcttgtttcctcaattgcttggccaagagtcgatgatttagatgacagctgcgatagcctacttgcaaaatcatcgactgtctccgtatccatcattgttatcttctcaaaataagacatcacaatactcaaacgtgcttccttgacacgttctgctcctacgtttcgactgataagtgtgtattttgcatgttttgagcatcaatttgtcatcactttagcatcatatcatcactgttttataccatttcacatcatttgtcatcactttgcatgtttaggatagttttgcatgcatgttgcatatttgcgttgatttcaggtgatttggagctgttgacgagctatctggaagaagcggaccagatcatgacaaaccactcgacccagaggtcgagtaggagcttcaagacctcaagagaccattcgaccaccaggtcgagcagaggacatcaccacttcacttcaccactcgaccccgaggtcgagtgccctcgtctccatcactcgatcgcttcactcgaccatgaggtcgagtgtcttcacctccatcaccagacaaccactcgacctcttcactctacctagaggtcgagtatcgccatcacaccactcgactgcatactcgatgacaagctttagagccttcttcattccgcactcaaccagacactcgagcacaaggaagaaaagaagactccagctattcactcgacctctcactcgaccacctgggtcgagtacagttcttaatccgtccaaatacttcgtcgttttgagtattagggtttcgggatatttggctataagtagcatgtacttctcattttcgaaaaagaagtttttaacctagttttatttccgcagccttgtgttctagactttttgtaatccggatttctctttatcaattcagtattcagcttctgttcttgattttcgtttactagttgttcattctgttatcatactactgttacactgctgttatcatgtcttcaatctgttcaacgtttatgctttctcttatgatgtctgagtagtgaataggtttctgaggatgggttagagtagtgtagaattctcagtatgctaggtgattgagtattgattgatagatcccttctggattagttgttcttaatgcctattgctttctgatcaactggaatttgagcccagacatttccgcgcccaaaaggtgttcgatgaaatgtctgaaccactaattccagagattcgtgaccctgtaccaaggtattggttgcagggagcgttttggctttaacttgttgattcgtaatgcctgttaggttagctctcgtcaatggtgattgagtctgggactaggttagcttgagagtctctgttgcggtggcacttagatttggttaatgaacttgttgtctagggttaatttattgagcatgtcaatcacctgtaaactgaggaaacgacactactcaattaccccatccttaggaattctttgtctgattgattttatagtttactctactgctgtttactccatcctgtcatatgttgcttagtttctacaattctttactgttactcgaccttgtactcgactacccagttgtctgaacaacagactgtgcagtcgagtatccctatttcattttctgtctgttactcgacctgtcactcgacctcacccagtgctcagcaaagagctgtgttggtcgagtgtttcactgtttctgtttgattttctgttttctgcatgttcatttaggactgctagaacacaccaaaacctgttatgcttggcttgacttagtgacttctgatcacatcttgattgttagcatcacacccatttggattgacaacctaaaatactacaacgacatgattggtgttttaggataattgacttaaaagcctactatcaatttggcgccgttgccaattgggtgtttgttgttacatttaagatttcagacttgcttagatcaaattctttttaattttctttttagttactaactgtgtgtttttcttgttgtcttcttgatccaggtacacctctgctgtatgcgaactcgatcaacaagcaaccagaacctctttttcaacgacaacatcaaccgcacagcccgcgaaatcagaaaaaggagaaccacagtcaacctagtacctcagcaaccactcgttatggctgaagaacggaatcaacaaaatggccctaccaacattggtgctggatatgcaccacgtgatcaccgtcagaggaaaagaggaaaggaattgcacctcctcaatccagaacaacaacttcgagattaagagtggtctcatctcgatgattcaggggaccaaattccatggtctgccaatggaggatccactcgaccaccttgatgaattcgataggctctgcaacctaacaaaaatcaatggtgtctgtgaagacggattgaagctccgtttgtttccattctccttgggcgacaaaacacacatctgggagaagcatctaccccatgactcaatcaccacttgggatgattgcaagaagggttttctatcaaagttcttctccaacgccagaactgcaagactcagaaatgagatttctggtttttcacagaagactggcgaaaccttctgtgaagcatgggaacgtttcaagggttacaccaaccgatgccctcatcatggcttcacgaaagcctctctgctcagcactctttacagaggagttctaccacgcattaggatgcttctggataccgccagcaatgggaatttccagaacaaggatgttgaagaaggctaggaattggttgagaacctggctcaatcagatggtaattacaatgaggactgcgacaggaccgttagaggcacagctgactccgatgacaaacacaggaaggagatcaaagcactgaatcccaagctggacagaattctaatt

SEQ ID NO: 26026 - DNA, 2446 bp, Arabidopsis thaliana landsberg
atactattcgagttatcttgaacctccacgatctccgctacaatcgaagcctctcctccactcttagtttcattaacaaaaccaaaacaagtaaaaacaaaattgatgaacacaaaaccaaaacaagtataaatgtgagttttagagaagaaaaaaaatcttacggatccactgggaacagcgagattcaagacgatcttagtggaacaattgagattaccagaatctgatgttttctcacacttttcgagctttgatttcgataaaatctgaattccgtcgacttcgttgaacattccgacgaaaattccggcgagtatacaagccattaaaatcgcgttcaccattttctctctcacggagacgcgaattgaaaattgttttcttcttgaagaactgctttcttcgtcttcttccaacggttactttgggttttttaatctttaaatccattggacttaaccggaaattactagagaaccgaattaaaccaatgcaataacctttttttgcagggcacgattgaagttcatgaagtcgtagagtgaataaaacttcaaagaattgtttatcatgcatcaactactttcatttgtcgttatcaaaataataacactactttcattaatcatgtgtgtttataagtagcactgatgcgagaatatatattaaatatcttccatcctaattatataaaagagttgtggtatacattccgtaggaccttccctaagctatgaagagtaatataaatgaggcccaattaaagcccagaagtgaggtatataaatcgacccaaaaaaaacagaaagcaatgcatccatgcatccaacagccgaagagaagatggtgccgccgttgttgttaggatcagaagaggaaatggagattgatgagcgtgacaggtccgaggatacggaggaaattattacattggatgtaagaattatatatgctttcattttcctctacttgttaatttgatactctcaatctcggatcttcttaatttttgctaataacaaagaaacgtgtcttacttaggagttttatatcgacagaggtgtgcatagcaccatgtccaaagagaaatacgctcctcatcgtgtcttagtccccctttatgctaagttggcccttcattgttacaatgttttctaggtaacacattgtaacattgttccattgttttccaagcatacactttgttcctggtcagctcgttttttatcttatgctggaagattgaacctaatcagctcgattctttggagtatttgtaatttctggatgggagctttccgtctacctcgggattgtatcagggaaattgataagatgtgctctgcttatctatggtcaggaggagagctaaatacatcaaaagctaagatcgcatgggcgtttgtgtgtaagccgaaggaagaggggggtctaggtttaagatctctaaaggaagctaacgatgtttgttgtttaaagctaatctggcgcattatatctcatgctgacttattgtgggtcaagtggatacaaagctctctccttaagaaagtttctttttgggcggtaagggaaaatacaagtctcggctcatggatgtggagaaagatccttaagtttcgtgacatagcgaggactctttgtaaagtggaaataaacaatggtgcccggacttctttttggtatgatgattggagtgatttaggaagactgattgatagtgcaggggatcgaggagccattgatctggggataaataaacacgcaactgtggtagaggcttggggtaaccggagaagaagaagacaccgcactaacttcttaaacagagtggaggagcgacttattctgtcctggaactcccgaaaccaagcagaggaccgtgcactttggaaagggaaagagaataggtttcgaagcattttctctacaaaggatacttggaatcatattcgcacagtttcaaataaggtggcttggtataaaggggtttggtttgctcaagccattcctaaacacgctttttgcatgtggttagccgttcacaataggctctctacgggagacaggatgacactttggaacatgggggtggatgcgacctgtatcctatgtaacaaagcgcttgaatctcgggaccatctcttcttttcatgtccctttgcaacagaagtgtgggaaccgctagcaaaaaccatctataacacttgtttttacacggattggcaaaccatcatcaacaacgtctcacgcaactggccggatcgcattgcaggtttcctagcccgttgcattttgcaggtgacgatttacactctatggcgagagcgaaacgagcgcaaacatggagcttctccgaattcttcaagtcggctaatcagttggatagataagcacattcgaaatcatttgatggccataaaacagagtggtaatagaagac

SEQ ID NO: 26027 - DNA, 1080 bp, Arabidopsis thaliana landsberg
ttaagaagttaacaattcaaaagagtggaaacgtgatacggaaaacgcacttaagatgttcagcgatggtgaaacacaagtttggtatcgtatcgaagaagcaacttcaggtactttatcaatagtttgatggaatttatacactctgctattctattagatgataccaaacttggagatcgaagacaaccctccatatgaaagagccccgaaagaagaaaacggcgaatgcgtggagaagaaagcataaagaccctaatatgcagttacaaatttcactatcaatgtataacaacatgtccaatttgtagaactcaatcattttaactttggatactttctgttattcaataaagcatcatgttaagaaaaatatctatttgtttttactgtttttgagccaaaatatcaattcagtattataaagctaagaaaaacgtacaatcggatgacaaaatatatatatatttctacttatttatgttgattagagctcaactgattaaatactttttttgtgatattttgtatttaaaactctttgtaagaatacatagacgaattataatttacgtttgaaatactatttattaaatccacgcatagcgtgggtcgtcacctagtatgatataaaggattaatttgatattttctcaaaacaccaagatcgagagcccaagagcaatatgaagatctccatgagaatcatcatcttctgtgtgacctttattgcagtttatgctacctccatgcagtgtcatgtctgggtttataggggcttaaggtgatttaaactcaggcacggcactgcctccatggctgctacgttttttaaatacattgaagttaaaaatataaaacaatccataaatgtatataaggtttctttgttgacaaaaaatgctatgtatttaaaaacgtttttaaatcacagtttaaaattcatgaaacaatccatgaataaaatgttagtgagattatctaacacatgtgatttcttttagctaggcttttttccaccactctttgttttttaagtgaaaaacaattaataatctttgtctaataataagaaaatag

SEQ ID NO: 26028 - DNA, 1315 bp, Arabidopsis thaliana landsberg
  unsure (1)..(1315): unsure at all n locations
caatatctaattacaagatacaacaaaaaagaaagaattaacaatgggcaaaaaactttactagttttgccatttatgtcctcatctggcttagctgttatgcatcaatcggtgggtcatgcacctatacgttctctctctatctcactcaatatatatacacgaaccttcctcgttatttcctcccaagaacatctctcaaacattcctctcttcttcttccaatattttgatccccacacacactcacatcaacacatataaatctcctcgtaaaccctaaaccctannnnnnnnnnnnnnnnnnnnnnnnnnnaccccaagaaaaaagttcaatttcgttagcaatggccaaagttgggaagctgacaaagcttaagtcggctatgaagaaatggccttctttcgccaagaaccaccaccactcaacctcctcagccgctgtttccgacgaactctcagaagacaacaatctccatgtggtttacgttggtcaaactcgaagaccttacatgcttagaccagacatcatctctcacccactctttcaagaactcgtggatcggtcttcttctagatccatcgaacaagatcgtgagattgttgtagcttgtgaagtcgttttgttcgagcacttgctgtggannnnnnnnnnnnnnnnnnnaggaggatccgttgaagaattggctgagttctatacttattgacatcgaccgattgattttatacatttatttcgtataatatataccttttttgttggtggttgttgatgctgatttgtattttcattcgatgcggggtgtgatcaaaacgtgatctcgtaaaccatgtcatttgcttccgtttttctgagcaattttatgatgatgatgagcatatgtagttttcttactttgttaagaccaaccaagaataaatttctactaacaacaatctttatatatattttccttcaaaatgtatttcagtacctatattaattgtaatatacataaaaaaaagaatgcaatgatttcaagaaaacaaactaagttttctggtaggttttgtttctatatttattttattatggcggttttgtaaacttttgtttctattttcgtaacgtatctttctcatatgagtcatgagtctcatgacataataaagaaggcctttgatgatgttcgataaacaaaagttggttgaatatgatgagtccaattcctttattttgctttatataaacaaaatatgacaagaaatgatttatatcatcgatattcatttttttttttttttgcgtatcgtttgtatggtgtaagattcaaat

SEQ ID NO: 26029 - DNA, 1381 bp, Arabidopsis thaliana landsberg
gcggaactcacactcaggtacaacatagttacatatagcctttctgctatgtttgagaaatattatttttgagcgacttaaattgtcatatggaataaaaaaaaactttcagttaaatgtttttgtaaaatactgtttaaaattttaggatgaaaaagactgaaaaaaaaccactcagacaaaaaaaagagagaaatcattaacctttttaaaacatcctttttctcttttattttcaactttcacattcttgatgatcaacatagtggagcttggatctcttttcaatcaaatgatttatttttatttttaaagcagaggaactttatttgtattttatccctttaaagagctgtagaagtttccttttcattagctacagaagttgctagttgtgcatagtatatagttttggagatatattatgagaaattaatacaaaataaaaactgatttaaaatctttcagttgaatttcatgtgaaatagtatgttattaataaaaaacggaatcatatacaaatcatcgtcaatcagattgtttcgtgtataaatattattctgtaaaaccaaacaaacccggatcagacacggttaccaaagttgaaatctctttatttgcacgcactcactcaaagataaaaagcttaccactctcacctttcaaaagccccgccagcttcttcttctcccacacacaaagaaaaaagacagaaagaaaaaaactttttttcttttcgttaaaggctccacctttctttcttcttaacacacaacacatgaaaatccctgcatcatctcctcaagacacgaccaacaacaacaacaacactaatagtactgatagtaatcacttatcaatggacgaacatgtcatgcgttcaatggattgggattccatcatgaaagaattggagcttgatgacgattctgctcctaactcacttaaaaccggtttcaccacaaccacaacagattctactattttgcctctttacgccgtcgattcaaatctccctggctttcccgatcagattcaaaccgtcggatttcgaatcgtcttccgatgtttatcctggtcagaaccaaacaactgggtacggttttaattctcttgatagtgtcgacaatggaggatttgatttcattgaagatctcatccgagtcgtggattgtgttgaatcggacgagttacaactcgctcaggtggttttatcacggcttaatcaacgcttgagatctccggcgggtagaccgttacagagagctgcgttttactttaaggaagctctcggttcgtttttaaccggatcaaaccggaatccaatccggttatcttcttggtccgagattgttcagaggatccgagcgattaaggaata

SEQ ID NO: 26030 - DNA, 3099 bp, Arabidopsis thaliana landsberg
cagaggatcaagaaacgagtatgaagacaaagaagaaggatttgagatcattaatggaagaagagaagatggaattggtgttgatgagatacgatactgagttttacagactctcttcagacatagctaaggaaacttgggttgtcggaggaattcaagatcctctgtctcggagtcgaagctggaaaaattgattacacagattcatcgttactcatcagtaaacatcgtattttaaaaacctaatcaagcgtttttactataatttgattatctgttaattaattttgatacttacattttttttttatttgggtttcttgagttttttttaatggttcttctcccttttgtttcgtatctcaaaggtttttttttgtttaccttctttgttttgtgtgtttcatcacaacgtttgtaatgtaatgcaaaatatgtacaggctttttacgttttacgcaaatctgcttaatagatcatttttttttgtatttcatgtttgatcatacgttttgtgcatgtagaataaaatttcagatgggatgaaacatttcaatttgcacaattgcaccatgtataatttgtcatttcatgtgttcaataatacttaacttagactagaggattcactgccaatctccatatatagcagcacgcttggtctcttttcacttttcttgcccttcttgaaagagacacaatcaacaaagaaccaatatataaccgaattgaaggttacattctttgaacacggcaagcaataacaggcaagttagctcttttcttcctaataatagtatccaagaataagcgacatcagccaacaatgtatgagttttctcaatattatagagaagtacatcacgatcagtcagaagacatataatagatgaatgatcacaagaaacaaacctaggatcgttgtcatttgtcaaatgtccatgaacaaagtttcgtcggtcttctttttagcattggagttttgagaccatgacttgttatctagtgatttgtgcaagtacatggctttgttaccactcgaattcaagcttgcatattacatgtttagagtttatggttttcgcaatatgactaaaaaaaaaaaaaattgggttaaaaaaaagatgaattatatgattatcttccttatgaggtattattccgtttgatacaaaatttagatgttaaaaaacagaaaatgacaaaattagcaacaaagaaaaagggcaaacaaacacgcatacaaaattaaatcattaagaaattccttttaaaactatacaattcggcttagccaaatctcacacttcaattagccacaaccaattccgagccgactcctttaaaccggacatctccaccggtctgtttcttaaaccggacattcacctcagttaaggctcttctagtctcttcgtcttcaggtgtctccatcatcaacaactcataatcttgaatcgcgtgttgccatttctccaactactcacacagcgtaaaccaaacaaaacattcatcacaaattacaccacacttaaaaaaccacactaatatcatttcgaaatcggtcggaccggttaaattaagcttttgaataccttggcataagaatctgccctgcgccgcctcgccttccggtacgatggctggagactgagagccaatgtgcaatcttcaatagctttctcgaacagatcaagcttgaatcttgaagcagctctgttacagagcaagagagcattatatggatcgttctcaagtccttccgtgtaaaccacgctagccccttcaaattttgatgcgttgaaaagcaaatttccactcagtcttgcagaagcaaccgctctcgcttttctagccaccgcgtttacttcttcgctgcttggatcaagtcgagccgcttgccttgacgccgttactgcatcttcaaaccttcctactgctatgtagacctgagctccgaccatcaagaggtaagaagtgagggaaagaccaaaaatctttatgaaactatcgatgtcgaagcgttttgttcctttctgatacacgctgtatgcttcctcgtgtcgctgaagatgcaataaagcctcggtttggagtgcatagaccttatgagattgaagattttataagtttaatcagtcaaaacaagagtccatacatataatatccagttagctaaaccaacacaaccaggcaaataaaacttgctatatttggctccttattgataaatggtataaacaaggagacaaagctaacccgaggagaagaatctgctccatatgatatcgcaaaaagagtctctttcaatgcaacattccattcctttgatcttcgagcttcgtcacacctccttaagcatttaacaacatcttcaacttgttcaatatgttttgtctctgtatattttccagcttcattatagtgacacaaagctttctcaacctcacccaatctggtcaaaaacaaaaatccagggtgcaaaggtctatttaataatttatttagtaccataaagtaataatctgaaacttagagggaccaattagagaaaaacaaaagtgaaagactctacctgagttggagggaagctagtctctgatgagctctctcgtaagttgggtttagtcttaaagcttcttcacaagcatcagaagcttcaagaagacgaccgagactgatcaaagcggcggatttgttagaccaatacgtcggcgttttggggtcagctgaaatggctctctcgtaaaacacgagagcttgtccaaacctcccacgacaatactcttcgtttcccattttcttcagagtctctggatcgagtctgtgatttaccggtttaccctcccaccgacttttcgtctgtgtcacgtcagttttaacggctggctgtggtttcacgatgatgtttcccataacgccgttaagtgagaatctcttgctctctgttcttgatgagcctgacgaaatcgattttcttgcggaatcagatgattttctggcggattccgatgattttcgcgggtgattctcatctggttttggcttttgttggggtttctgggagtcagatttctttggttgagaagaagtatcggt

SEQ ID NO: 26031 - DNA, 828 bp, Arabidopsis thaliana landsberg
gatcaatgtggaacaggtatgggatgtttctggtcggaagcattttacttttgaaggccacgacgctccagtttattccatttgccctcattacaaagagaacattcaggtgcggcaaggattgaatcaaactatattttacatcaattattatactgttttaccaatccgtttgaagaacaataaagtagacgacacatttcatatagtattatcttgcctatgaatttctgttctttaccaaaatacatctcgttcttatttggatttcagttcatattttcaaccgccatagatgggaaaataaaagcctggctttatgataatctgggttccagagttgactatgatgctcccggtaaatggtgtacgaggatgctttacagtgctgatggtactaggtatgatcttaaactcataaacatttcaatcatctataccgcttgttcttcactcctcaatttccaaaatcttcagattcttttgttactccggaggatactgagttggagccttgatttactaatcttatcgttctgtactaagtttaccttttcagtgctttctgatgttttttcccccttcagattgttctcttgtggaacgagtaaagatggagattctttcctagttgagtggaatgaaagtgaaggatcaattaaaaggacgtataaagagtttcagaaaaagttggcaggtgtggttcagttcgatacctcaaaaaaccattttctggctgttggtgaagatggacaaatcaaattttgggatatgaacaacattaatgttctgactagcactgatgctgagggtggacttccggtaagt

SEQ ID NO: 26032 - DNA, 1041 bp, Arabidopsis thaliana landsberg
agagttaacatatagcaattctctacatacatagacgcgatcgatactcacaaatatatcatattccatgccggtatatagataaccgacagacacagtcacagtcacataagacaattgtccccctatccgtcgtgatccgtatctaagatagatatactataatgccgttttctaatgataatgcgtttaactcgaccaacctgtaagcttcgtatgataagcattatcttgaatggttgtgtaaagaagcacatcagtacctaattaactaaatattataatatcattaatgatgtgtctgtttgaatttggcttgcggcccagcagagatacatgcataacagaagaagtggcgaaaaaaggtttgaaaacgaaatgtgtggaacatattcagctataggtatctaagttaggtctaatttactatatatcttctacttaaaaaagaaaccatctttacgtagagtcataattcataaaccattaattagcttaatgtgaatgcaacgggctacatctagatatatgtacctatgtttgtaatttttttgtcaccagattcaccacatccttaagatttctatatataacgaggtcatagttttcccaaagaacttgtaattaaccacagaaaaatgcacattgatgacaaaataatcatagatctataacgaacttttgaaactaccatattttgaactttcatagacttaatgatattacaaatcgaattcatgaaactaattaatatataattaaccgcaatatgtgttctacaatggtatctgatcctgttttattttgactcgtcatcacatattattcttgtttacatacactaatatttcttcttttagaaaagtttcttgaagtgatattatatatgtttgatcaagtagtttatttgattgtaaaagataatgtatgctttttaggattctttattcatgtatatcttttcgggttatggagataagtaaaagctaaacttgaataagaaacgacaaattggatttttaaatttttttttattttttc

SEQ ID NO: 26033 - DNA, 4116 bp, Arabidopsis thaliana landsberg
agaaatattgcatatcattttcatatatttaaataaaacacaaggcttatcttgtatatcaatattataatttttcttttttgatcaattcgataatttttaatttataaatacccaaaataattttagattataattcataaactaaatgtttagtttaaaactaaatgtttagtttaaaactaaaatatcataatcacaatatttatgatattttttattgaatgtattataaaataatttaatattatattaatatatattagttatagacatatatttcactacattcattttacccacgcatcgcgtgggacattttctagtaaaataataatgtatgtttctactttgcttaaggatctgtaatgtacatattaaaattaattaatctccatttaggccattacactagtaatcaaatatataaacacatgacttagacaaacaaaaattcctgtaattaaaaagttaatcatatattcataaataaataacaaaattatttaaacatgatgttgaccataaatgtgttcatacatttctctctacgacaatacatctaagtaccaacacgggtcggtttattttcggattggaataccagaaatacctttaagacccatcttaactgcggttcttcgaaacaaagtaggaggtttctctaaaccgatagaatggcaaaaccgattagctaactcggccaacgtggttttgtctctaccggtttctcgaaccgagttgtaataaccgagccatgcatggtacgctgcttctttgatacttgtatcaatcttagccattgactgataacctagtcaaaaatcaattgtcctcaatgtcacttggcaataaaactccacttatgggtattgacagtgaaggcgaacaaacctgatgtttaactcttgaatcaagatctggagctggaattggttcaagaggtaaatctttaagctcatcaagaaaatatctctcccatggcgcaatcaaaagcaatccttttcctccttttccttctcttccagttctacctaaccgatgtatatactattctctgtcactcggtataccgacctaccaaaaacgtaaaacaaagtctaatccgttaaatatccataaaaggttgtttttggcatgaaaatgttcgctttgtgctttacctgaataaccaaagtaacatctggatagttcattccacgagcagatacatcagatgtgacaagaataagtctatttgattccttaaactcgtctgatacacgtgttctatggagctgaggctttctagcatgaatctccctaacgttcaatttcatttcccggagcagagtgtacatcagtgatgttaccataccggttgagcaaaagactattatctgcgagaatgaaattggatagttacgagaattaccaaggtcagaaataaaaaagcaatcgtttaagaggatttgttttaccttataatcaggcatgttgttgatgtgctcttttagaagatgaggtactaagtggaaatgagattcgtgtggagcaacaatacgagattgcttcacctaaagccaaagcaagaaactcaataaccagattcaagtaacaagcttttgagacaaaaacaagagcttaagagtttaccttatcatgagtttctacacaaccgagcccgattgtgtcgatataagagtgatccctttttaaaacaagttgtgagactcgacggacctgaatttaaactacattttagacgtttgtgtccgcattggattttgtgataaaggtaagaatatatgaagttagctatatagcaagggtacctcgtttggaatggttgcggaaaagagaagagattgtctctgacgaggcaaacaatctatgatcttttcaacatctctcctgaatcctaagtctagcaatatatcagcctcgtcaactataaacaatttaagggccatcaaacgcgatgttaagccagacttattctctatatgatccaagagtcttcccggagttgctattagtatctgcaacaaggtacggaaacaaaagaagattcaccacaacaactagaaaatataaacaattcctgtaaaacagggaatcacggttggtcaaacctggcatggctcagattctaggcgttgttgatcaagtttgaagcgcgtaccaccaattagagtctgaacaccgatcccgtcatggtttttgagcagagccttgccctctgcagcgatctggcttgcaagttctcttgtaggacagaggataagaacaaaaatcggagcaactttgtgaacgcccttaccgctgttcatagctttcagaactgtttcaattgcaggaagctgttttttcagtcttacaacgttatcttaagaaacaacaaaagctaaggcataatctcaggagaaaggattgtaaaataccaaaaacgccatgctctttcccgtcccggttttggctttgactaatgcatctttacctgcgttacatataggataatacgttgtcaaatgcaaaccatttgagccaaaagaactagaagaacacagaccgtctaggcactcagagagagtggcatcctgcactctagtcatcttaacaatgccagacgcagaaagcgccttaagcgtcaaaggagatatacaagactcatcaaatctgcaaccattaacagagctcatcaagattcaaacttgacaaatcaaaatcctttacacagcgagtttaaaatacctttttgcactgtaaatcgagtcatgaggctcttgcttctcctcccttacattatccacagattgttttttactgagatcttctctaactctattaatatccaaaggaggataaagctcttcgtctgtgacattacgattcactcttttcgtcagcttgatatcgtggtttcctaacgacgcactgcttcctgttttcctcaaatccatccaacctatcatctttccctcattgccttcttcatctgaatcctcttcagttgaactatcgttcttcctaaacttccttcttccaaacaaacctttgttccttataactccaacaacactcgtcgagctcttcactttctctttggtaccagcaaatttaggagaaaaaggactcaaagtatctagctttttagcatcaaagtcatctccttcatcacaagaactctcatttctcttaaatctactcatactcgaaaaacctctcctactactaccgaaaacacgatttttacccatagaatcacatgtcgcagaaactaatctcctcacatcaataggcgaattagaagttgaatcaatcgaatccgaacctgatctcgacccttgatctgatttcttcaccggaccatcgttctcgttccaaaaatcctctgctccagctttcataaaccgatcagccaaggttttgatatgttctttcgggctcattggtccatgactctgcttcgatttcgccgttttctcaccagaatctggatttccccacattttagctcggatctcggtcctaattcgagcttcgtaaagctgtttctcttgatccaagagcttgttctctttctctctagctttcttctcgtgcatacgtttccactgccacttgtttagtcctccagggaaggttctcggaccaccacccatgttccgagaggatattcggttccataaggacctttcagaagtggtgcgcttactaagccctgaaatatccagtgacacaaagataaagataacatgacaaaaagacactttcacgaaactgagacacagtatcgaacacataacattccttagatgtatgtatgagataatggccatgtgataaaagtgagaaacagaggctatgaaggaacaaaagtaagagcctaatcaaaattgcttgcatcaaagcccaatgttaagcagtatttcaaaaactaattgatactaggaagtagtttacaaaaacagaagccttgaagatgctagaaacagcccacatagacccttgaaacaagacattgatccggtacacatagcatcacgtaagcatccaaattttaaccgaacaaaaaaaattctgaagtaattgagtgcaaagaaactctctttaactcttacagggcatttctag

SEQ ID NO: 26034 - DNA, 877 bp, Arabidopsis thaliana landsberg
  unsure (1)..(877): unsure at all n locations
acgccacgagcggccggaagaggctgagtctcctttttagaaacaggggttttctcactttctctcttggacctaagtttctcagtgaagttcttatcacctttcttatcagcacgttcagagagaatcatctctctctgaaactcagtcattccagcaagcttctgcctgtcttcctcattcttgtaaaggtcatctccaaaatcagactcctcgctgctgtcaccttcacgatcagatggtccatcaccataaccaccttcaactcgagcagctcgatcttctctctctgccnnnnnnnnnnnnnnnnnnnnnnnnnnnnnnnnnnnnngttttctactagcatagccacgatcttcatcagaattatcccttgaatcgctactaccatcagagtaagaaccctcacgtctcctcgatgatggaggatgacgactcctccctgctgaatttgttctcccagcagcttccaaaagcaagttctctaaatcacccataatcttctaaggaggctcacaagtaacgaatttaaatggttttcactgtcacctgaaattatgagaagtatacagttagagaagcaaaagacctcaccacattggtcaagtacggtgtataccacaaaaaaccagtagatagctaactacaagagcaaaacaatcctttggattctaaccctagataagccattaatagggttaaggaaaacttttcacccaatcaggtaacggtgaagtctaaagccaaatcgcggttttgcgaaaaccaatacgagtttctgaggttaatcaagcgaattcggagacggagaaagatcgatttctggtatggatcttcaatttgattggcagaggtaaggacggcggaaacagggaac

SEQ ID NO: 26035 - DNA, 967 bp, Arabidopsis thaliana landsberg
aaaaaaaagtttgattttttgactataaataagttatgatatttatttgtttacagtgagtaatcaagaatgactaggcaggttccaaatgaaaactgtcaatagttgaagtgagttttgtttatgagaaaattgatcgtgtttgagaaaatatggattcgatccacaaaagattagagttgatattcttcccgaaatttgacgtgtaaaaaagataaatctaagttgtgaaatttttgaaagttttaacttttttttttggcgttatactttaccaatatcaagactgaatttcattgtttaggaaaatatacaacttctaatgcataaaaagttagtttgcttttctttgttttcttttgattccggtattttgccggtttaaatttccgacttgttcggaatttcttccggttttattgccggttttttgataagaccttttgcaagttgcaaatcaccacttccaatcttggaagatgtttaattccgggagagttttagatggatctttgttcattggatgcttgatttttcttccatgtgaaggtaaattcctcgctttgctaataagagcgtaagggcgtcggttcttcatgggtgatagatcaagatgtttgcggttgattggagaggagtatgaagagttggggttcacgtcgtgttttgatggtcctccaaggattattccaatcctcatcagctgaagtttaaatctccggtggccaaactaaatccaaaaaatctctcccggcgaattttggcaaaaggcgtacggtacaaccaaaggcgggcagatgtagaactttcatggaggagctgaattatttgctgactggcaaaaaattctccggtgaagaggattgcatcgtgtcggtgaagccgtgaagctgctgtgaaacgttgatctaccctgcaattttcacgttgcatacacgtgtcgtcatcttatctattttaatgtttg

SEQ ID NO: 26036 - DNA, 1119 bp, Arabidopsis thaliana landsberg
ttcatccatcggatcagctccttcttttctgatttttttcaatgactgcttcttatgcttgccctcgttcttctctcttctcctagacccaccccccttactgtctgtttaggccccctgccaggtactccagtctcattgcgtaccgtcgtctgcatcttcttgccctgttttcatagttgtttgcttttcttatatggattaggcttggttaaaagcgtacaagccaaagattttgaccacatgcttaaggaattttaaaactcaagtcaaatgaatgagtaaaattataagatattaaaatttcaacagatgttttttctttcttgtgattaatctagttattgcaatggagcaatgaagtttgataactaatcttcaagtagctacagggtgaagaagaagaagactccgtttataagtatatgagctctaatgattgtaactttgtaagtctcttttttttctacagtgaagtttatatctcttaagtacattgtatgctaaattattgatatccgcttcccatcatttaggtcattcatcaaattttgtatcatccaactatttatacataattttcaaatcattacaatgttttctcaattttttatatattcttttacagaatcgagcttacgattttgatgtagttattcacctttttcaaatggaattgtcaattgaaaataaaaaagcagataagcatttatgaatatcttctcaaatcattaaaatatcaagtgcaaacaaacataactattgaaaagaaaataataattggaggattttttgcctgctaattgaaaataataaataaagtgttcttaattagtgaattaaccccagatgtgtgccatgtggcgcgtccaagaacaaatccttcggccagaaatgtgcaaacgtcgtgcaaatctgaaaaaacaaacacaagagaaacattcaaaacattcaaaaagtacttaaagccttggcaaatctgaaaataaaccataaattatatatgattgattacattacaaaaaaaaaacgtagtgcatattttcaattttgactataaaatccttaggtctaacataatcactacttattaaaattctaaaacttaaatcacttgtc

SEQ ID NO: 26037 - DNA, 1012 bp, Arabidopsis thaliana landsberg
  unsure (1)..(1012): unsure at all n locations
tttccatgcatcaaagttaagcttattatatgtcattgttttgattaaattacataaaagtaacgattaaagtagactgtaattattaaaaacattaacttaatttgcttttaaaactccaactaattatccaacaacaaattcaaaacaataaaaattagatacatataaatgtcaataaaataaattcttcacctttacctataactactttttctatccactaaatattttgtaatgcctttgtgttaccaatcaatcaaatccttagtagtaaaccgcttaccaaatacgaccaatatatcatngagtttgagacaatgactagtgcagaggattgctagatttcctatgggaacgagggagctacaaattcggaaagttgcaagttcaatcactctattccaagaatgaccaaggtagctttctttctacttatgtacatttgcttaacatttattttcgatgagctgaagtgttagaaaacttccaatccttgtacgttgcctctgacggggatattggctcttgaaatgtattttccattatccttttttgtctgatagtctagtggttttttaaacaacctatatatgatccaatccacttgagatttcgaacttagtcatgctagttagctgacattgacatatatgagcatgccaatcaacttaagtcgatgagaatagtagattactggcgccttttctaagttacatgcatgtatatttaacaattgttcaaatacaagaacaaaagttgataaaaatggaagtggtgttttataacatttttagataaattagtgtaacgttaatagaaaaagttgataatgacagaaaatttcaaaagtattagtatttcgattaaaaacagtaattatattctgtaagtaatttaatcgaaaactctttttctgatttagaaaattatcttattattggtctatttctggaaaaagatctgaatttgactgtaccaatagtgattaaaggtgggtcaagttgaaaaa

SEQ ID NO: 26038 - DNA, 1218 bp, Arabidopsis thaliana landsberg
aaacagcggatggagctaacattcatgatacaacttttgacaaataaatatgaacaccgagctcctgacggcggctctttccctctcaaataatttggtttaaccgggtatgatgaccttgagaaacattgaagtctctaaatcacactcttgccaatctcaaaagcaccaagcttcacctctaaacggttttgttttccaggaatgaattgggttaatgtaactttctaatttgggtcaggtttgagattggacggtcttccaccacaaaaaatatcaaccattaaaacttttattgttgcccattaagaccgaccttcttttcgtaattttttttttaaaacgtaactttgttgaatttgtaaaaaaaatctctttgtgaaattatcacaatgtttattcaaaactaaataagaacatactagaagcttttctaaattggaagatgtataaaaaaaaaatagaagaaaagaataatgataatggaaaacaaatactataaaataaacgtttctttgataacaagaaacggatttgtcttctatataaataaaacacacacctgtctatttatttacacttctcgaatcttctttttcttctctgcgaagctctgtctctctctactcgattatcaaacatggcgaatcaagctgaatcatctgattcgtaagtacttgttaattactgagtaactctttaaggttttgttagtcttcgtgttggggtttttctaattctatttttttttctctgaatatcttaggaaggggacgaagaaggattttagcaccgcgattctggagaaaaagaaagcagcgaatcgtttggttgtggatgaagccattaacgatgataactccgtcgtttctcttcaccctgataccatggagaagctacagctttttcgtggtgatactatcttaatcaaggtttgatttttgaattttaaggctcttcttctcttgtttcctttactgaattagggtttataaggttttgcgattgttcattggtttgctgctagggtttatcagaagggttgttttttgaattgggtctttcaattttcatgcttttgttttgggatagtttctttgagttgtgtgtatttacatctttgttttctctctctttgttctgggaatctgtggttgcagggaaagaacacgccggataccgcgtgtattgctttagccgatgagacctgcgatgaac

SEQ ID NO: 26039 - DNA, 658 bp, Arabidopsis thaliana landsberg
ctgcctccacatatggttccaatcccgacaataacacttaacatcctctgtttttctctctgttttaaattcaagacttttaaaaaggagatgcattctatgtaacccatgttttttgttgactaaaattttacgttcatacaaaaaaatgctataacgttaaactgcatcctctctcacatcaagatgtaggtacaaaaataaaatcgcagagttttttaagaaaagctcaaaaacattcgagttaactgatatcaaatgcaagacaaaggaacaagagcatgtcaagacaatgataaaagaatttcttacatcaaaccaattttcagttatcgattatgaagggcggtgaaagataacatagtgtgtgtcgagacaatggtcttcacaatctaaacctctagaaaaaatttcaataagcctctttcttcaatgtaattattatacaatatcaagttttgtaagcgcaaggtatgatatcttatattcttcgattttgtttttcatctataagctctttggctttttattggaaccagtctcaaaaattaacatcatcactgaactgttgttatataagattaggatttattattactaataatgttttacatatttattgagctttaacaactaggataaggaatattacagtctt

SEQ ID NO: 26040 - DNA, 1650 bp, Arabidopsis thaliana landsberg
ctaaattgtgataggaaacatgtttagtcaaagttaaaagaagaaaacctgaaacaaataaagtttttccttgttgatcttgtgctcgaagaaaatcggaaatgcctaaagacaaaactaggaaggccaatagaagtccacggaggtttttcattttcccacctctgtccaaaaaaaaaaaaggattacgaattgccaatgtacttgcaatataaaacatgccaaatcaaacctttggatataaaaaacggatgaattgttaaataattatttattaacttatatttctgcttggggcggatcataacgggaaatatgtcaacgttcacataccaataacaataagccacctattgagttggaccgatcttctaaccaaattcgaaataatttgtctaatatataggatttgattatggtaagacttttctcaagtggaattataaaatctgacaagtgtgtgtcatgtttaaattttataaaaaaggtttgcaagtggaaattagtagaactgattgattctaattggttatcatcaagcacacctatagtagattaacctgagaaaatgagttattaccgtgtgtgtgaagggatgtcatattcatatatggtaaagtcaccgatcgtgtcagaatcaaaccacgaatataagcaaaagtgaacaaatgaatcgagatttttaaaatatagagagtatataacctggttgcatatttttcatttcaaaaattttataatcaaccactaacgtcttgatttattttatatggatattataccagtggttagctgttattattcgttagataaaaccatggcaaaagtttaagtttttaaaacaaaatttatacgtagacgtcaccatgattaattccatttgcagcttataacactaaaaatttgtccatttcaaaactttggtagtagtaagttttgttagttgtgaacgaagaaatcatcaaaaatggacacttgcaccaggcttctgtttgctgcgtgtgccactttatccatcttacatcttgttcaatctcagaatcaacaaggtctttttatcatctgtttttcttttttacaataattttggaaataaaccattctaagtttttttttgagatagaactttatataagaaaaacaatatgtacctctcccttttcggtcttaccaggattcatcagtttggattgtggattagcttctaacgagtctccttacaacgaagcaaatagcaatctgacgtacatatccgatgctgatttcattcaagtaggacagtctggtaatgtccagaaagaggtgcttatcttactcaggaagccataggcggttatgagatcctttccggatggaatcttatattgtcacagtctgaatgtctagcaagacgcgaattatctaatcaaggttatgtttcgatatggaatctatgacgggtttatcaattatccaagattcgacctccattttggtcctaagatttgggcccccatcgatatgggcaaggcaggtgatgtagttttgtagcagatcatgcacctgtcaaggtctaacatcctggacatctgtctcgtcaactcaggggagagtacatcagtgatatcagccataatgatgagccccgcgcttcatgagctttctatacag

SEQ ID NO: 26041 - DNA, 1550 bp, Arabidopsis thaliana landsberg
gttaacgacatatgtctaacataagttcttgtcatagtataacccaacaactcttgaactgttgtcttttgcttaattttatccaaatattgttttatattttttttttcctattgtttcatattttatccttgtgtgaccttaatctaccctctttcagagaaaaattacaaatcaaatctaatatttactaaaaatatcataatctcatagaaagaaccaaaaaaaaaaacaatcttcaaaaaaaagtatactcttcttaagaaaaagctaaagagacagaaacaagcttcgtatatttctcgctgctatttaggcggttctcttctattctcttctcttctcttctttctcttctcttcgtcctgctcaatctctgcttctcaatcttcggctggaagtatcacagaaaaatcgaatttaaaaactgacctatatatcggtaagaaaaaacaaaaaccccaaagtagtttcgttcctacttgctgatgctgtgatgcatgtattcagcttcacaacatcattcaaaattttggatttttatgacgtttttgtgggttttgtagatccgtggaagtcgaatttcgtgtaaaatagagatgggggaaaacgatgatggttgctcgactcagctaatcgatgggaatggtgaatttaacgttaagggtttggataatttcgtgaaaaagacgaagctttctgattgtggtctttcttatgctgttgctgcaatcatgggtcctcaaagtagtggtatgatatcctgagtttgcttttgttcttttttaatttgaagttcgaagttaattctaatcaaagttacaagtttttgttgattttggaatctgggtatatgaatttctcaactttactagattctatacttatatgatttcagcttgagacatttgcaaagtctttgacttgctgagatatttcaaatgcttattgttgttgtatgtcatttcagggaagagtacacttttgaatcatctttttaaaaccagttttcgggaaatggatgcttttgcgggaaggttagtgattgtcatttgtcaattattgttttttataatctttttgtggcaatgccacttttggggttgaaattgggttgactttgtaaattactcttcattttcattttcaggagtcaaacaactaaaggtatttggatggctaggtgtgttggtattgagcctttcacaattgctatggatttggagggtactgatgggagagaaagaggcgaggtaagatgactgaatcacacggttagctatatctagttgtaacccaacaatatgtttttggctaactagctatgaaattttcagaaaaatttgaatatttatggatacttatatctttccgatacttatacatatacttgatccttttactttatgtgtgtctagcatttttctattattctttttgccaatggctcatgtgcttttcaggatgacactacatttgagaaacaaagtgccctgtttgctataagctgtgccgatatttgactgataaacatgtgagtatgttttgtt

SEQ ID NO: 26042 - DNA, 697 bp, Arabidopsis thaliana landsberg
cttcttcattatcatcacaaccactaaacatcttcttagtcttaggacgaacacgacttctacttctatccttagatttcaaaccatctccacctttcactttctccgatgaaattgatttcgtactacagctactcaaaacactattacctgatttcttcccaatggaagaagaagattgatccacagattctcctcctccacttgaaaacctaggagaacgtctcagagcacaagaagacgaaacagtggtcgacgatttcgttcgagaagatgaagtagatgcagtcttaggcttctctttgttaacttcaggacattccctactcgaaagcctaagagatctccttagcgacggaaacccatctttcgaaatgttcaatttcttcgacctcgaatcttcgattggactatccgatgagtatactaatctcttcgatagacctcttaagacttcccgacgagttttcttcgtgggttccgagccaaagcccagatctttcctgggtttcacttgactatctcgattctgcagagagataagcctcgctgatcgacgaataggctgcggcaggacgacggtggattttcttctcgtcatttcaacgaactggggaaaaacaaagtctctaacttgttaaatctcttaacaacacattcttacgaaattaagaaaaatggtagatctgagaatcac

SEQ ID NO: 26043 - DNA, 1492 bp, Arabidopsis thaliana landsberg
aaacatgcataactaaaaaaataacagcggatttaacattttttttagttcttttggttttcagctcataatttattatgtctaaaaaacaataccaaaagtttggaatttacaattataacggatttgcaacaaaaaaatttgacaagccaaaacagatttgtgaaaagtttatgaaacaatgggagtgttaaaagtggcttcactattaatttgaatttctgatcttatcatgactatttctgtttcaaaatataggatgtttttagagtgtttgttttgtttcaaaatatataatgtttgacaactttctatgcaactttaaatatattggatattttatgactgtattttgcagtattttttatatttggttgagttttaaaataaaatattaaatgatagtatgaatataaaaaaaattcttacaatgtgttattctaaaacaggttgcaaacttcataaatattattccatgtgtttaaaataacatttatatttactatttaaattctttcaagtttgcaacctgttatctatctatcaagcaacttaacttagtggatgaataaaatacattttaatatcaatattttacaccatctatagtctatacaatagtaaatatatccatccaacatttactacttgagaatgtcagtagacatacttaaaacttaaaagtaccaattagctattaggatatgtaatcatggcttgacgatccagtcttgagctgaacttgcaaaagattgttggttgagactttggagagaatgaaatatacttacgtgatgatgcactgtcatggaattttattaagcttacgttttgtctccattagttccattatttcctttttactaattgtgaattggtaaagagaaggagaaagtcaggattttctcaaagtctaaaacaaagttaccacaaccatttcaccataataatagctaaaaagttctacattccaaccaaactagagctaaagaattccttttaaaagaaaagtttaaaagaacaattaagactctgaaaactttttaatcctccaccttctttgcttagagctcgtcctgtaatcaaatcataatcacagagttagtcatacagcccaatgtttgcatatatttttggagtttatgttgaaaagaggttagacacatacatgggcggcatcggtttcctcggcttccttggtttcctcggcctccttggtttcctcagactttgattcattgtctgagtcatctccttcattgtcatcatcttctgcttcttcctcagcctgtaggataaaacaaatttatatatcagagccttgacagaaacagagtttaattatatacattgtaaaaccccagagattcttacgtcggattcagcaggagcatcctttgattcctggtaaaacaaagaaacatacaacaagttgttgattactacttgacttatttgcaattagactagattttttggtggaggatgggta

SEQ ID NO: 26044 - DNA, 697 bp, Arabidopsis thaliana landsberg
ttcctgcccagttcccatagatttgacaggtaccgtctcccgaccgatcctactccaaggactcgtctagacttcgcctcgatagacgtctcacctcctaacaaccggcaggtcgcgttcttaaaacaggattcggtacttatcgaacacaggacatctgaagtcgatctctggagtctcactcaacttcaaaacgaatcccaacgatcttacgtcgaaaaattcaaagcaattaaatcgaagattgcgaacctaaacgaggaggtagccatagcagcccttcgtaacggtccgtggttttcctctagattccgtgaggaactcactgttaggcaaacagtctctttagacgatgcccttcacaaagctctccacttcgccaaagggaagaggagctcgctgtgctggccttaaggttcaaagaatctaaaacgcaaaacgctccccttgcaactaaaaaacccttcaaagaggaaaaccaaacgaaagggcagcataccctattcgcaatagaagaggcagccgaggacgagagtctagaacttgacctcggaaaatattgcaagtacgacaaaaaaagaggacattccaccgaggaatgtcgcgccgttaaaaattaatcgcagttgggggtaaaactaaaaaaggttcaaaccccaaaactgaaacccctcctcccgacaaacaggaggagggt

SEQ ID NO: 26045 - DNA, 2081 bp, Arabidopsis thaliana landsberg
ttggattggccagtcccaaaataattcttttgttcttttgttataattgattgtgatctatccagaagctcttttgtaatagagtttgtaatatacactgcaaatataatttccttaaggtattcgtttaatcattctttccatttgtttccttcgctaataagtgcaccagaagttgtttgcttagggtttcttcaactcattctcacgcacaattactcaaggttctttccaaatagtagagaaaaacttattgaaagagttctaaacgatacagcaggcttaatgctctgtctaaaggcaaagacatgtcttagctaactgcaaaatgtaaagagttacaaatacttgtttggtaaagccactcaaaaacggaaaatacagcttggttcctttctcggaaatggatagagcttcaagatccagagaggacaccgcggataggtggacagacggatggatctcatttcttcccaccaccggaaacattgaacttgaagaaaatgatatctccatcctgaacaacatatgttttaccctcctgtctgtattttcctgcggcctgcattagttgaagggattataaattagaccaagtgtcatcgccatgaacattataaatataatcatgcctcttcaacgaggatatcttgcacagtggagagcttccttaacattttcatgtctgtttttagaggctacttactccaccgagaccttaagagattgtagaaggaaaagaagttatagacaaataccttgactgcaggttcattgccaagttccttgagatcctcgaatttcatgacctgtgacatcaacaacaacattggaataaatcacattgaatttcaaaacagaaaaatatttgattagatatggtttgcattaggattctgctttgatatctacaggcctgcatcgatactaggaaatcaacaccaagatgaatataagaatatgcaagcaagcatttgttttagtcagtgaaaacataagaaagattatataaactctataacagaacaaatcatcaaaatctggaggggaaaggctttacgcatgtaaattttaggtaggaataaactagtgaattgaccaagattcaagagaaatgagaaaatggtacctcagcacaaataaatcctctctcaaaatcagtatgaatggcccctgcagcttgaggagcctttgactgccgtcttatttgccagcacttcacctgcaaatcaaagtatcattgatggatgtattttataaaccatcaaattccagtaacaatgcactacttgacacataacactgatcatgcactaccaaatagctcattacagaacaattatgcttagaagaatttcacagagaactagagactaaagcgtgtagtgaagccaagtaaagtgggactgttaatacctcatcaggccctgctgtaaagaagtatatgaggttaattgctgaaaatccagttttgatgatcctcggaagagcactgtcaaagcagcaatggccataagattcaatttaacagattcataaagaaaaatcatcttcaggagcaactattcattcgcaaggtgctgttcttttattcctaacctttgcagtttgttctcctcacaatactttgctgcttcatctggggccatatcagcgagactcctttcaaacacaccactgaaaggaatcatagtatcaccaccgtgttcttgaaccctacataatgatgaaacagatatttttagtttaggagaagtataataaggtaagtaaatgtgtaagcacgtagccatattagaaacttttgcaacaaccaaggggcaaaatgttttacttattattcaacatagtttgtgaaaggatatatattagtaccaggcatgaatctttggcaagaacttgtttttcttcctctgatagtctctctcattcaggttaatctgtaatttaaatttcagagtaaccagtgatcacaaaaagtccaaccaagatgccttaatagttcttacactgagatgaaacacatagttgaaacaaacatgaaagcatagagatcagaaatagctaaagaacacactatg

SEQ ID NO: 26046 - DNA, 1139 bp, Arabidopsis thaliana landsberg
  unsure (1)..(1139): unsure at all n locations
gacattcaaaaagctatatgcatgtatatatgtatatatttacaacagaacgttatttgttaattaatacagtatttgcaggtggatctatcaatttattttacatgggccaaaaatttaaatagagattactttaccatctttcaaattcaatcaagaaatggaaaacggaataaaatatgttgaataaaattaaatgattatatgctaagaaggaaatatgaattgacgtgtgaaatgaaaaaggaaacaagataattctaaatggcaaataacattcagttttgagaagtgaatatgttaatggggaagaaattattttttaaaaggggcgatttattaatttcttagaaatctataaggaaattagaaaatttatgggtggcaagaaagtagatccgcccatgtgcatggatgtgagatcattttcttgtaatatgtattttgtttgatatttgtcctttaaaatatctcagattttgtaattttgatttttaatttctgtataaaattttgcctgaattcgctctttctgtttccttttcaacatattttgtttttttcattttgtttacggttacgtgtatcatttttcatatatgtcggtgtgtctcagttctcatcatctccataacaaaaagaaaaattgtaatcttagtttctcactcggttaaccataatatctagtaacatggatctgcatcttataggttttctcttgtggttttttgttgtacaagtgactacaagcagtggtacatacatcaacttgtttaagaattaaatttgattacaaaaacaaaccaaagattttttttttaatcacgttctaaaatattttgtttctttttggaattaagctcataggaacatancaacaccaataccagcactaatagtatttggagactcaatcatggatacaggagatataatgacatccccactctgttaagtccaattttcctccctatggtcgagattttcctggtgctattcctaccggtagattttcagacgggaaagttccatcggacatcattggtaactatcaaaactttttcaaattttacttttctagttgcttagtctatcttgtagtccttatttcattttaaaaacattacagcggaatccgt

SEQ ID NO: 26047 - DNA, 738 bp, Arabidopsis thaliana landsberg
atctttcggtttagctattatagtttccagtaactttattttttgatattacctatatatacaagtatttcgtttcttctcttataacttgaagttgtcatctctttcatttttatgcaggagccgatctcatagccaacaaactttgtgaattaaaagaagttatgtggtgagtaaaacaggtgagaccaattacattgacaatgttgtctttcccttgacagcgtgatatcccaaccattgcatgtatgcgcccactcatgtacacatgcatatattcatttttgcatacatagatacatacatagatacattcatacattcatacatatattcatacatacattcatacatacattcatacattcattcatacattcattcatacatacattcattcatacattcatacatacatacatacatacatacatacatacatacatacatacatacatacatacatacatacatacatacatacatacatacatacatacatacatacatacataaagaatataaaatgtcacaactcagggaagagtggaagaggaaacctcttgtgctgaatttatgccacaacaattctacagatagggaagaatcccaggaaggcgctacataatacgactgaagtcacacaacacagtcctgtatatccaaaaagacttgctctgagaaacaaatctttaaatgatttcatcaccatgtgaacagcacagtgttgtgcagata

SEQ ID NO: 26048 - DNA, 1029 bp, Arabidopsis thaliana landsberg
ggctctaccaacttatacaatggcatgcttccttctgcccaaaacagtatgtaagcaaataatctctgttctagctgatttctggtggagaaataaacaagaggcgaaaggtatgcattggaaagcgtgggatcatttgagtcgtcctaaagcggaaggaggcattggatttaaagatatagaggcttttaatttagccttgcttggaaagcaaatgtggcggatgctttctcgaccagaatcgttaatggcaaaggtattcaagagtaggtactttcataaatctgaccctttgaatgcaccattaggatcaaggccatcttttgtttggaaaagcattcatgcatctcaagaaattctaaggcagggtgccagagctgttgtcgggaatggagaggatattatcatttggaggcataaatggctagattccaaacgagcgagtgcagccttacgaatgcagagagttccccctcaagaatatgcttcggtatcctctatcttaaaggtgtcagatttaatagatgagagtggtagagagtggaggaaagacgtgattgagatgttattcccggaggtggaacgcaaattaataggggaacttcggccagggggaagaagaattttggatagttacacttgggactacacaagctctggagactacacggtgaaatctggatattgggtgttaactcaaatcatcaataagaggagtagtccacaagaagtatctgaaccgagtctaaaccccatttaccaaaaaatttggaagagccaaacaagcccgaagatacaacactttctgtggaaatgcttaagtaattccctccctgtggctggtgccttagcgtatcgacatctatctaaggagtcagcctgcataagatgtccatcatgtaaagaaacggtgaatcacttgttatttaagtgtacttttgctagattaacgtcggctatctcttctataccaattcaactgggaaaggaatgggctgattccatttacgtcaatctgtatggggtttt

SEQ ID NO: 26049 - DNA, 1301 bp, Arabidopsis thaliana landsberg
taccaaaatacgattaatttaatgactgttattttctctttctttttggcagtatttaaccaaaaatggcatctacgggcaagcatgtggactaaacaatgagcatgatgtcatggggccatgacgactacatgtacatggaatttacactcaaggatgtggattaaacaatatagttaagcaaagttcattttgacttgatcttcatcacgtcaacatgaactttgattttactgtataacttgtatttactgtaataacaacaatatataacaattagaggttgtagatattatgatcaattacttaatcatgtcttgatcctaataactacggtctctgaattgctgtatattattattattacagcaagtacgacttgtacagtaagagcaaagttcacgttgatgtggagaaagtcaagccttactacatgtctcttatcaagaaagtgagtatatattgcatgctcattacaaaaaacaatgaaaagtgtattaatattgaaaacattcatatatttctaaattcttcagctgactataaattctttcttctctttttcgattttgcagtatttcccggaaaacttgaggtggtgaattcggtggagaaaaaaagtgcccatggaggattagtcgttttatttacttacaaatatttttacacattttcgagttaatgtgaatctattgtaattgtgttatatatatcttatgttaatcatattcaggctgtctctgaaatgtaatcacaatcaaccctcgtgaatgctaaagagtttgtacgtcgggtgatataagatcttaaataatgaagtttatttataataatctaagcctccaaggtataaaaattgtgcattgtaatgtaaacaaagttttattaacgtaactctaagtgtacaatagtacattagtactgataaatccatgcgaacaatgtcatgacctttaatgcccatactcagatagagatgttcaaattgatcacggtatctttgcatcttcgcttctgttaggtcatggacagaagagaattacgtaccaaacaggtgtaattcgtaagatacgtaatcacatatttctatatgacgatgataatgatctagtataactgtcatttcgtatgaaattatctacaaaatttatgttgatcacatggttaaaactttgaaggattcaccatgttatagttgaaagcaagaacttgaatatttgcattttgatttcagcaaaagacatatttttaacgtcttaaatagcaaataatcaatcatcacattgacatgatcatgcatt

SEQ ID NO: 26050 - DNA, 624 bp, Arabidopsis thaliana landsberg
ataacactgatttaataaagtggagagtgttttgttttttatttttgaagtgttgttgtgaatttctggtctggttgtttcttgtaacatatgattgattacgttttgatttattttggaatttgtgtaaaggcaaagctggttggtatttacaatggcttacattgagaagttacagagacttttattaatccagttttgaaattacaacatttttggaaacactctcttaaaatgcaaaaccaagaatgaggattctaaacttcgaagtagaaaacatatatttagttatagagtaaaaagaaaaacacatcattggtttcagctatggttatcactcactcatgtgagcaaaaagagtaccataagattccattgaggtctttaccaacctctcatgcgttcccttctcagcaataacaccgttttgcacaaccgcaatggtcctgagccgatgagtctataatttcattagaggctcatcggctcagcactatcacggttttgcaaaacagcgttattgcagagaagggaacgatgaaaggttggtagaagaccttgaagaaaatatcatgctactctttgtgctcacatgagtgagtgagaatgatagttgtatcgtac

SEQ ID NO: 26051 - DNA, 2300 bp, Arabidopsis thaliana landsberg
cttaaattgatatttatattcttttatgatatttatataataaatcactgagactgaagaataagtaaggaactctatcatcaaatgcttaggtttctagaatccaacactaccttctcttaaattggtttaagacaaacgttgtttatgaattatatgtatgatgcattattgaaaatgttgttagaaaaaaatatttttaatagtaaaagtaattgcttattgcacgagtgaatgattaaataaataaaaattaaatttaaattaaataatacaaaaaaatccgaaaaaaccgcggcgtagcgcgggtgaacatctagtaaacataataattagagagagccgcatttttggatcaaacgcccacacgaagacgtgcctacaattaactcttatcatcgatcactaaattctaaactagatcatggcgacctgttacaacattattattcctttcaatttttatacgaaggtaagagagaaagaggacctccattaatttttaccttgacatcgtcaaatttttataattccgtaatggcatccatttctcatctttctccagctatcattttttttttgcagtgattagaaaaatctttgttgatttgggagtttaatttcagattttaattagttgtttccagttgcagatcagaaaaataatattagtgatttattattcaattgacttgtttaatcaattgtgaataaactctctgctttgccttctatgagtgattccctaaaacagagagatttctgggttttagggatttgagtgttgtttctgttatacagaaacaaattcaaacaaggcaaaaaaatgtcggactcgccaacttcttctccaccagcaccatccgctgattcccgtccgccgccggatacctcatccgacggatctgctgctcctccacctacggattcagcaccacctcctagtccaccggctgattcatctccgcctccagctcttccatctcttccgccagctgtcttttctcctccgccaactgtctcatcccctcctcctccgccgcttgattcatctcctcctccgccgcctgatttaaccccgccgccaagttctccccctcccccagatgctccgccgccgattcccatcgtgttccctccaccgatagactcaccgccgcccgagtccaccaactcccctccacctccagaggtgtttgaaccaccaccgcctccggccgatgaagacgaaagccctcctgctcctccacctccggaacaattacctcctccagcgtcttcaccgcaaggaggacccaaaaaaccaaaaaaacaccatccaggaccagccacatctcctcctgctccttcagcaccagccacatctcctcctgctcctccaaacgcgccgccacgtaacagttcccacgcactaccacctaagtctaccgctgcaggtggacctctcacctcgccatctcgcggagtccccagcagcggaaactctgtcccgccacctgcaaatagcggtggcggctatcaagggaagactatggccggttttgcaatagccggtttcgcagtcatcgccttgatggccgttgtgttcttagtcagaagaaagaagaagagaaacattgatgcctacagtgactcacaatacttgcctccttcaaacttctccatcaaatcaggttaaaatcttgatccattctctcatcttcaagaagatgcacaaatgtttaaacatatttctttcgctttaacgtgtagatggattcttatacggtcaaaatcctacaaagggatactctggtcctggtggttacaattcacaacaacaatcaaattccggaaacagcttcggcagccaacgaggaggaggaggttatacacggtcagggagcgcacctgattcagcagtgatgggaagtggtcaaacacatttcacatatgaagagctaacggacataacagaaggattttctaagcataacatacttggagaaggaggttttggttgtgtgtataaaggtaaattaaatgatggaaaacttgttgctgttaagcagcttaaggttggtagcggacaaggtgaccgtgagtttaaggcggaggttgagattattagccgtgttcatcatcgccatttggtttctcttgttggatactgcattgcggattcagagagattgcttatctatgaatatgttcctaaccaaacattggaacatcatttgcatggtgaggttcttttttaccacttttctcatcagacaagattttattgtgtgtttttttttacttacatgggttatttc

SEQ ID NO: 26052 - DNA, 2301 bp, Arabidopsis thaliana landsberg
  unsure (1)..(2301): unsure at all n locations
tctgcaacaaatgtgattgtccggggatcggccagtgccaatttgaggtgctccaaaaaccaaacccagttatcttctgtctcagcatccacaactgcaaaagctactggaaatattccatcttcggcatcaggagctgtagcaacaagcataaccccttggtacttagagtttaagtcggcggtgtcaaggaaaaggagaggacgacaaccttgtctaaacccagatattgatgcatagaacgatatgaaaagccgatggaaactcgaatcttcttttgtcatgaaaatggcaatacttccaggatttgtctccctgatcttctcgcagaaagaaggaagttgactatatgcctttttataagaaccttgaagctgctctcgggcaatctcttttgccctccatgcctgtgagtaattcagttgaatcccatactctttctttatgtcctcagcgatatccttgggcttgtagtctgggaaggctttcaacttctctttcaagatggttcttacccatcctctagttgcacggtaaccaggtttgatgacagctctctcacaagtgtgcctcgggttcattttcttgatacatattaactgagtcgttgatagcctcgatgcagtgatacgccatggacaaccttgagctttgcatttgacagacactcgatggctgtcatttttcttgtatttgtaagcaaacccatgggcgactgaatacttgtgtaatgcatctcggaattcaagaaaggtattaaaccgttgatcaacacccgtgatgacgttttcccactgctgtattgctgtgtgatgcctctgatcaaccaaaacaaaattgcacggcaacggactatcatctggcatcgccatttcaatttgaaaatcatttgccatatcctcctcgacaccatctcctacagcacaaatagcaggtaccaccccttctgatgccgttgtcctacttgacctgtagtagcaattcacagattagttactttctttaacctgattcacagatgacatgaattattatgagtaagaagaaactgacactgcacttcattacattattgcaatagttttggcgattaaatggcagacctcatagccgcaaacaacttgaaaataaccacgtacaattcttaccatgaccagctcaataaaccaacacaagttctaacattggactctatagaccaaggaaataaaaatgtgtgaaagaactagaacaaagcaaaagaaacatctacctactagctggcatgacggagagatttttggcagcagcttcctcgggaataacgaagatctcgacagtccctgcatctgaagaaaagttgaccattcgtatgaaatctttgtccttagagatggtaataagggtcttcttgtttccagggagaaagtacttaagggtcattgcctccaaaccaaacccaaaattttcagccagctcagacttgaaatcagtcattgaagtattctgatcaatgtcaattgcaaaagcatcgccgccagaatacgacaaagatccatctttgatagtaacaaactcccctcctgactgacatatagctatgactttgttggtggtcatgaccaaacaatacctataaaaccaaatcaggctctatatcacacctcaatgtacacaattttatcaaaatcagccaacgccatggccactgtacgaaatttaaaaacttctattaagttatgaaccctaatttccaaaaaagaatctgaaattgaatactagatcacaattctgacatcaaaaatgaggatcggaagggggaaacaaaccctactatcgaactgaaccaggttaaatctagggtcagaaagaagacattggagtaccgnnnnnnnnnnnnnnnnnnnnnnnnnnnnncaagaattgggaatctcttcgatggaaaaatataaaattgccgagctttttttcttctgcagaccgagagagagagaggagatggtgagagtttgaaacttccacgtacggcctcagagagaaaagggtgatatcaaaacgatgcgtttagaaagaacctaagaattagagtagcattaaaccaaatcaatctaataaccaatggtccggtctgaccaatttaccgctccctaactaaccgtatacgcaccgttttaaagtctttccctaatcagaatcttgagattacacagagagacagggcagcaaacaaagaagaagaagaagaagaagaagaagaggatgagttgcgttacaccagcacttcctccttcactctttactaatgggtatctttgatctcct

SEQ ID NO: 26053 - DNA, 1414 bp, Arabidopsis thaliana landsberg
atttgtcaaaatgagttaattaaaatatagctaatttttttttaaagaaagagttgtgatgacagttcttacaaaaatagagattcatttggtaaaaattggatagaagatattttattagcatttccccttttgtttttcgttcaagtgaaggtttcaacaaaattaaagagaagatctcttaatcacaacaattaaagtaaagtttaaagactaaaaacaaagcctaaataaataccagtttggtggtattaaactagcacgtgtcaaaaactaattggtagacaaaaaaaaaaagtctcacgtgtaacgcgaaagcctttctaaaaaaatttcttcagcatttaccaaactaaagcgcgcctctcgctttcttccttcaacctcttctttgctcatctctctctctctacaagaccaaacttatcttttttttttctcttctctctgtctttttacacacagagctctgttttcaaagctctgttctgtttcttcgtgtaatctctgtttcttcaatctgttttttttcttctaattttgaattctcgtacagacgcaacggttatattgttgtttagcctctttgttcttcgaatccaatgtcttcgttgttttgtgtaaccatggattctcatctctagatgatttcgatttcgattccaatggtgagattctgtctctatttcgcgttcgtcatcctcgtatctgcaaatccgaaattaatcaattcgtgggatgagactgcgattagattcgaaccactgtcaccttctccggcgccggagccttccccggatgatgatgattcgtcggtttcatgtgtagatgacctaggaggtgttggctctttagattccacgtgtaagctcgtcgctgatttgaatctcacacgtgacctaaacatcaccggtaaaggtaatctccacattttgcctggtgttagattggtttgccagtttccgggatgttcgattagtgtcaatatctccggcaatttctcattggctgagaattcttcggttatcgccgggactttccgtctcgcggcggaaaacgctgaatttggggtaagctcggccgttgataccactggattggctggagaacctcctccggatactagccctatcgccggagggagtggaaggtgccggtggaggataccgtggaagatgttcatgttgtttgtcggatactactactaagattccggaatatgtgttcggtggtgatgtttatggttggtcgcttttggagaatccggagatttatggcgagaggacgtggtcctacgagtaatgacgttgattaccgcggaggtggcggcggaaccgtggcgatcgacatattagggcatgtgagtgaaaacggcatcgctttaaccgttggcgcctatggtggcgtaaaaggt

SEQ ID NO: 26054 - DNA, 914 bp, Arabidopsis thaliana landsberg
ggaaatgctcatcttggaactctgaaattatgtttatgtatatatatgatgcactaactaataatcagttaattaacaacttttcaattattttttgcttaaaaataatctgaatccgttgccgcatataattagagtataagcctagctatgcatgtatcataattacttattttgtgcaatgttatagaatattcatctaagttttggcttgtgggctcattcatttgcttataaatactgtcccctacttctttatatgttcttcctaactaataaatatatagttgatgattatacatcctactacgccctaataacgacaatcaaaaatatcatgtgaatatatggactcaaacttgagtttgaaggaacgctaatagaagtaatcgctaaataaactttttttttgtatatatattaattaacgatctcttacctcatatgagtttttagtttttgatatattatacactattattttacaaggtataaacttcttcatgtttattttctcagatctctgaagactttgggacatataatttgcggatatatttattttattttattttaagagcaataaggaattttcggaagaggtgaaggaggaatttatatgctgatgatgatgttgctggggatatgaggagtttgatagtgaaggggcacattgatatgacagtgtctccaaatcaaaagccctaactcctatgcaataaacacatatgtttgggttttagggtttcactttttaactctctaaggtagacaaatcataaccttatcaactatctaaggtagacacatcaatgaaaccactcctctctctcatcaactatcgcctttctcttgttcgccctaatttcagccgcttcttgccgttttcttcgtcggagaccagtggccggtgg

SEQ ID NO: 26055 - DNA, 3707 bp, Arabidopsis thaliana landsberg
gaaagatgaagatttcatcgggagagaagagtggacagctaagctcgaaagggtagttggagaaagagagacacaacaagttgcgacctttttcactttttttttctatcttctcgccgtcggattaaaccacctgctctgccctggtggtaagttacaatatgttttgcttcaagatgggattttttccggtctttttttaaaaaagttttcttacctataattggtatgtgtaagaaatttcgagaaatgtatatatattttcataagtttatagaattattaatttatgttattaatggactatatgtttctataaaacttttaaaacaataatgtcaatttcttataccggtcccaaaatataaccaaatttttttattaatttataaagattattattgtatatatgtttcttttttctaaatcattcaagggggtttattggtttagaaaacgaaagtaaaatcataaactagttttagataattggtttccaaaacatcatcaatttagataattagtctttggttaattagtgtgctaactcttttcttcatcatgttttttctactttgtttatcggatttttctgattctattgtgttatatagcaagatgtgttacatttgtgactggagattaaaattgataaatgagtttaggcttaaagactatctatgttatgaacactcaatggaagtggacttcttaaggtttgtttctgttggttgatgtaattgtttacatttccactgtttgctttactatgttaattttcctcggtgtttcagggaggaagctcagatcaactctacgagtctgtacattcacaggcaagtgttttacattccataggcaagtggttcatattttcaaggactctgtttaaacgcttttgttttttcttttaccagatattttcattgccaaaggacacattgatctatccagctcacgactacaaaggtttcgaggtaatgcaaaacgcaaattcatttacattggcttgtttaatggaaaatatgactcatccacgcaatggtttttacatcgtttctgttaaaattcaggtaagtacagttggagaagagatgcaacacaacccgcgtctaactaaagataaagaaacattcaaaaccattatgtcaagtaagtttcttctacttagtatgatgctaaagtattcatcatctcataaatgaccgccgtttttgctcttgacagatctgaatctgtcgtatccgaagatgattgatgttgcagtaccagcaaatatggtctgtgggttacaagatgtgccttctcaagccaactaaaaaaaactcttacatataatgtttgtctttttatcgatgtcattctatatttaccaaagccaataaaaactcttgagagtaatttctacaataagatttgcttccgttgtagataagttcattagaaaattgtgtaaattagattgaacatgtggaatttgttatgaagatgaagacagtatttgcgtgttcgacttttgtttggtttgttgattgatgtgtcaactacttttcaattaacataaatctacatgagctttttcaaccaccattcgtttatgttctgctgctacgtgtcgaaattgctaaaaccttttaatcttagtgatcaaacaatgactcagcgtgagagagagacaatcttcctatctttttcttagtgggaaacttgaaaattcgaccatctcctcaactaatgtcaaatatctaaaggaaaacaaacatgagtaactaatttactttctgaaaagtatattcacactgtaggttgaaaacaaatggttgaatattatctttgtgtgacaacacaacttactatctatacttctcacactctataaactttgattcattttcatgtttctctttacatctttctgttttccccccaaatttctccttcttgtaccaaaaatctccacttctaggagatgctccacacacacacaactaaggtctcataacttcatatttccctgggtgttgagaaggagaaggccaaaactaggggtagacactgttttatacatggtcattgggccttgtttatagtatgtggctttcagtctctcaatctttgctccatttctacaccagtcttgatctcaatggtgaattcggtgtttgagtcctgaaactagatggttccatcattgcgtctttcttcatcctgaaagggcttgcagcaaactctgctaggttgtacccactgtcttgcccaggaaatgcgtaagacgggtgaggaggtgacaggaaacaacttttgtatgctggcccaagttggcgtaaagggcttgaacatggagatactggtaaggatgtgatagctcttacgttttctctgctgcaagaaccaaatacgaaattagttgacacttgacacgaccaagtatcaaatagattgagctacaacacttttacctcgggctctttatagttctagacaatggctgttttgcataattatcatggctcagtctccctggatagggttcccttgtaggctgctaaagaagaaagtcaagtttaacttgatggtaggaaatcaaattgacccagcccccaacatatgcattatacacataccagtgagaagtttccatcataggaacgtggggggaagtctttgggcaaactagtactagccactcttgttgtgttacgtagaaaagggtgttctagaagctgagaagctgtaggacgtactgtcggatttcgttgcagacaaagccttataaaattctttgcatcatttgaaaggtgatcaggtatttccggggtgtctttactgtttccgattttgaaaatcgcagcaacctgatacaaataatggcacaagataacttaggaattagaaaaaattcagactattaagaagaagagtacacaaaagattatgtccagtcgtcagtatcctataccccttcaaactggctccaaggtggctttgatgttgccatttccagaatagtacaacccaaactccagatatcgactgcatgagtgtagccattttggctcatcacaacctggaaaagaacggaagcatgatgtgattttctatcagctgcaacaacataatggccttccactgcacaacttgccagagaaaagttataaaaaaaaaaggtagaatagtagaactacctcgggtgccatccagtaaggactccctttaaaagaaagcatagtagaaaaggctgttacctgttgccgaaaaaattggctattagagcttatgcatgcaaaagtttcaggaactatatgataataaggcgataaaacaattgatatcttctgttgcccattgatgacattctagagatcatttttatgaagtacatagatatacttacatgtttggccatcccaaagtctgccaacttgatttcaccattcggatccactaatatatttgctcctttgatgtccctgttagaacaaaataactctttattaaatgtccaagaagagacaaattgaattccattcaacctttaagatgtcattttgaatacctatgtactgtatttcgtccatgtaaataggcaagcccagcaagaatctgccgcgtgtagttttggataacgggttcagtgaaagaaccataaaccttaagtagtttatggattgaaccacctgacacgtactccaagtagacggacaagg

SEQ ID NO: 26056 - DNA, 686 bp, Arabidopsis thaliana landsberg
  unsure (1)..(686): unsure at all n locations
ataatgacttatattacgagtcatgttgataattctttgattttaagggatccctagaaaaatgtttgcgctgtagattgatgtaatgttcacaattcttacgatatgatatgtttttagtgtaaatggtttttcaatgaaaatgattcatgattggttatattgttgaaggtggtggttgatttcacggcttcttggtgtggaccatgtcgtttcatcgctccattctttgctgatttggctaagaaacttcctaacgtgcttttcctcaaggttgatactgatgaattgaaggtacattcaccaacatttttcccttcttcttgagagatattgttttcttcgatcacaatctcttttatggttttgttggaacagtcnnnnnnnnnnnnnnnnnnnnnnnnnnnnnnnnnnnnnnnnatgtttttgaaggaagggaagattttggacaaagttgttggggccaagaaagatgagcttcagtctaccattgccaaacacttggcttaagctttccactcttatatatctcttaagatgttggattaattgttctattactcttgacatgttataacttgttcccctttgttatcgttccggcctataatctcatctgactatttgaagctgaaaaatgctttgcttatccagtaaatcaattactttgtgacttcaaagtatat

SEQ ID NO: 26057 - DNA, 708 bp, Arabidopsis thaliana landsberg
taggttgtgatcatcaaacatgatgtagtggtttatttttgttttatctccaaaagaaagtagtcttacttttatcgttctcacttttttctagtttgatcacatttcttcgaagctttgttaaatattcaacacacttatgtgaatctgacatgtaaagaaattttcataacaaagctttctaccaagtgaccactaaagcattgttaagagaaaggggtcaccaatgatcaaacaatagagagaaagtacttagatcaaagaaaatgtagaacataaaatccaacactaaattgagagagttcaaataaaaagacaaaataactaagagaacacttagtcgacttcctcgatcttgggaccagcaccacctgatgcaggaggagcttcatcctcgtccattccagaagctccaggaccaccagcttcaccaccagctcctccttggtacatcttagcgatgatcggattgcaaacactctccaactccttcatcttgtcttcaaactcgtcagcttcacccaattggttaccatctagccattggattgcttcctcaatagagtcctcacccttcttcttgtctgcagctggaagcttctcaccgatcttctcatcccacatggtgttcctcctgttgtcagcgtagaaacattattgcgttcttggcctggaccttcttcttgtgctcctcatcctcagacttgt

SEQ ID NO: 26058 - DNA, 5456 bp, Arabidopsis thaliana landsberg
  unsure (1)..(5456): unsure at all n locations
aaatacactaaatctctagggtaggatttattggttgtcattttcgatttaatgattcgttatactttcgagtggaataggagttatatttctcattgtttataatgtcctttcagattatcaacccgacaaagaatatatgattagattatcaaattggtgcatatggccgtaaatttattaatatgttattgattagactatatatagttcattcaaaaaggagagattctcgcatgtctcagtgactcgctaggttcatcagttttattaactctagtaagaattttttccatgtatattaggtctctctggtctatacatctatatacattggtttacacgtacatcggtacatatacatacacaaatgagacattgtacgtttagtatacagaaatgattagcatatcattcgataaattcccaccgtttatatgtgtgggtgtgtgtgcgcgacatagacatataagtatattatataagcagcattgatgtatgtttgtatcatgattaggtccacaaaagtgtcaataccatcattaatgtcaatataaatggtaacacgtccccaccatataatgcctacaaatctacattaggttgcacatacataacaatttgcgtatatgtgtgagttcttgtcgattcatttaattattcttctataaactatttccaatagatggtagtgatatatgatatcatgtcaacattattggtaattttctttacaaaaaatgattaaagaaaacacacaaactgctaactttagtataaaatcatcacccaaactcttctttaacaaacgtaatcattttcttaagaagattagaaacactaatcataccatttactttttctttttggcaacataatcatatgattttctaaaattatattttgaagactttttttgggtgtttggcctctagtcatttatatttctttctcttttgagtttgtatttataatcatgagaaaaaagtccaaccaactttgaaatagtgagaaagctacttggacgtctgttttaactccacgtgtcaagcttagaacatttaaaggttttgcttacaatttttatttatttgatccaaccaacaccaacccatctcagatattttcgccaatcataatcagagatcaaattataacggtgaagctatttttaacttgtatattaaatagtaaaatatacatgttacacatccggatccgnnnnnnnnnnnnnnnnnnnnnnnnnnnnnnnnnnnnnnnnnnnnnnnnnnnnnnnnnnnnnnnnnntcccccgaactatacacccggtttcttttttcggtatgacatacctatgtctccactgcacgacgtcgttcagcgatataacactaaacaacgagacatctgagctaatttagtgaaaccacacgcagtttttctttgcaagccttaaactttttctttctttctttctgatactgatactgatagtattgagagactgactaaaaagaagaactagaattacaaagataaagtaactgaaggagaaaatctattaatcagcaggctcttcaggcttcacaaagaactctatataagcaatccgactcggtggctgataccctgcggattccacttgtggagctaaagctttagaaactgaaaccaagtgctgaactttcaacattcctcctcttcctattgttagtttgcttcccctgttttctctcactacgtttcccggtatgtttgccgttgttgctttcaaaaacttgtatttgtacctacaatcaacaatgagaagtttagcaaatgtatctggctactattcttgattggtaaatcaagcgtaggagcgtgtgttttaaccataaagctacggtagagaaagaattgagttcattgttacccgtaagagacttcggtatcacaatgaaaggcaaggagaagatctgtgttggcataatacatgaagtctatctgcaaagaggatagatcgaaatatgttccttgattctttcacattaagataatatacatcaccaagaaacaagtgagaaacaagacctgcaagtctccatgtccttctcctctaaagattacacaagggggttccttttgaagactgatctgtacacttgaaccaggccattcaagatcatctattgcttccttcaacgccgctgactgatagatacattatcaattaccatttgagaaaaagctcagactaacaatgttaaacgaaaaacgatactaaactatgttactacctttactgtaaaagtaagtggcgcgattcccgcctgctcaaagttgtagtcccaagtaacagtttcgggaattctagttcttatctcagagtagatgcaagagtttaaggtatcaacagatctaatcaaacactcacaccaatcagctaattactcgtaatccgtatattcacaaagcaaaggatcatagtacacatacttgagaagaagctccatatcaggtcctggatacttgatttctatagtattagaatgtccaggtgatgaaaatgtgttcaagcaatcaacaagaagccctaagctgattccgaatctcggcctaccttgagctccatactcgtatttcgtgaatagctactcatataacacatcaaacagatttcggattcaatcgaattttaggggtttagaaaatttaagataaactcagaaatcgatacctcgcgttgaagataaactttggcttgaagacaacctgattcttcaacaatcaaaactattccgtgttcagataattctactaaagcatcctggaaacggagaagttttcagaaaatcaaagaagaaccctagattgaatttggggaggatggagataaaaacctggtggcgtttccatcggacgcaagtgagtgcatcgaccattccttgaacattatcgagctggcaaatcaggtccggtgtgtctggttcaatcgccggccacgagcacgaactcatttctctctctctcactcacaaaccttcctctgctttcccgccagaaaatatatgccgacaaaatagcaattaaattgattattattatatttgttttagcaggcccagttattaataaagttgatctttttggcccacacacaaactaaaaagaaaaataaaagcccatctttatgatatcgcgtttatatctgagtcacagagaaataaaagggtatgtttgtaaatttcaaatacttctctttctttatccgtacgaaaatggacggtgttaccggcggaggaacgaatatcggcgaggctgtgacggcgccaccaccgcggaatccgcatccagcgactttacttaatgcgaactctttaccgccccctttccttagcaagacgtatgacatggtggaagatccggcgacggacgcgattgtctcatggagtccgacgaacaatagcttcattgtttgggatccaccggagttttctcgtgatcttctacctaaatacttcaaacacaacaatttctccagctttgttcgccagttaaacacctatgtaagtataaattctctcgcgccctaatttctccaccattgatttctctaattgtactgtgtatagattatgatttcgttgaataatcttagtgcttgatgtgtttgataagatttatatgattcatgtgccaattttgatgaacagggttttaggaaagtggatccagatcgatgggaatttgctaatgaaggtttcttaagaggtcaaaaacatctattgaagaagataagccggagaaaatctgttcagggacatggtagtagtagtagtaatccacaatctcagcaattatctcagggtcaaggttcaatggctgcattatcttcatgtgttgaggttgggaaatttgggttagaggaagaagttgaacagcttaaaagagacaaaaacgtgttgatgcaggaactcgttaagttacgccagcagcaacaaacaacagataataaacttcaggttatggttaaacatcttcaggttatggagcagaggcaacaacagattatgtctttccttgctaaagctgtacagaatcctactttcctctctcagtttatacagaagcagactgatagtaatatgcatgtaaccgaggccaataagaagcggagactcagagaggatagtactgctgctactgagagtaatagtcatagccatagcttggatgcatcagatggacagatagttaagtatcagccacttagaaacgattcaatgatgtggaacatgatgaaaacagatgataagtatccgtttcttgacgggttctcatctccaaaccaggtatcaggagtcactcttcaagaggtactacccacaacttcaggacagtcacaggcatatgcatctgtaccatcaggacagcctttatcatacttaccctctacttcaacttctctcccggataccataatgccagagacttcccagataccacaattgacacgagagagtatcaacgacttccctacagaaaactacatggatacagagaagaatgttccagaggcattcatctctccaagcccattccttgatggtggatcagtcccgattcagcttgagggaatacccgaagaccccgagattgatgaactaatgagtaactttgaattccttgaagaatatatgccagaaagcccagtttttggagatgcaactacactagagaacaacaacaacaacaacaacaacaacgacatcaacaacaacaacaacacaaatggtagacatatggataagcttatagaagaattgggtcttctcacatcagaaacagaacactagtaaaggattatgtttagtatccattgtagagtctttctctactaacaagatcgttagtactcagtagtacggttgcatctttgtgcagaattctttccttggataatagaagagttgtatctattattaaaaagaaaatgccattttttctaatttattgtagaaagtgactactttgtccaatcatatttgtagtcctttttcgataagaaaaacagagttggaattttcccggggaagctcttttcaatggaggtccttgcgagctcttcattatccccaatttcttttactaagcctaacaaaataaaccctaatttctcaatccaggtacttttctttcgtatagttgactcctttttaagtttctctcctgcaattccccaatttgtgtccgtttagctgtgtaatagaattttcaacctttgcaggtgaaattgtgggtaaaacaacctccaaagatttcaaaagctagcaaatttagttatgctcgtagtcgtagtaacatttcaaggagcaatgcagcaaacccaggagtcgtgttcgtctgtaatagattcccgtgtgttatcgaaagaaatgatcagaggaaataatctgggaaggttatgatgaaatcttctgttaatttcagacaga

SEQ ID NO: 26059 - DNA, 1635 bp, Arabidopsis thaliana landsberg
cgcaattccacaaattccacataatccaagagatgagaagcccttggtctatccaaatggtgttatgttgataaggaatcaagatgcttcatactagcaattcgggaagccaacagagtggtcctgaatggtgcttgttcccaagtccgaagagcaaaagggcacaggaagaacagatgaaggcacgattcatcctcaccacaatgagggcaattagcaagagggttgatgtttcgaatcctcaggttttcgccaacgggaagagcgttcttcatagatttccagagaagaaatttcaattttggagggcattttaagttccaaatctccttattccaactgaactccaatggaggatctggaggttggggtccttgtttagcgagagcagctgctgcgtgatagccagtctttgtcgaataatcaccggacttagtgagtagccaagcataacgttcccgagcaccaagattactaggtctcagagaaaggatatccttttcatagctgggaaggatacttcttattttctctctatcccaagttttcaataccgggcagataaggtgatcaactgtcataccagagaaaagttcaggtgatggacccataggagttgtcggggaagaaagcgagatccatggttcattccaaaagagtgtatctgaacccgagccaatgactttatccagattagacttgataagatctctacccatacagatacttctccaaccatgtgaagagtatgaagctacagtgcagtctaagaaggaggaagatctacaatactttcccagcagaatgcgagccagcaagcaacatggtgaagtcaggatccgccagctcacctttgcaagtaaggcatcattaaaatttgtgatatccttaaacccgagtcacaccttctttcttagttttagccatttttaaccaatctatccaacacatcttctttttgtctgcagctgaatcccaccagaagcgggtgagagctgactgaattcttttgcagagcgtgtttgggagtttcccaccggacattgtgtaagtgggcattgaagatgagtttcccacaggccatggtgtaggtaggcatcgaggctagtacagacttaagcatagtagtcttgcccgcagtggacaaaaaccgagaagaccagctcaaggaacgttgccttattctgtcaataatctgattgaagagatccctcttctttctaccaaacatctcaggtaagcccaaatactttcctagacctccagttagttgtatctgaaggacttgttgagcttctgttttaacatggtcgggtgttttccttgagaaagtgattgctgactttgatatattgatcatttgactagacgcttcttcatatttcttgagaattcgcaacaaagtcttgtagcttttggggtctgaacgacagaaaaacattgtgtcatcagcaaaaaggagatgattgactcgggggctgccttttgatacacgtaatccggatagagcgccgttttgttgggatttcctgcacaacccagagaggacttcgctgctaatgatgaacatatacggtgagagtggatccccctgtctgagccatgtgcgcggaagtcactgcacctgggccgaac

SEQ ID NO: 26060 - DNA, 5864 bp, Arabidopsis thaliana landsberg
atatattcataaataggcaccaaatatgatcattcttatatagccactatgccgtatcaactaaacaatccattgattaaaagataaaatttgattttcattacataataatccattaatttcctcacgtggaacccacttggtgtacttccacgtcgtccttatatcactgacccactcatcaaatcaacgcatctttataagccccttcatcgtcacacacttctttcaaattattccatattcttcttatttccattatttcacctcaaatcattagattcttacacaacacaacaacaaactagctcccaagtctaagcttttatttcacttcaaagttgtctttggctgtctctctctatatataatgctaatgacggagagaggccgagccatgtggcgcacgtgcctagcctcagcgttccgaacagctctagcctgcacaatcgttggttcagctacactatacggtccagaatggatcaaccgccacgtggcattcccggccttctcttacgtcacggttatcctcatcatcacggatgctacactcggagacacgctacgtggctgctggttagctctttacgccacgtgtcagagcgtgggacctgcgatcgtcacgttaaagcttataagaccagctcgtctgacagccgaaaccacggctctggcggcggctctagcggcgtttgtggtagtgctgcctaacagttcgactcacttggtggctaagagaatcgcgttaggacaaatcgttcttatatatgttattggttatatcaaaggagctaagactgatccagttatgcaccctcttcaagtcgcggctagcaccgcgcttggtgttgtagcttgcgttcttgcactactcgtcccactacctcgcttggctacttgcgaggaccctttttctcatcactctcaatatatcaaattatcccaacttgaattatttacgtatatgtaacgttactctctacgtacttagtcgtagaagtacggtctttattgtttcaaacactaacttaagtgtttgtatttttgcatgtgaaaacaaaagtagctatatttagaattttcacgatttagaataatgttacatcatttgagatggtttttccattaaaagaggaatgattaggttggttaaaaatttaaagattttcgagacatagtacatatatattttttttttgataaaccattgtacatatatatacgtgttagaaatagatttgaggaacaaacatgttggtggacttggtaatacagtcacaaaacacgttgacgtgggtattaaagtgtgttgctaactttattccgtaccacattattacatataaaatcctacttatgtcagcaaccaccgaaaattttgtcttaattcttcccaatattgcgaacaaactgtgtcgcatcacagacaaaatatgattcccttttgattaattaacataatccctataagattatatacttcttctttgacagtattaaatcaacctattagcaatggcatgggattctatgataatattaagaaaaataaaatagaaaactaataatttatttttaaatatataggtgaaacaaagctgcaaagagcttggtcaaaatgtaacaacgagagtgaagttgtatatgaaggctttttgctccgatgatagcatgtcagcaacggcttcagtctcacaggctcgagtgttggctcgttcttcctccaagctttatcaaacactcaaacgttaccaagtaatatacttgattctcattattaaatacaatatctgtttacaagaaaagaatataaatgtatgtacaatacatatttctaatagtgaaatgtttatgtgtatatagccaagcatgacatgggagaggcttccatttaagatatggaggtggcaaaacgtgaatgataacaaaggagagaaactacaaagcatggaaattgctcttagaggaatggaaatggtagtagcaagcaaatctcctattccttcgagcttacttgcgggtgaagtaaaagaagatctcaagaatatacaagaacgtgtgattctctcaattaaaagagtgaataatagttcgcaaccgtcagtaacaccagaatctgatccgaaaaaccccgatgagtgcctccaaacacttcaggaaatcccgggaacgcctcaagatttgcccttttacttcttcttgttctgcatcaggctccttgaaaccatcataatagctaaaccggaggagaacaaagtcaaggtcttagaaaacaaattcaagacgaggtcttggataagtgattgggacagcaagaaaattatgccggcgctaaagctatcactctcattaggcttagcgattttgctaggttcgatgtttagtaagccaaacggttattgggctggtttacccgtagcagtcagcttcgcagcggccagagaggcgacgtttaaagtgacgaatgtgaaggcacaagggacagtgatagggacagtgtatggagtgatgggctgttttgtgtttcagaagtttttgacggttcggtttctttctttgcttccatggtttctcttctctagcttcttaagcaggagcaagatgtacgggcaagccggagggatatcagcggccataggggccgttttgattctcggaagaaagaatttcgggccaccaagcgagttcgcgatcgagagaattatcgagacttttattgggttgtcttgttcgatcatggtggagcttgtctttcagcctacaagagccgctaacatagcaaaacttgagctctctagaagcttccacgctttgtacgagtgtgcaagcttgtttggagctaaagcgagtaaagcagatataatggaaagtcaaaagaagttgagaagtcatttaaatgagctcaagaagttcacagcagaagcccatgcagagccaagtttctggttttcgcctttcaacttttcttgctacgaaaagctgttcaagtcattgtctaaaatggctgatctattgcaattcagcggttacgccataggctttcttggagaacaaggaaaaacaaaatcaccgcagtgtaaggagattctaagcaacgtagacaaagatctcaagagtctaacagaaagcataggtcttttagccaaatcattcgaggaaatcacacttctaaaatcactagacgcactcgaaaaggcgctcgccaagagcgacaacacctcatgggacattgagctcgggaagacaccgaaccctagcttctcaaccgccgtgagcgagccggagaagattttagaaacgtatctccagcattgcagaagcgtggcggatggactattccgtgtggaagaagatggagaagaagaggttgaagtggacaagagtgaggttgtgttgagtttgtgtgcattagggttttgtgtggagagaattgggaaagagacaagagagattgaggagatggttaaagaggttgtgcaatcggaaaatccttcaagccatgttaacttgcatgagatctcttgcaaaatacgttctttgtataaatgataatattttaccattgataaacaacaaatggcgtgtgaaagacgaaaacgtttgtttttttggtttatcatctctttttttttttgttcctgtaataaggctttgtggttaaccggtttatataccaataataccaataccaattatgtgaagactgaagagtctaaaaagtgcatagaaaattagtaaataataaatgttgggactctttgagtaattcgttggcctcttattcaaatgttaaaataatataacaagtttagagaaaaaaaaagtgtggctgctgggattcgagcccaggtctccacggccacaacgtggaattcttaccactaaactacagccactttgttgatgtttttccatgtattaattaataaacgttaataatcatgttgatctaagttggatatagattgtcactgagtgaaaaattcagttgagaacagactagaaaattcagctcgaaccttttataagccagagtcctcttctgcagaatatctcaactatggaattggagcgagtgaggtgaatctcatagccaatattttaaaccattccctgagataaaatcagtaaaatttgaatatatatatgtaaaaatgtgcaggtggaggttgaccttgtgacaggaaaaacagaatttataagatcagatattatctatgactgtggtaaaagccttaatcctgctattgatttaggacaggtaattagcttggttttggtccggattctggatgtgcacttaatgttctatcacaggttggttaattggcgtttctgtttgtttactttaagaagattgaagctgctgccggtggtgaagcagctttgtggccttgaaagcgtagagaagtacttagaatggaaaacatatccttaaaataacagagtcactcagagatgatatatggaagaatcaaaataatatctgttgttttttcttatgatataccacaaacaaagaaaaatcctaaatcaaggaaactgaaactgcatatagtcttaaccggaatcgaagcaactttaaagtttgcgttttaatcttggcctttttttaaatcatctgcagtaatcaattgtttgaatctctaattaactacaacaaacgcaagtcacctcaattcacatcaagggcagtaaaaaataaatatatgatatgattgttgtaacggtcactttttattatcgatataaacaatttcctttttctatattggtatgagtaatttccttttcttggaacaatttaacccaacctatctttttttttccgttggcaacctttctctctatatataacaaaagtcctctttcttcgaaaacaaaaatccaccttcttcttcttcttcttcttcttctttctttttagtctctgtttcttcttgatcaagttctattcctctcttacaaagagaactcaccgatcacgagaacgtcaaaagctcgatgatcaccatccattttcaccaccgtcagaaccgtcggaactgtaactcggtgatcacaccatcaatgatctcgccaccgtttgtctctctgttatcttgcgtttcacgatctctctagcaaatcatggcggatctcaccgagagtcccaagtattgacgcaaaccacgcgccgttgtcacgagactcaggtatgttgcttctcgcttaaattcctatttgatctcttggaaccttggatttttaatatttagtttctgcacaaaaaagatctctttgaattaggtcaatcaatatttagttttctaaccgcaatttcatcggaggaactagggtttgatcttgtagttttttttttttttcctcaaacatcagctttattaataatttgctgtagcaaagtcgcgatgtaaaaaatcagttattacaaacgggatatagttatagcaataaaactgagtgttcaaaggaagttgttgttttgccagagcatctgcagccatgtttgaaaatcgccttgtccaagtaaacttgcattcttcaaattttgatctccaagcgcttatatctcttatccaattaaaaactgcaaaatttgaagaccgaccattgacaatctctgagacttctttattgtcaccttcaaagtaaattttcctatagcccctactccaacaatgttgcatggccatgactaaagcttggagttcactttccatcggattggtagtaatagagcctatagcatgagctgcacctagaaaggttcctcgatcatcccgtaagagccaacccgctttactcggagcgttgctgtggtaagtgccgtcatagttgcatttcgtccaaccaatagg

SEQ ID NO: 26061 - DNA, 2637 bp, Arabidopsis thaliana landsberg
ttgattatgctttgatgcttttctaattttttctctgtgtgtgtgttgtgtatatttctccttgatattcttccttatgtaaacttggtgtattgcttttgtgcaggctgatatggggcatggacatcctgtcgcacaacagccctcacgtcctgcaagtcgtaatacctttgatgaaaatgttgactctaataataatctgtctccgtctgcatcacaaggcattggtgcaccatctccatacagctatgcagctgttctaggctcttctttgtctagaaatggaactccagatccacaggccattgctagggtgcctagtccctgtcttactcccattgggagtggaagaatgagttcaaatgataagaggaacacaagtaaccagagcccattcaatggtgttacctctggtctcaacgagtcttctgatcttgtgaatgctttatctggcttgaacctgtcatgcagtgttgggttagatgatcggggtcaggctgagcaagatgtcgaaaaggtcaggaactatatgtttggactgcaaggtgggcataacgaagtcaatcaacatgagttcccaaacaaatctgatcaagcccataaggcaactggctcgttgaggaattcacaattgagagggccacacggatctgcctataatggtggagttggattagctaatccttaccagcaacttgatagcccaaattattgtctcaacaattacgcattaaatccagctgtagcctctatgatggctaaccaacttgggaacaataactttgctccaatgtatgataatgtatccgctttgggattttctggaatggactctagacatcatggacgaggctttgtatcttctggtcaaaacctctctgaatcacgtaatcttggcagattcagtaatcgaatgatgggaggaggtgctggtctccagtcacatatggtagacccaatgtataatcagtatgctgattcacttgatcttctcaatgatccttccatggataggaactttatgggtggttcatcatacatggatatgcttgaactccagagggcttatcttggagctcagaaatcacagaatggtgtcccttacaaatccgggagccctaacagccatagctattatgggagtccaacatttgggtctaatatgtcatatcctggcagcccattggctcatcatggtatgccaaactctcttatgtcaccttatagccctatgagacgggatgaagttaaatatgcgatttccttctgcaacaagaaactattcgggagggttaatgggttcttggcacatggatgctagttttgatgaaggctttggatcttcaatgcttgaagagttcaaaagtaacaaaacaagaggatttgaactttctgaaatagctggccatgttgtggacttcaggtatttccttgaaagtcttttacattttctcttgtttacaatttttcccaagctaacgcgtacttggggattttcatggcatgaccgaccagttcggatcaatatggaagccgctttattcagcagaaactcgagacagcaacaattgatgagaaaaacatggtctatgaggagatcatgccacaagctcttgtcctgatgactgacgtttttggaaactatgtgattcagaaggtaatttatttagtcttcctctttggttttattttgaagttaagccatagtaagatgagtgattcctgaattttgcttatcttcctacagttctttgagcatggactcccgccacagaggagagaattggcagagaaactctttgcccatgttttgcctcttagcttacagatgtatggttgtcgtgtcatccagaaggtaaagtctagttcccacctgttttactgttctctccattctcaagaacagttaagagtttcattatttttcatatgtttacctttttaggcaattgaggtggttgatctagaccagaaaatccaaatggtcaaagaacttgatggacatgtgatgcgatgtgtacgtgatcagaatgggaaccatgtggttcaaaagtgtattgaatgtgtgcctgaagaaaacattgagtttattatttcaactttctttggccatgtggtgaccctctccactcacccatacgggtgccgtgttattcaggttcttgctactggtgattaagaaatatgacaccttttttgatcttatgcttctatgtaaaactgtttttcatctcctgttgcagagagtattggaacactgccatgaccctgatacacagagtaaggttatggaagaaatcctgtccactgttagtatgctggcccaagatcagtatggaaactatgttgttcaggtttgtaaaaagatatgagttttactccttctggtgattttttatactttgctcaaaactgatacatgttttgtggacagcatgtgctggagcatggaaagcctgatgagcgcactgtgataatcaaagaattggcggggaagattgttcagatgagccagcagaagttcgcatcaaacgttgctgagaaatgtttgacttttggaggtcctgaagaacgagaattgcttgtgaatgagatgctgggaacaactgatgaaaacgagccttttcaggtctgtca

SEQ ID NO: 26062 - DNA, 787 bp, Arabidopsis thaliana landsberg
taagaagactttgtccctgtctgacacgatgttctcgggaaatccgtgctacctttctatctccttgatgaaaacttcagcaactgtcttagagctgaatgggtgcttcaatggtataaagtgtccatacttgctgagacggtctatcaccaccagtatcaccgagtaaccattcgagaggggaagtccttctatgaaatccttctcaattgtgtccatatctgctgaggaatgggtaaggaacatagtaaacccgctagagatagtgttgaatacttattctcctgacaaatctggcacgaatgatgtacttgatcacatccttcctcattccttgccaatacacctccttagacatcctctgaaaagtttttaaaaccccttcatgccctcctatctcactgtcatgaaattgccttatcagcttctgaaccattggtgaccctcttggtatgaccagccgaccatccttgaacagaaccccttctttagtggtgtatcccgtggttttctctccttccatttcacaccttttaatcagcttaagtaactctggatcctccttagtccatatagccacttcttctcggtctatagtttgtggagcacagagaaccaactgattgacttctggtacccgtggttgtcttgacaaggcgtcaacaactctattttccacccctggtttatactctatcttgtatgttaacccaatcagctttgtagcccacctctgttgcactggtgtcaaagacttctgatccaacaaatgtttcaaactgctttg

SEQ ID NO: 26063 - DNA, 1604 bp, Arabidopsis thaliana landsberg
gttagattcatatgtggaagccatctcttagatgaagaactctcgcttgcggttgccatcttagtgttctttctcgtcactatcgatcgaattttgcagaagaaatcaaaatccttctataagaaaacaacacttcggctccaggatacgaatccctcaacatccgataattatgcaatggttcctatctattaacgggcctggcccactttaatccttctattaacgggcctgacccactttaatctgtgtatccctttcgtatgcaattgttattttcagttgccaacaaatccaagttgtccgattttggtagaaagtaagtcaactagtcaagcattttaaactcatttgatctcaattggttagcacttgtacaatagtcaggtggtgaaattatgccttattgcgtgttatccatgattatcactatcgacaatatgattcgattgtatggtccattgatctataaatgtggattctctaaaccatgattaccaaccgcatattataattcggaaacaagaaaagaagattcagaatgtacaaaaagagaatccgagtaagtcattgactcagaaacaagacttaggagcattgcttctcttaataacagcctcaggcactcttagagatggctgtcacattgaagttgagagaactaggattcttctcgattatcttctttatcactttcgctgcgtcctacgaggataatatcaaagctattcaagtatataccgggttgcatttcctggattctttcaccgttttgataactttaagcttaaagagtgaagggtttatactactttgataattcttaagcttatagagtgacgtgtttatagtacatgcaataaggtagctggagaggaattaccatgtgaaactggtcctgccctatctccatcaagttcatagagctcacttgcattatatggtaatagagtgtcacagtttagtgccaacttggaagtgagtatcatttaggtgttgatatgaattttttttaccatctacacaagctaaacaaatgaaatgcgcgtccacctagtctgaagcctgaagatgggtaaacataaaaaaaccaatgtaacatctaagtgaacaagttacagatacataagcatcaatgtgaggtgagaacttacaggtgtatcaccagctataacagctacagaatgagcatcttctatttgactgtcattctcgagaaacttggcacgctatcaaaatttccatagaaacattagacgcaaagcaaacaatcagaattgtaaattagatagatagataagatagagaaacacctccataggagtcatgttggcagtggatttgaagaatctatccaagaacgatccgtcggcttaaaaatagcaaggagaatgtaacaatcaataagaattcatatcccacgattaaagaagaagcatgaatagagtatgaaaaactcacagagtttgatttcagaggtaatattcccaatagcatgaagaagaccaatggttccacaagcattaccaacagtttgtttcataaagtaaactttatcgctatgcacctaccaaattcatcaacacagaaccaaaataagaact

SEQ ID NO: 26064 - DNA, 1529 bp, Arabidopsis thaliana landsberg
tggaaatgatttatttccaaattaaaaccgtttttgattattgagaaaaaaacattaccttgtttcggacaagtctacgaggttagctactttactcgtggactttacaggttaatgaaaagagaaagatttatataaaaagatttaattgtttatgagttatgactattaatagtcaataggaaaaaaatactaaatttttgcaaagtgcataaacagctcatactatcactaaaatttatactatttcctaacaaattttttaatggagtcaagttaaaattatgttaaataactaacgttgtttgtttgttgatgtcggatcttgcataaagttataaaaaaaaaactttacatattaaacttgaattagtcaaatggtcaacttttaaatttggttaaatggtcaaatttaacattaatttgtaattactagttttttccaaagtgtctaactagctagaattctaacacaaaaataattattttctaacaattttaaatggagtcaaatttcaaattatgtttacttgagaattatcactgtttgttggtgtgggatttacccattacattttaatctggttatttcataaagtccaacaaatcacatactaaaccttttttttttgctaggagaaatcacatactaaacttagtttagtcaaatgttcaaagtcttaaattggtcaattggtcaacactcaacactaatttgtaatttaattagtaaattaatggcttttagggaaattataaagtggagataaatatcatcatgataggccatcttgttcttggcaaaataacaaagcaccatgctatatatatatattttctctatcattattatcctgttatttacccaatttgatcaagcaatgtactagcacatactctgtggttgtatctcgtcaaaaaactaaaatttattttcaatcgcattcgattgttgtcatgatgacaaacccatagcaagtcaaattacatgtcttatcctatataatgtctttaaaaatcactccatgaacatatgtaaatgagtttagtcagaagttttttatatagtaaagtttgagcagaaggtgaagaatctagtcaaagtgataaccaaagtgtttgtgcagttaagggtctttggtttttcatttttcctacttttgaatgtttctcttctattattaccaaattttatgaaacggtttgtttatcactctcattttcttacaaaggcaaactcttaaatacttttatctgtctttctgcataaagagtctctcattattcattgtcctacagcataacaacaataacccctagaaatattgatagaaataactcgataactttaaatataattaactgatatttaattttatttaattataaaatctaaactctaattcttttttataaatctacaacggataaataattttgtttagccgataaattaaggatgatggacaaaaaggtgaacctaagtacttaactatttattattttaaaatgcaattaaaaatggttgc

SEQ ID NO: 26065 - DNA, 1532 bp, Arabidopsis thaliana landsberg
gaaacataacaattataaatcaatggggtagagttcaaattaccgattcaataacttctacttgactgtagacattttctaaattctcaacagcgacatactctccttgcgcgagtttgaagatgttctttttccggtcaattatcttcatgcttccatttggttgccactcaccaacatcacctggtgagatatacatagtaaaataaagtaaagaagaactgatatcgaaaatggtatatagcaaagcaaaatgatcaaaatgttgtggtttttagtaacctgtgtgcaaccatccatcaataagaacctcttttgtgaggtcttcacgtttgtagtaccctgaaaacaaagtttttcctcgtatgcatatttcgcctcgcggagtacttccaagagcatcataattcatttccgggacagattcaaggcgtatatcgacgtttggcacgggtggaccaacagtccctagcatgtctagttcgtctgggaacgttgcaaaagttccagcacaactctcagttagacctacaaaaaaaaaacaatcataagatcaagagattattagctaattgaatctcttccaggtctaaaggtttaccatatccttgtagaacattacaacatgcaacaactcttagaaaagattctatgtgactagcgagaggagccgctccagacagaataatcctcacattgcctccaagtccttgtttaaccttgagagaatgattatgaaaaagtgttgaagtctcaaaagagtttcagatagttatttttagagactacttaccttgctgaacacaagtttgtcaaaaagtggagaggcctccacatgagactgtcccttcttcatataaccaaatttactgagaacgttttgagtgtgttagatcatatagcttaaagattagtgacatagataagcaaagagaagtttgacttactaggaaaatgcagaatcaaatatgaacttttttaagaatccaccatcagaaagcttcttctgaagacctgtttaatataataggtcaacctaatgagacacgggtaacttgtccaagtgaataaaccatgtatatcaatgatacgaaatcgaattgataattaggaatataaataatgggaaaatgtaacaatcaccaaagaagaaagaatgaaagcttatcataagaatattctagtagaattgagaatatttttcacatttggtatatcccatcatcagctagtaatagtttcatgaaggtgtgtaacgtggtacaaatgtaaaacctcagattcagttatttggaaaaaacagatgatacgagaacataattcaatatagagggcgaattgaaaagtacttgctctacttggacatatgatatttcaaacatcttacctgagtatactctatccaggacacgaggtacagcacaaaaaatagttggtttaagctcagcaaggtcttcgatcaacaattttacatcctgaggagacaacccggagagaattataagtgaggaattcaaaactggtttaaataa

SEQ ID NO: 26066 - DNA, 4504 bp, Arabidopsis thaliana landsberg
tatttaatgatcttcttgttacagacatgatctgtcggaaaccggtgtttcaaacagaacttgactccacaatttttgcaagtaaggttattcgcaaaagtcagaatctctttgcaacgttttacaggacacgttggtttctttttcttgtttggatcacaatctccggatctttcgtgtttctcaagcaaagatttgattcctttttcatcaaaaccagttgtttcaatcgctattgaacatgtttcacagatggaaaccgttctgctcccatgatcggatttcggacagttatgtgacttgtatgatctatgctccaaacaaaacaccttcacacacaaaacttctcaatcaagaaacattcagttgtagaaaaaaattgaaagtttctgagaaaaagctcttaccaatttgcagccgtcgcaagtaaaagggagaaaatcgagtaatttgcaatcagggtcttggcaatgctctccaagatcaggaaacgcttctgttcctcctcctgccataagcttctcttcttcttcttcttcttctttttcttcttattcgtgtgttcttgatgttgttgttgttgttgttgttctatatttcttgtgttcttgattctatatatatatagaggttggggctgacttagagacgaagccagcgtccaagttggatttttcttttggttgtcatttttaagttttctttatttggattttttcctttttacacgtaacgcggttttagatgtttctaggcccatttaggcctatttgttatgaataaattcagacttttatctttatgtttcttctgtttcagaaactcgtgggctatattattactttagtccaatataaaaaacaattaacccatcttgacccgagaaccgactcgttcttttataagatcatcgaggtgtctgaaaatgttccgctatcccattagcttgcacgaaaatgttcactagctcgcccgcaatggtaacaatgaagaagttattgtatccatagatttctacgcaacaggctctattcgatatcgtgctaggccatgtgctaagagcttttgtgatattgtgctaagagcatcattaatggtagtttcttagattacccttaaaatagttcttatgaattttttatgaattaattttaaaatttctgaaacgaaaactaagaaaacttcaatttgtctcttatataagagactctcttaacaaatatatgattaaaaacattaaatttataaccaaacttttctaagaattaacctaagcaactatcaataattaatggtgctctcatacccacatagtgacatagacacaaaaaataaacaaacatattattttacagcttaaaacttacaaatcatttcgataaaacacaaaaatcaatcaaccgtttaagtccataaacgacttagctttcttgtatgcttcattcatatgtttcctaaaccgattcacatctaacctcacatcttgttcttttaaatagactttcattttagtcacattccaatccattcctctataagcaataggatctttcaaaaccaaatcatctctactatacttctctatcaaactgctttcttccacatttactcgatactccgtataatccaacttcattgctttagccggcgtttcgaaacacgttttagacacccaacctagtccaaccggaacaatttgaaccaacactgaacctggtcgaagaaacaacaactgggttaatgctgcaccatgaaccccgatcatcccgtggcttgactttataagtttatacgcttctctcaaactcgttgtttttgatggtctaaatgtgattacctcgaatccaacatcttcaagcatctctctgatctcttcctcgtttaatatcactcgaccaatgttaccatatctacggaccaatatgagacgaggcttgttaattttgataatagatagatttgggttcaaggctttgtctaggagattatggaagtctactaatgatttggagttgggtatttgggttgggtctattgtcataggcccatgtgaaattaggcccacagtggctgaagtgaagcaatgtgtaatagaaacactttctttgtctagtagtaatatgggtttgtgtttgctaaacgtacctaggatatcaatgtattttggcatccaccattcctttgcattcacaaccacgaggatgaaatcgcggtccgggtataccaagttggccgtgatgaaaagcgggatgaaaccatccattaaatcatgataaatgcttccggtgtaacctccagcactgaacacaatggccggcgaatcatgtgttatattacatgatcgtgtcaggtccaatgggcctgaagttagttttagctctctgatcctaggcatgatccacttttctgcttttcttgggtatggcctgattttctcgacaagtggtgctgatgtggtaaatgttgggtccatgagagttaaagttccggttttggggttgagaatacatgagccgttgatggagcaaagatcgtaactagtgtgggatcggtcacatgtgatttttgctgatgcagccatcacttgtgggttttgctttgttcttcttgattcccatctttgttgtaacgtacctacagaggaaacttttttcaatttttagtcaaaacgcaacgtaaatatttgtaagaaaacaataagtaactattaaaaaagttttatcaagaaatgtttttactataaaaatattcaacaaaaacaaaagttattaaatgaagaaacacttcacatgcttataagtaaattattggcaggaatttaattcccatgcaatatattaacttgtattattctatttatagatcattccggattaactatatatcagtctatcacgtaaccttttaacaaagaaaaacaaagaaaaaaaaactatcacgtaattttaaactaacaagaaacaaagtttcattagactaaaaatcattattatatacttttagttgcttcttttgatcggagcttataaagttagaattagtgcggtttcgtaatgttagcatttagattcaaatccagccaagtatgtgtgagttattgcaaaaatgttgacttgatcgttaaaacaataggtaatataaaagtaaaagtgtttgatcgtagcctacgactcaaacaagaagttaaagattttatttggttgaatcgaagaagtaatttgatatgtacataccttgagagaaacttaacgaaggaaacaattgacgatcgtagacggaggagaaagcaacatatataaccataacgatcaccaacgccaccgaataactcttcgacgtcgttttcctaaccatggtttatatgcaaatcaacctttaagaatccttcaatggaagagaaaagaaagaaaaaaattgtaagtcaattactggatgaagaacagaagaagatagaatgtaaacgagaccactgattcagtatatatgtatttttatcaagaagacttttctcttacaaaatatttttaattgtttgaaagatttttttgccaaaaaaacaaaacacttttcttaatgctgaggtatgggaatgctataatagaacaaataagtcataacatatctcaaatggagtgtacgtttacagctgtttactctctttgctagatcataaaacagtgaaagagatagtttttttaggttttaagtaagacaaacgcaaaaaaaaaaaaaaaaaaaaaaacatcttattctacagctcaaaaatcacaaatcattacaataatacataatcaatcaaccgtttatgtccataaatattttagctttcttatatgcttcattcatatgttttctaaaccgattcacatctaatctcacatcttgttcttttaaatatactttcattttactcgcattccaacccattcctctataagcaatcgggtctttcaaaaccaaatcatctctactatatttctctatcaaactgctctcttccacattcaccttatactccagatactccaacttcattgtcttagctggcgattcgtaacacggtttagacgcccaacctagcccaagcggaacaacttgaacaaatactgaaccgggtcgaagaaacaacaagtgtgttaatgccgcaccatgtacaccgaccattccgtggctagacttaataagtttatatgcttctttcaaattcgtcgttttcgatggtctaaatatgattacctcgaacccgacatcttcaagcatctctttgatctcttcctcgtttaatatcactcgaccaatgttaccatatcgactaaccaacatgagacgaggcttgtgggttttaggagtagatatgtttgtggtgaaagctttttctaaaagattgtggaagtccactaatgatttggagttgggtatttgggttgggtctattgtcatgggccaatgtgtaattaggcccacaattagctgaagtgaagcaatgtgtagtagcaacactttc

SEQ ID NO: 26067 - DNA, 853 bp, Arabidopsis thaliana landsberg
agaaatgtcggcgagagagttaaatccattcttctttgcctaaccaaaattactcttatctttttattttaacaggtgattagacatccaagagtggtccaactcctctcctctagcccttggtttaattccatggtttgggaaaagaaaccgggtaagtttctccggtttagatgcttcaatgttgaagccgtacaaaggaatccagatttggtgatcagactagaaatggattcaagacttcagaattatgaagttacacataatttaaggggatttggattcgaatgacactagttgctaagattcaataaaaaccttactaattacatctgaatcacctaagtgattttagattcaaagaaaggggaaaaaacacaaccctaagttaaaaaatgtaaagagcatatcaacaccaagacgcgacgaattttgcactttacagagatattgctagaaagaaaaagaagtcaaaaggataatgttaaaataagggattcctttgcggttttgttgattagctttgtagacttgtttgttgttgttgttggggttcttctggatgttcaggttgaggaaccgaaacacctccattcattcttgcacgtgcttctgcaaacatacgttgttgctcagctgctgcttcctcctcagtcatttgagctccagggttccatttcacgctcctctgtgtgtcctgctatagagtcacaaatgtaggaaacggttaacattaatcgttttttcgtctcctcggtatcaagagtaggagaagacagtagagaatcattaccattgtttcatacttatgttgctcatacgcagcataaacttcttcaatgtattctccaaa

SEQ ID NO: 26068 - DNA, 1135 bp, Arabidopsis thaliana landsberg
tacatatgttcgattatatttcgaactgtatatataatttctcttatttttgattttttcctgagatttaattgttgagacagatgcacgtgtaagctttagcagtgatagaaatcagtaaaacagtcagagatagttgaagaagtacaacatgcgagtgattaaaaaacgtgatgtttggtctgaaactctggatcctcccacggtccattgtcttgtctctgttctctccaaaaagtgaaaatgttcatttacaagaccatatagtatggagccttgttcaagattctgttagagcaccttcattggatggagactcattgagtatctaagaaataaactaataatatttgtttatatacatttattttaaaattaattattttaattgcttaaaaaaatatacaagtatcaaccaattaatgtattaaatgtgtaggaagtgcgttaaaaataaaataaatacaatggacatttggtagatttgaatttgacaggtctattgagagagtgaaagtgttaatcactctaccaccataaatatctctaaaatggtgcttttaaattgttttaaaatcatatgctgcctaaaaagctcatgttttacgggttttagctttgggtcggtcttgtgtgtaggtatgatctcatgagttctcatccaaaaaacagttctactctctttcattccctttaatttcactctttccattttacattttttgtaaaaagtttcctcaacctttcacttctctttgataccacctttcacttctctttgataccacctagatacatagaatctcgtatttctataatcttgtgatatacatcgtacttcaatatttcttcctccgatgattttagaatattttttcaatggtttgtttttccttctctcatagcatgtgactaatattgacaatcttctagctcgtctttgcatgaaaggttgtgggagactcttgtctcaatggttctcccatagttaacttttctatttcagttaaatgtgtttcaagtttggcttataaattttgtttgggcctgtctgtcttctcgtttcgaggtaatatatattcacaagttataaaaaaagaatgttgacgatcttacttcgtttcaaatgctttaa

SEQ ID NO: 26069 - DNA, 431 bp, Arabidopsis thaliana landsberg
caccatcggacttagcatactctcttgacaggtctgtaattgagttctctttggtcctttccttgtaagtttcttttatttcttgtgggtagtcttcttcttcaggccattctgaaacaaatttcttctttgatatagcttcaatgccgagtataggttgaatagcttccctttgcatccgactcaatttatccctaaattcttcaatagtgcaagctagcttctggatggtttcttcttggagatcagacttccttttaagttctagccaatcaactacacagagcgtactagattgagttgttgagcttgaaggtcgtgttggagctaaacttggttcctttactctttcagtctcaaatccatcttctataaccactccttggaccccaaaggtctgtccctttacgggtgatcttcttggagctttt

SEQ ID NO: 26070 - DNA, 1120 bp, Arabidopsis thaliana landsberg
aacgttgctgtgaggaagaacgatgcaggtttatgggtacttacttggagcttcgcaaacatgctcagtcagagcatccggattctcgtccttcagaaattgatccagcacggaagcttgactgggagaatttccagcagtcgtctgaaataatcgacgtgttgagcacaattcactcagaagttccaagaggagtggttttaggggactatgtgatcgaatatggagatgatgacacaggagatgaatttgaggatgttcccaacaatgaaggaaactggtggacatcttgtattctctatcaaatgtttgacaatataaggaatgccaggaatcgaagaagatcaagaatgagtgagagtaggagagggagtcgccgctctagctatgagaattccaactctgatgacagctcagtagcatccatagagtttccggagtatagagtagatgagatcgatgacgagttcatcagcacaagtggagctaacagaagtagctctatgcaccaaaggtcagagtaatctatagctttacaccactaattttgtattgttgctgtctgcagagatatacattcttactttcatagtttataattattctgcattgatattaaaggcttaccagtgagcctggtttttaggcacctcttgaatgacaaattagctaatcaggccccattgtgtgatatttctggcataatagcttggggtgttgacctggtttagtagctttcttgtgctatatatgatggttacttaagagacattgcttgatgccttgttttctctgatttacagttcaagaaggcgtcgaacccgcttctatgaaaattaggtattaaccttctgtttctatgcttttggtactgtcttcttgtgaatctgtaatgttccttttcgttctttctcagtcagctggaaaatgaagcgaagcaaatgatgcagaccagcctatttgtagccagtgttcttggttttggacctctttcttctttttctttttgtttctacacataaattttattttaggtttgtcttgtgacattactcgcagcagtcgcagcccttgtacaaaaactaaacaaaaagcctttttgggatattgtagtaccctt

SEQ ID NO: 26071 - DNA, 810 bp, Arabidopsis thaliana landsberg
aggacgttacttcatgcggtgccctagtacaggtcaccaggaagaggatttgtcgtctttcatgccaaatttgctgataataccagactgtattcccggagccattttgtgaagggacttgaaatgatgctgctactcgttgtgtatcaaatatttggtagtgcttacagaggcgtccttgcatatcttttgatcaccatatctatgtggttcatggtcgggacctggctttttgctcccttcctcttcaatccttctggttttgaatggcagaagattgttgatgattggactgattggaataaatggataaacaacatcgggggtattggtgttccggcagaaaaaagttgggaatcgtggtgggaggaagagcaagaacatctccggtattccggaaaacggggtatcatcctcgagattgttttggctttacgcttcttcatctttcagtacggactggtttatcaactcagcacctttaaacaggaaaatcaaagtttgtgggtgagagctcttacccatctcatgttgctcttcttgttttcgaattctcttggtttttaataaattgattctcaatgtttcacagatttatggagcttcatggttcgtgatcttattcattttacttattgtaaaggtatgataagtatcaccatgaacatattcattcacattttgggtttcttaagtatgagataccaacaatcttttaatcgatcaaggttgaatactaaactgaatgtaactaatcacagggtctgggtgtgggaagacaacggttcagcacaaacttccagcttctga

SEQ ID NO: 26072 - DNA, 568 bp, Arabidopsis thaliana landsberg
  unsure (1)..(568): unsure at all n locations
ggcaattggttgatttctttatcagtaaccagcaaacgtttttcaccatatccttttggcaccatccgctcagcagggatacctttagataccaggtaatcgaaacacgattttgcacgtgcatcggataactttaagttgtccacatcactaccacgtgaatcggtatgtgcactcagctcaatcacgaaagtagggttgtcaattaaggtattgtnnnnnnnnnnnnnnnnnnnnnnnnnnnnnnnnnnnnnngtagactgccccaggtcatataatacatccgggaaacgaatctctctctcaattggtactaaacagaaattaatccctttgaaaattttagcttcttcaacaccaactgtagtaacttttgctttttttgaactgttaacaaaaccaagctgagccttttttgtacaacattgttccctacctgtgtggtaatttaataggacacgtttggttttatgtaacgcgctgttttaccattttcagcaaaattatatttcccctcagcatccggtttagtttctactgaagaaccatcagaacctacttgttttac

SEQ ID NO: 26073 - DNA, 1232 bp, Arabidopsis thaliana landsberg
  unsure (1)..(1232): unsure at all n locations
tgttggaatgtgtgaagatgacttctacgggaacctatgtatttatgaagttgacatggcacttgagagggatggagaactctttggtaccgcctttaacccctctgaagagctattcgggcatggtggaatcgatagccttttccataagcaccaaacagctccagaggtttttatccattaccctttcttcttagatttatcaaattggatgcatctctgtgtgattctaataatgctctcttgtttttgctcaatccagggagggaattcggtgcagccagcaggcagtaatgattcgttcatgagttcgaaaactgagccaataatttgcttcgcatcgaagccagcacattcgaacatatccttctctggagtcactggagaaagtagtgctggagatttccaagaatgtggtgcatcatcttccatacagctctcgggggagccaccatggtatcctccaacattacaggataacaatgcctgctcacattcagtaacccgtaataacgcagttatgcgttacaaggagaagaagaaggctcgcaagtaagtagtagtctgaaactgcaaatacatgagcatcattgaagtgagtgcaggattttcctaatgtgactctggcttcttttttctggaaacaggtttgataagagagtgaggtatgcttcccgcaaagcaagagctgatgtgagacggcgtgtaaaggggcgatttgtcaaagctggtgaagcttatgattacgaccctctcaccccaaccagaagttattgaggataaaacctcaaaccaatgaaagatcacaaaagtggagatataagacagagatgcaactaattggnnnnnnnnnnnnnnnnnnnnattattggttgaaaaggaacacgagttctccgcctcaaaagcgtcatacttgcttagaaaggcgcatgcttctgcagttctgcctcattttttgcataaagtttgttatcttcttctgtcatttggcatcatgacttgactgtgaaactagaaactcttctacagattcaggttcatgatccttaaattttgtcctattataatttgtgtagccaaggcaaaacaacgaatgtatattttttttacgtcatataaataataaccatgtagaagtttggagtatcatcacttctatatttacggtattggttaatgatactaacaagtgtattttctaaaagcgtaaccacaagaatcacaacctttca

SEQ ID NO: 26074 - DNA, 1828 bp, Arabidopsis thaliana landsberg
  unsure (1)..(1828): unsure at all n locations
caggtaaaatatggtactgctctctcggtacctctaattcttcccgcttttgttatcacttatcagttttagtcaaagcggtatacactacataaatcctatagagtttgaagccatttttacctgagcggtacagatgttgctggtagctttatccctgcggatatgctgttccctagtctgcatagccatacgcaaagcttgcttcccggaagaatcaacactaacaccaataatcctcccaggcatcattctcttatactcttgtgaagtagccaagaaagcagcatgaggaccaccataacccatcggaacaccaaacctctgacccgacccaacaacaatatccgccccaaactcnnnnnnnnnnnnnnnnnnnnnnnnnnnnnnnnnnnnnnnnnnnnnnnnnnnnnnnacaccattagcatgagcattcttaacaaactcaccataatccaacacctccccttcagtccccggatactgaaccaacactccacacacatcagcagagctataatccacatccttaatatcaaccgtcacaactttcaaatcgaaaccatccgctctcgtcttgcaaacatcaatagtctgaggatgacaattactagcaataacaaacgtcttcttcttcccctttagaatattattacacatcgccattgcttccgccgccgccgtaccttcatcgagcaacgaagcgttcgacatcggtagaccggtgagatcagtaataaccgtctggtaattgagcagagattcgagtcttccttgagaaatctcagcttgataaggagtatattgagtataccaagcaggattctccattatattacgcaaaatcacaggaggaacatgagtgttatagtatcccataccaatgaacgatttgaaaactttgttcttcgaagctaaatcactcatatgctcaatcatttgactctccgttaatccttcatcaaatatcccggaaaacttcatcgaatctaaccgaatcgatttcggaacagtcgaatcaatcaacgtgttgagattatcgaatccgcagtaattcgccatctgagcttgttcatccggtgttgctgagttgtgccggcgcgggaaagtgtcgcttggcttcaacgcatcgacggagatcgatcgtgtctggtgttgatttctaccggaggtggtaaaagccgatccagagacatcacgacggcgatggagaaaggaggagacggaggagacataccttgagggagtaacagtcgtcgtcggaagaagagaggattcgccgttacggtggcgttttgtctcgttgacgagacgtttcacgatccctctgtaagcaagtctccttgcacgctccataaccaaaccaaaaaaaaacaaatgcaaatctgagagagagtagagagacactgaagaaaatgctgattatatatatatatatatagattatagttttgaggttggtaattattaatttaacgtattttattgtggctttgagatctgaagagggttggtgactgacaaccactcaactcaataagcaactatacagaagaaacaaatttgtttgcatagattccacgtattttgcatcgaagcaatatgctgataaaaaaaaaaaattatcacctttttctggaaaaattgcggctgtaggattttgatatcactatctagaaatttaaatgtttgatatgctaaggttttaaatcgtataagagttcgaaggatagtacgatacatttattaagactatcgtaatcatagttttaagtatatagttcatgcagccgttatggttatagaaattatcaaaatagtatagtca

SEQ ID NO: 26075 - DNA, 1599 bp, Arabidopsis thaliana landsberg
  unsure (1)..(1599): unsure at all n locations
caagagtccataaacttctttgctaaacctgttcttgagaagaaatcggtcggatcggtggttaaccggcctttcggttatgggctgaagaatattgggctcaaaggtgatattggagaggtcgagtatttgctccttcacactaatcctctcttcctttctcagttatcatttggtaacgattctaccaagttcgggtacgttacataattacttggctactgtggagacctggttaatatgtagaacattaagattagggatatctcgcaataaaaacgagttctgtctatatatcaacgtatcttacagtctaatacgtacagaaatgtaaatgcagttttttcctttgtgtataaatgcgagaacctatccgtatatacgaaatttgcatgcatgcatgtgtatagttatatctgctagatagatttttcttttctactagagatagattactagtatatgagtttgattttgtttttcgcgtttgaatgtacatgttaaaagtgtgtctagaacataaaaacccacaagatgatttcagagtgttctattgactatagtggaaaagaaaagctaataattaacccataataaaaaatatatagttgactaattacaagtgaattggaattctgttttcagccaaacttataatatttttttaatcaaatgaaatttatgaattggtttctttcttacatattatgaaacattaaattcgagtcagcaacttgaatttcaaaagtacatctcgatcagtctgtctactcgacagggaatgggtaactttttttttaacttacgcaatgcatgttgtgtgtgcagtgtgtataacgctaacttatatcaacaataaaaaagtccttttttcctttttttccccccctgaaactgttatgctttcgaaatttcacttatctctctgacgtgtttagtttcatcctaaaagtgtatatatatatagcttaatgtttctatgttttctcttatcttataatatatgtatttcttataatgagcaactcgtgatgatgtatgatatgtctgtttgacagctctgcggtgacgtgttacgtagaagcaattaagcagttggcgtgtgagatcttagacctcacggctgaaggactacggctcccacctcataccttcagcaagttaatcagagccgttgatagcgactcagttctcaggcttaatcactacccatcatccaatcaattccttagtggagccaaggtttctgatatgtctgtgtcattaccgagagttggcttcggggaacacacagaccctcagatcttgacagtccttagatccaatagagtagggggcctccaggtggcattccctgacggaaggtgggtctctgtctcccctgacccttcaaccttttgcgtaaacgttggcnnnnnnnnnnnnnnnnnnnnctatattcattacccatttgattctgtatatgttactttaaaaaaaaaaaaaggttttcaggtgctacttgaaaaacttaaaatgcaggaatctaactatttaataatacatatcaacatgtaagaatctactaagattctataaatttcccaactattataacta

SEQ ID NO: 26076 - DNA, 4265 bp, Arabidopsis thaliana landsberg
agctctctgtcaccttcagaatgccttattgaagaactatgagatcgactgttggacttgtgcaggtataatccagcctcaaatgccaataagatttctggtgggaacttaggaagcacttcgcttcaggataataatagtcaggatcttataaaaaagactgaagcagcatatgattgtcactcgaacatgaatgagagtctcccccataatcatcgctcacatgtcggtagcaataactttgatatgagttccacgactgagaacaacgctttcacaaaaccaggagctccaaaagtaagctcagcaggatcttcatcagtgaagcattcatcgtttcagcctttaccctgtgatcatcataataatcatgcctcctataaccttgtccatgtcgctgagaggaagaagctaccgccacaatgtggatcctcaaatgtgtacaccgaaatgattgaaggtaacaacaacacagtaaattacagtgtgaatggaagtgtatcaggtagtggtcatggaagtaatgggccatatggaagcagtaacggtatgaatgctggaggaaagaatatgggaagtgataatggtgctggcaaaaatggaaatggcgatggtagtggaagcggaagtggaagtggtagcggaaacttggcggatgaaaataagatctctcaaagggaagctgctttgacaaagttccgtcagaagagaaaagagaggtgcttccgaaagaaggtaaattctcggtcaaatctataacaaaggaaaaaaaaagtattcttgtaaattgcgaaagcaaatgcaaaccgcaaaaatgttttttttttggctttctcaggtacgataccaaagccggaaaaaactagcagaacatcgccctcgagtgcgaggccaatttgtgcgtaaaacagccgctgcaactgatgataacgacataaaaatcattgaggatagctaacggaaaatcaacaaaacccactatttctcagcccaaaaacatgagtaatgtgctcatatctatcttatatatatatctatcacatgttttaacattttcccttcaaagtctgattctttgataatactactactattcacgaaacaaagacactacgacatttgattgtttgttattattgtcgttgtctggtctggtttgtgaaattaggacgaagggtttggtttcaggatgtagtgaaatctttgtagatgttgtaaacttgtaaaacaataaccccttctctgtatattttttggtataagcttgcttttggagccgtgcatagtacggtgtcgtattgtatcaacattatctctttcaatatcatttagcttatatcgtaaatatatatattcttagaaaaagtctgtctttgataaacaccattttaaaataggaataatcaaatctcttatacccaaatgattggaaactataatggtgaccacgattgttgcttattaaagttcaatttcaatattgttacaacttacaacacaagaaatttattcaatcaactaatctctttttgtgtgttgaaaagaaatttaaattccatgggggtagttagttgatactactttgataaaatataattttcgtttgtctttttttctttgacaattaatttttatttgtcaaagtcaaacccattcacattaatttgtatcacaaaaattaaatttttaaaaaatatattttatatcaaaagagaaaaatcgaaaaatccagcgattggcttggcgtgctttttttacatttcaaagttctctcagcttctttctctctctctccatcgcttttgagatcatcgaacacaatcgaaacgaataatcatttggagaataagaagatcgtgagaagcttaatggggttggatcccgtgttctgggaaatcgaagtgggaggaataagacaaggaggatcggtgaccgcaaactcgacaggaagtcttctgaatgttctgtgtctacttcaggtaattttctctttatagtctttctcaattttaattctgggtttaagcttctcttactaaattatggaaatttttatcctttgctaaaactttctgattcctgtgagccatatcgtttgctaatgctgattagggtttttgactttctgtttaaagattgcttttttccttccatttcactagcttttgactactctgtaacacctgtgttagtatttcgacagtgatgtgttattgcatgtctctttcctgttaattgttgatattgctctccagtggaagttgaggattaagctcttaaatggaacttgctagatccttaagtatcttgttatattcttagaactttaatttgttgatcactgatcttgacacaattttgttcagctagtgttgattaattattttcttcttctcgctttctttttttttttgttttgtagagaaatctaaggccaagtcgtccttgagtgaatccaaaagtaaaggctctgatcacattgtggcacaaacgtttacattctctgagttagctactgccactagaaacttcagaaaagaatgtcttataggagaaggaggttttggtagagtttacaaaggatacttggccagcactagccaggttccttcccttttcttttgcttggttttaaccttttgaatcttcttggtagtgaaagctcactgtcattatatcttcatttgtagacagcggctatcaagcaacttgatcataatggtttacaaggaaacagggagttccttgtcgaggttctcatgttgagtcttcttcatcacccgaatcttgttaacttaataggatattgtgctgatggagatcaaaggcttctagtctacgagtacatgcccctaggttcacttgaagatcatttgcatggtatgcgcttctaagatcacacatgcctatgaattattttccattagaggaaaagtcttcaatttcaatcgggtgatgctttttttttcagacatttcacctggtaagcagccacttgactggaacaccagaatgaaaatagctgccggtgctgcaaaaggattggagtatctgcatgacaaaactatgcctccagtgatctatcgagatttgaaatgctcaaatattttgctcgatgatgattactttccaaagctatccgacttcgggttggctaaacttggcccagtgggtgacaagtctcatgtgtccactcgtgttatgggaacatacggatactgtgctcccgagtatgcaatgacaggccaactaacactcaaatcagacgtttacagcttcggtgttgttctgctggagattataactggtaggaaagcaatagacagttcaagatctactggagaacagaatctagtcgcatgggtaagaaaaaaacaaattgggaacaaactttgtttcctttgcagattcctccttctaattgtattctttgaaatgctctatttcaggcaaggcctttgtttaaagacaggaggaaattctctcaaatggctgatccaatgcttcaaggtcaataccctccgcgagggttataccaagcactcgctgtagcagcgatgtgcgtacaagagcagccaaatcttagacctctcattgctgacgtcgtcactgcactttcttacctcgcctcccaaaagtttgatcctctggctcagccagtccaaggatccctcttcgctcccgggactccacctagatcaaagagggtctgaaaataatcccgagaaccgcaatgctgtgtaagttatgtagcttaaacccattccgtgctgtctttcttggagaggaaaggtggatgattttcagactaagtgtgaatgtatggcttaagagctacttgtagatatgtgtaagaagagatagattcatatagaggccggtttataatgttgttataggtgatgttgtttaatgtaatgtttattgagcgcttgctttcaaatgtgacaatttctcattattgtactgaggatgtctgcttcgattccaaagttattgtataaatattaaagtactatagttttcaaaactttaatgtgtgagattttgattgtattgatatcatattacaatgtcaaggattgattattggtgaacagtcaaatatagatcaagctgttgctgcaagttaactatacaccttatccttattgcatcatctggttcttaatgtgtgagattttgatagtattactatcatacagtaatatattaacaatgtcaatggttgataatttgatcaacactagaatacagattaagct

SEQ ID NO: 26077 - DNA, 554 bp, Arabidopsis thaliana landsberg
taaccataccttcctcagtgaaaagaactttaactagaattttaattttatgattttatgatatttcaaacaatatatatatgtttaacggatgaataataatgtgataatcactctattttatattttcagacctgtatcaaaatgacgataaaaggaaaaaggtcgtggcactaaaaaatcaagaagctggtggaagttgtgtcgatggaaatgtggctcattggttttcgaaaactaagttcaatgggttagtggacgtaccaattgtgtatttggccttggaagaaaatatagttaagaatgatcttacattgagaagctcacttaaacatgtcatcattggcggtatcagcggaggcagtaacagtggtaaagggctagccaaggatttctacttagatgtaagtgtacatatcgaataagaaatgtgtggtagtaaaatatttctgtttgttgttgttatgattcgatcaaacatatattcttgatgagttaaattttcatatttttagggaaacgaattggttgaagttcatgtgagaagtgataga

SEQ ID NO: 26078 - DNA, 1185 bp, Arabidopsis thaliana landsberg
cctttgctttatttttctatattattacttacaattattatattttagaatatagtaagttaacaatacatagttagataccatggacctacctattttgtaatttgttgaaaaatctatatgtccatgggtatcaacaagagagatccataaaactagaaaatgcctctttgtattcgttttatgtatgtttattgctaaattagtgggttcagcatattcgttccttatatataatacgaacaacaaaatatcacagtagtatatatttcaactaacaaacaaatgtatgaagtatgtttactaattccataatcactgatcaatataaaaaatgatatacctaagaatatttaaatcagtaatttttattttttttctgtttatgcgtttaatttaagtttggcattgagttacttcatcggttcaatttagtgacaaaaattgtttgagaaaaggacctatatatcgatgtggtttagctataacggagaatatatactatgatactttacttctcataaatactaaaatacaaaaattggatttggtaattagaatataattaataaacgatgtggtcaaacaaacttcaaaggttgactcttttcaatcctatgtaactttgtgaagaaaaacataagagtttggtatttgattaagataaagttactatacgtatataaaaaaacatcttttaaaataatatttgtgatgaatttaagtattttgattatactcctcatcattaatctttaagacttagttcaaatcggtgtagtatttgtttttgaattttgatgaatcaaatcaatgtaattggcaaaaacgaatccgtgttatattttaaagatattgttcccttaagagatattttattttgatcagtatatataaaaagatgaagcaaatataacaatgggttccaatttccaactgtctttacacagaaaaggttaacaaaaacggtcagaaaaaaaaagactaccgacaaaaaaaaagacagttcatttttttgttatattgatctttcgattatcttttgcacattcttgtcctgatcttcttcttctttcttcccagtttctctcttcgagcttccggaatctttggtgatcaccgaccggatctggacgaagaatctcgttaacaaactcaacaagcattctccaaagcttcctcctt

SEQ ID NO: 26079 - DNA, 822 bp, Arabidopsis thaliana landsberg
aggagcattaatagtggtcatgtgagaataaagctgaagaaatcctgagatatattgaaaaaaaatttttaagtgattgtgaaaacaaagaagagagataaaaagtgtatgtgatatttatataaggggtacgatggtctatactatagaatatacacagaatatcacatacattttttgttttggttagttacttaattaaagtttttttgtatgttatagatgcaaatttcccaaaatttaatagtggtcgttgttgagataagactattaattgtaaccatagagagaggcgagagaacatgtccttaaaataataaaaagctgctccaatagaactcttaagtctattaaaattgatgttttatagtcgattattaaatagagactgttctgttggaggtgattttctggtcgtcaaccaaacttcggttacaaaagttcgaagagtactcaacatgtttggagatctaaagcagagttacaaatttgatttgagacaactttacatgttgcttatatcataattgatttttcgagcccatgtaactcccacagtcccgcagtaagtaacctgcatccattcgagcactggtaagtatggggcaaactatgggtcgaccgtaaaagtcacagaaagaagtttctttgggacgtaactcttccttgacagaagaagaagaagaagaaaccccatgagatgcttttggtagatcagtggtagactggtagtatcttgtgcaatggcttttagcaacttccttagcaagaatctgccaatacagattagcagctcttgaaagtgtacttagactcgatatt

SEQ ID NO: 26080 - DNA, 1145 bp, Arabidopsis thaliana landsberg
acagtttataacctcagattcggcgatagcttcaaaggagcttttctcttgtctcgtttatccatcttcaaagccggttcattcagacgcggcggggatgattgcactaccgggttctacttctccgtcgtccatgtcgattccggatcaacaatctggtcatgaaatcgagattcccctgtttcaagctctggtacaatgaagcttactccacaaggaatctctgctattgaagatggcaaaagtcagacaccagtttggtcaacgccgggtgaagcttctgcggttaagtccatacggctaaccgacgacggtaatctgcttgttgttgatcacttgaacgtttctgtatgggaaagctttgattattcctactgactcgatcgtgcttggacaaagacttaagcttgggatgttcttgtccggatccgtctcgcggtctgatttctctaccggagattataagttcttggtcggtgaatccgacggtttgatgcagtggagaggacagaattattggaagctaaggatgcatatacgagctaatgttgattctaacttccctgttgagtatctaacggtcactacttcaggattagctcttatggcacggaaggggacggtggttgtagtccgcgtggctttaccaccgtcctctgatttccgagtggcgaagatggattcatcaggtaagttcatcgttagtagattctccgggaagaatcttgtgacggaattctctggtcctatggattcttgtcagattccgtttgtctgcggtaagctcgggctttgtaatcttgataacgcttcggaaaatcagagctgttcatgtccagatgagatgcgaatggatgctggtaagggtgtgtgtgttccggttagccaatcattgagtttacctgtttcttgtgaagcaagaaacatttcgtatctcgaactaggtcttggtgtgtcttacttctctactcatttcaccgatcctgtggaacacggtctcccgttattggcttgtcatgatatttgcagtaagaattgctcttgcctcggtgttttctatgagaacacgtctcggtcttgttatctcgtaaaggactcgtttggttctttgtctttagtaaagaactcaccagagaatcatgatc

SEQ ID NO: 26081 - DNA, 2069 bp, Arabidopsis thaliana landsberg
  unsure (1)..(2069): unsure at all n locations
tcaccgcaaactctagtcgattgggtatgtaatcacactcaaaaccgtgccattgtaatctattttgattctcattttgtatgcgttgggggttgcacatgcaaaacttaacggattacgcagatataccaatgatgattgatgagagactaggaggtacatacacagcagaaggagttgaggaacttattacattgacactaagatgtgttgatgtatcaagtgagaagagaccaacaatgagttttgttgtgacagagcttgaaagaatattggataaagaagtgagcttaacaacagtaatgggtgaaggtactccaactgttactcttggaagtcagctttttaaagcaaccaagtgattattataaaggaaccatctttttacatatatatacatatatatatatatatattatataagttctctgagacaagaaccaatcagagaacttaaggaggaagaagaagaagactgatcagctgttttgtgttaagtgtataaagaacagctgaagcttattgtttgtttgttttttccctcctttttcacttcctttggaggttattattttcagcaattatttttttgacaatgagtgcagaaaagtataactttgtaaaaacattatttattgatataaaggaagcaaagagtggaatgttgtgtgattctttgttacattttactctctacaaaaactttgaacttagcttgaaagactttattgccaagttggttggttgaataagttttgatgaaaagattccaattggctaactgttgaactaacagaaggtgataactccctgtctgaagaactctaattattatgttggtagagtaaaactcagagctactttttnnnnnnnnnnnnnnnnnnnngggaaagattttgacctttagcttcaacctacctatgctttgatagcctttattgccaaaggggagatatattaaccaagttggtctctaaagtcttgatcaaagattccaattggataacaacactcttggtcttggactagtatagttcctacatactccatttgctactagtgaaaataaactcaatgctctgatttattactctgtccctagttttgctaaaaaacctttgtgggcacacagaactataaacaaacagtctttggaacagattgcaaaatcaaaatcatgtttggtctgattttatgtcgggagagattgaagatctaatgataaagactcttcttctgtagatagttaactcgttaaattggtgggtctcacatttattattaccttccagattttgacctcacagaagcaaaaacacagtagtgattgaaaagcttagaaaagaaattacaaaaccagagattgttgattcttagttcatacatagaagaaagaaacagagctaatgttttgtcataaatactaaaaaccgttaaaagtatatttttaaaatgagaaaaaatgtgagccattcgatttttggatagacccatcatgtaaaggtttaagctttttttttgttagccaaagagaaagcctttttagttctattgacaatggcgacgaagctgatttctccgccgttgtcttgtccgtgggttacttcaagagaggtgataatcaaagggcttccacggcggagaagagaatggatggtcacgaagagaaacagagtctctgctgtcacggccatgattgtggagccactttctgttgtttcttcttcagcaattcagattcatcaatggtgggaacaaaaccctaattcgttactgttaatgacggaggctactggtggttattcgttggctagctattatacgtctttgggtttgtttgttatctctgttcctggtctttggtctctaatcaaacgctctgttaaatcaaaggttcgaactttactaattacaaaaccctaaatttcacttccaattcccaatttcttcgattttgaaaaagcttgaatgcaatgttgaggatttgcacatcgctgagaaagacgtttgttgttaatgacgtaaagaaggagccaaagcaagtagctggagagattctatctttcttc

SEQ ID NO: 26082 - DNA, 1589 bp, Arabidopsis thaliana landsberg
  unsure (1)..(1589): unsure at all n locations
ctcagaactttgcggggctacaactcctgagggatttccaggcatgttattgagataggtagtcatcgtattgggactgcaaggtgtaactgcaacatgatatagcggtcagtgagaaaatctctcaattttagctccaaatgataaggaacatgaaaattttaagagaataaaacctgaaaacttcatagagaaggttcatacatttggaatcaattctcatgtcatccaggatggatacagtgccatcttcacaatttacaggaaaggagaccacattgccaccgtagtcagaataacaagtcgcacttagtcccaatcgtccattctcagggtcagaaaatgaacttggctctgctatttcactttgtgaggctccaagaccatacaaatcccggtaaggaaaccaaccagtggcctgagatcctaagcaagaaacatatatacttacaaacattaaacagttaccaagatgatcctaatggattacgtggtccaataaatcaaagctttggaattaattccacacttcaattccaggcagagtaatcaaaagaaatgtgacagtaaacaaaagagtcctctaggtctactaaccactntggatcagtgtgttcctaaactcgcctgtctctaccacagatgaaccaaccggggacatgggttcttgactaacctggaagtaatcactcaaaagttcagtttcgatcagacgagaatcattatagtccagaaattaagcatttgaacaacatcagtttttcaattggcgaaaccatacctccatagaaacaggcttttcatccagaatccgataaatcgcctctatgtcaatcataaaatcctcgtcgtcggctccaaattcaaagccaccagagaaatcatccgcttgcgactgaaatactgaatccttcttactcatgacgaacccaaaccctaagtctgagaataaggaatctaaaaccctaactcgaaaaaatccagcacaaaaaaccgacactcagagaagaagtttctcccggagaactagtcaaacacgaaatcgccgacgaagtggatacaaagacttcgcgatttgggggaaaaaaaacttgcgagtaggtttttggaaacgacgaattttaatttgagaagaaggttctagagtagtagttggggatgatccaggcgacttttatagtgccggtgaggtttttttcttctctctgaaatgggaaaaggtaagagaaagagacgcagatttaaataagaaacggtcgaagaagttggctttgttttttttttttttttttaacacgaagttggctttgtttttttcgtatttttgtattggtcaatttttattattagtaatcatgggccgctatatcttaatttttaattaatgttttctgcaacaaagtatagttaatttgctgacgacaaaaacacaaaagtagaaatatattgcttaagagaaaagcattaattatttccaacgttttctatactcatatttttccttattgtttacaggtttgaccaaaaacattagattagtgaatctttttccaaaacaaaagatttaccaattttttcttatattaatt

SEQ ID NO: 26083 - DNA, 714 bp, Arabidopsis thaliana landsberg
ttcgtttggtaaaaatatcttgaaagtgttatattttgaggaatatagatacacaaaagttgtcatggttctaaattttatgagaaattctgcaaaataccacactttcaagttttgtttccaaatatacaaatagaaggttttgattttcataaaataacacaaacacaaaaattagttttcaagggttcataatttaaaattttaagttacgtttgggttaactttttcttaacattatggtattgggagtctcgcattgcgtttttgcgaccacttcatgtgacctgaaagagtgatgaatcgagaatttttgatcgtcgggaattgatcttctcttctagttcatgtgaccacgaaagagaatgaccgtaactctgatcgtcagcaattgataaatatattggagaagcatactgtatcgaggagaatctgaaatgtttaagtgttggtcattgtaatcgttttctaattatccattgattatcattaattaattaattaaatttatcgttatagagattctgattggtgtatatagaaaattgttttaacgcaaataaaatacataaatgtgctgacatggcatcttgagagagctttataaaaatttgatgtagatggtttgggaggcctcaatgaacttcttttattagtaagaaatatccaccaacagtaattattggattcaataatagattaacgaatgcccaa

SEQ ID NO: 26084 - DNA, 1910 bp, Arabidopsis thaliana landsberg
cagcaatttggaaacgagactttaggcaaccggaaccaaatgccacgtggcctcctccgccgttgtttcagtactgtggtcaccgtgaagcctacggcatagttttccctgattggagcttctggggctggtacgtattatagtaagtgtttaatttatttatttttcacatatctttattttcattaaaaatttctaaattatgatttaggtattaggtttatatgtttctaactactttaaaataaacaatattttcggatggcattttaaagggaaaaaaaaaacaaaatcattactaaccaatagcaattaggaatttgaaatcagtttttttttttggataatgatttttaagcggtacaacatgaaaataccaacgtttgaagaagtttttttttttttatagcgaaactaattaacaacgttttatatccatgatggaatcaattgacaaaacaaatgaattaaccaaactggtattattaacaaaatcctataagcagccagtgtcgaccatttacatcattaaccgaattaaaacagaggcgcaagacgaaaaccagagccaaacggccaaaacctattacaagactaaaaacaaaaacaaaattggtcagaaatataaatgtcccgtagtttttttaacgtaaaatacaatggtaacttgctaagtcgtttcaaatagaccgtgagactgagaaccggatattctttaccacctaatagtgaaagaactttttttggaactattattttgttgttgtgatataggccgcaggtgaatatataggagtggacaaaattatctgtggcgcttagagaagccaacaaaagggttaaatggaacgatagagttccatatgcttactggaaagggaactctggggttcatcgcgaaagaggaaaccttatgaaatgtaacttctccgataagtatgatcccatggttcgtctctatgagcaggtatatttgtccatccctttccagcatccagtttaagtgaaatttttgtggaggtctatctcagagtatttcagtactagctcacgaatttatagaaaataaatctgatacgtaatagtaatggcgatttcaggattgggggaaggagaggcagatagggtttaaaagttcaaacctagaagaccaatgcacccataggtttatatgcaatgaatagctatctcatactattcatgtttaaacttttttgggttttgttaaatctttgttgatttggggatttggaattggacattaaggtacaagatctacatagaaggtcgagcatggtcggtgagcaaaaaatacatactagcatgcgacagtatgactctactgatcaaagccgagtacttcgatttcttcggaagaagtttggttccgttagaacattactggcccattaaatctcacgagaaatgtggtgatctcaagttcgccgtggaatggggtaacaacaacactaagaaggtaagcaacatctatataattatatatatagtatccaagatcttatatctatttcaatcatcgataatcgtttgaaatctatatatataggcgcaagttatagggagacagggaagtgattacattatgaagaacctagagatgaagtatgtgtatgattacatgttgtatgtgttgcaagggtacgggaaactaatgaagttggatgtgactgtgcctgaaaatgcaaccgaagtgtgttcggagacgatggcttgtccgatcactgacggtggcctgatcaggcagtgcatggacgactcattggttatgtctccaagcgttaaatcggcttgtgatttgccgcggccttatagagatgatgaactaaaaaagtttcttgaggatcaagaaagtgcggagagaaagtttgagaagtgggccaatgagtatt

SEQ ID NO: 26085 - DNA, 790 bp, Arabidopsis thaliana landsberg
atgtcagggaagggaaaataagtctcaaccttggaaagcacatcaagctttaatttgacatcaacaaaactccacaaaggtcaacagaagatggaaaaacctctgaggacgatagagagatctcaggagaaggatatgagacagaaagagtaaaagagcttaaaaagaggtctgatatggaagaagaaactatagggaagctagcccacactgtggaggaacttagggataaagtgagtcagatgcaaagagaagctcaacctaaaggcggaattgacattatccccgagaaaaaagtttacttcaagatggtctgaagagatagattaccctctagaggagaaagaagcctattttgaagaaaggggaactgagtattctactgcacacctctccaaggaggacgctaagtatgatgatgatacgagagaggactatgcagaccctctttatcattcattttcttcttcataagtgtgaggagtcaagctagagactttaaacaagctcacttgagaggaagtcccatgactatctttgtgaataagtttttcttttcttgttatttttgatttgttttagttgtgtttgtggttctcaggaatagaggaataacgtgacggtagagtgaaaattcaaaacttttactctacagatggcctagagatcgagtagacagtctagtggagtgcaaaaattttaaaactttctgttgcacctgaagaccttgcactcgagtatattggttgagtatgagtgatgtttagaaccccaaaaaaaaaaaatcatc

SEQ ID NO: 26086 - DNA, 741 bp, Arabidopsis thaliana landsberg
ggaatataccataagctatagtccgaagaagaagtaagcaattctgaagcatggaaagctctgtaataatgaaaatttcatagttcaaataaagaattattaaagaatttatgttacatttggtagaatctgagctattaccagagaattcaatgcagcatcaccaagcaagaaaatcgcattaagagagtgcatgttgatcaccagctgcaatattttgatcatcaaatgtttttatataatgaatcaaataatctatatagcttataaaagtacttacaacattgaggctataatcatggatctcaaggaaaggaacaatgatgaaccagaagacacaggcagtaagcaaaactgcacctgcattcatctgatgtacgcgatatatatccaattaagaactcacgaaaattcgatataatcatggcgcatgattatgaattttgagtttgactacctcgaaagataatctggaaaacatatccccaaaaaccagctggattactagagtattgactctgttgaatagtattatcagctcctttggatcgtgctctctctgagtctatggcttcaatgctatctactctatcgccagctgctcttttgttgtattggtaacatccgtgcaaagaaagaagccagcctacctgttaaaagataccagatcaaaatgtaagaaacttgagtaatgtcacaaataagttaataagcaaagtaaccaggtttttgtacagaaca

SEQ ID NO: 26087 - DNA, 1276 bp, Arabidopsis thaliana landsberg
  unsure (1)..(1276): unsure at all n locations
ttaaagcgtaagatgagcattagtagcttcagcttctgactttgcttatacaactgtagttgcagagccttttacattagtatagcatataataaggttttgtgattcattgagtaaccaaatggtaaagaaaagttagcgcatttacccctctgaagaaagtaagatgccttgaagaacagatttaaaggctcttgccgcagtagcactaatgcacattatgaacccaaaccagtgaaatcctggctcaccctgcaatgtaaaactggtacttagatcaagatcatacatacaaaaaatagcaataagatcgtctcttcacaatgatacaaattcaaaacacacaaaacaaggatatgatataaccacttgacaagcttcagagaagtacaaaaacagtataaagatatcacctttacggagaaataaggaaggttagatcccaaaatgatgttctaccaaattctacacctgattaaaccataaaaggctgaagctttttagataacaacaacactcaaatttgccctgatttcaaagtttagacctttgtccaagtttaggtctttcaacattaacatctatttacggatcagtgatctgaatccaaattggatctttccaaaaaaaaacatgaatttcaaatctagggaggtccaggaaacctaacattcaacactgacattgttaagagaattgagaacagaacaaaaaggcttaccccactggcgatgacgacaccggggacgacagggacgagagcaccataagtaacccaagcttctctcttaaaggtcataagataagcaaacagagccgtgaaaaacggcgtcgtagcaccgaccgcttgattgaaagagacaggaaggtaacgaagggagatgttaccaccgacgacggaagcacaaaagacgatgctgagagtagcaaccttaaggaattgagaacgagatttgagatgttggagaggaacaagcttgaggaaaacaatggagatgtagctaaggatagcgcaagcggacatgtgacacattgtgagaaaaatcgggaatttgaatccgtaattcgagagaaggaacttgttgaggagaagaacaccgatgtttgaagagtaccatgatatgattagtgtcgatatgaacagggtttgtttcttcgcagacgacgacattattggtgggtatttctgatctgggttcttcttgttcctcgacgagatcgagatttcgttgngagattgagagattgagagagagagagaaagagaaaacgagag

SEQ ID NO: 26088 - DNA, 761 bp, Arabidopsis thaliana landsberg
tgtcccctgacaaagtcgtacccacaaaccaagactcagacacagaacccaaaaaggagactgaaggagacgttccttctccagctgatgtcattgagaaggccattactgacgagaagcatgtagtcgaagaaccattaaaggatgaacaagagaacgtaagtgaagccaaagatgtcgttactaaactagcagcagaagatgagaacatcaagaaagatactgacacacctgttgcggaaggaaagagcgaagagactttgaaagaaactgatacagaatcagtagagaaagaagctgcagcaaacaaacaagaggaaccaattacagaaaaagtagcagaagttgtagaaacagcacctgttgctaaagagatcgatgaggcgaaacaacaaccagaagtcacaaccaaagaagctcctgctaagcaaaaacattcaaacagcattatatcaaaggtgaaacaatctcttgttaaggcaaagaaagcaatcattggaagatctccaagctctaagactatcacaactgaagaacccaaagaagaaatcaaagtctaagtgataaagtgttcaagtttaaagttttcaggtatttttattcaatttgttggttttgcttcgtgtgggagaaaacaaaataaaaacatgaacattctttttctttgtttttatggctttcgtgtggtttataacttatatctggaaacatacaaagaattgcctttgtgttatggatgtgtgttgaaaattttctttacg

SEQ ID NO: 26089 - DNA, 1297 bp, Arabidopsis thaliana landsberg
gagatcccagctttgctcaccatctctttgacaatcttcaccacatcagtagtctttctagccaaacacattgaattaatcaccgccccataactttccacatcaggaatacagccagctgcactcatttcctcaacaactttaatcgcctcatccaacttatcaacagcacagagagaggacactaagtaattgcaggttccagtatcaggactgtatccaatcaatttcatctcattaataatatctgcaacagactgggatcctcgtcgccgttcaagccaagcatcagagagaaggagatgagtctgagggttaggtagacagccagaacgaagagtgcgttggaggattgcgaaagacaaaggaagaggatcggaactctgaaggcaataagtaagaagactggagtagacaatcttgggcagtgaacgaggtctcacaggaacaaaactttggaggatttcgtcaatgactctgattctatgatgacgttggaaagcagagagaaaagaaaacaacgttgagttttggtaaggctctatgagtgaagcaacaagttcggggattctaagatactcctttgtttcaacagcacattttatcgccttttcaaccgcttcaaaggacgagattgaccggaaaaacggaatgcagacatcaaaggaccgagaataagcaagaggttttagcagatgcgtcaagcgaaaagccatttcctattctcagagacctgatcaactattataaagtcattattttggcatttgaaaaagcttctcctcctatagtaaacctggaacgtaaacagaaagtaacacctggaatcattcaacgctcttaactaatgtcgatgatgttcaattaaccccttaaaaggttcttattttagtggcaaaaatatattttctgcaaaccgggagtttggggaaatcatataaagtcatacctgaatgcgtttaagacaggttcaagctaatcccaggaggaataatccggtaatgggagagtgagctgggaagaacgagattttgcttcacagaggaatatcatcgaacgactggacggcaagatgtgaagaactcaaatgaatagacgatgacttgaggtttagtaaatcggatcaaagtgagtaatacgaaacacccatgagctttgatcgaatacgtttgttcacagatttgatatgtagcagaatggtgtgattaggaaagaaaaaatgttgcgttttgattctatcagcctctgttgggctttgaggttttaaaacctaaccggatatattcaaagggtttcg

SEQ ID NO: 26090 - DNA, 1219 bp, Arabidopsis thaliana landsberg
atcaaaaaagttgattggcaaaccaaagcttggtaacaactttaatttatttgtgcggtcaaacatttcttctcatttctaaaaactaattgtaaatttttgatttagataagttttcattcttttttattgggtgcgcaaattatcatatcttcactaatttgttttcctcaaaaactatttaattcggacaatctaaaagagacaagtatcttaactgaaaaaactgattcaagggaaattttttatcaatggtcaattgtgctggtaaaaaagctccatgaaagactcaaatgggagtttatacccaaattttttagagtttcatttcaaaagctaaaagcaacagacacatatctctctgaattccatcaccacaacaaaatctatataaatattatatatctgcattagatcccagtagagagaccattgcaaggcataactggaactgatgaagagtgtgtagtgtatgtttggagaagccgagtatccgatcactgcaaaaacagcaaagagaagaatcaaagactatggtcacagctcgcaagatatttgatgagatgctattcaaagatttttttcctacaaattaactcgtaggtaagtaaaccgacctgttgcttcttcttcttaggacgtctcttccttttgggtttatgagcatcagaattggagctcaagttgctactctgactgctatatgaattcgccacagaagcccttgcattatatgaagactcacttcttctgtttgaagtgttgtttctcgaggatgatggcatctcattcctctgtacatatgaattcttcctagaatttgattcaaaccttgcttgtggtggtggcattaaagctctatcagagttttgcttctacaaatattttgaaacattcaaacatgtaaataggaatttgtcatataaaccatgtctctggtaacaagtggcatcaccattcatcataatacctgatttctttcatcactggacatgctcgatgttgctctaccagaagcactagaaaccggctctttgagaaaaaaacgctgacaacagtcagagatgatctttactggaaacgttaagccagaaaagagtcaacaatcggcttcttctagcatagaaatcatatggaatttagaggtgaacacaccactagcctcgctgactcttcttcatctctcaaggtatacactaatacaatcgataaactacac

SEQ ID NO: 26091 - DNA, 775 bp, Arabidopsis thaliana landsberg
  unsure (1)..(775): unsure at all n locations
aatagaaacacccgtagggtatgtataaatgtaattgtcatgaacttatgagattcaagttttaaaaatacagaaaaggatagtgtatttacgagggtgcattaaaagagaatgttggtctatagtaacgtttgaattgaaatgttacaaaagagatttgtaatttgtattttgtattgtgaagtgaatggagtaacatgagatgagcaatggtgctgtggtcagtggtcacacacacacagaccctgtgaatcccaacatcatagacctactcacttctctcttatctcttttcatttattactctacatttaattttgggaccaacctagacgacgacgtttatttgtttctgttttgtttcctttcttttcataattttagagctatgcatgttctcattcctcctcaatttcacaaaattgatttttctataggaaacacatataacatagggctggacctcaaatatatacgagatagtgtacaatttggnnnnnnnnnnnnnnnnnnnnnactatagccaaatatttgtaacaaataaaaacacagaactgtgtctgtcacaaacatagcgtctaacagttacttttacacagcttggtttctttggttctacggtacttacagaaaccagaggcatttttcgtcttagtacaagtatataacaggggcccaaacacagtacatgcacaaaatttaatatctaaatacagggaaggcccatttgaggggggttcttcgatccggccccacgtctgtttattctgattta

SEQ ID NO: 26092 - DNA, 833 bp, Arabidopsis thaliana landsberg
acaaaatgccaacaccaaaattgtgtacgacatgtatatcaatgtcaaaagccaacaccaaattttacatataatattgatgaaatgatatgatacgatattattaagttccagtttaactgataagaaaattattaatttccaattgacagtatatgaacggaatatttctcttaggcttaaattaataaatttcattctactaggtttatatgatactactttgataaactacctaacttgaatataatatgacgtataacccaaaaataatatatcctattgcccaccagatacgtatttaatcattgaatttctctttgtatcctactaattagtcatgatctcacgtaattttcagctttactctgaaaaggcttttattgtattgtaatgtggcacaatagttgtgtgcttccactgtgtatatattgacatcatatatattgttttgatttgaagcagaagttgcattgacagtgctttggaaataagagaatatggagagtcgccataggtttttgttgctcgcatttatatcaactttggctattattcacattgttcaagctcaagatcaaaatggtaaatattttttatatttttaattcacaaggcttttttaagaaacaatatatatagttgtatcactttcgcattcatgatcatcgtcttactacaatgaacataatggaatcaacccttatgggttaacgtatacgtagttgaaacttaaaagccatctagacatcgaaaagggtgttaaagtttgtaatgaaggaaatgaatatggaccacaataaatgtttttacaagtatacaactaatagaat

SEQ ID NO: 26093 - DNA, 1168 bp, Arabidopsis thaliana landsberg
ctatcaggaagtgtgattttatacttgtatgtcgtgtttccttgttagaagatacttatatagcaactcatatccttcatctgtagttcttctagcaatagagaccgtcaaatccaaactgccaaatattttttcatcaattcgaacctgaaaggtttgaggatgtgatgtgccaggaacaccgtaatcgtatgcttccaaagttatgtagaaagaggccacacagttttgtaacatgttgaatttcattaggcgaccgaactcgaatttagtcccctgacaggtaaacaaagaaaaatgaatcaatgtggtttaaaaagcatcatgtcgtaacaaagtaccaaccaaaagagactagatttcgttaccttcaacatattgtaacgatgaagcccaagcttagcatagtgcttgcccaagacacggtaaggaagcggcgtattgatttcacagttgtggggaatcagtccattgatccttccatacatagatggtggtatttgaacactctcaatatcgaaaccctaagatcccattagcaaaaataatctattttaatttcgtgaaacacagaacaatccaaaaaatcacaattatagatcaattttataaccaataattaagaagatgaaagacttacatcggattccgccacttgtcgccaatattctctctgtacattgtaaccctcctccgccgcagaaagggactcctcctccgtagtcatattcttctcgtcggtgaatactttgtgtttttttgttatggcgattacgttatattgaagtgaattaatattttgtgggattcgatgtattcatttatgggcttcagttgggctttttcaattttatgattagaatttaagaacccatacataatgaatgaaattatttaatacatagataatttctttcataagattgcctcacacattgtctctaagaaaatagtgcaatattgaggttccaactcagaatctcatctacttcaaactaacaaactcagattaattttctcaagattttggtgttactagtattgcttgatcaaccaacacctcccttatttgaagccaaatataaatttctgatagacactgcttagtagcgacataaagacattaaacatgtgttgtagatgctttttttaccaaatagtgaatgtt

SEQ ID NO: 26094 - DNA, 257 bp, Arabidopsis thaliana landsberg
aactactatggactgaatcgctggagtcacaatgtctatccctatcccgttcaaacctcttgatactttcacctaatttaaaccatcatacatatttttcaacaacgtaaaatacacttgtactaccttagtgacatattaaacattcaatgacttcacaatcatatcaatgaaatctcagcaataccatactaaacacactctcacaggcaataaaacctttgacaccacattatcacatacacatctcattctct

SEQ ID NO: 26095 - DNA, 1562 bp, Arabidopsis thaliana landsberg
  unsure (1)..(1562): unsure at all n locations
taatgcctcagttgtgcgttatgttttacatgaactgaaaacaccaaaaaaaatctttgaaattttttgaaacccgatattttaagttgaatagactttgtacttaaatcaactggtaatgataaattggttcatttcttaattattactttacgttttatcacactttccatgtgagtttttaacaagatacacttaattttcagaaaaatacatcagaaattattactatggcgttacgaatgactcttttgtagaccattaatatggttgttatcgtgagtaaaatatctttagtatcaacttaattattatagaccactaatatggctgttatcgtgagtaaaatatctttagttttcaacttaattaatgaaaagctagtgaattgaaaaagaaattaaaatagaaaactctccaacttgcagaatctaggaactctctttttctcctccttattacgaaccctgccttgctattcattttatagagcaactttcaacactcagtactctctcttttcaaaatctttcctttttatctcaagttataagaaattaatggcgtcaaactcaagaagttcaatctcaccatggacgtttagtcaaaacaagatgttcgagagggccttggcagtttacgacaaggacacacccgaccgatggcacaatgtggcaaaagctgtcggagggaaaactgtagaagaagtgaagcgccactatgacattctcgtcgaggatctcatcaacatcgagactggtcgtgtccctttgcccaattacaagaccttcgaatctaactcaagaagcatcaatgactttgacacaaggtatataactaaatatctatatatgatgctctcgatatattttgataatcattctagtgattttgagaaattctctcaaaaagttcttgtaagttatatttctttggtttaaacgtgctctttatgactagtttgcccaaaatagcatatattaagtatgaactttggatttttgggattctgatattttattgtttctttgtgtcttcttttctttttacatgttaaattttttttttagaaagtttctacaaatatagtttacttacatactatttttttgcttaaatataaatgcaaattgttctatttgttttaatcaaattctatatttaaaagcatgaaacacacctattaatacagtaaagggaaaaattcacatgaaatctaatcctttcatgtacttcatcacatgcacattgtctttaacagttttgaggcacgaaacattatatcatgataagataaatgtacataaatagataaattggttaattctacttatgtccatggtcggtggttgacattagtgtatttatattacaagttgttaaactcgagtttaggaaacccttaatgaacgatatcttcaagttgttaattaaatatgtatgtgattggaatctaatcaacatgcttgaaattattgataaaacatgccttcatttactgctgattaaataaattctttgtgcangaaaatgaagaatttgaagatctaacatcagcgtga

SEQ ID NO: 26096 - DNA, 1134 bp, Arabidopsis thaliana landsberg
  unsure (1)..(1134): unsure at all n locations
cttcccaacttgcttcacaaagacaaactagcttcaaaagacaaggtagtcttttatcttccgttgtcgacttgacaagtactttataaataaataacaaaccgtcaaattggcgaatcaatcttgagaattagtgtcgacataaattttattattgtacattatacaatttagacgataagtagtgcaaatccattgtcctcgagcagggacgagtctaaaatatgggaggtccaactgtccaagccaaagaaaatgtcttttggatatttgtagatagtttaaaacaatgagagaacattttaaaaaattggggacaatgttttgcaatgttttggatatttttatatagttttaaaacaatgagagaacatttttaaaatattttttaaattgaagacatatatttacaaaaataaaaaatttagtgattttagacccatatttcaactcgtagaggatgaactgatgcatgattagaaatttagaatcctgaccttaagtcacttgtgtttttttgctcaaaaaaaaaaaatctgattatttatttttaagcccaaaacttagataatcctttacctttttgctttgaaaaagttctgattaaaactttgtgggcaattttcttgaacttcatcactatttgggctttttaacaaactcacttatggcccgattaaatatagttttatagaaccggcgtcgtatgatacaagcccttgcacgacagcgtatctatgaaaaataacaaaaactgaaagaacaaaataaataaattaattcggacaaaggtttaaacttaaacccaaccctggcttcttcttcttcctcagtgccgccgtaaacaagcttcggcgtcgattttctcctcctctgaagaagaagataatttaatttctaaagtaagtttgcttctgattccgttaatagtctctatttcgaagattgtagtctcttaggagaaaatcttagtaagattgtaattttgctctgcttcacatgatgggcttaaacgatgatgaatcccacataggccattctgcaatttgagacgaaatccttgctttcaaaatatataaacattaaacctttcattattttgctcttcttctncttcttcttagaccctagtca

SEQ ID NO: 26097 - DNA, 864 bp, Arabidopsis thaliana landsberg
ggttgatggtaaaacattgaagatccttcttgaatcatatgtttctgagtagcttccatatctaaattatctgccacaccaaaaaacagaatcttagttttgaacaagatgataagaaacctaagattcttaaaaaggttggatctttatgtagatagattcagttaaagatcgacccaatagagaaaaaatcataaacaagattgaattcaattatcattagggagacaaagttgagagctttttaaccgtaactatgagctaagacaactgttacataaaccctaagctcaattttcaacacagcccaaaccaaaaaacaaagtaagttgtgttctgtaactaagaaaatcaaagaaaccagaactcagcgaaagcaaccgacataaaataaaaagatggaaactttgagatcaagaatctaacctggttggtaatagtttgcagagagacagataggagactgagtttgagagattctttgagattttgagaaaaaagatttggttgatattgaagcttcaaggtaaagagagaatcgaatcaaaagagaagtgctttgtttgttgatgataccacttgcttgcctactttccaccaggggaataataaaaacgcttaacctcatttttatcctcatctctttctaaaaccaaatacccctttgactactcatttttacggttttgccattgttgcttattttgtagcgcgtaaagaataagaattaagtacctttaacagtcaatattagtctgacgagtaaacaactgtaatatataactggaaataaaataaaattccaaaacaagtgtcatgcattacatcactattatctgagtaagtgattcacccgtatattat

SEQ ID NO: 26098 - DNA, 5038 bp, Arabidopsis thaliana landsberg
  unsure (1)..(5038): unsure at all n locations
aactcacagacctgatcagaaaaagaagccccacgagacatttcaatttcccatttgcttccagcagttgccatggatgggacataaaacccttccctccactttttatttatccacttgaagggaaaagaatcactgactttgtaggattgttgtaaatactgggtccctgaatacaaatgatgaaaactgtgatacagagataaaacggaaataactgttacacctgcattcaaaaggagtaaaacaagaataccttttgacataaccacgaatgagttcccactatttgctcctgccactgctgtaatatagtaattcttttcccattgttccataatccattcctatgagatgaaaaataatggtaaaatacacaagttggagaatatcataaaatggaagtgatagcagcagtgcagacatgacaaatgactaccccagaatattaaatgaagctaccttgtggagaaagcttggtgatannnnnnnnnnnnnnnnnnnnnnnnnnnnnnnnnnnnnnnnnnnnnnnncccagagatccgtgcaagaagccacactgctgataaataacccatcctcatttcctttttcaatgtgttgtgcaagccttgtatcagtaacattataatgatatctgcacaaagataaaagacatgtcagctgcatggtcatcaacgtacagccgaagaattctcaagtatgatccaagatgtcaccgttgtttcattggtctgtgagcactgtaaatgctgatccattgtgttgctggcatgcccaatctgatcttctttgttggttgttcatcctcctcgtccattgtcagcctccccctcttttgacccacttgatgtatgagcttcacaccagacaaacacgaaaaaactttagacattcagaccggagctaaatagtaaacctcaatatatgtttcataaagaagatcaccaaatcaccttctgtgcaccctcagtatttattggcctaatgtctgggtttgggccgactattccatcaaaaagggagacatatttagcataatcaggctcctcatcaaacttcaaattggccacatactcgacaaactgacgaaaaggttggggacagaagcagcaaagagtttctggggaagtggccatcttcttcttgcaaacaaggaaacctttgttctctccctaacaaatagaccaagttaatgattgacaaggaaagttgccaggaaataaaacaaataactttagtgtccccaacctggtacccttgccatggaagccggcctcgaagaaggaaaacaagagtgtaagcaagagattccaggtcatccctccgactgcaagttctgccgagatgagcatgtacactagcataacgtactgttcctctgaaaatgaaaaagccaacacgttaataagtaccctaaagttgaagtcgctgataagaatcaatctcacaggctttatgcctagctgaatcaacttacctaaaaacatcaggacgctggtcatattcaacatgtagtccagttgcagtatctcgccatttggatgctgcaagatcaacagattggataagcagcagaaagacaataaagtacgctcactcttataacaaaaataaagtgtacctaagccgaggtctacaaggaaaagttttttctcttcaggagttccaggaggcccaagcagaaaattctctggttttacatcgccatgcacatatctgtagaaacaggagcactgcttcttagcaaataaaaaccacttgaagaaagagagttacagtagcagaaatattagaaaattaccctctagaatgcatcttttctaatatggatattgcctcaattgcaatgcatgcaaccatctctgttgacatcctggaatgtataaaacacacaaatcatatggtgagtgccaccaatattgaagggctcatctcaggaaaaattatgtttatcaatggtttatataacaaaatcttcagatgctacaaaataaagtaaatgtttctcagagtgaatgtttacgcctgggtggtactattccaaacatcccataagctaggcccaaggatatccataacctgtatgaaagattaaaaacagtaattactcatactgcaagtgctcttgttcagacctgactaaattccacataccatcacgtaaaaatcgccctgccgacccttaaaatgaactcgtggcacaccatgactgccaccaagtgcactggacgaacagatgataaagcatacattagttatctcatccttttataaacaaactatttgaacaagcagaagatgaatcctagagccaaagacaagagaccataacgctcacttgtaaacttgccactcatacggtggcccatagttacatcctttgctggttctatgctcaaacttcaaagccacctacaaaagtggacacatcaaaatcacattacagatcacagaaaaccaaaagaaagcaagtaaacttgcaaacacaaacagcatacctccaaagctcccgggccaaatctagcattagaagtactcgtgcccatctttcgaccaacataaacttgtccaaaaccacctttgcctagctttctatctaacttgtacatgggtgaattaccaacctgaacctgtaaaaaccaaggagtcaataatcaaatcatcttacaagagaaagttttaactttaagtggcatgcctaagtttgagagctttctcctaatcaaaaaacacaacacacaatgcaagagacaattccgatgaactaaaacctcataaaaacaacagaaccaacaataaagttgacaccttttcaggaagtggaggagcgtttccttcatcatcaggcactggagctgcttgaccaccactgtcgttctcatccatcttcttatcttcactcgaaaccctaatctgttcttcttcctctttcaccaaaggcgtcgtcttttcagctgcaacgatcgcttccttcaccaccactttcttcttcagctgccgcctcggatttctcctaacaggtgnnnnnnnnnnnnnnnnnnnnnnntgcttcgggttcttcttatcccgatctctgcgtgcgttgctacgcagctcaggcatcgtacgtctggtccatggaacgatcgaaatcactgagaaagaaagaagcttccagacccatctgctctggatacaatcttcgtgaaattgaatataacaaagagatcaagaaactgatgaatctgagagagctgcaaatccaactgggtggagagattttggggatttatgagactaagcaattgaagaatccaaaggactctgatcttttttttctaaccttgctgttaagggatcttcttatttatgggatgttttttttttggtttcttcacacaatctatgggtttttaatgattttttttctttcttttatctaacaatatggacattggacatgattaacatagattaatcaaatctacaatacttaaaattgttaatggaccaactctgtgtgacttgaagggggcttgtaaacaagtttcttgttggaatgtttttctttcttaaggctttccaaaagcccgatgtgaatgttggtcggttaaaaagagaaatgatatatcttggctttctttcattatcttgtaaaggagaaatgttaaattttcaaaaccaggttgaatattgaagaagatttgggtagaatttattcaaaatttgacgtgaatcgattcatcaatagaatggtatatcgccggtttaaaagagtatttagttagggaaatatgggtgtataaccaacaaaaatttataaattaagaaactaacctaaaaaaaaaactttcattatattttgtgtgtaatgtatattatttacaattttgtcctcatcattatcaccatcaaccaccaccaaatcataacacggccaccaccacgggctaccgtcgccgccgtcaccaccaccacggctgtcgccgtcaccaccaccatagccgtcacagtcatcaccaccactgccgccgtcattacagccaccgtcactgccgccaccatcacaccacagtccgtcaccactcaccaccatcacctttaatcatcatcaccatcaccaccacctttaatctctcccatcagcaccacaacctttggccactgccaccagcaccgtgacaataaccaccatcatcaccatctaaggtcactagtcactaccaccatcacttttgatcaccaccaccacatttggtcattatacttgccctctatgttagttttttaatttatacatatatagtgttatatacttaaatagtttatcaaatatggttatttttgcaaatgacccatttagttattttgtcttcttttttttttttttttttgtaaaagagaaatgtcaaattttcaaagtttgactcggaatatgatctcttctcggctatgaatgatcacgacaaaatgttggggttcgagtgttcgtctagatttcctcaccatgatcttgtttatgggttgaccattaggaaagcttttgctgaacacatccattggaatgttaatcatcgatttgtgtttggaagagatgttcaatttgcatcatgtgatgaggtcacaatagtgcatcataaactatatattcataactatgttttgagaagaacaaatcaaacttaaaaaatctgcaatacgtggaaagatgtgaacatgaaacatctaaagaatgggttgaactatctttatataggagaaaataataatttaacatgttttcaaaatatttcggactaacctaccaattttgcagatgacaatctctttttatggagagtatcttataataaatgcaaggatttctttgaagtgatagatatttgtcatttggtaatgtttcaagtcagtgtatcaatttccaaaaaatcacagctattttgaaaagataacttttgtagcgagtgtaaacagataaattattcgaaatacgagaacacaagggtagtcaagtctcacattttgcttatgtcttcagccaactttatatgaaagg

SEQ ID NO: 26099 - DNA, 1148 bp, Arabidopsis thaliana landsberg
tcggatggccccgaatctgccatgggttctgcttattattggggtatcgcgtcttgtttcaacacttgaagctagtgaaggagattctgatcctctttacaagtaaaaagtcttctcctttctccttttctaagatcgcttctttcaattcacggctcttctctgctttattcatatctttggagaagtaaaaatacaaactttatttcttaattagctttctgttattgcttactgacattataaatgctgagctatgttttgatttaactgtcagagtcgaccgttagattcattgattgcataactctggcagttgattctcaaattctcggtttagctttaatgatctttctgttttaggatacaagttcagatttttttacttgtaaggtatggattgagtttcacaggtttggtggaaatttagagccactaacaaaggagtgactcaagtaggaggagcttattagaactatgtggttgacttttccaaatgaatttctttagtcttgtgtgtggtgagagttgggacacgttagagatgagatctttgtgtgtttccacaagcccttcattttcactgtagtagggtcattgcttttgttggaaagattataaaggcaaaaaactagatagggacttatgctgcaagtggcttttgaggagttaggtgtttcttttttgttgggtggaagcttgtctttctctctgtctctctgttgtttgctttgtaggccatctaaacagcttaatctatcttgagcctaattagaaatgaaaaagctcagaaatttgtttcaaggcagcttactacgatatagctagaccggttgatgttgcattagagacagggtttgttgtaataaggtcttatgggtgtgtgttagtgtaatgctacatagcgtggcaaaggtttagttcgagaaattagttggatgttagtgtcatagagtggctatggttaaagttttgttgttagagtatcctcggttgctttatacttttggcttttgctgagtttaagaagagactagtgttaatgtgctaattggttcccaggtcatgtgttgatcaatgtcataaaactgtatgcgtgggggatacttgctttcaacactgtaaattttcagctgatggaaaagcca

SEQ ID NO: 26100 - DNA, 1724 bp, Arabidopsis thaliana landsberg
tgataaacaggaatgacttgtttagtacaaaataatttaaatacccgaccactgggaaaaccaattcatcataaatgaactatgaatctatgatcactctttaaattcgtacatgaattaaatcacatgtgaaaattcatacattaaccatgtaaatttagtgaatccttatacaaactatcaaaggttgggttatatttgttatgattgatcccaaagcctttaatcaaccgtctacatttggtaagtcatatgatccgtttttaagaaaacaaagtaacttagttttgttttactatcaatggactatgtaaattcatcaaaacatgtataaacgtatatactgtatattagtgttatatgttataagcttcttctgtataagtttactaagtttttttgacaaggtttttttcagtttatgtataaatatagactgtctataaatctattaaatctaaatcgatgtcgttttgatttttacaacatttcatatgacaacaaatttagaaggttgactaacaatgttatgatcaaagttgattcaagccaaaattattagttattaactagatcaccctaaataatccatgtatgtagtttaattggtggccataatttacagagaagtgtaatgcctattacttaaccgcgaatcaacatcacgatattatcagcctatacatttttggagaatgactccttatgcctatcattatttagtaattttataattaaaagtttgtgttttagtttaccatctttatcggaatcaagtgagttttttctacatattttaatctaaaattaaaagtagaaaaaatcgatgaccaacacgactaagtaaagtcaagctcgttcatatcactttcatataattattttaaatgcttcgaactcgatacatactttcaagctacactgagaaacttcattgtgattaatatcaacacctttttgtctgaggttaacattttatgttactagtatgctttttcttatatcatagagattcagctcgtttgtacttccttagaaaatttgtaattcactatgttataaccttcagtgaaattcgaacatggccaaatatttcatcattaaccccaaaatcaagaatgcttgtctttaaaactcttttgacatttcacttgcttcgtaattttcacgtatatgaatgaaaataataaaatttataagaaatcttcgtttaacatttcttttctaaaaaagtcattacatgcatgagatacttacatatgcaattgaagaaaacaaaattacactaaagatatttcttccaaaatacattaacacatcgtcaattctgcaagctcttctatagaaatctctaaacctagcataatttggtttaacgagtcaagaaaagacaatttcttttttttttttaaatatggtcggaccattacactatattatatattaaagaaatgaacatgacaaacaaacacatcacatgtgtaaaataaatagaaatagttgcatcatcccatacttcaatactccatccaccatgccaacattaatccatgattgggacactatctaagcgaacacttcaacttacactttcacactatattatataactccaaatgtgcaaatgaaaaaaattcaatgaacaagttattgattctattcacaatcgatgcttgtttactcatttagtcgaaacataacaacaaaaaattgcacacatgatc

SEQ ID NO: 26101 - DNA, 1361 bp, Arabidopsis thaliana landsberg
gtatagttataaatttaattactagtgaataaaaacagacattcaataccataagaagaagaatagttctaggttagagtgaaactggtaagtaatgataatatctctccagcctaacaaacattaaaaattgtggtaaacggagtaagatagcgaccgttaaaaaatcagccgaatgaagattaatgcgtggttaatatgctccggatttcacggcgtctgtctttaacagttaaaaacttttttgtcgggactgcaaaaaaatcacatttatcttgtttggtcaaaattagtcatgagaagattaagaccatgcaatgcaaagtactcattaatcttttaattttttttattcaaagtatataattactcacgaagtcgtgacacaatgagtcaaaaaatgaattaaataaaacggtgtaatcttaaactgtatttagcccgtccccatgaaatttcaattttcgactaatctttgaccctaaacaataggtaaccaccgtcaccgtattaaatgcttttgctattctaagaaatacagataagtttccacgtattgtattcgtcccacaaatattcataaggaggaaataatatcctttttttatagaagcaaatggaaataatgtgaacaaaaatccaagatctattacaaaataaaatattttaaaaatttaggaaagacaatcgatattattagcagtttagtccgaaaaatgccgaaatacactcaatcatagagatattacttttattattaccaattttgacacaaatcaattgttaaaacttcctaaaaagtaaaattctctaattgaatatataaataaaatatttcaaacgtgatttttatttacaaactttacaaatgttaataatatattcacctaaactgaaaacatctaaatgtcataaaatttgtatcttattcctaattctgatttttttttaatataaagttataaacacaattagtagataatctcattattcataattatggattattcggcgattttcactattgtttttcaccactaattatgccaccttgccagctgtattcacacacacacacacacactctacacaagcaaaacttaaagtatgcatttttattaattatggttcatccattttattacagaagaataaatatttcatttgaatgagaataataaataaaaaggcaatgcttttatgatcctcttacctttaatcttcttcgtctctctatcttcctcgatctccgccgattccttcgtctatccctttcctctctgtaaacctttcttcttcttcttcttcaatgcctccctaaaaccctagactcagaattctcaaaggcgacaccttttacc

SEQ ID NO: 26102 - DNA, 6424 bp, Arabidopsis thaliana landsberg
  unsure (1)..(6424): unsure at all n locations
tctagttactcctgctgggcttagctttgttccccacttgtaacatagattctgcagaatcacagaccagcttcagtttcactgcatcatatgatttagtaacatttgtggctagttttcagaaaatcaaaccttgaacatagatactggtccacaacggaatatcttcctcatccttccatagnnnnnnnnnnnnnnnnnnnnnnnnnccatgtcgacttcatcgagctgtttcaaaactcaagatatctgaactgacatcttcgttgactttataactatatagagtctcaaatatttttgttattacctgagaatagtcagaacgaatgggctcaagctcagctgttggtggagcagcttctatctctgccaaggatggatatccgagattcgttgcagcccattttaagaacaacctcaaatccattttactgatacttcctataggatttatgtctgctgagctgcaatcatactgtttcaaccaagagaatgaacaatattttttaaccatctatgaaatttgagatgtagcagccaaaaagtgattactccattacctttgtcaggtaaccacgaagtccttcatcaacgttggagctgcctagaacaaggtaaaagcctggtttgctatgaacccaaggcaagagagacgctaacataaatgctaacaccattctcatccgggcttgaatgttctgcaacccaaggttctcagcatttgatcctccatcaacctaataaacaaaaccaacaaccattttcacaattttagttcttcttctcttctccagatgatcatatttcattttttctaacagtttgcctaggtaatgtatattcagactttaccttataccttggtcgcttgcctgtaactgtttgaaataatgataaaactgcagagacaacaccatctatgcaaacatcaagatgccaagcaccaatctcgtctgccagctgctttgaacgcctttttgtctcctcagaactgcaaatttaagatttcaatatggggaaaaaagtttcatctctgctgtaaatccacacagtgacgaaaaatcatattctctttgctcttattaactaattcacctgttttcagaacccataaagacagtgtaaaatattcgtttggcaaactctttgctatcagtaggaaactgcccattagcataattcccaattcggttcgcatcagcttttacttgctcatctccctttgcaatctctaaacaagaaagaaaatatactctgagagaactcaatatcatgaaatttcaacaagacaaaacacagttcaacatacatagaaaaaagcgccagtgtacctttaacaacaagttggcacatgcagccaacaatagctgccacggaggagctgtctgctccgccagaaagaggaagcaaaaatcctgaagcgccacttcttctcaaatagtcccacatccagcaagcgggaccaaaggctatttcttcttgtggagagtggtaaatgatctacattactaatgtatattagagtggaaaattttagatgttaacttaacatcaaatactcaaggatggagaaccttcttcggactgcttagtgtcattttcaggttgaaggactgtgtaagtctacagggcacagctactgaagatactttaaccttgcagcttgcttgttcctgaaagctacttatagatccacgaaggctagcaacctttctcaagacaaataagcaagatgatcctaagaacttttcatttatatatcacaaaacagaagaaagtaaagccaaagggtaactgtgggataccgcatcaagatccacttgtgaaatgatgacctcaacgtctctcaacgagaattgtgagccttgagcaacaacattcccgtttacaacaatacatgcacatccatctgcacttggttacaaatgaacaaatctcactcaaaaaagtagatatgatttactcaaaaatgatactttcaataatgttaagggttgacaaacataccgtagtataagcggctaccatcgcatccctgttgattactgtacatatacaccccaccacgagcatgagtagcccccatccaagcattcagacgaatatctagtttcctaagttgatgatgactcccacttgcattcataaatacttcaacaccattcaatgcgagctcggcatgaggaggaagtggactaaacagttcctcacagacttcagctgcaacagccctgataaggaaatataactgatacagttaagcagacaaaatcattgacagtgttgaaatggaagcatttatccaaactcacgtgtcgataaactggatgtaaccataaccaaaagggactgatttctgctccaaagcctctgaaatttcaatggggagctgaaattcctctagctcttctctctgcttccaagctgtgaaccaccgtagctccctatagtttccatcgtttgcgagccacattttcggtcgaatcatgatgattcttctgttcatacagagaacctggcagttataacgctctgctcctttaatcacaggcattcctatgctgcacaaaatatcatccgtccaatcaccaagcagcaattccttcaaacactcccacctgaaagaagatattcacatgaacataagaagaaacggttaaacatgattccgataactaaattcagaagaaaaagaaattaattccatcatctaaagtgatagtaccaagtcattcatgccattcatcatcgaaatagaaaactaaaaatagaagcttacgcatgagtgacagtgtcgagttccaagaagtgatcctcgcaaccatagccagtgacctcgagctcgggtccaagcctgataacagcaccagcagcctttgcctcagcgatcgaagccttgatgttcttcatgttgctctcgaaatccatggcccattggttcaagttacacgtagcaaccttcaacagcctcatcttcgtcgcctaaagagaaagacaagtaaatttactgtacatcaagtagtgtaaaaaatctgacttatctaaggcacaaacttgttcatgagaacagaagctggttaaattagttaaaggaacaaactttgtattactttgctaatactaacaattcaaattcaattttaacagccataatacacaatatctgtaacgaagaactcgtcaacgcaacactattcgatgtgaatcaattgccaaaagaagagaaggaagaattggagcttacgtgaatgtgcaaagaaaccaagtatcaaagtcgtgaaattcggagatcgtgaaaattgaaaactatgggagtttgtatttctttcagatgtgaaattcacagactccaagtgattgtgcagtgctcgtgcagaacagattgtgaccgaccaagaagaacattcggtttgagaggaagaagaagaagaagagattgatactgaaacgacggcgttttacgattgtaaattacaaacaaaaccttaactgagaacaacttcgttttatcatgacacgacatcattttttttttttttttggtcaaaacacgacatcgtttaagttcccacttttgtctcttcttcgttcttttaagttttaatagacgacgacggcgactagaaggagaattagcgagatcggaaggagaaaaaatggatcaattctcaggaggaggaggtaattggtcgatgatcccaaacgtgcaggcgcaaggtaacttcggtacaccgacgaatcatgaccagcaactattcctccagcaacaacaattacaacaacaacaacaacaacaacaacaacagtttcatcttcaacaacaacaacagacgcagcagcaacaacaacaattccagccacaacaacaacaagagatgcaacaatatcagcaattccaacaacagcaacacttcatccaacaacagcaattccaacaacaacaacggttgttacaatctcctcctcttcagccacagtcgttacaatcacctccgccgcaacagacgatggttcacacgcctcaatctatgatgcatacaccgcagcaacaacaacagttggttcaaactccggtgcagactcctcaacagcatcagtctttagcttctcatttccatctctatccggtaagagaaacaaagaaaattgatgaaattggaatcgttgggggttctaatttcgtgttaatgacgcagatggtggagaaattagctgatgtgatcgaaaatggaacacgagatcagaattctgacgccctggtttgttaaaaatcaagtcttttaaagtggttttgagatttctagggtttcttattggatgatgttgaaattgtgggatttgcaggtgaatgaattgaatagccatttcgacaagtgtcaacagttgctgaattcgatttcaggatcactaggatctaaaactatggtaacattttggatctctgtattggttctgtttaatcttttgtttcttatggatctctctctctctctgtgttttatagactgttgatggccaaaagagaaatgttgaagaaagtgagcaattgcttcaacagagaaggttagctagattgttagtatcatgttttatctgatcagattgtgatcgtgctcttactcttttgttgttaaatgtcttctggtcagggatttgattgtggagtataggaaatctattgaagagattgtgacaatggagcattagtttctcatattttgattcagcaactgtttagctacttaagaccaataattgttatcaataaaccaatcttgattcacataataaagagaatgtggttttcttcaagaaaattcattcttcggattacaaatagatcacaatgcataatgtgttttgtctgcatcaaaccaaaccaaaatctttgtatgtgggacatgcaacagaaagctcaacccaaaaacgatataagcccaggtagttgttgaacatagtgagtggttttgtgatttagattcagaacagagtagaaaaagcattgtaacgaccatggaaaattcaaccattattccacaatgatcctccaaatataaaacaaaacaccattgaagccacatctattagtcttttaaaaagaaataaaaacaccgacttctaatctatccctactcactattttgaaatcatgataatagtcttaaacaggtaaaaaaaaaacccaataaaacactcacgtaagcttcatattctctagatagtttggaacagcatgaaacaaaacccgtttagaaccttgagattctggaacttcaactcttactcttaccacaatgttctcctcgagattgtagtaataaaggtaaaaaggaacttgtggatcatagtgatttgggcagaatacagcttcactaaaaagtttacatcaattccattgaactccggccattgaaggggctttacgtagatatgctttgaccatttacgttcctggccatgctctaaaacccacaacaccaaatcgttatcattactatttattgaacctaatttacccttgtagtttatcagagagggaggtttccaagtaataaaaccaaatttctcagacctaacgtcaaagcaaacgatcataggtcccaacataggtttcatagaggttgctgcataatacaaaacacctttgatgcatatccccttatgataacggtgggtataataatgtctgcgacattggatcttcctccaaaatagatttctccttccagtctcgaatgtgagaacttgatgctgactatcaaactcctcccctgttccatgatgcaccgaggttacacacaataccttgaaccgtttgttgattggatcatacccgatggcgaaataatttattgtcgcatgtgcttccaatatgggtaaggttacgtactgccctgtgatgggattataaatcacaaaaactgtgtcattttttatcttacggtgataacagaccagtccgtggacagagctaaggatttgagagaaatctctagggatatccgtatgatgatgagcagtggctacaagagatgaattctcatctggattttcaggctgtgttgaagtgtaggaaaataacattcctccacctaagaaggtgaagatgaacctcggtggatcgggatacttgatcgggaacaactggttataatttggttgtcgaattatcgacgacaagagcttacatacacaacgacacttggccatagactttgcagacaatttcgataagattttgatgaccaaatctgcagggattcgatcaaagtattctcctccagagtttgaacatcgtttattggattcaaatacggttagggttaggttttcttttgtatcctgctgcttacgttatgtcattgccttagatattgactctgcttggtgatttcaaaatcttcatcttatgatgacatat

SEQ ID NO: 26103 - DNA, 1772 bp, Arabidopsis thaliana landsberg
aaacaactctgttttttctcttgttttgtttctttcattatgtctttcccgcctaaaaactcctctttgtttcaagaggagaaaacagagagattcaaaaacagagaacctctccttagatttaagaaaatcatggaaatggtgaaagcgagtgagaaagaacatgaaaagtacaagccgaaattgttcgatttagagaacgtgaagaagaagaactcatcttcaaggcatttcaagagatggaactcagattccgccttgagaattgaagatccagacattgatgatggcactgttttcaagaaaaccgcgacctccagcatccggccaattctaccggttctggctatggatgagcaacctcagccgcgtgaagcaactgatgaagaatcacagaaagattcaggcaagagagaaatcattagtccatgcttaaaaccttattatttgattaatgagtaatattataggtttcttggggatgcaagctacaacagtaaatattataggtttgaggctcgtgggtcgcgagctaacacaaatgagagattcataatgagaaattcactagagaccaagttatcttgagattccgtggattgcaagctaagtcgtgttattttgcatatgttacagaattggagcagatgaaagataagtttgcaaaattgcttttaggagaagacatgtcaggagggagcaaaggcgtttcttcagcgttagcattatcaaacgcaatcacaaatcttgcagcttctgcgtttggagaaatacggcgtttagaggcaatatccgaggataaaaaagaacgatggagaagagaaatcggatggcttctctctgttactgatcatatagttgaattctctccaacacaccaaactaacgaggatggatctttcatggaggtttcttaccattcttattatagttttctaatagaaagttttgtttctgtgtgtgtctgaatctgaatcttttcttgaggtaatgactacaaaacaaagaactgatcttgtctccaacattccttgtttaaagaaactcgatgaaatgctcctcgtaagacaaaacaaatacttataatcgcttctctgtgtttgatcaaaaggatcttacgttgtaaaatgtcacaaattctgtaggattgtcttgataaattcaaagatcaggatgagttttactacgtcacacccggttctccggaatctgaaaacagtaactcgaccaggaacgatgataaatggtggcttccgattgtaaaagttccacctaaaggcttatcagaaactttgaaaaggtttttactaagtcaaagagagtgtgtgtgccaagtgcttaattccgcaatggccataaactctcaagttcttactgaaatggagatccctgagagctacatcgactcacttcctaaggtataaactctctataccctaaaccctttagtccaagacctatcaacacatcaagaattgattcccttatgatttggtatgcttattgatgtgtgtttttctttaacttaacagaaagggagagctagtcttggagacatgatctatagaatgataacattagagatgtttgatgcagagcaatttcttcttgaaatggatttatcatctgagcacaagattcttgatttaaagaacaaattcgaagcttcggttgttatatggcagagaaagatagtgcaaatagacaacaagtcatcgtctccgtggagtacgaatttgagtatggataagagacaacagttagaagaaaga

SEQ ID NO: 26104 - DNA, 1250 bp, Arabidopsis thaliana landsberg
tgattggctgagatgacaatacaccttttcttgaacctcgggaacaatgctttcaacactatatggcttgacttgggtcctggtttcagcaaaggaaacccattgaggaaacctgcagaattcgaagagaacttcattgatgcagtcgaagaggagctcatgttcaacacaaagctgatttggatagaatggtatgttgctgatcaatgccggatatagaagctggtcagagatttctgttttcagatacagctcttcccagtttgagtctattgcctctaacaccgcttttacatacttaaacactgattctttgtgacgattcttttcttgcaattggttacacaaaggttgtatctttgcttcacctgagcaagtgttaagatgagtcaatgttagttcatgttaaaatctaactccagtaatattggacctttcttttcatacctcttgctggacttatgaatagtggttcaagaacaaagtcatattcctcagttttagatatatagtgagatggtgagcccacagaggggagagacagtgtctgttagaagaaacaaaagcaaccaaattagtttatagttattctctgtgtttttttcatgtaaaaatttgtatagaaatcaaaagtgaacttgcctcttccaagaattcaccttcattctctgcaccataagctgcaacttttgacatctcatcaacaatctgattgcttttagatagaagagggctactactaccttcacttgatgaagcagttcctatctctttcaaagttattgaatcatctgcagagtctcaaagaatcattggatagtcaataactactttaaatctcaaatgagagaaaagataaactacctgcaattgtttcggacttgatgaaatcatatgaagaagacctcaaaagcacggttgaattctgtttccatattcttcccgggctgctaaaaggagacgaatactcgggaagccatacaatcctttcgtgatttctttgaacctgtttgcttgttgccaagtttggatcattatgttcttgatgaaatctcttttgagatattgaagtcatgcgctcgagaaagaaatgatctttagttgacaaactcttctcaaagcttttcttcttccctaacaatctcttgtccggtttctcctttctgattgcatgtttcagttttctcatgatctcagagagaaacaaatgcaaattcttggctcccatcaaacgagaatcttcagatgag

SEQ ID NO: 26105 - DNA, 1530 bp, Arabidopsis thaliana landsberg
ataatttagttacgaaacaatttctttatctaatagatgaaatgaatatcgatttagatttttgaaaacaaatgctaaatgcaatcaaatcaatagcattataataggaaacatttgactttgtaaatatctatttgttataactacatatacgctatatatattgtaacaatcatggagtaaatgacgtttgaatttaatgtaggtacctattattaaggagagattggattcaaacaaattcgagtcaaaaatttaaatatggaaggatccgattgacagatatccgggtcaaaaacttttaaaaaaacccgacccgattggattctttgctgcattctgggtaaatgagaccgtcacgtgtgtatcgccttcgatttctttgacgcaaatcttaatccttgcatcattaagaccgtcacgtgtgtatctaaaataacaaaaaactctgtttctttacaaggactttccgacgctaccggtagtcgatttccagaggaaaatgggagtttagtatataaaaataaggttgcagagacgcagattctaattctggtttgacttcaaattaagagagacactactcaacagcccacaaaacattgaacatcaaagcatccataaaatgcgttttcgtctaccaaaaacaatagtacaactaaaacatgtcgactgaaccagaagcagagagacaaagaactttagaccagtcacaaaacaaggaaaccgacacaaagaaccgatgtgtaacgctctaacaaatcaaccgcagcccacaattctcaaaatcagctcgtaaataacattttctagtcgtccaaaagggtatccaccagggcaaattgatttggataaagcaggaatgtatatgatatatgttgagccagctttattcccctgtctgatacgatattacctcatcgctgctcctcatggggtagttcttgaccaattgcctgtagtgcgagtctgtagtataaaatccccattgttgccatacacgctctgcacattggtcacatagatttaggccatggataatactgattgattctgcaccaaacatttgacatataacgagcagcagaagaaagagttacactgtaaacaaggtcttacatgagagctatgaaaattagtatcttccttatatccatttttgatgatcgttgatgccttacacgaccttcagaaccatcatctgcctttgctgcatccttacgaggtggtgctgtcacgggtagagttggtaatgcactagaccagaaaggtagtaaagctcgtagaaacttgtgacgaagaggaccttacatgaaaaaaaaaatgagaatcagtcaaagtcatcgcgacaatgctatagattcatacaaaagtggagtttgtctaatggaaggcagacacatgcatctcagaaaacaaaaacaataagaggaaaggagaagcacaaaactagcgtaagtcttgtagtaaagcaaaaaacagacaagagaggtaagagcgataaggtttttctaccacctcttgttgagt

SEQ ID NO: 26106 - DNA, 4389 bp, Arabidopsis thaliana landsberg
ttcactatccatttccagaaaaaggtcatgcgccggagatttattttctaatcggaacaattgaaaacgacgtcggaggggtgacagtaaaacatatgggcctttaaaaggcccattattaaaaaaaactatgggttagggtttgtttagtgaaagaaacgggtcgggtcatattttagtatgagtcggttcacctttgtcgtatacatctaccaccctccttgtgactgctgcgtgacttactctacaactataagctcttttttcgttttccctttcaataatttctttttctttttccgtgatcccaacgtttgaattgatcgccgtttctgggtttttcttttaaaagagaggtattcatcatggacgggcaagagcatgccgaggtccctaattcgatggttgaggatgaccaatcagttgttgcggcggaggcgattgcagagttggcgaattcaaccggcgaacctaatcctgaagaaggagaagaacagagtgttgaagacgagcttatagcgaaggcgcagaagcttatggaagatattacttccgttgccaataaccctaatcctaatatccttcacgctcttagtcagcttctcgaatctcaggagtctctgtatgttcctttctagctcaacaatcagtctctcttcttgattttcttttgtagttgtctttagttttgacgcttacttgtattcgcaggttcttagaggagaatgggcatttctccaatgctcgtggtagtcataacagtggcaagctgtgtattctcatccgagtaagtttatttaaaaaaagattgttcttttttctcttgtgtgggttctttcttcttattttgttacttgatttttggcaggaaaacgatgagttttttgaattgatatcgtcgacttttctatctgagaattcttactcaaccgcagtaaaggcagcctctgcaaggttgctaatgaactgttcgcttacgtggatggtaaattttttactactttctttctctttacccttaattggatgtcttgtttgttgactcatgacgcaatttttcttttttttcagtatcctcatgttttcgacgatgctgtaacggaaaactttaaaaattgggttatggaagaggcagtcaagtttcctggtgaagactctgccaagaaggaagcctcagattctgaaatgttaaaaacttattctacaggactgtctagctctctcatctggcgaggtactgattaaacattctcaacttgttgtctcttcttcccatttttgcaacgcccacagctgaaattgtaacattttctttttgtgtgactcatgtaagtcgtgggcaaatagttgaagacgttttgacatcaggactatctgctaagcttatgcattatcttcgagtacgagttcttaaagagccaagcacaagccgtatacacacaactgagactaagcacgtctccttaaaaaccaaagaagaaggtcgaagtagggtgcgtaagattgtggatacagttgaaggtgaccatgttcttgagacagactccggaagagagatgggacaaactgatgtacagcctgatggcgaattcgaaatcgatggcagagatgtatttaatgtttcaggtgttgttgattgtaaaattaaacctggagatgacaatagtgttagagatgacccttcaagacacagactgaaccgatcaaaatcaagggggagaggaagggttcacgaaggtgcacctgatacagaagttctcttggcatctcctagatcaggtcgtctacttgtcagagatagggatctatcaaaaatttcagatggcagaaatgcagaagacgtgaccgtatgtcttgggaaaatgaagtctggtattatggagatagaaagagaggataacgatgagtgctttcaaggttgcataataggaactaaaaacataactgatctagtaaagagagccgttggagctgctgaaaccgaagctagagctgcccatgctcctgatgacgcagctaaagcagctggcgatgctgctgcagagcttgttaaaactgctgctttggaggtatgtttttctttttttgcttagctgttagtgatttcatttccctaatgaaacggtggattagggtgacctgatatttatattgattgtcttttcttttaaattatccaggaattcaagtcttctggcagtgaagaagctgctgtgtctgctgctactcgagcagctattacagtcatagatgccgcagaggtttcaaggttggtcatgctatgacgtcgtggatattatcgttgctgtttatcaattatttatctctgagttgtttagggctttaactctgctatttggttggtggcagaaatcctacttgtgtcacatctgatcagacaacggatgttagtgaagtttcccttccagatatcgaatcattggctcagttacaagaaaaatattgcatccagtgccttgagatactgggagaatatgttgaggttctcgggcctgtactccatgaaaaaggtgttgatgtatgcattgtgctgctggaacgtacatcccagttagatgatcgttcgacagtgtctcctttgttacctgatgtcatgaagttaatttgcgctttggctgcgcaccggaagtttgcagcaatgtttgttgaacggcgtggcatactaaaattacttgctgttccaagggtctctgagactttttatggtctctcatcttgcttatacaccattggctctcttcaggtaataatacagcaaatttgcatgactttaacacaattttggttcaccgtcaatcgttgacttagtacaaatcctgcttcttcttaccttcaattttttttttctcagggtataatggagcgtgtctgtgcacttccattggttgtcatacatcaagttgttaaattagctatcgaacttctcgactgttcccaggatcaagccagaaaaaattcagctttattctttgctgctgcttttgtcttcagagccattttagatgcatttgatgctcaggatagtttgcagaaactccttgcaattcttaaagatgcagcctcagttagaactggtgctaatactgaccgatcagctcctgaagtcatgacgtcctcagagaagcagatggcttttcacacctgttttgctttacgccagtattttagagctcatctccttttgcttgttgattcaatccgtcctagcagaattagccggggtggtgtgccatcttcaatgaagcctaatataagggcagcctataagccccttgacatcagcaatgaagctgttgatgccatcttccttcagttacagaaggataggaggttgggtccgacctttgtgaaagctcagtggcctgctgtcaataattttttggcctcctctggacatgttaccatgttggaactttgtcaggtaatgtagcattttactccacatgtacattgttttgtctaccatcttttaacattatgttcacatgcgcagactccaccagtagatcgttatctgcatgatcttcttcagtatgcttttggggttcttcacatagttacatcaatacctgatggccgcaaagcaattgcacatgccacactcagcaacaatcgtgctggcattgctgtcattttggatgcagcaaatatttccaacagcatagtagaccctgaggtcagtagtccgcttctatccattattcacctgggttttgtctttcttcttctgcttctcattgatacttacctccttcatgttttctttattgaagatcatccagcctgcactaaatgtcctaatcaatctggtgtgcccaccaccatcattaagcaataagccgccccttgcacaaaatcatcaacctgttcctggccaagccactacccgtccctctactgatgttgctgtaggtactcagtccactggtaatgctccgcaaactcctgttgcaccagcatcttcaggtttggttggggatcggagaattttcttaggagcaggaactggttctgctggccttgctgctaagttggagcaggtttatcgtcaagcccgtgaagctgttcgtgggaatgatggtataaaaattcttttaaaacttcttcagcccagaatatatgtaaatcctcctgctaccccagattgtctacgagcgctagcttgcagggtacttcttggtctggctagagatgatacaattgcacaaatactgactaaacttgaggtagaatagcaattttctttccccgtttatatattgtgaagttgagcaggcatcgttggtaatatatattgacttcccaagcattattctaggttggtaaagttatcagaactaatacgggattcaggtggtcagtcaagtg

SEQ ID NO: 26107 - DNA, 1709 bp, Arabidopsis thaliana landsberg
tcatttccaaatgcatcttgatcatgtttatttgtttgttattacgcttgtttccctgaaacttgagtgctttgagtgctaaatgatttgcttctttttgtttatttgataagatggatcttcttccctgcatcgagataatacaagtataacaagagatggaagaagttgagagccatatattttagacgagtaccctttaataagttgaatttttttatttcctatggtactacttatcatttaggaaattgatagaatatctaaaaacgctgacatagttctttgagatataaagattgttatcaactatctttgattcacgctgttatctcatctgacaatcatcacatcacttataaaacattgtgctcaaaaccgttactcttttcattaatttgcgttttcttatacaataccaaaatctgaaatattcttcttccagaaatgactccttatattgaaactagcaaataggtagatcgtgaggaggagcttcaagagtctccaattctccgacaccattgtcgaccaagaacgccatagcaagaccccactttatatgaacatctaagtgacaatgcatcaaccaaacccctgtttcaaaaccataacagcattatttcccctaatatcaaatcaaaatgtaactattactaaagatataatcaacttttgttcattacctggattatctgccacgaatctgataacagcccatccattaacaggaacagccacagtgtttctaagcggaggatcaacaagattaaacttagaagtatctttcttgggattaaagttaccgaacccttcaccaacaatgtagaaatcgtaaccgtgtagatgaatggaatggttttcgggagttactatacctgtgtcttgaagaacaatctgaacccttgatccatacttgagtttgtatagcttagtccctctatcaggttggtagagagatcggcttatgttgttaccagtgtaatcaaatttcaccggaggcttcgccggaaaatcggttgtgaagactccggggatcccatggtggtgagcttgaaggagtgagtagttacttggaagagcaaatgaaacgttgttcatcgatgcagtgaaacgtgtgccgttaggaccttgacatcttcttgatctgaagttcttaggacagttgttgagaccgtgtccgttggttacgaagagattctcgtcgatttctgtcggaacctcagctcgtctaagtgaccggaagctttggctgaaacgtgtgacggtgtttgtgtcgttgtaggcagggaggataggcatgatcggtttgaaggaattacccttcttggttccacttccgccgcctacaccgcaacaaggggcggatttgtattgaaggattgctgttgtggttgtgtttccaaacggtgcgttttgggcgctttggtaagctcttgcggccatgtagtagcggtttggtggttggtcaccggttatgaggacatctgtggtttgtcccgggccaagaactatcacgttagtggtgaagggttttaggtatgacgcgtcagctccgaccaccgtgagtttgtgattagccaccgtgaagaataacggttggtttaatgctgagtttattactcgtagtagtatagtctcaccaaacattattggtactactgtcgtatctgtaaccaaaagattataaaaaagtctagttaatatac

SEQ ID NO: 26108 - DNA, 1308 bp, Arabidopsis thaliana landsberg
ttttttacccccaatccgaacaaaatccccgaagccttaatgttatttagaaaaatgtcaagggtgatgttatttactttcaatataaagactacaatacataacacacgttttaattttagtcactttgcccctaaagctagccaaagtttagtatataaaaaaaaaaaaagtttagtatatatacacatataaacataaatcataaattatacatacaatacacatgtgacgtgtgcattatgttctgcctttgtttttaagaaaatacgaagaccatcttggttaaaatttgattatgaatctgattggttaataagtttatactgatcagtgaactgaacgtacctaaagcaatttattacatacgaagttggtaagggcgaaacggtggctacatgccgcgacattagttttgttttctgaaataaattttatgaaaacgaataatgaaaaaatcaaacaattcattgaatcgccaaatagatccaaaagaaatttattgtgaaattgactgcaggtccatgattcatggcttttactacaatcaaacattcaatgagtttcttcgactgatgtttatttctgtgtgtaagatatataatacatacattgacaatatatgattcttgaaaaagagggtttggattatcataacggctaaattctattttgatttcagaaaattctcaccgaaccatttgaccattacatgtattattttattcaagcgttattttctcccctcacactttaattgatttcaatcatagcacatgcacaaactatacaaattatataatatagtaaaaggtgtaatcaaccaagagagaaaaacacctagagagggtttgtttaaaagtctaatttgtgaatagatgggccaccaaaataacatatttaatactaactgttcttctcaaaacgatctaatttaaaactttatgccaaagaataggttattagtcaatatattacaatgatatgtggtcatatgaaaaagattttgggaataagaaccaaacaaccattgacttttcattcctcaaaacattggaagtatgtttgctatatgtttttttcttcttctcatcaaatggttaaaaatcaaccttctaatacttttccccaagtatataagatgaactaaattggagaaacattaatttcggcttaaacactaaacactaaactcgaagagattatgtgaacggtgaaactaaatttgtcaatgattcaacacttgaaaagattgcatggagaatttgtatcatacgtttgaatttgaggatatgacacattgagcgt

SEQ ID NO: 26109 - DNA, 873 bp, Arabidopsis thaliana landsberg
cttaacgcatatgaaattaggcattcacgagtctatggagccgtgcttgcaaaaggataagtggaagtagtaaaatctatgtaccaaaaggaacattttacctcggtggtgtagagtttgtgggtccatgcaaaaatcctattgaattcatcatcgatggaactttattagctcctgcaaatccaagcgacattaagcaagacacgtggatcaactttaggtacatcaacaatctttctatctctggttctggtacacttgacggccaaggaaaacagtcttggccacacaatgactgccacacaaaccccaattgtcctaaactagctatggtaagatttttcatcgagttttcacttatattattattatttacatttaaagcgtattacaaaatgtttgatatgatacttatacaataataaaaagtgatattcaatcattatttatcatacataacttattaaattatcttgtctttttttgttttttatttgagaaagtaacaagtcgtttaataaacttgaaatgttttatagactatgggatttgcattcgtgaacaactcaaatatcaaagacataacatctctcaatagcaaaatgggacatttcaacttcttctccgtccatcactttaacattaccggtgtcactataacagctcccggcgatagtcccaacaccgacggtatcaagatgggttcatgtagtaacattaaaatctctgacacaaacatcggtacaggagacgattgtattgcaattctctctggaaccactaacctcaatatctctaacgtcaattgtggtcatggacatgggattagtgttggaagttaggaaaaacaaagatgagaagacgtgaaggctt

SEQ ID NO: 26110 - DNA, 344 bp, Arabidopsis thaliana landsberg
tgatgcggtaggagtgatatcttattactgtagggaacaagcttgatcttgagatattttcaaagtcaacctactgttccttctcgttcagcagatggttgtgttcaaggaaatgtagcgatgactgcttcaggtattctagagtatttctgtatattttcagaactttctacttctcttgattctggtacttaatgtcgtgatctaatctgcaactggtgaagctagcgaaggatgttcagaacagaggtcaacagaaactcaagcagcaatgcctgaagtagacaccggtgtaacttatactttgcctaattttgaaaaccaagataaagacattgatctag

SEQ ID NO: 26111 - DNA, 1125 bp, Arabidopsis thaliana landsberg
atatatgaactaggtttcggagcatgtggtagataaattttggagatgagggggttatcttctggttctatcaataagcgtatttctgtcttatcccattgattcgagtgtgattcaaggagtgctttaaccattaagtcaggatctgttgttgctagcaattttggaagtctaggcggtgttgttcgaagtcatgggtctagacctaagttggtggtttgtctatcaccaacactaacttctattcttttgtgcaaaaggtcttgaccaaagcgtagggagttccacccatatgagggttgtgatcctctagtagcaaagaggagagaaccgtcccaaaattatctcgctttgagaagacgatagataaggctgtatatgcgctgaaggatcttccacacctgatttgccattagggcttaattaaagagatgaatgtccttaaatcccagtccgcatgaccgtttaggtgtgaccaacttgctccatgccatccaagacatttttttcttttgtcgacccccaccaaaatctcgctattatactatcagtctccgaacacaattctataggaactttaaagcagtacatagaatatatcgcatggcgtaagcgacggctttgatgagtgtctccttccctgcgtcagaaagatatcttgtttgccatcctttaatcttttgttagaactctctcttagatataatgtagcatttctttcttcgttcaaccaaattgttccgggagttctaaatactttcttccaccgccagtattggggatatttagtgtgctcatgatattattccttttgtgttggtaaacgctgttcccgaaggtaatggacgacttatctaggtcaatcatttgcagtccaccttaagaaaagacagagtcatcgaaaaataagagatgtgagactggggcccacgttacttatatgaatgccattgattttatttttcctggtagcttgtgtcagcatagagctcaagatatccgcacaaagtatgaacacctgtggaggtaggaatcaccttggcgcagtccatgaattgcattgaaatgaccatagaagctgacattgacgaggacctaaaaagaaacagagcaaacacatgccat

SEQ ID NO: 26112 - DNA, 1122 bp, Arabidopsis thaliana landsberg
cactttttaccacatgcaaagggaattaatcctaacttaatttattaggagtaatcacatcttggtagtgtatagccgggaatttccgacagacgttttttttttccttgcccattgattgcatagttcaaaacttcaaagttggtcaatccaaccaagtcgaagagataggagatgttttgaagtatgaaaacaaatagaggggctaaaatcaaaataacaagaaaaaacgcttctgccgtgttcgaatgtgtcctcgtgatcatctccgtatataatcaatcaatcaataaaaatccagagttacaaacactcttctcaaaattttcccattaaatcgcaaagttaattttgcgattttttttctctttttttctggttgggttatttattttccccttttaaaaaaattctgcaacttgtcttgaaatctggggtaaaatatttcttcattggtttctggaaatctcggggaacgatttgttgggttttcttctttgtactctctcctcacattagcttttgttggtgggattttttgaggatggtgattgctgcagctgtcatcgtgcctttgggccttctcttcttcatatctggtctcgctgtcaatctctttcaggtttggttgctgattcgtttctggtgttactctttttagattccgttgttgttctacattgtagatcctttcttcttttgttttgattcactgcttttagggtttccttctccagaaactttgattctttcgtttttgtcggtgattgtgtcttaattctgagtgtgcatatgagagtataagctcgaaattgactcgtggagctcatgcactgagctatagagtgttgtttgattctgcgattaagtatcactttcttcagatttatcttgatttctatgttgattgaatcgaggaaggaatctttttttctctcaacttcgtttgcttcagttttgatgtttactactacatattgttgtttcaggcagtttgctatgtactcattcgaccactgtctaagaacacatacagaaaaattaaccgggtggttgcagaaaccttgtggttggagcttgtatggatagttgactggtgggctggagttaaggtatccacct

SEQ ID NO: 26113 - DNA, 1244 bp, Arabidopsis thaliana landsberg
gcttagttttcacattatcgtgtgaattgttgccgagatgctactgggtagttttaaggtgaatacgacatgaaaaggaattatattgctagcctttgctagaggtttcaacataaggaactaagaaccatataagtgtgataacgattcgatgatataaacggtttaaatttactctcagcattcttaaaagacacattatctacaaagctcaatcttatgtatctttgaaagtaacaggctcttgatctatatgaccatgagcgttggggaaaaagttgtgtttttcaactgtgtatttctcatcattctatcattttcatccctcttctctgatcaatgcagaaattaccagcgttattagtataattgatttgatgattcactgtttgaaatactcttgcagtctttatagggtcacatgatttaacaaagtagtaacttttgtgtgaagggtacctgtggatccattagagtggcaaatatcacaagacacagcctgtaacattgtggcgcgcttagctaatactgttggagcagctgaatccgttctgcgggttgcagcaacaggacatgacaagaggctctttgttaaggcaagtgcattctggtttcttccttgtttgcattacaagaggtagtttcttcgatcacccggtgcggtgcctgcatgaataggaaatgtgtataacaacattcaagcatttattgatgaagacaaagatggttaagaccattgactgaaattccacagaacctgtcagttgtggttttagccaattaccactccgatgcaatgcagttctctggttttatgcttggtggcagaattctaaactgaactttttttatcttcgcctgtttctgtctctcaggttgtgatctgtctttacttcttggcagctctaggacgaatcatatcgggtgtgaccattgcctatgcaggtaaaagcacaatggttcgctcttaagtcttaaccataatatggaatgatgctttcgatatttagtgtaggatactttttctgacactgttaattcttctgtgtacaacaggactatgtttgttctgtctctccatgctttttcggagttcaattagaaactccgtattgaaccgaagaaacggagagattttggattgcgaaacaccttcagagttgtaatacacaatccgcccccacgtgttatattctttgtcctctatccaaaaatacatgttcatagctttggatagttgtaat

SEQ ID NO: 26114 - DNA, 987 bp, Arabidopsis thaliana landsberg
aacaacctcatgcttctgacaggagatgcgggattacttttgcctgtattgatttgctgataattggtgtccattcatctttgattaagctgctggagcatgtaacactttgtcgacacccctggagttttatcactgggaaaaacaaagaacacagcgagcatatgacttcactggtgtcatctcatggtttgcatctaaatgtgacatgattctcctgctctttgatccacacaagcttgacatcagcgatgaattcaaacgtgtgataacatctctacgtggtaatgaagacaagatccgtgttgtcttaaacaaagctgaccaagttgatactcaacaagtaagtttcgttttcgttccattcatttggtacgttcatatgctttctttttactcattgttgagccgctttttctaaagctaatgagagtgtatggagcattgatgtggtcgcttggtaaagtcctgaacacaccagaggtagtacgtgtctatattgggtatgttttttcgagtacaacattaattttcaacaaagaagtcaaaaagccattagtttcatttctacacacgagagattgatttgttgttctttgcgtttaacttgtgcaggtccttcaatgacaaacccataaacgaagttgcagttggaccaattgggaaagaactctttgagaaagagcagaatgatcttctagcagacttaatggacatacccaagaaagcatgtgacagaaaggtatgattttgatgagtctcagtttgaacaaatcgtaaatcagaattttggaagttgaaaaaagaaacctgactatttttttgttattctttgcagattaatgagtttgtgaagcgagctcgagctgcaaagataaatgcatacataatgagtcaccttcccaaggacatgccagcaatgatgggcaaatcaaaaactcagcaacgtctcatggacaatctcgaagaagaatttgaaaggggagt

SEQ ID NO: 26115 - DNA, 1182 bp, Arabidopsis thaliana landsberg
  unsure (1)..(1182): unsure at all n locations
actctaaataacaaacagtctgactatttctgtcttagctatgcagctctcatctgcacgttctcgatattgtcacggttccaaagtggcaagaaaaagcgatttgcaaaccggaggaccaactgcaagaaatgcacgagataaaataatcactgatagtctaaagaaagagattgatgatttagacattaatagagaagcaggttaccatgttttgaactaattccttcccaagataatggtctatacgatagatctgtgattcatcaaataactctccaatctgagaactcagttgctctgcagattcaaggtccttgccaaatggcttctccacaacaatccgtgtccatccaccaagatcagctggaaattatgagacaatatagtttacatgaacttcaaagcgtctaaaacttgtatttctaagctaactactaaaatgaagactaactcgtagatgaaatacgtgtcctaggctcaagcaggttaacattttatccaagtaataaattccacagctgaaagggactcacatttgttcatgcagcacgtcttgatcatcttgcatacagaaggataaacagacggtggaagtgcaagataaaacagtcttctagaagacccttcagtactatttttggagatttcgtgctctgaaattgccttgtctaatctctggaacccctcctcagcatcataagggccactcacatacttaatctacaaagattggaaccaaaaaatcttatttcagtaccgaanacaggaccctattcatgaaatcaacatcctaaaaagaatagactaaccagctgcagaaactttgacaaagcttcagcttgctcagcattcttctcatcaacaagatatttgcatacaatctataccatatgggcgttgtactcacaagttaagaagcaaaaagccaaatggctaattgaactcaccctggaatcctatctctcagctcttcatcagaaatgttagtcctagcatacccgaaaatataggcttcatatggattgagaaatccttgaccatcgtactaaccaaacaaaccatatctaactcaattaaccggaggattggttctaacacatgcaccagccccgatatggacccaacctgacggtataagataaaaagagcagagaaaagtcttcttcttagcaagatcac

SEQ ID NO: 26116 - DNA, 1577 bp, Arabidopsis thaliana landsberg
aagaatctccttctggttgtttctttgatcgcaaacaagtttcagagttctgaaatctttgtgtggagatatgataagccaaagttttattcatgtaatgagaattattgtttgaaagctaaacagaaagtatcgaagattcaataaacagaaacattattaagccttattcgtcgaaaactaaatgtgttttgtgctttccgcactctaaagcttgcggttgatgacattaacaggaacaaggtgaagaggatgcttcctgtggctagtgagaccaggtgcttcttcaacactcacttcctcagtcgctttccaatcaaaatgatacaaaagattcgccaatgtgtactccaccgtacttaatcccacgtacattgcgggacaacctctgcgtccactcccaaacggcaacagctcaaaacttgtccctttagtttccacattgctatcaacaaatctctctggtataaactcatcaggatccttccatacatcagggttacgtccaatagcccaagcattgacatgaatacgcgttccagggtaaatatcataacccttgatcttaaagttagtcattgcttctcttggaatcagaataggactcggtgcgtgtaacctccaagtctccttgatcaccattttcatgtagactagagcgtcgagatcatcgtatgtcactatacctttgtctcctacgtgttcacgaatctcggcttgaactttcttcattactcttggatgtcttgaaagctctgccattgtccaatccaaagtgataacagatgtgtctactcctgctacaaacaaatcctgaaatgaaaacaaaaatgcttacatgaactcaataaattataattcaacatctaaataaggcatggacaaagttctgtaacctgatatttgtattaaccaaactatacataaatttctaaaccaaattacccaaatcgaacaagaattatggtatcgaaccgaactaaccaaagttgaaaaacttaccataataatagctctgatatgtgtatcggtgattcttgaagaaccaagtttggtttcttgactctgtaacttgagcaagacgtcaatgagatcttcacggtcttcagttttcttcttctcccgatggtcaacaatagctttctggtaaaacgtatcaagatcttgaaaactcttcctccggctagaatcaagaccactgatccgatccaagatccagccaaacccggggaatatatccgccgccgcgaatttaccgatcactctgttcgcctccgtgaacagctccagaaacgtctcgttatccattccacttccttgaaaactcaatccaaacgccattcgacacgtaaagctcgcgacgaacttagccaaattcgcggtgaggtcaacggaagatccagacgacgccgagtcagataacgagttaacgagtcgactcagctcctcctctcttatgttccggaacgagttggctcgtttaacggagaaaagttcaagaacgcagagtttccgcacatctctgtagtaatcaccccatttagtgaaccctaaaccaagtccatcgtaaaaaaagc

SEQ ID NO: 26117 - DNA, 1452 bp, Arabidopsis thaliana landsberg
  unsure (1)..(1452): unsure at all n locations
acacatttgacagtcgatttttagcattattttgtttcttttgggtgtataggtttgtataactacaagtctaaaattaaaatgtagcaaaaaaaaggaataaaacagaaagaatcaacactaagacatcaaattatttaacttaatcagtagccactagctatgggtttctctgcccaagaaacaaacgaataatttagttgacaatgatgaacgattaagtctactacgcacgacgaattagtgctaattcctagagattcttgatgataacttttaaaataaagaaactgaaccaattaaataacgaatcttagaaaccttaaatgactacaataaaatgaatatgaacatgtaaaaaaatactttaaaacataaatttaccagatggagagggcagctacagagatttcagcattcttcaaatatccagcaaccaatatgattgccataaaataccaaacctccaaactgatccatagtaagaaattaatcaaaatagcaaaaatattattaatactatataaaaaaaacaaaatcatcaagtcaggtttggtttggttatgtaaactcaccagagcataacagcagaagccaaagataatctaacgaaactccacaaattatgaaaagcctcccacgagaaaccagaccaagcctcaccacacgtaccactaaatatgtacacaagctgagccatgtcaatgaagcaccacgacgcgttaagcactacggctagacctggcataccccactggagcttcacaatgacaaaccacgtgagaggcacgtgtataacaagtgcaacagccgatatcacggccatgaccattatcttgctttgcgattgcaaaaatttagccgttggaaaattgatggcgtaggcaaagatttgagggatcatgtagatggaaaatattccggccgcgctagagattgccgccgtttgaccaatggacgcgaggattggggcggcgaaaatgtaaaggagagagaggataagagcagtcacgtttagtatcacccatgatcgttgcaagtaaacgccaagcattgacaattttcctgctccaaacgcttgtccacatagcgtttctaacgcacttcccattccaagctagttgcggacgttcataatcacattcattacaatgatcaaaacaaaacttcttaaatcttacaaaaaaaaataaagtgaaacttttacaaaaggcaaaaaatatattaatttttaaacttgagaaaatggtccatttgataaataaattgtactttgactagtgactacaaattgataatcatgaattcatttcttcaatttttttgggcgtttgaatttacatttttaatgtatacacgttaaattattttttttaatttaatggtcttttgatataatctaaatatagagcattgtttatagaaatgtagacanaacattttgaatgattt

SEQ ID NO: 26118 - DNA, 1213 bp, Arabidopsis thaliana landsberg
ggttttctttttggcggacatatacgatccctgatcaagtgagttccttggctgatggaacaaatctgacttcgcaaacaagcagcacgtatagcccataaagagctgtatcatccagcaacatagcatgcacgagaaaaagagctcctacgcagcatttcgtactagaccggtggaagttacaaacttctcataaacctaccgttcagtaataaatgtagagcaggattgtgatacgtgctgctgtgtacaagtcaagaaacaattgcggaagataaaccccaacaaaactgtcaggactatgtgtaccactctgatcactgatgttctcaagggtcttttgatacaagactcggtggtgagttttgtatctgatagagatggtgggttcacaagctggcggtcgcttctctcttgtgaaggaaagatggtcgatgatgaagatctaacacgatggtgatcgcttctctcgtgtgggatcgaatggaggggaagtgctggcggattgaagtacaccacagagatgtgatgagtctctgatacagtacacggacttggccttggtgaatcgcacacagaatacaaagaacaatcttattctctcaagaacacttaaatagaagaagtaagaaaatttggttctttattgataatcaagtgtgaaaaatcgtacaactgctgccgggggactttataagagtccttcaactatccctacgaccgaaaataaatgcaaaaaaacgcaacaaggaaacaaataaaatcaaaacacaaaaatcattgtttttagagagaaaaataaactaaaaatgaaagtacttaaattctcttgaggagcacgtttgatgacgcgtctagccattgtgtgggctgtgtgaacctacaaagatagtataaattgaataaaccttacctgcatgcgctttaggcccaatagatgttgcatgagtcactttctgtagtacttcttgaggtacttctggaatcacgtcttgtgctagtttcctggctggttccttgaagtaggagtctttctggagttcctcttgagtagcttgatcagtgtcttcgagctcttccatgtccttgatctcttggtcttgatctttactctcttgatcacttttagatgtgacacttggatcgacccctcttgcggctccaaagtcttctcttggattctaagggttcttaacctgcaaataatgtcata

SEQ ID NO: 26119 - DNA, 1078 bp, Arabidopsis thaliana landsberg
tagtgccttgaaaatccttgtgccagaaaaaagaacagttgcataagtccttgctcgatcgaaaaagaaatcaaacaaaagtagcatacagaaaagaattgagatctgtccccaactctttttcactggaacttattagcggtggcagtaacatttcgcagaaatataattgaagatatatcgataatacctaatgtgttctcattgtcgtttctaatcaatgccacgagttaaattttgaggacaacatgagaagaattgctattaataatgcaattttattcttttggtttcaatgcaattttatcctacaaaaatataagaaactgaacaatgaaaacttaaaaaagaaactacgggtcctatcattccttctatacattgaaaacattctctacccatgagagtccatttggacccaaacctaacaattccttcacacataaattgttcttgtctaaacactactaaacaacaacacacaaaatctcacaataaaacaatcaaccaaaccgctacaaacgctttaaatcaatttcttaccaaattcaatgatttcacaagattagtttacatcactcactcagagctatttgagttctcctctctactatcatcatcatgatcactctgttgctgcttttcttgatgctccaccgcattgttcgcttgttccgcattcgcgtttgcgtttccgcctcttgaataagccgagttcaaagcggctaacatcccgagattggagtccggcatacttagtcctaagttctgagtcggctgcggctgagctaaaaaagaacctaactgaagtgaacttcctgtgtactgatccatcggacaactaaacgccgttcccaccataaagtgagttgttgctcagcctccacctaacgctcctcctccagcagagttcacaaatggccacataggaagagcacggtggcatgcggtggtgttattgttgaaaccactctccatttgattaccgacagttgtcggtaccggcagcatccatctagtgttaacagcaccagacataataggcggcgcaaccgcccacatcggcgccgccgtaaga

SEQ ID NO: 26120 - DNA, 1241 bp, Arabidopsis thaliana landsberg
aatctgaaaatgacttccataccaattggattctgcaacgtttatggtatataacaatttcaaacatttcaaaccctacacaaataaattctacatgtaaaagccacaattgttctactaaatatagaaaatttctttttgataagaaaatgaattgtatggctggtctatctgctaagtgttaccctgcaagagatagtaatccgcaaaatcatttttgtcgtatatgataattatggaagtgtaatcaacacattttataatgtcaagattagcaacttttgtttagtatatatctcttcaattgagttttttccccaactaaactcaaaattgtattatctagcagggtggaaattttgtttctttaatcggttgacttactgataattccatcaccaacgatatgctttcgatcgtttgtagttgatattcttagattagatgttacggtggcaagagtcttgattgtgaggcttttattggatatacgaaatatcaattgagaatttgcatatttgactagagtttctaaataaaaggaaagcaaccaaaatggagaactttcgtcttcaagtttgaaatgattaatgaatttaattttgtcattaagatcgaaactttagtgtgaacatgtatacatacacacctaatcctttatttggtagtgattattttggagagtgcatatataaattaggtatacgtcgcacatcattgaatgttcgaaattttccaagacataacactaattcatttgaataatacattctctacgatttttagacatttcttgtacaatacggcccaaatttctcactttgtttcaaactgatatatgttttatcttttccctactttttcatatataaaattaaaatgtcctcaaacacctatttttattttcttactaatgtatgttcatttttgccttggctataattgtcttaattggtacgtcttaaacttcttcgtttcttaccttagtacgtcctctagcaactgaatggacttcatttattagaatctaatttaatgaaagtatttacaattttgaaataacaacactttgtgtatttcgaaagctagaatacaataacatgtaattttttgtcatcttataagaaaaataaccaatcgaagagaagaattcgcaatattaaacggatctcaggcagtatgatctcttagtcaactttatcttatattttattctttcaaatcgatgaatgacgttaatc

SEQ ID NO: 26121 - DNA, 2296 bp, Arabidopsis thaliana landsberg
atatgtcaatatttaacctatattcctagatgatattttgggtatatgatttaaaatatttaaggttgatgaggcttgtatgttattgttttctagcggacgcttgaaatttaatgttttaagttctctcacacgttgaacgatgctgatacgagcgataaaaatgatgaagatacaaaaccaaaactaaattttgctacggggaaatctactagcaataaataacaaagtgttttaactttaagcattaaaccaaaaaaaaaaggaaaaaattagatattaagtatctccaatgcaaggttctcttgataatttgagagagttttcttgattttggtgattaaaataaaatcatcaaaactgattaaatttgagagagtaaactatttgaagagagattttggaagctgagggagccgtgataggttgaggagataaaacttaattcaagttcttaagtttgataaaatcaaaatttaaacttaaaaaagggtgagagcctttcatgtggttctcaacattagagatggttttataattgggatttggaagtaagcctctattctattgagagtttttggattggagatataaaatcatatttcttcaattctgtattttaattcattttatattaagggtataattggtttttaattttccttaaaacctatttcaccaaagttatctatataaagtatagatggacaaacttttggaaaagatccttaatatacaatttccccaaaataaaggtgtatcaaagtgattttactataaaataatgtgtaattaacaaatgaaactgagttaaaaaagtcaaaaaatccaaatatcaacaaacaataaatgtgacacaagaaaatcatgtaacgttttcctcaatgagtccatttgtcaaaataaaaaattgggtttttgtttgagtctattttttgttctgtttttcaatctatttaagcacactagatttgccaacttcatcactcaccaaaatccaacgtgaagaagaagatcaatatggaagctctaatgcttatcttcacgttctgtttcatagttctctctctcatattcctcatcggaagaatcaagcgaaagctcaaccttcctccgagtcctgcatgggcgttaccagtgatcggtcacctccgtcttctcaagccaccactccaccgtgtttttctatccgtctctcaatctttaggcgatgctccgataatctccctccgtctcggcaaccgactcgttttcgttgtctcttcacactcactcgccgaggaatgcttcacaaagaacgacgtcgtactcgcgaaccgcttcaactcccttgcttcaaaacacatctcatatggctgcacaacggttgttacagcttcgtacggcgaccattggagaaatctccgccgtattggcgctgttgagatattctcggctcaccgtctcaatagcttttcatctatccgccgagacgagatccaccggcttatagcttgtctctcacggaactcttcactcgtaagtttgttctttgttctttgttccaattttatgctaattagcaaaatttattataatcagaatccttagtccctagtcaatctctgcttataggtgaatttcagtgtattgtagcaaatatttaacatatgatatacaataaattttgcaggaatttgcaaaggttgagatgaaatcaatgttttctaacttaacattcaacaacattataagaatgttggctggaaaatgttactacggagatggtgcagaggatgacccggaggctaaacgcgtgcgggagcttatagcagagggaatgggttgttttggtgctggaaacactgctgattatttaccgatcctgacttggatcacaggttccgagaaacggataaagaagatcgctagtaggcttgatgagttcttgcagggattggtcgatgaaagacgagaagggaaggagaaaaggcagaacacaatggttgatcacttgctttgtctgcaagaaacccaacccgagtactacacggacaacattatcaaaggaatcatgctcgtgagtaacattttaagttcattagtcgattgtcacatttggtataaaataataattagttttgttttatgcttgtatgcgtccaatgtgttgaagtctcttatactagcggggactgatacatccgcagtaacattggaatggacattgtcagctttgttgaaccatccacagatactaagcaaggcgagagatgaaatcgataataaggttggcctcaacaggcttgtagaggaa

SEQ ID NO: 26122 - DNA, 1229 bp, Arabidopsis thaliana landsberg
tgcaaatactgctagcgtccaggaacaggtaaaattataataccgattgtagtaaagatatattggaaattagagagtcatgttttttggggataaaattgctaacgattcactgtcctttcattatttccaggttcttatcagaaaagtgattgaacttcatgataaatacatggtatatgtcaccgagtgtttccagaaccacaccctcttccataaggtctaatgttctttctgcgcacttgtcatttgtctatcttattcatgtttatgttgcgttactaacctaagtttatggaaacatattttaggctttgaaagaggcatttgagattttttgtaacaaaacggttgctggaagttcaagtgcagaactacttgcaacattttgcgacaatattctcaaaaaggggggaagtgaaaagcttagtgatgaagctatcgaagatatgcttgagaaggtacttttgtcaaatttttttttctttttcaagtctccaaagagtggtgctgaagtttataatgttgttacaggttgtcaaattgcttgcatacataagtgacaaggatcttttcgctgagttctacaggtttatctccaacttcaatctttctttatctgtggatcgactctttttgcttctactctttgtttttcttgtaatgttttgtttttactagctttttgtggagatgccttgcaacaatatacaatttgattgacataagttggattactgagttgcaagccattttgtttatggttttgattgcaggaagaagctggcccgtaggctcttatttgatcgcagtgctaatgatgatcatgagagaagtatcctgacaaagctcaagcaacaatgtggtggacagtttacttctaagatggagggcatggttagtttgagtgtccctgtgtttcttattttaaagcggtgcgtgctctgatgacttatgttttctatataattttaatccgctggtgacaggtgacggatttgacactggcaagagaaaaccaaaacagtttcgaggattatctaggcagtaaccctgctgcaaacccagggattgacttgaccgtcactggtcttaccactggtttctggccaaggtacaaatcatttgacataaatctacccagtgaaatggtaaaaactctattgattttcttacatacctgacaaggagattggttggttctgatagatccaattcgtggattcttt

SEQ ID NO: 26123 - DNA, 633 bp, Arabidopsis thaliana landsberg
aaccaaaatttcgataattcttaagatatgggtctgtctaccatttcgtttgactcttttgctgtaggttcatttaagtgaatcttttcaatggctagcatcgtggtgaatgttcatgactatggaacttgggtggaggatggagctcgggttcagtgcacattttgcgacaagcgaatgaatgactttaatcgtctcaagtatcatttgggaaatgtctgtaaggacgtaaccccatgctcacaagttccattacctattagagaggcattttttaagatggttatggagcagagatatcctgatcgtaaacgtggaagatccaacaaaggttttactgcttctgagacagctgcggaagctgaaaaactagcccaaatggacgttgctcagttcttttatgaacacggtgtcgacttctctgctgtggattcgacaagtttcaaaaagatgatgatgatcaagacagtaggaggagaaggtggtggtcagatgatccctgactctcgtgatttaaacggctggatgtttcaagaagctttgaagaaggtgcaagatcgtgtgaaggagattaaagcttcgtgggagatcactgggtgcagcatcctctttgatgcttggattggcccgaaa

SEQ ID NO: 26124 - DNA, 802 bp, Arabidopsis thaliana landsberg
tactcgctaataccaagacttagactaacttctggaccttattgccttgcgccacacgtcaaataagattattactcccaccagaatcaattgatccaacctttaaaaaagttttcattagattgttcattttgaacttgagattttttgagaatttccagaatgagacaattagactatattaaaccgcctcatatttagcttgccttaccaaaatttatttatgggtcgggcttggtttcttgcacatattctctaaatgatttgcggctaccacacgtttaaaggatttatttgctatgttactgttatgttaaatattcttttttgcttttgatttttttgttaagttaactttttaacttgtgttcacattcattgccaagttgcggagataaggaaattacgacttgtatattatacgaagaacggaagaagcttgttcaaaagacacaagagaaaaaaagatagacaatatggagttcggtctttcaatggtaatcacaacttccgtaatgttaagaattgttattgtcgcatctatctagctttggttttggattttatatacccgcaataaaaatggagaggaccccaataatgtcacatcgctatagacatatagttattttttttatttcataattatgttattttttcgttttttcttgtgatattgtaaccctatgaaatgttttctcagttatttgatcattgtgttctgaaatctacagaattgtttgttactcttctcagtcacattatcacatcacgccactaaaccaaacccaataaaaaaaaa

SEQ ID NO: 26125 - DNA, 1476 bp, Arabidopsis thaliana landsberg
  unsure (1)..(1476): unsure at all n locations
aaacgggtatctaaatctattaacggccatatggtattttttggttatttattcatatataagttgtaataaaattggaagtttcagtagagacaaattctgaagaagagtttataacaagtgtagagaaaacagacactacttgtattaatttgtagagttgtgtctaaataaaaacacaaaatagagncaatgtagggtagtgtttatatagtccctaccttatttataagaccctccaaaaattttattgtatgcattcttttacatatttttggcctttcccttatggcttgtctctaaaactgctttgtttcctacatcccacatgatatttgctttcacattacatatataaaaaagaatattttgatggattgatatagtggtataggaaaatttgggagcattgttatatctttagatagtcctgagtttaattcttcattgatgcaaaaaaaaaaaaaaaaaacttagaccatttggctactctatctaggccataatataacaatttggccttgtaagaaaaaacaataacccttgaaaatagttggacgttgtatttttatgtcttgtgataaaaggaaaatgttcaaattttgaagagatcatataagataatgtacgaataaaaacaagtgtttggacatttatgaaatttaataattatatttgatgtcatatgttacgtacttacgcggctttgatttgatcaccaaggaaacacttcatgtggttctgcatgaattagtcgttgttgtgtatataatacatataacctagtcacaaatcatccaaaaagtcataagtaaacctaataaatctatgttaaaagcatatatgagatttttcttattaaatttaataaacacttccaaaattttctctctcattgtgcccttaaatacccctccatattcctccccaccaccttcacatccacacctttcttcaaacataccaaactctctctccctcttccctcttctctctagccaagttagatttcaataaggtcaaatcatggcgataaagaagtcgaacaaagcggcgttgtctcaagcagcatctctaaagcaaatcttgtagttgtgctcaagtctaggaaagaagaatcaaggtaattgctacttcaacgacgtgccaaaaggtcacttcccggtctacgtcggtcaacaccgaagtcgctatgtggtcccaatctcgtggctagatcatcatgagttccagtcactcctccaactagccgaggaagagtttggtttcgagcacgagatgggtctcactatcccttgtgatgaagtcgtctttcgttctctcatctcaatgttcagataatactcgatatcgaggactgggcttcattagctcaactggtcattctttcaagaaatattccccttttaaggaagtaacagttttgagcacattgtcacatttcacactcggaagagtcaatactcaaattttttt

SEQ ID NO: 26126 - DNA, 1079 bp, Arabidopsis thaliana landsberg
cattgaagatgtgctgctagaactaatggaattggctgctattagcaaaggattaccctcagtattacagcttgatcacgacacattgcagaatcttgaggtgtatagaggtatggtctctcagatttagttagtaggggatttggtaatcacggcctaacggtctacttagtttttaggctttacaatcaataattttgggtaatttattttagtgtttttcctctctgaaattttaagcttagtattaatttttatattcttagtttggtatattctatggcctagtctggaatattcaatgttgatgtagcatgttagaacactgcgaagattattttattgtaattacattgatttctagattgggtagtagcttttgtatttgctttctcttacaaatctatcttcttcatatacttatcaaaatcaagacagccaaagtaatttgcttataccttactcgattggcttagctttatacaagggttgtaatttatttatggttcctgcaattcatcatagctattctgctttttcagattctctgagcacatttccaccaaagtctttgcaactaaaaatgccgtttgccatttctccatggaaagattctgatgaaactgttggaaaccttctaatggtatgttgtattgatctttaccctctctccggctgctacctctcatttaaaattagtattatgatcagaataacttggagaccaatttgaaatcagttggatttgtttttccgtgtattatgcacccttttgcagatttcacatatcttatgttgtgattgcttttcaggtttggagattcctgatatcattttctgatgttcttgacctatggccttttacactggatgagtttattcaggcttttcatgactatgtaagtcgctctttagtacctatagactgttttctcgtgttctatagttgtttctttcatttcattgttcgtgctctgtatttgataaagatcctattgtaggacacaaggttgctgggggagatacatgttactcttctaaaatcaataatacgagatgtcgaagatgttgctagaaca

SEQ ID NO: 26127 - DNA, 802 bp, Arabidopsis thaliana landsberg
tgtccttagtcctcagcattatgagaaatttcttaaggtgccgatgcatgttcagacagtagctttcttctgccagaaattatatggagatgatggtttaaagccgtatgacattacacaactagaaggttactggagacaagaaatgcttagatacttgaatgtatctattttaaaatcatttgaaggtgctcaagcccctggtactgacccaggattaaaagctccattggttggttgtgttgggattagatcaaggaaaagacgccgtcctagtcctgttggtactttgaatgtatcatacgcaggtgacatgaaaggtgactgcaaatctagtccagattctgttttggctgttacagatgcttctatattcaagggtgacgatgatggttcttcccatcacattaaaaagggttcacttattgaagttctttctgaagatagtggcatcagaggctgttggtttaaggctctggtattaaagaaacacatagattaggttaaggtccagtactcaagatattcaggatgcagacgatgaatctaaaaagctagaggtacacattttaaaacccttgctttggtttcgtacctactgtccagtttgattacatgtttttgctgcaggaatggattttgacatcttgtggttgctgctggtgatcatctgggggatcttataatcaaaggacggaaagatgtgagaccaatgctgcagcccatcaaagaaaatgatgtatgtgtcatcggggttggtatgcctgcggatgcgtggcggtgcgatggatggaggcaaggg

SEQ ID NO: 26128 - DNA, 951 bp, Arabidopsis thaliana landsberg
aagaacctgaagaacggaacccacttgagggggtaagtcttgcttgaaaacagatttcagattcgactcattggatactttttgtctaactcatttttctttcttcacttgaaaacaaatcttgtgctttcagagacatcaacatgatgatggttggtgatccatctgttgccaaatctcaacttctgagagcgataatgaatattgcacctttggctatatcaaccacaggccgtggttcttccggtgttgggttaactgctgctgtgacttctgaccaagaaacaggtaaaaagcacacaaaagcgtttccacatttttttatcaaatgctaaaatcaaaatttgaaggaaggtcaaaagtgctatttctcattaaaatcaaattctcattttcatcaggggaacgaagactagaagctggtgcaatggtcctcgctgtaaaggtatcgtgtgcattgacgagtttgataagatgaatgatcaggaccgagttgctatacacgaagtgatggagcaacagactgtaacaattgcaaaagccggtatccatgcatcactgaatgctagatgcagtgtggttgcagctgcaaatcccatatacggaactgtaagttctcaccgaagttttcataatctacttactctactgactagtatttttttgtcctaatacctactcttgctcctgcagtatgacagatcactgactccaacaaagaacattggacttccagattcgctgctttctcgttttgatgtactgtttattgtgttggatcaaatggatgctggtatcgacagcatgatttcagaacatgtcttgcgcatgcatcgttacaagaacgatagaggtaggccccaaaccctgcttctatgttttactaaacaattcacaaaccatgtcttgaaacgcatctgacttttgagtgccccataggtgagtcagggc

SEQ ID NO: 26129 - DNA, 1147 bp, Arabidopsis thaliana landsberg
gtagtggatccaattttctatccaactttccactttctctttctaaatgaaacaattccatatttttcatttcatttatacatcatagacttaattaatgatattctctttctagtaattagtacattaatttaaatttatcaagaaaattctgttgaacatatataatcaattattatgaaatgaaatttataatgaaatgatttgtttgatagaaagaataaattataaactacttaagagaccgacgaagatagcaacgacaaaaccctaaccttataccaaccctcatttaataccaataaaaaaaaagagatagggacaaacaaaaatcgtgctatataaccgaagcatccactacaaaggttggagaatccttaaactaactatgaaaacggaaaaagttatggagagagagatcgagacaacgccaatagagccacttagcccaatgtcacatatgctaagttcgccaaatttcttcattgtcataacttttgggtttaaaactcgatgcaaccgatcggcctttgttgatggcatcaacaacacattgatcaatgctcccagattctccagtaaaatggtaaaaatatttattctacacgtatgcatgcatattatattatatgtagacgcataaaaacaagtatacgtaaatctactcgtatgtgtttttcttcttcttataatatcaaagaattcacaagttcattcttcagtatatattcttacaacttgtgtttttttattatatcaaagaatttaaattccctctctatttctatgtatgcaacacacatagatttgttctaagttatgtcttagggatcatattttttgttttgtttttggttccaggagataaaatataagaaaaaaggagagccggtctggattcctgccaaactccgagtagatgatcatattattgtgccggatcttgactattccaacatccaaaatcctgatcagttcatagaagactatacttcaaacatagctaatattccaatggacatgtccagacctctatgggaatttcatttactcaccatgcagacatcaaaagcagaagctttggctatagtaaacatacatcactccattggtgatgggatgactgttatggccctactactcgctt

SEQ ID NO: 26130 - DNA, 2454 bp, Arabidopsis thaliana landsberg
gcagtgatccgagttcaaaattatcaacaagctgtcacccgctactataactccaatatcaaaatccggagattcgaagtgggagagctcgttttgcgaaaagtgttcagcaacacgagagagctaaacgctggaaaactgggaactaactaggaaggtccctatcgaatcaccgaggtggtacgttgcggcgtctataagctcgtaaaagttatcaacggagtacgtgagttacggccttggaatgccatgcatctcaagaaataccacgaataggtactcaaaaacaatcaaactacgataaggcttgatcccttggcaggatacgtaggcagctcccccaagagcagaaccaccaattcaatcaaatcacaaaagggcttaatcccttaaccaggtatgcaggcagtcacctccgcaaacgcaattaccacctcaacccttccatctgaaaggcgaaacttcaataagggaaatagatatcgcatcccccatcaacgaagatcagctgctcacctgacagtttaacctttcttcggtatcgaccaggtccctgctcaatgaccaaacgccagatcgtcgcttgctttacctccttttcgtttggtcatcgagcagggacctgctcgataccgaagggagattgaactatcaggtgagcagctgatcttcgttgatgggagatgcgatgtctgtttcccttgttgaagtttcgtcttacaaatagaagggttgagatggtaattgcgtttgcggaggtgactgcctgaatacctggttaggggattaagcccttttgatttggttgaattggtggctgcgctcttgggaggagctgcctatgtaccctgccaagggatcaagccttatcgtagttcgattgtatttgagtacctattcgtggtatttcttgagatgcatggcatttcaagaccgtaactcaggtactccgttaataacttttacgagcttatagacgccgtcacgtaccacctctgtgattcgatagagaccttcccagttagttcccagtttatcggcgtttagctctctcgtgttgctgaacacttttcgtagaacgagctctcccacttaaaatctccaaattttgatattggagttatagtagcgggcggcagcttgttgatagttttgaactctgatcattgcctgatctctgcgttcatcgatgaagtccatgttgtcctgtagcatttgcgtgtttaggtccaagttagcaggactggcggttcttcttacgcttggtactatggtttcgacacggattactgcttctaaaccataggcgagagagaacgatgtttcttgcgttgatttgcaaggtgtagttcggtaggcccagagaacttcgtggagtacgttggaccacattgactttttgaaatcaagtattttcttgatgttgctcaatatagcttcgttggcggcttctgcctgtccgttaccttgtgggtaacggggggtggatgtggtaagaggtgtggatgtcagattcacacactcaagtatttatttatttagtgagaaggattattcttgaggacaaatatactagaaaatagattgatgattatagagaaagctatgagtttcgtaagaaaatgtgtatagttagtttgcacaaaaatgcgtgtgtctttacatggtccttgacccataatttatactcaaagaatacatttatttctcatttacacacaattattctatcttaaatgtatccgtttcaattttcgaattaactattcaaacgtttgaatttgaattgactctgatcttcatgagcctcgccttttaaccgacaaagcccagcccatccttgacttcgactttgcccccacctcgcggtgtgatcatttcgcccataactcgccttcttcccaagtatcttatgggccttactccttgtgggcttacttttcatctacatggcaatcttttgtaggtcccaaacttcggtgcgggatccgacaccaacaattagcccccaagtcttctcgaagtgcttgtccaattcggaagactttattatcttaatggacaaagattgcgctaaatgacttttttatttcccaccaaaaccttttttactcctttgattccggcattgtccgtatttacccgtatgacatctatcaccattatgaccgcatcttcagtactactattaaagcgggaaaactcttccatttcccccacaaatcccgaggcgatttcatcatcaccaccatcttgcgtgaggtaaattcattttatttctttcttacttttacgctttgcctttagaaagaaaattttctctcttttttctctgcaaaccttctcttcttcaagtgctcgatttttccactctcttccatgtccttcgatgagggaaatctagcagcgacatatgcactcgcccaaacaatatctccggtccacactatatat

SEQ ID NO: 26131 - DNA, 872 bp, Arabidopsis thaliana landsberg
tgtttttcgcggccactgaggcctaaacattttaatgccggattataaagctgtgttttctttcctcttgtttcgtgtgttaggacttgtttggtagcagaatccctcgtccgagcgtgagttacttttcgcggaaggtgatgagtgaggtatccgtatccctgaggcataggagtccctcggctcggtcggccttgccgcttacgtgtactctcatcatttttggggttctgctatcgaagcagtcaaaacggcacgaaagtcgttctggcagaaaagttttcaagcgttaggacttgttcggtagcagaatcgcttatccgagcgtgagttacttttcgcggaaggtgatgagtgaggtatccgtatcccggaggcgtaggagtccctcggctcggttggccttgccgcttacgtgtactctcgtcgtttttagcacccgctatcgaagcagtcgaaacggcacgaaagacgttctggcaaaagacttttccgaggaaaaatttgacgcggatggggttccccccttctagcccccgagggagggtcgggctttgccgaggcaaggatgacccttccttgatggttagactttgtgtgtgaacggggtgtatgaacgacttgaaagcatcttaagggtagaagcgacgtagctgtcagatgttccaagcgttgttgtaaacctcgccttgactattggccagcttgtacgtcccgggcttcagaaccttggcgatgacgaatggcccttccctaggaggcgtgacgttgtgccaccctcgagcgtcttgtcgcagccgaagcaccaagtcgcccacctggaggtctcgggaccgaacccctcgggcatggtagcgtcgcagagactgctg

SEQ ID NO: 26132 - DNA, 583 bp, Arabidopsis thaliana landsberg
tttagtaatagtttcaaggcctgcacgaaattgatcgttctattagagcatctcatactgaaaaagatcttagttaataatgatcatatttcacctgactcattatcacttagtattgatatggaagctaatcagatacatgatattgaaaaacgaatttcaaagaaagtaaagcttgcctgctgatcattcttatatgctgcaaggtgcaaggccgtgttgaagtcaaaatcccttttattcagaactcggttctcgatatagtaagcatctttttggctcattctctggatccatcccgtgagaacctggagaacttcaaatctatcattcatcacagctagatgcaaagcattttggcgatccacgttcacatcttcaatacattcaggggaagttatgaggcactctgctacaagatcatcgtctccccttatcactaagagatggaacggcgtgacgccatttctccctttgacacgggacaggccaccatcatgccagagcatatgggagacaaagtcgctttgttccttttccacagcgagatgcaatggactgtaaccgcttgtgttcagctttc

SEQ ID NO: 26133 - DNA, 729 bp, Arabidopsis thaliana landsberg
acattcacattctttaactcattttatttaattttgtgtcccttatcaagaatgagtatgtatgtagtactctataagaagacagaaataagaattgggtatatatgattgtgtggacatccttagtgtctcgtgaatcgacagagactctccaactgtattcccttccccattctcattcccataagccttcactttcttaaattgcatgtattgtttcctctgttaaagaaaatagaaactataatttacttaagtctagttatcaattttagcctcactgactatatgtctccccaaatctaaaaccaatagttttttaaatgtatagatatgtaaaacaaatcatctgtaaaatataatactcttccaacggttggaaaaaaaacaagtatgtttttagttgattgtataataagctatgtataagttttttagaacaattatatcaacgcgaatgaatcatcgtaacctcttcttacatttagtttgaattaccgattagaaataggtaaatccgtccatgattaactgttactgatagtctgatactattagttgactatccaaatcatcaccacagtaaatatttcgatgtaaaattgacaattaggatattcttctaaccataatgattgtaaatgtcattctttaaaaaaacatggatgtagactatactataaacatcaaacatgacagacagggattcacagtttcgaaatgaaaaac

SEQ ID NO: 26134 - DNA, 1300 bp, Arabidopsis thaliana landsberg
aaaacgttagtctggttgtcaatggcaaagataaatctgtatgaggcatatacaatgttaattctccatacatttggggtgtagatcatttaaactacatatagcgtgaagatagagatatacaacgaatccagttccaaaagtgtggggttgtattattattcagaggttgccattggcagaggcaactcgtttgcatcacatgaaaaaaaacatatccagtgtcatgttcccattaggagtcgacatcattcaattcttaccgagttatttatgaggaattttctagaatatttgtaaggaatattatcagatttaaccagcttttttttcttcgattcagatttggcacagatcattttgttgtgtagtatatgttaacttccacacattattaagtttgggtgatatacatcgggtaatttatatggtaagagacatctaaacgttatgattcaaattaaatcagcaaaagcttggtaaccgcgaaaatgaaatccttttattgaggcgggccatctgatacatattcaatacattagtatatagtactattttcttagaaaatacacaattaccagaactagcttttgtcaaagaatgactagaactacctccaaacgtaattagtgtagaggttagacgcgcggcctcagaacagatccatatagcatctaatgtttttcttttcgaatattgattataacctaatctacacataaaatttaaaatgctattgataataacatactaatgatgaagatttttcacacgctacgggtaattaaggaagatgatgagagtaaaatgaggaaccacaaagtaacataggaaaacaatgatataattcattcgcgtgcgatttacatataatttcacaacaatctacttttgtttgtatcatgtaataaaggtcatccttttgttccttaatatacgggatgattttgatcacacatattacgtatacatgatcaaacaagagttctttagtatatttgaaagaattgttgacaagaaagaaacaaggtttcgcatgtacgagggggtatctgctcgtgtgggctatacatgtttttgagtaaacgtgtcgctatatacatataacgtactgaatatatagttgtaaaaagtttggaacattgttggttgatcatgtgaccaaatttattatcttacactttgtggtctatctaagttggaaatttttggttaaaggaaattgctgacctagattcattcataaattttcaggttaaagaccaaaaaagatatttctcttatctatgactccgtattg

SEQ ID NO: 26135 - DNA, 2997 bp, Arabidopsis thaliana landsberg
  unsure (1)..(2997): unsure at all n locations
aaaccttgaatggacctcttctccaacttcctattctttcttcttcatcatcaataaaccaaagtgttttttcattcactgtcttcctcaatcctcagtgcatccaaattcaacagaagactgattagctgtctagtacaaatcataagcaactcttctttcttttttttgtgtaaaatctttctcaaacagtttctctatcttttctccattattgtatgctgcaaagcaaagtctttcaactacgaatcataatactataagatagtttatatagagttcgattccacaactaaacaaaagaccaaaccatgaacgtgtaatacaatgcagactcttgtcatttggttaagagtcactgaaagatctctacaaggtgctgccgtcacttgaagactctttctctttctctcttcgatttcccaagacgtggaacaaccacaggaccaccacgcactctttcaagggcaaaacttattctcaacggtcgacccaataatccctgtaacagagagaatctcttcagaaaccattcataatgatagcaacacaaattcttttctttttttggttttacctttccatccatggcgtcttttgcagatagagcatcaccttcttctgcaaaatcaacaaaaccaaatcctcttgatctcccacttcctttgtcatacgcaatcctaactgagaacacatttatatttgacacattaaagaatctaaatgaaattgcaactcaagcacttcatgtgagagagtaagagctcttcaacccaaatcctataaactcatattaacacatcctacaaacgattagataaccaaaagtcataaccaaagactcgttcaggcttttcatcgaacacctggaagagtttagaaatgacaaataccttctgcaacctctccaaaggaagagaaagcgtctttgagagattgctcatccacagaccaggacaatcctgcatacttacgggtatcaaaaatcattcattatcatctacatatgtaaatgtgggtactttgttacaatactcttaacctncgatgaatagcttggaactgggcgatgcacaagaagaagtgcaaaattgaggaagaaaatggaagctagaagaaatagagtgttgaggtatcgctgaaactcgtctcactaatagctcaataccatttttcatcatgatcacaaaaacttgtttcttcaaatttaagctttgttttgggtttgaagttttttttatttatataagtgaccaccaaaaaataaggagccaaacaaaaaaaaaacttattttattattgaaatatctttgtggatgaggaaggagtaaccgaaaaggataaatcatttctttttcttcttcctctgctttcttcctaaagcctactccttttcaatggcgacgttaggctttaacacaaggcgaatccagacaccatcacttccgagaatccctaaaccctcttcttttactaaacccatcaaaacccatcatctcttctcctccgaaactctgatgaaacgctgccgtttcgtctctagatcgttacctgagagctcactgtcgattacaaaagaacaagaggtagctaatgaagtagaagaagatgatccaacttcagagctgagctatctggatcctgaatccgatgcggatagcatcaaagagtgggaattggatttctgctcgaggcctattcttgattccagagggaaaaagatttgggagcttgtggtttgtgatgcttcactctcccttcaagtcactaaatacttccccaataacgtcattaatagtattactctcaaagacgccattgttaccatcactcaagacttgggtgttcctcttcctgagaagattcgcttcttcaggtacaaaagaaggagtattcttgttcttagtaaatagaaatgtaatctaatggtgaagttggtatttgcaggtcacagatgcaaaccattatcacaaaagcttgcaaagagcttgccataaaggcagtgcctagtaaacgggtgagtaacattttttttggtttacatgttttatttctgtgttagaagaacaagttgataaacaaaactaaatctctgcattacagtgtctgtctctgtttctgtggttgcaagaacgttatgacactgtgtacacgcgtcatcccggtttccaaaagggatcattgcctcttctgtctctcgacaatccctttccaatgaatcttccggagaacttgtttggggagaaatgggcatttgttcaattaccttactcagctgttagagaggagatctcagattttgatgagaagtttgtgtttggtgctagcttagacttggatttacttggcattgaagtggatgagaatactctgattcctggtctctctgttgctacttcacgtgccaaacctctagcaggtaactgtccggtttcttgctagaccatcttttggaacaagttagtgtcttgttgttatgtggtttttgatccttagtttatttacctgatcattatagcttggatgaatgggcttgaagtatgttcgattgaagcagacagttccaaaggatgtttgattctatcagttgggatcgctacaaggtatgtctacgcgacctataagaagacccctgtcactactgatgaagctgaagcttgggaatctgcaaagaaaacaagtggaggtttgcattttcttgcaattcaagatgacttagattctgatgactgtgttggcttttggcttcttattgatttgccaccaccccctgtttgatttcccttttgataaatgtttataccatattttgccatttagtaacagatttctcacatgcttgaatttgaacaaattgttacatgagtctgcaaaaactatggacctaggaagtgagtaaggtacaggggacgaccaatcgagtcttaacaagatcatagctaccttcacaacacaagtaatatctacacagtttggcactttccatcttactgataa

SEQ ID NO: 26136 - DNA, 9207 bp, Arabidopsis thaliana landsberg
atatcaataatgattgctgctggaaaaatcttttgtactatcaaggtgcaaactctcctgcaatatcttcaggaacttcccctatcccacaagtatccaccggatttgcaaaaagatgatgagtttttcttgtttttacttcaagtcaattagcattattgaagcactagaactcttggtactatatttcgatacatcaagagttaacccaattatgggaaaaatttaggcacactataataacgtccaagttcacccgtaaagtttgctctgcctcatgcaatcatcttgctagaatgctagctaagctttcatctctagattagttacctgattgattccaaaggaaccctctagacactagactgcgacaagtttcagaaattttcaaaacacaaagacaaatatagtatgcaggtcaaagaaacaaacaagagccgtgagactacagaaaggacctaaacaagcaggtaagggaaaataagtgatcatgactccatccacctttgggcagggtgtataaacgctactttcagcaaaaaagaagaagaaaaggatcaccaaaaaatactaagagtcacaaacaaaatgctaataattgcttatgttaggcatgcattctcaaaaagaaaacttgacaaacagaaactgcatcctctctcacctcgaggagtagactgaaacccgcaattggtcagatggtttgcaagcgtctcgcctacactcttttgccgatcaggtacacttttagcttccggtacaggccacacaatagccgtctcggtggtgagattctcactagctgaagcgacttgaggctatacagcaaagaaaaaacaaaacaagaaaagagagatttttaatataaataatcgggcaagggcaaccattctttgagacagaacacatcaatttggtcttaggctgagagaagcagaccaggagagtaagaagagcaagtaaagtaaagatctttgacacttacttggctttccagtatcttcttcacacttgctgaacaccctccacatgtcatccccttcaatagagcagaacatccatgttagtaacattacactactggagtgaatccaaaatcatatagaaagagagagaagaacctactccaacatcgagaataatgatatctgacgacggaacagagacaccatcacttgcattagcacccagttttgacttggaatcaccactctccgatcctccgccaccaccaccgccgcttccaccattataccccccaaatccagaaccgccgccacttgagatactcctgaaagacggcgatgagctcgacaaacactctaaacggtgtcggattaccggcaaaacagcagctcccaagcttctcaaagctgaattcgacgaagtaaatcgactgccatgaaacccaccaagacgtcgcacggagggagaacagcgagcgagcaataaaggatggaggtgtctggcgccggtaaagtggcggttaagtgctttagaaatagtgaggagaggtaatgaaggaccaccactacttcgagccatcgctgttgccttgacggttgagaaagctgagagtgtagactccatgaaagtgggtggctccgtaatctcaatctctcgagtcccgttatctttcttttttccaggcctcctgcgtttgtttaagtgttctctaaacgaatagtgtccacgtgtggaaatggcattcagagttttccaattttcttcatacaacttttggtttgtcaaaaggtttatgctttgtggtatttgagtcaaaaatttacaccttaatgggaggacttttctgtgattgaatcaaatatcgaatttttgttgcaagcgtgacgtagagatttacgggtttataaagtcagccacttatttcagacaatatcataacccaacacacaaaaacaacaatatcttacttttaacagtacacaagctcatttaacttggcaacttaataagtagagatcagcctctatacacacacatcctagctcggataagtattttcttgttctctagactccaatagatgacggaagattcccggaaccaagccttctctttcgcagacgctctgcaatgatgaatgcaagctccagagactgagatgcgttgagtcttgggtcacagtgagtgtggtagcgtgagcttagatcgttgtaagtgatggtgcgtgaccctccgacacattctgtcacgttttgaccagtcatttctaaatgaaccccgccagggaaactcccttcttgatcatggacgtcgaagaacgctctcaattccgcctgatacaccatataatttaatgggtaactacatgaatcataagcaagattatgcatagagttggatgaagaagtaagttcgaatgattaccctgattgcatcgaaagaacgagtttttagcccaccaggagccatgattgtgtttccgtgcattggatcactaacccaagtcacaatctgaccggctccacggactgctctgatcaaattaggaagcttgacccgcatattctcagctcccattctcactataaccgtaatccttacaggcttgttctgagggtttagtatctctatcagcttaaccagttcactagggaccattttatcactcacctgcatcaaagtacatcaatcaacatctgtcattttctcatacaaaaatgtgctgtagcctctttgtaatggttttccaatatctttaataccaggcaattgagacctgcagggtatcctattgagttaacaacagtacttgagtctacatgtgagtgtttttttctatacgaacaaagctatgaaacttactcctattccaattaaccaaaccaagagacttgatgatcacataccttgattccgagggggttagcgattcccctcagaaactcaacatgagcaccatcaagttggcgagttcgttctccaacccaaagcatgtgcgcagagcaatcatagtaaagtccagatgttgaatcctctcttgtgagtgcttgctcataaggcaataacaaacactcatgggatgtccaaaactcagtagtagtcatgatcgggtgagcactagtaagtccagctgcacccatgaatcccaaagcctcatcaactctattagccaattcacggtacctgttttgtcacaacaacatcaagaaataagaaaccgtttctgacttaagaaaagtgtattctcaattggttaacatcataacaaacaagattataaacaaggagagaagtttataaacctgtcaccctgttcactatgttgcgtgaaatcaaggttccactggctaactctctgcatagctgcataacctccagtagcaaatgctctcaagagattcaacgtagccacagactgtgtgtacgctctaaccatcctatgaggatcaggaatcctcgatttctcatcaaaagcatcaccatttatgttatctcctctgtaactcggcagcttcacaccatctttctcctcaaatgggtctgatctcggcttcgcaaactgaccagccattcttcccacctgaaaacttaaaacccacaaaatcataaactatccctaactagagattcatcacacagaaaaatctccaggtaaagaatcgaccttgataactggtaactggccaccgaacatgagaacaacacccatctgaagaagaaccctaaaggtgtctctaatgttattagcgttaaattccttgaaactctcagcacaatcaccaccttgaagcataaaggcttgacccatagccgcttgaccaagcttatcctctagtttcctagcctcaccagcgaaaactataggaggaaaagaagaaagcgtctgtagaaccgaatcaacatccttctgatcaggataatccggcaattgcaaagctttcttcgacttccaactctctagactccatttaaccgaagcggaggctgattgggtagatttcttggggtcagtcgaatgaacggcgaagacaggggagaaagagattggacggctaggagcgtgacggtaggggaggaacgacttggtcgtgagaggagaagaagcgtttagagtcaccatcgctgatctttgggatttcgattgacgactagttcggcagagaatggatagagaagagaagagtcaaaaagatatgatttttatagcccaattatgaaaaaaaaacggtagccacaaaatatctgtgaagcgaacacatctgatagaaacagagggttaccaccggttgtaacgtcacccaattatcatcttcttcgtctactctaaaccatttctgtgacactctttgttacagacttcaatgtttaagttatggccgatcatttgattctttctcttcaagctcctccttttctcatcttcccttgttctcttcaccgttcatggagatttcccggtggaatcagatattccgttcctgagttccgattgtcctctcagctacagttggctaattccatttcaccttcaaagtcttcagcttcctcttcttctccaccggagaattctgctccagagaagttcgatctcgtgtccagcactcgtaagtcttcgtgtttcctcttcttcttttgttttatcttccttcaccggagaagttttgaattttagttttttccctaatttttgaagtgtctgaacactcaattactaggttgtaaccaattttacttcggattcaagtatcaaaacctaaaatattttttagtttcaagtttaagaatagaaaagttatttactttgaaatctgagctatactcttatattgatagttgtttggatcttgcagagcttaaagatggaagtcatgtctttcggttcggggatgcaagtgagattgagaaatatctcgaggctgaagaaaaagcgagatgtgttgaggtagaaacgcaaaatgctaagattgctgaagaagccagtgaagtttcaaggaaacaaaagaaattggtcagttctattattgaaacaagtactgagaaagaggaaacagctgctccttccgatcttagcaatgtcattaaaataaaggatcgtaaaagggttcgttctcctactaagaagaagaaagaaactgtgaatgtatcacggagcgaagataaaattgatgccaagagtgctagtgtttccaatctgagctccatagttagtgtagcagaagctattccaattagctctactgaagaagaagctgttgttgagaaggaaatcacggctaagtcatataatgtagagcctctttcttctgaagccatgaagaaagtttctgtcaataaaataggagactgtgagacaaatggttatcaagagaatcgtatggaggttcaggcaagaccgtcattgtctacacaacaggaaattacgcctgtatccaccattgaaattgatgacaatttggatgtgacggaaaagcctattgaagctgaggagaatcttgtcgcggaaccaacagctacagatgatttgtctcctgatgaactcctttcaacttcagaagcaacacatcgcagcgttgatgagattgctcaaaaacctgtaattgatacgtctgaggaaaaccttctgaacacttttgaagctgaggagaatcctgtagttgaaccaacagctacagctgctgtctcttctgatgaactcatttcaacttcagaagcaacacgtcacagcgttgatgagatcgctcaaaagcctattattgatacgtctgagaaaaaccctatggaaacttttgttgaaccaaaagcagtgcatagtagcgttgacgagagcactgaaaagcttgtagttgttacgtctgatgtggtgagtactaactctaaaccattaagtagttttaacaggtgtagaaggaaagagacatcagagagtgttgttgaacagaattagtgccaccactctaattacttatcattcatgaaggaaaatgatggagaaaatgtagcttcaaccacagaagatgaaataactgtgagggacacaataactgatagtggtagcatatccaataatgatgacacaaaagtggaagatctccaacttcctgtacctgaaacggccagtcaagaaaaaattaaagcggcttctggcaggttagtaagtgatatatttaactcttcttagacaaactatactattgtcttgcacagatacagctacatgcatatatgtatgtatctattcatattttcatacagggctaggaatcatattgcagcttttataaaagcatgattgttttgctatggttggatgtttgacatctaaacagggaagaacttgtgtccaaagcattttacttggactctggttttgcttcactccaaagcccctttaaggtacctgtaattctttctgtttagtatacacaaaaataagagacaggtgttgaaatattaattattaacactctatatctcaagatctttcatatcttggtctcatttccaaccacctcaaaaacatcatttttaacattctgacaatttttgaattttaaatccctatacttatgttatgtggttagtaatttagaaataatgatgtccaggcattggcaggtcgggaagatgcttattttatctctcaccacaattggataggtattgctgatggagtctctcagtggtcatttgaaggtaaatactgtatataagtattttcacatagttttccaaattcttgcagaaactcagtcacttgtatttggccttgccgaatatatgtttgattcatctttcaggaatcaataagggaatgtatgctcaagaactcatgagcaactgtgaaaagattatttccaatgaaactgctaagataagtgacccagttcaagttctccatagaagtgtcaatgagactaagtcctctggatcatcaacagccttaattgctcatcttgacaataatgtgagacttggtccctaacatatatattacattggaaatccttttgagatagagtcagtctgtgatcatgtaaaattactttgtaggaactccacatagccaatattggagattcgggattcatggtcattagggatggcacagtattgcagaattcgtctccaatgtttcatcatttttgttttcccttgcatattacgcaaggctgtgatgtcctaaaacttgcagaggtacgatgtcgttacttaagcaagaaatctttattttcaagtaacagacactcttgaatggttcatctacaccagaatatgtgcaacataagtggtcttgctttacacaatttgcaggtttaccatgtgaacctggaagaaggcgatgttgtcatcgcagcaactgatgggctctttgataacttatacgaaaaagaaatcgtttcaatagtttgcgggtcactgaaacagagtctggaacctcaggtgctcaatggtcttgaattatctcctctttttggttgaacaagtagtttcggcgggtgttagttgtgtacgagtcacttagctctcgttttcaaatggttttgagatgaaatgtgctgttatcaatgcgttggggatatatgagtttgattaatgtttgtgcggtgtaacagaaaatagcagagttggtagctgcaaaagcacaagaagtaggacgatctaagacagagagaacgccatttgctgacgcagctaaagaagaaggatacaatggacacaaaggtggtaaacttgatgctgttaccgtcatcatttcattcgtgaaaattgtctctacataaatatgcatcttcctattaattgtaaataatggagagagccgcacacattcacaacaccattctagtttttccaaaaatttcattgaaacgatgtacactggagtaagtttgcattcctgagctatatatgtgagccggatcagtcctggatctgacccgatatccagtttccgacccaaacctagtaaacacagtacaatattactcaacccttgtgacttgctctaaggccttctcagacaaaacaaaaaaaaggatgaagctttttcttagaaatgcttttaaaaccttaaaccctaagagaaaactagcgacgacgattcttccttcaatcaatttaattctcgttaaacccttctctcaatccaccaccattcccaaaaaacaggatcgagttcgtgaccatggctacgacaattacatggaagtggagaaaaaaatccgcaaagtcgtcaaatttcacagcttgattctctctcaacccaaccacacaatcgcaatctctcttctagacacgctcgctcgtcgtctaggtctcggcttcaagcaacacgaaccaggtgcttttctcctcaagttcccacacgtgtttgagatatacgagcacccagttcaaagaatcctctattgtcgattaacccgtaaagctttggatcaaatccgtcacgaacacgaagctgttctcgaccaaatacccgacgccgtgacccggttgaggaaactcgttatgatgtcgaatacgggtcggatccgtcttgaacatgtcaggattgctcggactgagtttggactccctgaagatttcgagtactctgtgattctgaaacatccacagttctttagactcattgatggtgaagagactcgagataagtacattgagattgtggaaaaggatcctaatttatcgatttgtgcaatagagagagttagagagattgagtatagaacaaaaggaattgatgcagaggatgttcgattctcattcgttgtgaattttcctcctggatttaagattggaaagtattttcgaattgctgtttggaaatggcagaggcttccttattggtcaccgtatgaggatatatcgggttacgatttgagatcgatggaagcgcagaatcgattagagaagagatctgttgcttgtattcatgaattgctgtctttgactgtggagaagaagatcacgcttgagagaattgctcattttaggaatgtgatgaatttgcctaagaaattgaaagagtttcttttgcaacatcaggggatattttacatatcgactcgaggaaattacgggaagcttcatacggtgtttcttagagaggggtataagagaggggaattggtagaaccgaatgatgtttatttagctaggaggagattagctgagcttgttttgatgagtcctagaaaggctaaggttgatgcagagttggttcgctacagagatgga

SEQ ID NO: 26137 - DNA, 1005 bp, Arabidopsis thaliana landsberg
attatttcctatgttttatggcttgtattccacattttcaggtaataataagacagcgtttgcgtttaaaattcagtttttttaaattcaattcgttaaggaattagatttgaatccagccagtataacataaacaacatctttccatttcaaggaaacttgctacgcaaaccatcagtgtattaatcgttgttgattatgctaatggtaagaagcgtggtgggttgggtcaatatgattttcatagccgagtatcccaagtggtcacagcatggtccatacttcttttggcaaagggtcctaaggtcaagtatatctttcgatagatggactcggtccattcttggggacacttcgaacgggtgtacgatcccatgaactccactttttgtgaactgattatgtgatcgagaacaaaactcaagaacttccataatggctacgacaatgtaaacatggtgtaagtgtaaccaaacgcttttatattttgtaacgacaattagaagaaaaatatctaagtttgaatatgtaattaatagaaaacaccgccgaaatagattcttaaggagaaaacaagaaactttagatcatacacgagacattattatatacaaacacaaatggaaaaagagctgtttcctgctcataagtcgtaagttacgtacatgtacaaacctgaactaaaacaggtccaaatctcgcaacattaggttttgtctctctgttttttcttcgtgttgtctatgtacaaatcatgttttcttatcatgattcaaattcacttttatcccctgccctacatttcttggtatacattgacaagaactacagtccgggtcagcatcttggtgatgccagactaaagcacgctctttcgcttctatactggatccatcggtagtctctgtatatagtctcataataggttccacaactttcttccactcgaggtcatcagataagccgcttgtttcccagtcagaattcagaagacttattccaccc

SEQ ID NO: 26138 - DNA, 585 bp, Arabidopsis thaliana landsberg
caggtgcttttgaagatgctgatattatccatgtcgacgatatcgtggatcctgttagagatttggagaccattactgattagttgcggctaaaggtgaatcaaatctctaaacagatgtttgactgctatatctccaaactcgtgaaatcctttctgtgtatattaatacagtagtctgttttttgcattagttggatcttcatttcatccattgttgttttggtttcaaactgaattctttggtgcaactttaggatattgaatttgttggaaagaagattgatgatgtcgagaagagcatgaagaggagcaatgacaagcagctgaaaatagaacttgagctcttgcaaaaggtatgctataatttgacaaccatgcagtcttgttctgcgaatgttattgctcattaattattaagtggccgaaaaaatgactgtacctctctggtttaggtaaaagcttggctagaagatggtaaggatgtccgttttggggactggaaaacagctgatatcgagattttgaacactttccaattgctttctgaaagccccgtgtttacttggcgagtagtcttgaatgt

SEQ ID NO: 26139 - DNA, 1712 bp, Arabidopsis thaliana landsberg
caaaccgtaaactgtacgccaaacgtgtaccggaaattaattatggttcagtttaattggattgaccggttaggtgattgatatctgtacaacgtaaacaataacattctcaaacaaaattgttcaaaaattgagtcaatttttactactgttttcttgtaaatcgtgttataatactcggaaatttcaaatattctggtacatctttcgttgcttaacctcaaataatcaaaacaagtgtaagtcaataaaagctacaaaaaaacaacaactcagatctctcagtaaacagatccttgagtgtgattcaaaagcccagaaacaacaccaaggattgaagaaaaaagtgcactcactgggatttatttttctgtacactaaagagcaaagaggaggtctcctactctactctcatctctccagacaacgttccctcttcatcttccccatcaaactcttgttctacacctttcacctacacaaaaaaaactttcattagaagaatgtgacggtaacaagttcttgattctccaatggttgcttaacagttaacaccaaaacttgaacacagacagataggtctagaattatccatatgtagtaagagaaatgttaggaggatcgctgttacctcggatacataatgcatgagcatattttcaattcccgatgttttagtgacagatgagctcggacaaccactacaagctccttgcatgctcagcttgactataccgatatccctgattaaacccacccaaaggatttgtacttaagactgaagagactagaaaaagaaacaggactgattgaccattgctacaactcaaagaagtataaacttacggatcaaacccacactactcaatgtccccaccatcatcttgaactgccgatctgatgcgtgtttctaagagttccttgatcattgctactgtttcagagtcatcctgaatcacaaagtttcaccaatgagcaagaaatagcatcatttacacttgtcaccattagcttatctaccaaaaccttggagagcattgcagaacgccaatccataatcaaacagaacatcataagtaagggaaaatgacctctctcattctagttgtgacgctccgctactacttgaagatcataactcatatgcatcagctcattaaagcaactggcataaattccataaccaagtatatcatgtctatataaagtttacagcaaactatcactctccaatccctcaacaaatgctcaagaagatgttcaatcatgcaccagacaaccaacacaaactatataagaaacaatcaccctgaagaatccaggaggtccagaaaatcacactctaaacaaaacaaactaatgggaaagtgaggaagcgatcacgagggtaatagagcgggaggggttttacctcgctgatggcagtatccttggcagcagcagcttgtgagtcgagaaacaaaggctcgccagaagaatagaaatccatgactgctgcaaatatctcaggcttgagaatatcccatgatacatcatctgacttagttacagtgacaaaatctgacccaaagaaaactcgaaccacacctgcaaagtcacatcacaatcaaatgaaagacacagtatttcgaaagaaaagattacacacgagagataacaataccatcaatggagtaaatagatttggcttatggcgaacccagagcagaacg

SEQ ID NO: 26140 - DNA, 824 bp, Arabidopsis thaliana landsberg
aaacgttgaaatacgtgcatctattttgcgtacatatatgaacaaacgtatgtgctggctaaattatttaattgaaaaaaaaacaaataatccagaaacagacaatacgtgaaagcaacatttgatgttctataataattatatgttgttttggtctttgatttaattattccaagagccaaatttctttcaccaacttgtttttacctttttatatataatatagctgaaaaaaagacaaagagaatatgttaaaagtattctccatctctttcaatgttttgttttgaactcaacaaaaatatttttaaaaaatttcttgttttcaaacattatgatcaaattgattgttattgatatctattgacttttgtaatacccattagcccaccaaggtagtaagtaggtatgcaattataattattagtttttaataatattaccaaaagaaatattgaaataatcttaaaatgtcaaaagatgtgattactaactgtaatctttttctttctattattaatctaaatgaaggctgataacttgaggcagcagaccgttcaccagctgaggcggatcttgaccgtccgacaagctgcacggtgtttcctagtcatcggagagtactatggacggctcagagctcttagctccctttggttgtcacgcccacgagagtaagacacatttttatgcatatatacatttcatagacgtataatagtgctaaaatatgaatttgatatcgggaattatcaatgtgaataggacactgatgagtgatgaaaccttttgtcaaacgacgacggatttgcagattgttcaat

SEQ ID NO: 26141 - DNA, 1751 bp, Arabidopsis thaliana landsberg
aaagccatatactgattttcaagaaagtaaaaaaaaaaagcagagtactttagttgtttttacagttcagacctgagtttctacagtactgaagataaggtgagacatctgatttgtctgaagcagaagagaagctaagcatgtgttcttgtcctttacgaggatcattaatagtggtagatctcagtaaagggatgccttgatgaaacgacagcgttttagcagaggcaggggaagaagagaatccatcagttgatgttcgtgagagctttgaacttctccagcaatcttcaccatcgaaaccggatctttcttgcttgttactgaaaccagatccgagttcagtttgacccggagaagaaacggtttcatgaccagaaacacgaactccaagatccataaaaaatggattcagaaggagacaaagaaaaagtagtgctaaataatcacttcagagatttttcccatgggaggtaatcgctttgagctcagtgaagaagagaaccgagagagagagagagagagacagagggagaagaacgaggctaagttttttattttctttatactctagatattatttttattattttggagaaaggatatttatttatttaataataagaaaaagtaataattgtgggagtgagagatatgatatagctttgggtggagacaaagaatggtaccgaaaacacaatcaagatctcggacatgttactacaaagaaatgaaaactataatcagatgctctacgtatgattttattttgatttatgtattatttaagattttaataattttgtggttacttttgtgatatgagaaaaataattatagaggaagcaaacaatgaactttttaagataaaagacatgtggacaccacgtgagacatgtctctctagtttcaacttcaaaccctaagaaaggaattttcatttgctttttgctttttgctctaaaatttgttatggtatgcatttttaccaaacgttgcaaaggaaaagatggggtatactttaagtgagattttagtatgaaagaagttagagaatgagattgtcgtattgaaataataaatatagtattgattataaactgcaagtttttgctctattagattatttatgggattaagaatatacatttgataaaattaacaaactattttgttattttttcatttcaaaagaaaatttattattactcaaaaatacaataatgttacactcccatcactagctactactactaaacagaaattcagtttagtttcgagtagatccatttgatttcaagtactttggatataaagatttaagatccaatcaattatttggtttggttttttccggacttgattgatccggatttctccagattcggttcgatttcaagtacctgaaatattaaaaaataatttaaaaatggtaattttttttataaaaaactaaaacttcgatattttgagttttttttttttttttaaatataaaagtaattactttcctaaatttatggttttagtttttggataactaaactacatcaaatttaaatataattattatattggatatctattcggattttattccgatattttgagtataaaagtctataatcctttgaaataatttatcggtttggagtcaattcagaatttttcttttctcggttttagttcggttctagatatttgatctagcaatattcgtttgtttaaactaaacaaaaattatgaaacca

SEQ ID NO: 26142 - DNA, 1242 bp, Arabidopsis thaliana landsberg
  unsure (1)..(1242): unsure at all n locations
gagcttccggtaagttgcaatttttatattcttattattcctatgcattcatgatattttctcggttccctagtaaaatagcatcatctctttattttcttcttcaaattgtgttccctcttgttctttgtccacaaattgttcccttttagttgttcgtgatttcgttatgagtgagtactttcgaaatacaataatataaatagaggattcacttgtaattggcttatcattcaagttgaaaccaatggcatatatcttgcgttatacaaataggttataggtacgtcgactgcaatcgaggtaattgatgtactataggtatagtataatattttaagattctatatcctttggtttagatgaagtacttgtactttccaagtgtgtattcttttgtataaatatagataataggtcctttataaagtattaaactatctattttgggtgatagttagttatgtttttggatatattgggtaagaaattttgaatctagaacatgtaactctatatcatagttctttagcggttgaactgttcacggtgattcaaatcatttcactatcatgatttcaaaatttgaatcacaaatatggtttactaaaaaatattcggtttttgatgtatcactagcacttaatataagtttcaactcatgttcttaggttgtaaaggtattaaaatgaattgaatcaaaagtgaacttaaaacaaaagagtctatagatatacttaaaagagcattgagtatctgagaacaatataattnnnnnnnnnnnnnnnnnnnnnnnnnnnnnnnnnnnnnnntgtgaaaaaacttattgactaagatattgatagctcctaagcaggggaccaaagcccttgctgtattttctttttatttctaaacaaaactggcctgaatgagtgagaggaccacagtttttttctttttcttttataattttcttcttcttcttataatcaaatatataataatttttgatctgcactgttccacagactaaagttgtatgcagccgatatcttagacttagagagtgtagcctcaacaacaatttttttcataatttatatttttaatttagtgcacttaagatggaatcaaattccaatatctggagacagttcatgtcacacacctaattagtagtgaaaacacattttaccagaataaaaaagaagttaagaacatcacaaaatcttatattgaatagtgtctcaactaatatta

SEQ ID NO: 26143 - DNA, 1190 bp, Arabidopsis thaliana landsberg
  unsure (1)..(1190): unsure at all n locations
aaaacaatgtgaggatgagtaagctagtgaagcaggtacaagccacacacttgttaacttagtacacatagagcttatgttaattaatgtctccttttagtttatgttacgcatttttctttcttgcgttttggcagatccgtggtccgctctctaccatgaggactttaagtaaaatgctttcaactcacactaagagaaatcaggtccttgcaattagcatttgtggccggaagtgttattctccctgagtcttgcagttatcggactgacttgggtttttgtacattgtagatttcacatgatattgtggaagacttaatagttcaaggtgatcaaataaaggatacccttgaagaacttcaggatgcagttcactnnnnnnnnnnnnnnnnnnnntttactttgtcccttttggttcttgagagagtcatcactctattttcagttgtctttataaatctgtctttagatgtgttgcgcatgggaaatctgtcaaaccatactcgaatttgatttttcggtttgtatttcttacaagcatttcattttcaggctaatatagtgcgccacaacgaagaagccctaaagaagataaataaaacacacaatgaaacaaggagatcaaagtatgaacataaggaccccattgatggctcacaaatcccaagtacacgcctttccttgggttctggattagatgattcagaaatgcctatgccacctcttgccctggcacccctacaaatgcacagtataaggtacaagtttctgagcaattaacttaacgtcttgccacaaaactcttcacttgaaacaaagtgttgggagggcttatctctttcatttatgtcaggaagaccatgcgacatttctaatgtgcttttagatatggtcgagactgtgagaccactagcacttactcagcaaagagtggtggagctaggtgagaactcagcttccctgcaagttgctgttgaagaaccagctttgaggcaagctctgagcaacctcatcgaaggtgcattgttgcgcactcatgttggggggaaagttgaaattttgtcgaccagagctcctgctggcggtagtcttgtagtaattgatgattatggtcctgatatgctctatatggtaaacaagaccgaacctatattctgctgctttttacttactgtatttaagtctga

SEQ ID NO: 26144 - DNA, 4488 bp, Arabidopsis thaliana landsberg
  unsure (1)..(4488): unsure at all n locations
ggcgattcacgacaagccttcttatggtccgacttgagtgaaagttttccaggatgtgttctgaatccttctcagattcttggggtttcggttctgctgctacagagctaatagcttcgtacagctcacacagcttctcgctcagagatgggcagagaataccatcagagcctccgattgcaacctgatacaaaacaaacgtgaaaatgatgaaatctagagattagcttgatgaaatctagagattagttgagaggaagaagatcatgacaacacaaaagaaaagaaaactggaaattagcattttgttatcaaaatatatgattcatctggggtagagattgaatttcaagaaatattgaatgaaagtagcatctgttatgaaaggtggataagagtatacgactatctaccctaacaaatgtcatgtggaaaattggtatctacaagttacagaaatcaaaacatttttacaacaggactaaaaccaacaaacgaagtgagaccacaaattacctcatacatgacctcattgccaaattttgactggaggaattcctcggcgttctccacacacacatcaataagcctctgtagaaaaatcaagaatgatccatgagagttaatacaactaaagttgcaacattgtatcagaaaacaatcaagaaactgaaatctgagtcaccacgtcacacaaacctcagcaaggccactgttgacaagcaactcctgtcttctcacaagggggtctttaataccacccatagctgtgacgttttcttcatgatcagaatgttcagctactgtatcttcttgttcatctttcacctcctcaccattgtctttgccatctgtgtccgttgttttagaggttgtctctgacttatcctgaaagagaatatatatagcacgtcaaagggcttacaaacaaccgagaaaagcatagtaatatctaagtatttaattatacaagtagggtaatggcatcttcattttcgactaaagactcgatgggaactgctgccttcttcataatggaagatctgtcatgttcctgccacaagtgaaatgagaactaaataatagaattggtcgacaaaccaaaacgatatcggctttcagtgtacaaggcttgacaactcacaataatttcaaaggatacctaaaagatggatatcatgaaatcagtgttaatcacatttcacaaccatttactgactagataaacatgatcatttactgactgagcatatagagaactctgatggttacaaatccacatatggatacatggcagagatgttcacagcctggattatgttcaggttaatacccataagaacatatgaagctacatcagattttccttgttgagtgtggcaattgaagtgacgagagatttcacatttggtctttctcgagcttcatactgcagacaacatgtggctgagcttccatttcgtttgagaattgaccctcaagagcagaattcataacattgcatagtcactgagaaagaatgaagcaggagatccagcaaaacggttccaaaactgaatactacactctctctggtgtaactctacctggcataagatgaactaagtggatttagctttgagaactttatgccctgaaacattttggaagctaaggtacatatataaaaatgaagcagagagagttttacaccttgtcaaagaaaaccctgtaagcattgatacaaagctctccctttattactataatattccaatgctttcttttcagaaaaaataatctgatgctgtttccaagatccacacttataacaagaataaacaaaacacttgcatagtttccgttgatatgtgatttattcaaacttgtccgcttattgaaatagcaaaagatctttcgcctcgggtgacatgtgtacagttgaaaactttggtgactaagagatcatgcatggattagttagggaagctaatgacctatgtacaactaaacagctaatgagtgttaacctgcaaagctgaattaagtcaatgctctacaatgtttgaaggtcttgcagagaatgtaaacttttgtctctaaacaattgcaagggagaatcagaaacagtccaatgtcaactttagaagaagaagaagaagacttttacaataacagcaaccagtgatgatgactcccaagttcccaattaaacctgacttctaatcatatctaacccaataaaaaaaacctttctcaattgttatgaaaatcttacaagaagtagtctaacacattcttcggcgtatcaatccaaaggctttgaggaggacaaagttctacccattgctcccattctttaggcgtattgtacctgctttcatcaaatgaaaaagaaacacaatgtttgcgattgtaaccaaaccttgagaaatagacattgttcctcatccatgggagattattcctcaactcagagttataaaaactgacaaaaaatgtcaagccatcaagtgttgtcctactcaactccttccactccaaagagaatagtttatacaccattggcttctcattactgcatgtaaacataacaaaaatctctcctttcttctctaccaagacaactgctttctcatgccacacatattgcttctcatggacatacgggcatatgagtttatccacacaaatgtaattccatgtgcggtaagatggatcaaagttatacaaagttccttcagcattaaagtagtagaatatatctctgcgaaatacaaggttgctttgcatgtaaaacggtcttataaaagtagggaagtcatcagtaacccactcagttgctccaggattgcaagtactgacagtgacgagattatcagccggaacaaactttatcgctaataacacacaatcatctgatgtaggaggacaagagaacgcaatatgctcaaaagcaagctcacactttggcaaacttatgatatccctagaaaacagattgaaaaaaaacacgtcttttgatgtagctttacgcataagtaaccaactgaatcttgagtaacaacaattgattcagctaactctgggagaaccaaagtgtacaacttctagtgtaaagggtcgcggaactcgaacaagttgccacgtttaggaaaacacataagccaatgatgtttttagactacacgaacatagacaccagcttcataccataacttacaagctgctgatgctcgtatgttatcttttaaggcaagatgtgacattataacctctatgaggcttgatggtaggtcagtgtaactcgggttcatgatctttttacacatatcttgaaatctacaaaacaatcaactttaaattattctcaaagtgatcaaaccaaaaaaaaaaaaaaaaaactaaaaccatgcctatagaaattagaaactatactctagtttgatttaatctagaaccccaccacaggtgaaatggagtaaaatggttaaaaaatttctaaaggctttttagtatctattgcatcgttctgtttctggttctcatagctacataagaaatgaaaaaacaaacaaatgaagactgaaatcgagataagaaacgtacccgatacagagatcaaccaagagcaaaaaaacaaagaagaagagaaaagattgaagtcggcgcttgaaggtgaggaagaaggaagcgattgtttcgtttttttttggatcatacgacgtcagttattcaaacgggcttataaatatttctatgggccgggtaagcccaattcaataacaatcagtagatctaattttatgtttttaatttttttttgtctttctcttttttttgttttttttttaataatccgtctctttcattttgtgtactcgagaaccaaattcggataatgtctcatcggaggatcgttgttgttgctaggtttcttatcgatttgtaatttacaaaactaaatttattccggtgatgaacgaggattttctgacgaaagtgacttggggacttggggttgtccaagcccttgaatcgtatgttggtctttggcttctttgttcaagtcatcagctcgtcactaggtcgccagctcgtcaccaagtaatcagttcgttgccaaggcattcagcccgttctccagccgtccagctcgtagtgagtcaacttcagttgaagctcgtgatctcgtgattgattcttcacctttcctaaacattccactcgtacttgtttgatttgtgtatcaacattgcccatgccttcgcccattccttctcactacctctaactctattttatgtgaaagcaacaaagttcaagctccttcctttgctcatttgaaaaccaccaaaacacccaaacccatcatggaaacatttgataaaggcggaatacaaggaaatgcagtttagcttcttgtncgtatggctctnccntttctataaagaatttaaaaatggatgtgtggctcaattttgatacgttntcgngggctgtgtgtta

SEQ ID NO: 26145 - DNA, 1356 bp, Arabidopsis thaliana landsberg
tgtacccatacggctagatcccttcagcaccctgtccattcgaatttggactagacaatcgacccaccttatacatattaatttgttggttcaaaaaatctcttggattttggtgcttaatttgctcaaaatagtactttggctacactggctagtgcatgtggaaactgatagtagccgttgaaagtcaacctgacccctttgggaaaaggattacaaacttagacccaccaaacctaacctttttaccttagaatacgtgtctttctcaccataattagtttgtttatctctagtaagaattggaactacaaaagtagtttatgtaattaacaaaaacaatgctcgtttgtttaagcaaagcggaggatgggaaaaatgacgtggagaatgtcgattggacctgagttcacgtgattgggagtggtgccggtgggctcaactctccgatgataaagcgaaactgctttttgttgctttccttttgtctcctttttttttcttccagttctctcaccctattttgttcctcatccttatttatgaattttaagataaaaaaatatatatttaagtaattaaaatgtcgatttttttataagttcatttgaattttttaggtttataagtaaaaatcaattggtcatgaatagattgatttaaaacgaaaagaaaagaaactaaaacgtattaacccttgtttaaatacctagttatatacaagcaaatcttcaaacgatattattaaagggatgatgcattagataaaacaaattactagcactctagcagtatcatcaatagtttatggtaataacccaaaccgttcaaccattaaaaaacgatattggtatatagatgtgcacaaatttggtcaacaaaagttcatgtagtcaattataaatcggggattagtataaattttcatacggctttgtattctatcgtggcaccgtggtgtgtaatgtaaagatgattagataagaaatgtgttacacgcccacaacatatgattcaattatttgatggaaaatatagataaaatgtatagagaaaaagtactagaagatgcgaaatccagaaggtaaggggacaatggcatgagttccttcgtgggatttgctttcttaatttcactctttctttctgtctctttccctcttagaggtctctgaaattctctagaattttatattagctttagtgctttacataatttacatattatttagttcttttgtcaattagaattacttgtggatcaaactttaatgagcaaatgtttctggtgaataaaacgcttctcagtaagaggtcacaaattaaacccatcttttcatatttactattttagac

SEQ ID NO: 26146 - DNA, 1047 bp, Arabidopsis thaliana landsberg
gctgttgtttcaattggcacaagcatttttattgcaagatataaaaattcagaaggacatatttttgatgtatgtacatgaaggaaccgattttgactccaagctacaaagaagaagaagaatgatatacacagaaaactgcatatcctcaccatgaaattgaaagctaggggaaggggaataacagatactctgcgtagaagagattccatataaaccgataatatcctgagatagcttcctgcaataatcaaatgtttctacactccgttagatatacactccattgatgttccgtgataacgagtttatgtttgtacaaaagtattttaccttggtgtagtttgctttttctagtacccatgtctaccaaagatcaacaacaaagatattagagattaatgaatttggcagtgtcaaatgcagaaactaaagcatatagttatgaagttcttgtgcattatctcaaaagtatgtaagagatataagagtatctcataatgctttacctggaaaattaagcctgaagccaagatcacatgtgcaggaatcatcaagctacctctaaaaacctgttcattgttaaaggataagagggttggtcttttcaaagctgcatactgaggaaagtaacaatatcgcaacaaaaataaattggtggcgatagtttatcaagcttctacatgcagtaatggtgttcgtgctttaattaaccgaaatagttaagacggaaatagatgaattcacctgaggcatgtagaaagctagtgatatggctgaaacataatttactagcagaagtccagaaccgaggaatgcaatgtttctcactccaagttttgttgccagggttgatatttggaacctattcaagatcaattcaaaggcatgattaactaaacatgcttgaacaaacacataatgacaatatatcatacggagctggttaaacattgtctttgactgtcaaatggattgagccaaagagcggaaagaaagaggttatgcgtgcagttacttactttcgatctccttcaacatcaggaa

SEQ ID NO: 26147 - DNA, 1061 bp, Arabidopsis thaliana landsberg
atagcccataacggcccactaaaatctgatattttacatcaacttgagtggtagaaataaataaagatagggcagaagcagagaagcaaaatcgtggaaggttacaaagcctttcaaaaacctcactctctcaactctcaaaccttatctccttccttctcttctcctctcctctccgtcgagcttactatctccacaaaatggcgtcgacggtaggagttccatcactataccaagttcctcaccttgaaatctccaaacccaattccaaaaagaggtctaattgtttatctttatctctcgataagcctttcttcactcccttatctcttgttcgtagaactcgtcgtatccattcctcttctcttcttgttccttctgctgttgctactcctaattctgttctcagtgaagaagctttcaaaagtcttggtctttctgaccatgacgaatatgaccttgacggtgacaacaacaacgttgaagctgatgatggtgaagaactcgctatctctaaacttagtttgcctcaacgtcttgaagagtctcttgagaaacgtggtatcactcatctcttccccattcaggttcgtctcttttgtatgttttatttctgttttcaaaattcttaaaaatggttcctttatggataagttcgcttagggttccgttttatctcatttccaattgaaaaaatggttcctttgtggataagttagcttagggttcctttatatctcatttccaattgtaaaaatggttcctttatgaataatctgtgttttgattaagaagcacaatcttagatatgtctgagcctctattgacatgacgttgcttggtatatgtgtatgaagagagctgtgttggtacctgcactgcaaggaagagatattatagctcgtgcaaagacaggaactggaaagactttggcttttggcattcctatcattaaacgtctcactgaagaagctggagactacactgctttcaggtctttgtttatttttactttggtataccatctgcttagatgtgacctttcatacattggattttgc

SEQ ID NO: 26148 - DNA, 959 bp, Arabidopsis thaliana landsberg
cattctcctgtgtatctttggaccacttttaagagctcaggatcaacccagactgagcgagcccttgcgaagaactaacagtcatcgatctcctcttcaatttcggcgaaactatcttaacctatacctctaatagttccaactattcaacgatcaaaatccctaaccccgattcatccaagatcggcggtcttaaagacatagtcaacaccgtgattctcactctctcgttcgttgtttgcgtctacgaagctcctctgtatctccgtgaaaactgcctcaataccctcaagaaccatttgattacttgtcatacacggcgagctactatatctctgatgaagcttctagggtctaatttggaagagcagtggatgagaacagtgaatctagcgtttacaaattggatcatcgagcagcgtcgtagtcagtcaaccaagatcacaacaactcctttgttctcttacgctggttcggcttatggattgtggaaagtgcaattgtattgtcccgttgaagccatggaagtagagagatcgagcaacccaacggctgattcgagattgttgttctctctcaagtttaatcagcttgaaggtgtgatgcagttcaatcacaaagttgtagttagagacaattggatcgatgtgatcgtgaagatagacaacatcaggtacacatatgttactaagacactcttgttttgttaaaatggcctaaacagtaaaagcttctattttcttataaactcttcaaacccatttgtgttgcaagattgtagataacgagatgattctttcttttatgccaagtttctaattgaaccaaggttttagacattttgtaataaaacgatcaacaatcatgtgataactaatggatgcagatacgatgtaataaagcttgtaaacgagaaactgatgtcgagaagaggagcaggggagcacgaaaagcatttc

SEQ ID NO: 26149 - DNA, 1474 bp, Arabidopsis thaliana landsberg
acgcttgtatttctttgcaccacattcataaactatagaaaatgagcaaatgatttaggaagaacatcaaaaataacactttttatgataacatttttcaaaaatactacatttttgtctatatttaaaatataacaaatgcaaatttctaaagttttctaacgcatgatataaagaatatttagaattttttaaaggtcttttataacacatgttacctgaaatctatgacggcgaaagcgagataactttgggctgaaatcagtagcaactaccaacaactcaaacacatcaagaatgtactaatacttgaggatttttacttgaagtgtttcttgcattaataatttagttaatggttttaaaatagataagctcgatactaagattttttcattaataatttcgttgataagtctaaaatggatcaagcgatactttaggttatatccgtttaaattatttaggagaaagtgatgcgattttagtaggagatttaatcattagaacaacttagctcttagagttaaaacaacaaataaaaacatcaaacatcaaactaaatttactgttatttcccattcctaaaatttcaaggatttttgcaacacttccaaaatattgttaacaaaatatcagatttagcagtggaagactgaagaggacaattagcctagagttaccatcttacatacaaaagacaaaagggcaaataaacttctaactcaggtcatatccaaattcctgacatggtcagctcatatctttggagctttctccacaacttccaactcttgtaatgtaaacctgacagaataacaacatcaatcatcagtttcatcattttttgtgggtttggtaggtaactaacaggtttactaaccttgaaagcggtacgacgaactaactcgaaaacaagagtatccccatatgctagattgtgagcaaccgcaaatcccatccatccaccactaagtccattctttctcgctaagtagatagtctcatactcctcgccttcttcatctatcaaagttatgacaccatcttgtatcccgaggtgagatttgcagaattgagctggaagaccctgatttcaaccaaaaagaatggctttgtttggttagataatgataacattcacatggacaaaaacatcagatgagtttaataagattcaattctaagaccatagaagagacttcattaaccggagaaacgtaataacccaagaccttagaacactaacagtctaactcttcgtttaactttcaggtctcaactaactagtgtaagatttgttgttgagttggaaaagtacaatttcctgcacatcaacagcttcttagaggtcgtgagttagaaaaactttctggtccttgaaggtcttgtttgtaatttacatggttagacatttttatctcaaacttgtcggattcaaagggatagtttccaagtaacacgaagcgaatac

SEQ ID NO: 26150 - DNA, 2064 bp, Arabidopsis thaliana landsberg
  unsure (1)..(2064): unsure at all n locations
ctttagaagaagtgatgattcaatagcatttaagggagtattagagggtcagctatacttagtagattttgatagagctgaactcgacacttgcttaattgctaagactaacatgggttggctctggcaccgccgactagcccatgttgggatgtagaatcttcataagcttctaaagggagagcacattttaggattaccaaatgttcattttgagaaagacaggatttgtagcgcatgccaagcagggaagcaagttggtgttcatcatccacacaagaacatcatgacgactgacaggccactggagctcctacacatggatctattcgacccgatagcttacataagcatcggcgggagtaagtactgtctagttattgtggatgactattctcgcttcacatgggtattcttcttgcaggaaaatctcatacaagaaaccttacagggattcttgagacgggctcaaaatgagttcggcttaaggatcacgataattagaagcgacaacgggacggagttcaagaactctcaaatcgaaggaattcttgaggaggaaggcatcaagcatgagttctcttctccctacacacctcaataaaatggtgtagtggagaggaagaatagannnnnnnnnnnnnnnnnnnnnnccatgcttgatgagtacaagactccggaccggttttgggctgaggcgattaacaccgcctgctgctccatcaaccggttatatcttcaccgaatcctcaagaagacatcatacgaactcctcactggtaacaaacccaatgtttcaaattttttagtctttgggagcaaatgctttattcttattaaaagaggtagaagttctaaatttgttcctaaagctgtagaagggtttttgttaggttatgactcaaacacaaaggcgtatagagtcttcaacaaatcatcgggtttggttgaagtctctagcgacgttgtatttgatgagactaatggctcttcaagagagcaagttgttgattgtgatgatgtagatgaaggagatgttccgacagccgctatacgaaccatggcgattggagaagtgcggccacaggaacaagatgagcaagatcaaccctcttcctcaattatggtgcatccccaaccgaagatgacgaacaggtacctcaagtggaggcgcttgatcaagggggagcacaggatgatcaagttgaagaggaagaagcacctcaggcacctccaacccaagttcgagcgacgatccaaagggatcatcccgtcgaccaaatattgggtgacattagcaagggagtaactactcgttcaagattagttaatttctgtgagcattactcctttgtctcttctattgagcctttcagggtagaagaggccttgctagatccggactgggtgttggccatgcaggaggaactcaacaacttcaagcgcaatgaagtttggacactggtgcctcgtcccaagcaaaatgttgtgggaccaagtgggtgttccgcaacaaacaggacgaccacagggtggtgacgaggaacaaggctcgacttgtggcaaaaggttatgcccaagtcgcaggtttggactttgaggagacttttgctcctgtggctaggctagaatcaattcgtatcttgctagcatatgccgctcaccattctttcaggttgtaccaaatggatgtgaagagcgctttcctcaacgggccgatcaaggaggaggtgtacgtagagaaacccctggcttcgaggatgaacggtaccccgaccacgtgtgtaagctctctaaggcgctctatggacttaagcaagccctaagagcatggtatgaatgccttagagactttttaattgctaatgctttcaaggttgggaaagccgatccaactctttttactaagacttgcgatggtgatctttttgtgtgccaaatttatgtcgatgacataatatttggttctactaatcaaaagtcttgtgaagagtttagcagggttatgacacagaaattcgagatgtcaatgatgggcgagttgaactacttccttgggttcca

SEQ ID NO: 26151 - DNA, 1012 bp, Arabidopsis thaliana landsberg
caaaaaccaattgaaattcaaatccggtttaaccggttttattaaatgatttgattttccgttgactttccaattgatcggccaataacaaaaagagaatggaaacaatgataggaagctgaatcaagcaagactcgcgagaagctgaatcatcaatggctctggatgcattcttcttcatcgtctctctatttcttctgtttccgtcaccatccgcgtcagaatccactactcaggtctgtctttgaaccttgtaataatgatcagatatcagtttccgtcgagctttgtctccttgatttgtttgaagtaacactgaaagctccgtccacttataacatctagttcttaacacagtaactttcaagaacaagtttggagcttgatttataattttctggaaaaaaagctatccacatgtgtctacaatcgaaaatgatctctctgatgtgttttaaagcaattttgtagtgcagggagagagaatggtgtgggatcttgtggggtttcatcgacgaggattttgattaaaggaggtactgttgtcaatgcacaccatcaataacttgctgatgtttatgtggaaaatggtattattgtcgctgtgcagccaaacattaaggtctaactattcccttgtaatctgtccttcatcttttgtgagaatctaaattccaagtttgatctgtttgtttttatgtaaacaggttggggatgaagtcactgtcctcgatgctactggaaagtttgtcatgccaggttaatcaattcatactagttgatactttccaaaattttagccttttgttttgaatccttaactagtttcagttctaattaagaatggttagcattttcatcttactcttgtccctgatgtcaataggaggaatggacccccacacgcacctcgccatggaatttatgggtaccgggactattgatgatctcttcagtggtcaggcagcggcattaggtggtggaacaactatgcatatagactttgatatac

SEQ ID NO: 26152 - DNA, 1220 bp, Arabidopsis thaliana landsberg
  unsure (1)..(1220): unsure at all n locations
caacaagctcaaactgggtaagtctatacagaaaaaatctgttgttcctaattccaaagctttatgttaggatcagaagaaagtgcggagtcatgattagaaaccatacatttacaaaactcccctcggattctgttaagataccagcgctcttccatcgctcaccaacaagttttgttagtttctcatttggaagtgccctcagatgttgaccattcatccatctttgagtttataaatatgccacattgaagctacttataagaaaaaggtagagaacaaacagagatacgaaaaacaagagagaataagattggataattcaaacagctaagtaaaatctataatcaccttaactttgttgaatcaaaaatcgcgccacttttgttgacacgttcaatcgagaatttttcaactgcaaatcaagaacaaacattcaatgaagaaatcagaaaagctagggatgacaacaaagtaactacagtcaacaaaaacgacctaccaagatcctcgagtgtgaagaattcattttcagtcccgtctccccaacctaagagtgccaaatagttaaccattccctgaggtagatatcccatctctctgtactgttttttcgaaagggacataaagcagaaattagatgaagaatcagcaatggagtaatctatgatctacgagcagtaaaggaaataacagctataatcacctggcctacagaagttgccccatgtcgctttgataatttacttctatccggagctaaaattaaagaaacatgtgcaaattgaggcatcgggaacttaagagcctgccattgattgatacagacagcaataaatcaaattcttcctcctatattctggatcacataacttacaattggaataaacaaacataagctagtgcttaccttgtaaattagagcctgcctcaaagtattaggcaagtgttcttcagccctgaaatgaaagttaatagatttgatcaagataacattcaaacatgttaagagaagaaactcaaattccaaaagaagacactaccttataacatgtgatatagccatggtagcatcatctaccgtaacacanaagttgtaaacgggttggccattacttctcattaccacanaatccccaagagtatccaagttccaacagaccttcaagacactatcacacatggtcaattacaagaggtactatcgagctttaaataca

SEQ ID NO: 26153 - DNA, 1354 bp, Arabidopsis thaliana landsberg
aaaggtccagatagaatgataataactcaatttattaacaccaaatacacgttaatataatactacaaatttcaaaatctattacaaatcaacaattctcgtacaagaatgcatcgtgtatgacaaattaatattcaaacaaataatatataattgtgtattcaaaaccatattatataagcgtagagaataatatcatcaaagacttgtgttgagcaactctctgtaatctttacgaattccccacaaaatctcactgcattttttcatgcttggtctcgaacgtctatgaggagctagacattgaaacgccatctccaataccttctctaatgctaagttgttcgctgaattttgttctagcttcgggtccaataccgatatcgtatctccactcgtgaacttcttgatcgcctgatcaaatcacaaccattacacatgaatcaaaaacttgttgaacttactttatagtagctaagagaatgtttagtgttacccatctaatggtgatgcgttctttttgtcctctgctaagctcaatgggacgccgacctgtgagaagctcgacgagcagtacaccaaaagagtagacgtcacttttctctgtgagttgatacgttgttaagtactctgggtctaagtaaccagcggttcctttgacttgtgttgacacatgcgtggctcctgaatcggtatctggagctaatcttgcaaacccgaaatcagcaaccttggctctgaaattctcagtgaggagaatgtttgaagatttgatatctctgtggatgataggtggttctataacacatgcaaagcaaatgagacatagaataagtacaattgccatgaaagaaaaagaaggaatctaggtttacaatggacttacgtgtatacatgtgaagataggttatggcatgagctacatcggttgcgatatctaaccgagtcgccatgtcgagagtctttccttccttacctacaaacagattcacattgatcgattagcttgaaatgaatatatacaaaaagaagatagtagtaggatgtgtactcacaatccaagtgatctctaagagttccattgggtacatactccacaacgagaatcttctcgtcgttgtgaacaacaaatccatagtatttaaccaaactcaaatgagtaacttgagctaatgtctgaatctcaatcttaaactctgcatctgcaccttgacggtcgtcatgcatactctgcatcaagttagttacaatgttatagcgacaatctccattaagacaggacttagaaaggaatattcaaacctttttggcacgttttacagcaaaggttttgccatctcggagtttgaccttg

SEQ ID NO: 26154 - DNA, 1118 bp, Arabidopsis thaliana landsberg
cgtatattcatttatttattacacaaaaagttgaaaataacaattattttggaaaaaataacaattattttggaaaaaataaaatctctcaaccgattgtaactttggttttgaaccgattttagattgcctattttttaggcttcttccattctaatcaactctcaaatttggatgagggcttctcagtttatggcttctccttcaggatcaaagtcacttagctcgacatcactagcacatcctcttctacaatcctaataaatcctctacatagttttgactgtcatatcaacattggatgctcaagagtttcattcgaaagtcttgtttttatcacataattttcttttccgctgttctcagattctctagcgcattagaaaaaaaattgtttcaaaattgagtgaaaagtatttgttttagattattatttttttttttttgttaaaaaaaataattctttttctgaggaagtcttttctctttctaccagcgtacgtaatgccatatcattttaatataaccttctagatgaacgaaaaaaagaacatttaattttttctttttcacagtaaagcgctatttagagaaataattttctaaattatgttgattcaatttttccgcaaatgtttcatccaaatgaattgaatcagctcaattggatcttattatttctctagaccttaagtttaacagatatagaatatcttaattatttatgcaataaaatatatagttcctgaatactctcttcgaagacgtttcttagttatataaatattgccttaaagggtggaaaatcatcccaacaatcataggaagaaaatcagattgttaaaatgttttaaaaaacttataagcttcgatgctcaaattatactgaattagtatgattcggatgtttacataatagtatcgccagacgagatgtctacataagaaaatggtaccaaaaagaaattgcacgttctatgatactgcaattagaggagtacacccatataaaaaggtttgattcgataaattagataccgaagtagaaaaattacatgtttatggaaaagcgatccgctatgtaactatcaaaaatgtctcattttcttaaatattac

SEQ ID NO: 26155 - DNA, 2343 bp, Arabidopsis thaliana landsberg
gttcagcttaatctttccagtcaatttcatctccttccaattttgaagggttcatcagagaaagagagagccattcagagatccattgtaccaagctcacttcgatctacaggttaattctctcgaacagaaccacccattgattaatttgacactctgttttgcaattcctctgacttttgaacagagactttctaaagtctccaaatttttgatgttttcttaaggaaaggattgatttttattgaatccatccaaaatctctactgaaaagtatctttttgtttgtttttgacagaatcaccgagagctctctgtctctctgtcggtgatatttgtttgatgggtgaagaagagacaatcgtaaacgatgaaaacagctctaagccaaaaccaagtccaaagctgacactgttgcctctggtatttctcatcttctatgaagtttctggtggaccttttggtgtggaggattctgtgaaatcaggtggtggtcctctcttagcccttttaggcttcttgattttccctctgatttggagtatacccgaagctctggtcacagcagaactcgctacaagcttccctgagaatggtggctacgtggtttggatctcttcagcttttggtccattttggggattccaagaagggttttggaaatggttcagtggtgttatggacaatgctttataccctgtattgtttcttgattacttgaaacattcgttccctgttttggatcatgtagcagctcgtgttcctgctctgttggtgattacattctcactgacgtatttgaactatagaggattgcatattgttggtttttcagctgttgtgcttgcggttttctcgctctgtcctttcgttgttatggctttgcttgcggttcctaatatcaggcataagcgttggttgtttgttgatactcagaagattaattggagaggctacttcaatactatgttttggaatctgaactattgggacaaagctagtactcttgcaggagaagttgatagacccgggaagacgtttccaaaggctttgtttggagcggttttgttggtcatggggtcatatttgattcccctcatggcagggactggagctttaagctcatccacttctggagaatggagtgatgggtattttgctgaggttggaatgcttattggaggtgtctggctcaagggatggatacaagctgctgctgcaatgtctaatcttggattgtttgaagctgacaatgagtagtgatgcttttcagcttctcggtatgagtgagattgggatgctccctgcattttttgctcagaggtcagttagttaatccccatgagtgtgtttttggttatgcccttgaaaaatactcggtcgaacgtcgtttgtgtttgcaggtcaaagtatgggacaccaacaatcagtattctgtgctcagctacaggagtcatattcttgtcatggatgagctttcaagagatcatagagtttctgaatttcttgtacgcattaggaatgcttcttgagttcgcagcttttgtcaaactaaggatcaagaaaccggatcttcaccgaccttatagagttcccttaaacacctttggagtttcaatgctgtgcatgcctccttctttgcttgtcattcttgtgatggttttggccgccccgaagacatttctgatcagcggtgtgatcatagttcttggattctgcttgtacccattcttaacactcggtaacgagaagcagtgggcgagatttatctccgaaggaagcaagcccagtttcaggagtttcatcagagtcacagcttggttgttatatcttggagatgagtctgctgctagccttctgccatgatccccaccaacaaaagtgtgtgattaatttattgcacaagtctttaaaagcgcatggtacgtcatgtacagctgtaattaagaatgaaatttatttatgtcttgttcagctttgaattatagcacagaaaacagaacaaaaagagtgtacaaacaggagggtttgtacctgagccaagtgtctaaacatgtattgcttatggttataatttgtaaaaacgtgagttaattcattcaattttttgttgatttctgcccaaattctaattccaattcttgagtttaaaacagttgcacagtcgctttaggtttcttgcttcgacatcttctctgcttctctttgcttattggaccttttggagtcatgtttttactctttaccatataatatgtttctgcagcttttggttacttacttaaggcaaagactcaattaaaaccacaaatggcgacatcactcattacttgctattttatg

SEQ ID NO: 26156 - DNA, 978 bp, Arabidopsis thaliana landsberg
  unsure (1)..(978): unsure at all n locations
tgcggcggcgtctgttgattctcgggcgagatcggtggatttggtaaccgcgaggttatcgaggaatttatcgaatgcgtctacgagaatccgccagaaactagggaagttactgaggtcggaatcgtggaaaacgacgacgtcttctaccgccggcgagagagatagagatcttgaacgtcagacggcggtgactttggggattctgacggcgagggataaacggaaagaagacgcgaaactacagcgannnnnnnnnnnnnnnnnnnnnnnnnnaaaaggattacagtttataaataaaaccacgagaggaaatagctgcgtctgcgattgggattgcgattgcgatcagatgtggaaaaaagttgaaaagcgattcgaatcgctttctaaaaatggattactcgcccgagacgattttggcgagtgcgttggtaagtcaataaatatctatatatacatacgaaaatgatcatggaccaatccactgttttgtaaatttaaagggatggtggattcgaaggactttgcggtgagtgtattcgacgcgttggctaggagaagaagacagaaactggagaagataacgaaagatgaacttcatgatttctggttacagatttctgaccaaagcttcgacgcacgtcttcaaattttcttcgacatgtacgtgtctctttgattctctctttctttttatttttaagtcaagtttttgggtttgtctttacgtttataactgttacgggaataacgcactgcaattagcaaaagcataagaaaacaaatgtattgatccaagtgcaacgaataatttagttgacgttaataattgaagaaagttttatctataattgatattccaaattctgaataacgccggcgaggtctcatcaacttgcattttaataagatttgagttgatttttgtttctggtggtatttatgaagtttagctgattgaattcactattgagt

SEQ ID NO: 26157 - DNA, 904 bp, Arabidopsis thaliana landsberg
atcaatactaaactcaaaccggagaagtgtttgggtcgtgggtttatccgttcgaactggagggtctgaatcggacgtggaacggcgagaaaaagtaatctatttgtgtatcaaactcttacacatagcaaaacatattataagcttttgttactagcatcgatattgttattacaattgctctgtttgatattattagtaaacaaattagaaatttttttatcaaaaagaaacaacttaatattgttagaccagatacatcttagatgtgagaaaccttaagaattatatcatgacttgtattttttaggaaaaagaaatcattaatgcagccaatgttataaagttgattcaatttggtccaactatgtagattgaaatatgactatgtgctatattgctaaatgtattaatattaacataactagctaacttttccacaatggaaaactcataagaacttaatccaaaaaaaaaaaaaatcgctcgttttccagttcttatgaatgtgattgaaatttggaagtgggtaaacttataactttaatagtattacaacagtgaatggagaaggacacaagaatatgatcaaacactctgatcaaaagcaatggtctcctaccttccaatcacttatcttcaaacccattgttttctttatatattttaaatatattttgatgtcgcttttaattattaacatgtcatgttagattaatttctaaaatattcaatggttggtggtatactgttctttgttgtcttgctgtattatctatctactcatggattttcgtttgattcttttatggaaaacccaagatgacaagatcttttgcatgatcttgtcatgtgtctttatttccagcttactgaatatacttaaaaatatataaatgttatc

SEQ ID NO: 26158 - DNA, 2365 bp, Arabidopsis thaliana landsberg
gattgatttttgaaacaacatgatgtcaaattatatgggctcatcatcatgggcacaaaacaaatactattacatgaaattaaatttaaaattaagattactataatttcaatacatttcaaattcatcaattaattattttcagtgaacataaatatgcatatttactcatcaataatacaataaaacatctataaatcgataatgttagtaccatgctattttattaatgtatactgatattaacttataaagattttattcaattgtttaaattttatgaaaaatgaactaagacaattttatctaaataaaattagtgttttggatgttataaatcctgtagttttggacttgaaatttaaatatttagaaaaactctttcgacaataaatgacaaagaatttaaatgaattaaaatcaagagcatggagaaggatgtgttatctatcgtggatctaataagggtcggaagaaattgtcctgggtagaattgtatatgaaacagttctcataatttgcaataaataataaatatagacggcaaaaaaaaacccaaaaaaaattaaaatttgatgactaagaccaaattgtttttattttaagatcaaacatccctagtattattaggaaatatatttaaaattgcataattcaaaaacaaagttaacaaaatagatagttttgaacatgagaatgaattcttttcttttttgtgtaaagatgctgaaaatttaaataattaaaaaccgtattttttatataattttttttgaatcgtatcaagattttttaatagcaataattcttacttttcaaatattgcgtaattttagtttgtccctctaaattcgaaattagaagcaccaaaatcctttcaaaaccgcataagagacaaatgatagtaagactgattggtggaagtgtggccatatactattgttttaacatttagctacataaatttggctttttggaagctaggctataactattttttaaaatcatgcaatatttaataaatctccgcaaaaagaaaaatattttttttaataatcatcagtaataaataattattggcaatttggcatttggcaagtgagagaaaagaataggagtaagtctactcacatttaattgaacattgtcattttatttttgttaagtaattcattaatgaatttaggcaaaggaccctcctgtgctaatgtgactcacatggaaatgtcttcaaatacaaatccatatcgttctctctactgacaccactctattaaatactttaaataccttatctcattcttatctacctcgacacttattcactagaccgtgcaaagcatcgttgtatatatatgattcatgtaaaaaatgtttaaaagtggcatctttgaggaattgtgtaaacattaacatctaacttaatgatcaagtttacattacacatcaatcttatgtataagttcagtgtttaagtgaaccgtacataaccataaaaggtaaaattgtgtggtagattggagcctaaagagccatacggaatgtttggtttagtgggctttagttatatagtacaagagactaacatgcttaaggaatggttctttggtagagaggtaaagctcccaaagcctctctctcagctctctcccgcttcacctgcacatgaagtgtcgtgtgttagaactttgctatatgattcttctatcactacaagatagataaaactgtttttgttcttacaagagccaacatgtcttggaggtagctcctgaatggagtctgcactgcctgtggaattacagagacaaggaaaagaaaaaaagatttacataagcttcctatctcacaactaacaagcactatctcaaaaaaaacttctttcatagacaagatcttacaaagcttatcaagttacaattatattacagaaccaaaacaggtttctgaaaacagagtgttcttgatcctaatacaagtcttaagtcaaatcttgcaagctctatctacaaactccatagctatataccgttttagctctgttgtcacttacttagagactaaaacatacctgaagattatctgggaggtattcatgtttcatagaaagatccattgcacgcataagacgctggttccgagcatcaacaatctctctcggtaaacgattaagagcttctttaatatccaaatcatacaaaggatcataaagatcgtcgtatctaagacctaaaaaatcgtaaaattcccaaaatcagccagaagagaattagggtttggtttctagggtaagagagaaagaaagagtaccgtatctgcggaagcgattagaacagacttcatatgcatacgagctaagaaattc

SEQ ID NO: 26159 - DNA, 1366 bp, Arabidopsis thaliana landsberg
atgcagagataaaagatgtaaagacgttgtactcgaagctactgtggaaacgcattttcataaagtatgcaccacccggttgggcctaaacatagcaaacgaataatgtatattaaggggccgattggaaacgactattatttatggttgtagaggttttggctacaacgactttgactatagaaggctagaagctttgattacagagattttggttttatagattttaactggtgaaacataattgataacactaaaactgtagaaactgtaattatataattatgattataaataattactaaatatataagaaaataaattttaaaagaacaagaaaaaaataattctaaatcaattgaatttttttcaaaagtaagtaataagtatatgttatggaattttagaatcatataagaaagaagaaaagaaaaaataagaacttttattttgttgatttcaaaagtcattaatacgggacttaaaaaaaatttgaaaacaaagagtaaataaaaaaaggatgggaaagctttaaaaatttttaaagtaaaaaaatcttgattcacaaaaaaaactttgaagacttctaaaatcattttaaaatcttaaaaacctcaaccaatcatccccttcaattttcaaaattgaaagctactgtctactgaggcaatgacgcgtgtttgctacggcaatggcagaacaacgtaaataattcaaaagatgagggggtatttgggtaaaagagtttctgataaaatcttacagatccaaccaaccattgaggaccatttcttctctctcattctctcttctgacgtgtttcccttcttcggtttctcatcctcacgtccgccggatttcgaggaaacgaagaagaagaagaagaacaacaacaaaaggtctctctcgagtttctatgtttatctttttctataatcccttagtctagtgttgtttagactttcaattctgctccaaaatctctggatttttgaatctaccgttcattttctagagattttggtttctctcagtctaagagtcgtcttttgaaatcttgaatgatgaatctgagagtttctatgaaatttgatggaattttgtgtgttcagttgttgattagggtttgggattcaataactttcaaatttggtttcgattaggttcgatttggttatttttacctgtgaattgatctcgattcgttgtattaacgtctctttgtgtttttttattctgtttatgctagccttttgagatatggacagcttctggcaattaggtgatgagctacgaggtcagacgagagcatcagaggatcacaaatggtctactgttgcaacgaagctagctgagcaagctagaa

SEQ ID NO: 26160 - DNA, 1232 bp, Arabidopsis thaliana landsberg
cactatgcttgcgaagaatttgccgttttcacaaccacctcataagcttttctttctttttatacataaacatgaaaacaataagaaataagttctaatttcgtaaatacacttgatgagaagagataaagggatggatactaaccggaccaaggtatttgatacactgttgttgaagtttcaaccgcggacatttctccacaagatttacctctttcccctcgccgatatcaagcctgcaacatttgaatcaaacgtatatataactttagtttcttgatttaggacaaaagaatttgcaggaatgagataatgagtctgtgagaagtaattaccagtagaagaaaggttctctactctgacaatggagccatttgttgtagtaaaagtgcaggttgtgtccataccgatgtctcgggtcaatctgttaaaccaaaccaagatcagattacgttcaatccaaaacatctgtaacaaaaataaaaaacagaatgagaataatgtttaacttaccgcttcaagccagtgttgtaaagcaagcttttgagcttttccattctttgacaaacctttaccaactttagctgctctagttcttgctctagaccaccttgagatcgcggtttcgtgtttctcaatatcaaagaaagatatagaacttctcttcaactcagcaaaatccaaaagtttccacctaagaatagaaacaaaacaacaacaacatcagatcacaacacaaaagtttctacaaatggaacgttttgagagttttgagttgtcaaactaaccagctctgctcaacaagcacagcgcaatcagcgagctttcgtctagtacgaaagctcttataaaccttctgcaacttaatagcagcttcgtgtttcggattcctcggatcaagaactgagaactctttagcaatctcaaagccattgtctttaacagacctgttaagtgagatcattctctctagctgcatccctttcaagctaacagatttctcaacaaccattttaccagatcccatagatttcaaaatcgtgggctctaaagtaccgtcattgaaattaacagatctcttaggagttttgcattcgtcgtcatcgccaaagcttatggacttaaccgtgacagagtctagagcagcttccaagaaatcttgctctgcgaacgcacaggagaatgatacacccattcaacagatcccaaatcggaacctgagaagtaaaaaa

SEQ ID NO: 26161 - DNA, 1072 bp, Arabidopsis thaliana landsberg
ggacacttatactttacggtgcttttacagcgtcttatacaaagacattgctagcacagaggttaatttttctttaaaaaagaatgaagtacgcaacatcatgttttgaccaaacaatttgttgtacgaaaaggaatccattcgtctttatcataacttgtgcatgtctgatctatctttgcaggatgcaaatcttgagactgatcatcaaataatgataacagtggccaatgacataagcaactcacagtgaggacatgttggctcttgccattacaagcaagagaaagatcccaacagagtttgaatcgcctcaggttctgtagctttatcattccctttgaaagaatctgactcgatttaggttatcaggatttgatctatgacaatgtaatctgagtgataatgatctgcaatgttttgcttcttctttttttatgattcaaaaatgctttatagactgttgttgcattggtccatactctgatgtaacgtctagttgcagtctgtgttttaccctattttaaagacaaactaactttatttaagaactcaccaaaagagtagtctccttatgaccacagggttgttttggagacttagtagcctcatgtaaagtgaaccatgttcaatgcctcatgcttctctaagtcaagaaacaaaaagaggcttgtgaattgtgatattattagccaaaggaacttgccaaaggaacttgccaaaacaaggagacaaactaaaatggttcagtgcgaatgtgactgctcctttgttttcagcggcaaagatttttacacagaattttgcctaaaagactttcaaatatcccttagatcaaaaagcaactataacaaaaagagactttaaaatatcccaatttgtgagagatattttagattccatttttgtttttattttagcttagtagacaaaatcttatttcttgcattttctctactagtgaattgtctcatcttatcatgaaaatctgaaaatctcctcatagcttcattctttaacaatatttatatagactctttagcataccagacattgcattctaatttttctg

SEQ ID NO: 26162 - DNA, 2926 bp, Arabidopsis thaliana landsberg
gacgattgaaccaccattagagttgtcattagggtcttaaaaccatggtgcttttttataatcgtgttgactccaactgctgatgaatgagatgatgattgtccgagaaataatctgagcttttatgaagaaaaaaaaagaatcaaacctaatttttggttttcgagttgaaccatgtaaactaggtgacattcattcttaatgggtcacaaatgccagatactagccataatgtctttattaaactgggataaactggtacgtttgggtcactcaattcacatgtttcagatggttatttgtggttttctatccggttttatctggatcaatatgtttgttgacggtactactctcaagccaatatctcataaacacaaatcaagaactcaaacaaaccataagaaaactcagtagattgttttatttacttttgaaaaagaaacataaacaaaattgggaatttacttttcacataatgaaccaatagcaagtaaaaaacattaccatcatcatctacatatatcttcccatcttaattctctatagcaaccctgtatttaccagaagaagcattcctacaaagaacctataaaaacttgtgcagagaatcaaaaatgaaggtaaaaggtcagaccgaggttgtgatatcattgtatttaggacgtggttgatccgtagatatcacttcttccattgcttttctcttattactactcaacattggttcaagttgttccgattcaacttcttggtggagaggcaagatctcaatcactgatgactcttcttctatctccggtttagaaaccacaatctcttctatggcaactggtttctcactttctttcttcaactttgttttcatcatatgaggtttcaacttggtaagatcagctaactttactggtttcaagaaaaactcttcagctccttcttcgaaacatctgttggaagaaaccaccacaattttgtacatagttcaaagacttattcaaaccaaagaatcaaataacacccacctgccaattcaaaaatcaataagactcatattaatgttaaataaacagagctcttatctggagattcttgtaggaacgttctcagatgacattataactacaggtatacttctaaatgctgctgattcctatacacaacaatcatgttaattaatcagaagcaaataaaactgaagggtttattttgggcttgtccaaaagctgaccataattaaatggacataggcatcaggcatcccatggttttaagacccaaatgacaaccgaaacattaatcaaattttgttaaggtaatttcagattttaacaagattcttgccttctctgtactaaaatcaatgttcaactttggtcactggactcaatcacatatctgtccaaccataaattttgagatgaataaaagtttagtattgtacaaatagaacgagtaaaagagagtctcaacactgagatttaactttttgcaacaatctaaataagtagtttataggtaagatatggaagaagaaaaataagggaaataaatcccaagttaccacaataaatcaaacaaaaccggagggacggctcatgcgttcctcttgctcaataagtcatcgccgacactcaaatggagatgttcgccaagaaccacagtcgcaacaggcacattttcaatgcagcttacagttatctgccatacaagatacattaaaatgataaagtaaacgatttgggttaacaaaagcttaactaacgaaccttcccatctctggcttggaactctgacttcaaattcgaatgatcccttgataacaagtatgtttgaagcccggttgcagatttcacatctcctggaaccataaatatacacgttaaacagaaagcgagagagaattgacagtgggaatctattgtgatgagatggtgactcacctgagtataaagcaagaacagcctcttcattgaacttcaaagccggtctagccaaacttatcttatacgacaactttggaacctttttgacactctcatcggatgtttcttttggggtgaatgtctcatcggctattatgacctgttacataaaagataggaggataaacattaagcttctgccgtgcaaataaataagcagatatgggagtgttgatgacttactgcatgtgatggcattaaagtagacaaaagtaaagtggagccaattgaatccttgatgttttgttcctgttcaacaaacaacagtgatgagacagaattaaggcatgtggttgaagacattcatgttggaaacataaattttcgtttgatccatagctgaacaaataattacgtacaagcaatgaaacattcgtaaatttcaagtagaatttaagttcagataaattgagtaacaaacaaaaactagttacctgagagactagaacttgtttagaaacagattcatcctcgtccaatgattggaagtacacttccacatagtctgttggttccagacctgactttttccttagtttctggatcctgtttacaatctttaacacagggaaactaagctcataagcacaacatcgctttatatgcaaataaaatattaagatactgaagaagaaccccacagaagatatacaagttataagaaaatgtattgctttggtttcatctaggactagtacactattagagaagttatatatctttacctcacgggcaaaacctgcttcaaccaaagaatcatctgctcgtagatccagaatcaccaaaacatcacctgcatcatgaaagaaagcaagtattatatgtgtatcctaccaacagagaagtgataattaattacgcttcttaccatctccagctgaatcaatctcattctctttcaaatcgtctgggcgtttgaaaaccctaacaatctgacaacacat

SEQ ID NO: 26163 - DNA, 2150 bp, Arabidopsis thaliana landsberg
ttcgagaagcagcccttggaaatatgtgtgttgcataaaagttatttctttgacatttttccttctctggaaaacagcgtacatgtgaagtacaaaatcttcctgtccgctatggagtacttgtcattctctcctgtggatgatttacatggaaattttgaagaaatagtcgacaggtatttaaatggttgagattttttttcctggcttaaaatatgtaatcttgagataccttttactttagtaatctcaaaagtgaaactttatggaacatcacagggttttgtcaagatctcgggaaatcaaacttgcaaaatatgatccctcaattgatgttgcggagcagcatcgtcagcagagtcttcaaaaagcaatagccattcagtggctctgttttacacctccatctactataaaggatgtcaaggatgttacttccaaattacttttgcgatctttgatgcacaggtacaattgatgcatactgacatatggcctcatgaatatatctgcgtctgagagaaatctcgacatattaggaaaatgtaggctaatttgttcgctgttagcctatttctcaatttcttaatagagacgaaatgaagaaatcagaggacaagagttccttttagtatgcaaaatgtttgtctcatttttttcttcacttttgcctctgtttcatggtatttttgttttttcctctcgtcagcaacatacttttcagagagtttgcattgattgccatgtggagggtgcctgcaactcctgtgggtgcacacacacttcttagttatcttgctgaacctctgaagcaactctcagaaaatccagataccctcgaggattatgtttccgagaatttgcaagagttccaagactgggtatgtttctctgcaattttaactctttattattcctttgatttaaacatccagtgtctagatagctttacgtacctctttgtctttaaacagaatgagtattattcctgtgatgcaaaatatcgcaactggctcaaattccagttagagaatgctgaagtcacaaaactgtcagaagaggaaaatcagaaagctgttgtagcagccaaagagactctggattcttctttgtcattgcttctcagtaagtgatgccaaactttataatatatggttgacttgtgtgcacgactttgcagtttttacattgattgaaaatgctgttaactgtgatactattgaacctcgtaatattaggacaagacaacccctggatgacatttctcgaagaccatgtattcgaatcagaagaatatttattccttgaattgcatgcaactgcgatgctctgtttgccttctggtgaatgtctgcgcccagatgccactgtttgtgctgcactaatgagtgcactttactcttctgtcagtgaggaagttgttttagatcgccagttaatggtactcctttcatccaatgttcttggtccatatgttacttttacctgtatccttgctttcacccatggttatatacaacggttatgcaacaaatttggatattttctatggtgtgacaccatctcgaaagggcagtctactacattaatgtttgtgttgatcttcgcgttcaggtaaatgtatcgatttcgtcaagggacagctactgcatcgaggttgtgctccggtgtttagcaattaagggcgatggacttgggccacataatgcaaatgacggtggtattctaagcgcagtggctgcagctggttttaaaggttcggatatctatggaacatatttctcattcacctatgatttacctcctttctccatagaaatttggggatgtttcaccagcattaataaaacaagatgttacaatgaaagcacccgcattataaaaacaatcacaaacttgaaatttgactgcaggtgagcttacacggttccaggcaggtgttacaatggatatatcccgcctagacgcttggtattcaagcaaagaaggctcgcttgaaacacctgcaacttatattgtccggggtctctgtagaagatgctgtcttccagaactcgttcttcgatcaatgcaggtagagcctctgccatattagattataacattgcagacatatgtatctcgatctgcgggcatttcatcttacctat

SEQ ID NO: 26164 - DNA, 1811 bp, Arabidopsis thaliana landsberg
  unsure (1)..(1811): unsure at all n locations
gttttgtcgttgaagttatcatcattgatgaggaccaatattccgatggcatctggagcaagcttagagttagaacatgatgatattaattataagaaacatatagacaacaaatatttaccatataggtgttcgttcatgtcgacagcttcttcaaattcagcaaaagaacggatcctaaactattgtctttctattgattcaccaacatcaacaacctcattcagccttgtttgctgggtgaactggattagaaacttgtgaggatacaccttgtagcttgtcttgttgttagagaccaagcaatttttgattgtgtagacaacacaatgtttgagttttccagcctaacaccatattcggtatgtcgcaatgaatgcttggatcatggtcgactacataagaaaatttattttgagattgaaaccgtttacttatgagatagtgactccaagatggttaaaagtaattaaatttccacaacttttggtcgatcagcaagagctcgagccccataagtaagccactttttatgggttttcgtgatgaagcatgtgcatctaaattcaatgaactctgtttgatttctcaatggacttaaactctctttgatctctcaatatttattcatagacactactttagaaactataaacttttatattttctattttaccgatttgtagaatttctctttcttgttgtagaaagtttcttgactttagttttatttttcctcatcttttaataggtttttctttatcgtttaaactaaagctaagattaacatatttttaggtttttgaatttttctattaaacatctttgaatgatttcaatatatgatttgacatttaattgttttgggaacttaacatatattcgattgtttaaaataagaaacccggtttttattttccttttttaattttaaaatacaaagtaattaccattttcaaaaatgttaattaattagatgttaaatatgttaattattgatgtggcagctctcgattggtcgctctaaatcccacgtggacgcctttagaagtaaatagctagcttcaacttttatatagtatagatttagacagaataagcaaattaaacaatcattaccttatcttttataactctcaacctaattcccacccctaatttcaatgaataagatttcactaagaacacaaagaaagagcgagcgcacggaaaaggcaaatacccttaatcatctaaatttttacattgtttccaagtgatttctaacttgacaaaaataaaatcaccaagagcatgtcacaatatgcaattcaatgtataaaattcattaaagaataaaatgaactcaaacataaacgcatggtcaaaggatattacttacatcaagttcactaaaatctttgacggacacgttacgtatcatgttcttctcttttatttgaatcaaatccgatcggaactcttgaattaacatatctgcatttttggtttttcaagctttgcattcaccttctctcaccttgttcttcttcttcttaccctaatgttcnnaaaatccataaananttaacttccaccnccaanaaattttgcggatgtaaagtctcccgaaaaactttatcttttattcattcatgtggttagagtttaacggatatgtttggatgatcagtacttataaatattggaatantatgtttgttcaagtaccttttaatatccatttattgataaacaaatgttaactcacaaatgaataatatgtaatataattatttacttaaaatatatcaacaatggatattaaaatg

SEQ ID NO: 26165 - DNA, 993 bp, Arabidopsis thaliana landsberg
tgagagtttgcaggagtccatgttaagtagagtgcatggtgtaactatacaaaagagtatatgaatatatagaggaaaaatgaaaaaagaattcacgtgaagatgggggctacttctgcaataaaaagagacgccccaaaataagcatggttggcaattatcataagaatacaagatttctttgatgacccatcgctatatatcatcacatgtcgaccacacttttttcacttttttttctaagtgcctcttgttcttgggttaactacaacttttaacaacgtgtaacttcagtttcaacagtacagtacatttaacttgtaggaattgtaatgaatcaacttagcgagactaggtcattatgagatatcatcaatactaaataacattttgatgatgtaaacactctaggaaaagcagataatatagtatcatatggttttcgctttagtgtgtggcttcataagcatctccatgcatgagtcgactgctaaggaacatatagatctgcaccatagtgaagacggtttagtctattcgaaacactaatgctgggcctttcaaggacctcccgagactcgaattcgaatgcactctccaaaggtattatgttagggagaaaaaccttattaaaccaaatatgttactgtttaactcatacacgaaaattagatatataaatgtggaacaaatagcatatagttatatccaatatatacgtacatgagaggtaaagaagacagcaagactgacatgtgaaattcgggatacacttttgttgtttggtgattttgttacgtagtgttataaaagaaacgatcatgtgtgcgtggaccatcttcttctttttaccgctcacttcgctttttaccatatctactacaaaagagtccgaactgaccattaaatgaacgagtaccattcaattcataaactgcccgtatcaatctaactgacactgtacaagttataatgttaatatataaaagtaat

SEQ ID NO: 26166 - DNA, 1626 bp, Arabidopsis thaliana landsberg
acatcaaagggataccatcatacattagagggagtggttttctaattgatatgatttcaggaaaattaaactgctcttttttgttaaaagacaatcaattttttcatcaacaattataaaggactatacaaaattgttaaataattatactaaaatagtgtggtcagttcactagtggtgggtgagtggtgtatgtgagctcaaattttttagggaccgtccatgttcaagtataacacatgataatgtagagtataatgcactgttaagaagaaaaataaatatgtgaactctattggatgtacactctctttcaagatttttaagtaagaaactatgacaaagctttatttattgggttttgcccccaaaaaaaataaaagctttatttattgggtttctttactgagataccattattatgggaaatatttgcgaaaatgatgccatagcattttctcaattaaatcctatattttttttgtactaaatccatgctattttctttttaaaaaacacacaaaaatatagaatattcaataacatacacaatgatttatgaaaattctaccacgtcatttctgtgtcatttacgataatacccttgtttttccccactttgttcttttgtttcgagatatgtttaatgtttttattatcgtaaagagattgtcaacttgttatcaaaatagattttgggattttacgcagtgccccttcttaaatttgtggtggagatctctcaattgcattcattaatcatacactagtctttttctgtatcctttaaactgtggccattgtaactcaccttcacttatgttgccttttaatcatttcgtttctttagatatccctctttttaatattgacgttatatataataatgtgtgtgcattacatcattcaactctcattggttattgctatactctgccttttcaataattaaaacatcaaactatagatcatgggttccttacaagttgatcccttttctgttttattatatttctccatgcatactttgaagggtgatatgccgctgatgcggttacgagcaacacaactgcaacgaccaaatttcgaaaaaaacataacataactgcaacactgattacttcacataaagtccgtatcataaccatttttctatatattctataaactgaacaaaaagaagagaataaatgataataaaatcataaaaagtgttgatgtttcaaaagaaaaaaagaacttgtttcccccagacgctaaccaagccccaccccagcactgaggagctcccaacatattttatttgcgtgatgggtaggtatggatctacgggtagattttttgtttttgacatgtgaaagttttctgccgaaaacaaataataatatatttttctgatccggaaaaaaaatgatgtttaaaattttagattagcactagtactatcatttaagaaagctcactattcgaaaaaatatcaacgcaacgaaaaaaatgaaaagcagaagtatcttgacaaaattcgtctagcttgggtgaatcgtgttaccgaaaagaatttcagaagagatcaataaaaattcgcaaaaataaagggttttacgatcacatcaatctatttagtat

SEQ ID NO: 26167 - DNA, 936 bp, Arabidopsis thaliana landsberg
aacataatcattggaatgcttctgttcgcaattaacgactttttcccattgattaaactcaatgaacggttagggatgtcctatatgatggtgttatgttttagttgcatatggtgccttgttgacagtttggtgttcgtaatggcaggaatctatcgtctgattcatgtaatctgtgccacattcaattggcaggttttgagaaccttgctctactactctttcgtcgttttgaaagaattatttcttttttattgtaagctaagaatttgcaaattttgcttgggcatgtgttgttttgtcatagttctttcttggttgaaataatagttttttttttttaatatgtatgtatctcttgttatcctctttatatattcaaagagagtcatgggttcattgttaagcctacaactatattttcatcttattttggtttttgtaaatctattttcatcttatttacgaaattaaaatgtcgaaactaaccccactaattgatttgcctattcgtaatcagtacatattgtaaactggcttgattttatgataatactacatatatttgtattcggttaattttttacaaaaaccctaaaacctcaagagctctggactttccggcgaggaaactatggccacaaccaccgattgcgtctctttaacattccttcctccaagagttttttttttccctaatatatataggcataaattcgaataaaaatagtgtaatatttatgattttatccttcgagaaactatttttgtgatatctgttttgctctgaaaggttataaaagccgacactataatgccatctcgtctaagttactaacatatctagctttcacgtttttttttttgtgaaatgttctttctgttttttttttaaactttcattgattttgtttctcgcccttcttttataggatt

SEQ ID NO: 26168 - DNA, 1799 bp, Arabidopsis thaliana landsberg
tttttatctagattgtggccaaagtatagaagtctacggctacaaactattattagttgcaaataatatgagttggccaaatctaaagagaatactaatagtatgtagccttcttgggtaaaataatttaatgttcatcgtggttcactaattatgcattactattatttagaattgtgttaattaattaaataatcaggcctatatgtggatctattcttgaatattaattagattcttttttggtaaaatatctttgctaattccgagaggtcgataaattaacggtcatgcccactcggatgaatcaccccttatcctcatcctttatatctcttatgatcctatattatagtaaaatttggttaatagttgcaattaacaatttgttttttgcagttttagtaactcctaagaaaaaatgttataatagtctagtggttgttttatagattagagtcttattgtgaacggtttaaactttagatattttttttcacttcacttcttaccccaaaaaaaactccaaagattggtaaaaatcaaacaatgatggctcaaaaggtgaacttggtagtgataaaagaactgcatgggacgatggtggcatggtgcttacaacagtgttaaggtgtatatatgtcaaggccacgattgtcgattgtgtgtccacggttagtttgagtatgccaatgcttctcaagttgttgctggagatgaacacgaaaagaggtacttatatatcgctgcggcctaaacgggccaaacgcattttgaacccatttattttataacttggttggtcgagatacggactttttttttaataagtgacccgtttaatcccacaacttccctaggcattgtggtctttgactattgtgactatactagttattttataccttcttaaagtcagaccggtttccatcggacaagattaagttgttttgcttgatttcattgtagttcgacattgattatccaagtgaatacatcaccgctgtcgatggcacatgcgattaaatctttggaagtgactctgcggtcattatcatatgcttaggttcaagactattatgcgaacatctaatccctttggtcttgaagctggcaagactattatgccaaagggattaaatctgatgatgatgggagaatcataatgatccttcagttctgaccataaaacttttcgctcctccacgtagtttgaagcatagacaaaggaacagaaaaattcatcctgtcgatcttctagcttcaccgaacaagtcagcaattgaccactcttataaataggactaagtcgcacattcttacgccatagaacccaaatacgaccccgtctattgtgctcatagttagtgagaagcgaccaatccttgaaaagcttaccaacaagctgcgaaaccttactctcctttactctcgtttcaaccaagcaaccaaacttgaaaaaagattagttattagaattataattatcggtaaccttgaaatcaccatgaaattaattttcttgttatattcttatcctcttcttctttttcttagcaattttttcttcatatccttttttttattagtagtctattgagagaagtttaatacaacagtagagtagaatgatataacattactacttgaaatagttgtttgcgagcgaattcatgttttgtgaagaaaatcgtttttcaagtattttattacccctagcggattttttataagaaaactaaattttcgcaatctggatcttgaataacacgcgtgagacaacacacaacgtcaacgag

SEQ ID NO: 26169 - DNA, 4999 bp, Arabidopsis thaliana landsberg
agatcgtgttagatatatcagtatcctttcgtgtggattctgaatcatcttgtgtcatatgtacaaaaattgagatgccaattaatcgtgtgttagctaggaactgagggttacttatgtgccacgacaatgtcatagaagctaggaagtgaacaatgtagagcttacatgacggggacagattccggtttagcctcggttttgattgtagtgattcggtttacggttcagtagttttattttgtgtgttaattttgagtagctttgtatattagtaagcggtttttgtgtttgttctcgttttaactttacaaaaagagaaagagtaaatgtcatatttaaatagaaaaatgcaaccacaaatgcaaagaaattcgagtaaaaccaaataatgccataaggatatttacctaagaatcaaaatatgaaacatattaaatgtacacaagaaaaaaatcaaatcactaaaaattcactaaatttattaccgcaaagtttggatcatgatctcctaatttttgcacaagtggattcgaatcaaggactttttatcagtgtttttgttttctttcaaggaagccataggagactactagatagaaacacatatactacatatgtctttattatagccaactagatttaacatttttagaattgaatgtccaactacttctcatttttctttgcaattgatcttgaataaaactttgaccatggcaacatgtaaatggtattttgttatatatatttttattatttgtacaacttttattgtactataccaactaggcctactaaatcaacccaacaaattgacaaaaaaaaaatcaacccaacaaacctatttctttatttaaagtagtctaacgtcactttatccattttcttgaatgtcatcttactaaacactacgcatatgtgacgttttctttttttttaactaatcagaaaattgaatttttcatgataccggtaaagagatttatccaattaaaccgaacccgctccacataagataagctctattaattattagtccactggtttttaggtttatgaaaacgacaaatatttgaatgaagacaacgacttcaacaacatgatcgagctggtttggtttccaagtgtgaattcaagactaagaagaaatccaacaatctccattatcaattttttttattaactttttgactaaaccagtagagagagagagagaaagacagcaaatttggttgactctaacaaaccaatatcatcaaagtcaagcagttgaaaattcttcaatttcatcatctccaattcttaatctctctgcttcttctttcttcacaacttgaaacagaacacaaaacccttgatgagggaataaaaaaaggagatctctttctcaatcaaacaaaacaaaatgaagaaagaacctgtccatatccttcctctgtaccttccatgtctcttgatgtttcttctttcatcactccgtcaaatcaccggagacgcaagggctagagccgttaaagtcacttgctcacctttgcttgagcacaacgaaaccgcttatgtcccaaatttcgtagccacaatggagaaaatcagcacacaagtacaaacttccggttttggagttgctctcaccggtacaggaccagacgctaactatggtcttgcgcagtgctatggtgatcttcctttaaacgattgtgtactctgttacgcggaagcaaggacgatgcttccgcagtgttatcctcagaacggaggtagaatctttcttgatggatgttttatgagagctgagaattatagtttctataatgaatacaaaggacctgaagatagcatcgtatgtggaaacacgacgagaaagagtaagacttttggtgatgcggtgagacaagggctgagaaatgctgttactgaggcttctgggactggagggtacgctcgtgcgtctgcaaaggcgggtgaatctgaatctgaatcagcgtttgtgttggcgaattgttggagaactttgagtcctgattcttgtaaacagtgtttggagaatgcctctgcttctgtggttaaaggatgtttgccatggtcagaaggacgtgcgcttcacactggatgtttccttcggtactctgatcaagatttcttgaataagataccaagaaacggaagatcaagaggtaacacaataaaaagattcatgctttctatagaatctcattcgcttgatggtcataagtaattgtttttgcaggctctgtggtagtgattgtggtgtcagtacttagctctgtggttgtcttcatgattggagtagcagtaagtgtttatatctgcaaacgtcggaccataaagaggaagagaagaggtaagattagtttcttgatttgtgatgaattggtttaagaaggattgagtgtttttaaccgagatctttggtgcttaacaggatcaaaagatgttgagaaaatggcgaaaacactaaaagacagtagcttgaatttcaaatactcaacactagagaaagccacaggttcttttgacaacgcgaacaagcttggacaaggcggatttggaactgtctataaggtatgtgtgtgtatgatcatgtctctctttctataccttcctgtaaagcaaatgagtgatatagtggtatctctctggcttgtttagggggttcttccagacggaagagatatcgctgtgaagcggttattctttaacaacagacatagagcaaccgatttctacaatgaagtcaacatgatcagcactgttgaacataagaaccttgttaggctgcttggttgcagctgctcaggaccagagagtctccttgtctatgaataccttcagaacaagagccttgatcgattcatctttggtaactactactaataatactatatgatgagtttttattgttgaatcttgaatgcagcagcacactaaacctgtcttcattattacttttgcagacgtgaacagagggaaaacattagactggcagagaagatacacgatcatcgttggaaccgctgaaggattggtgtatctgcatgagcagtcgtctgtgaaaattattcacagagacataaaagcaagtaatattctgctagattcaaagcttcaagctaaaatcgccgattttggtctggcgagatcattccaggacgataagagccatattagcactgccattgcagggaccttgtaagtatatattcagaaaaatgtaccatttcttcaaaaagatatgaatgtttgagctgatccaatacttgtgaaactgcagaggttatatggctccggagtacttagcacatggtcagctaacagagatggtagacgtctacagctttggagttcttgtactagagattgtaactggaaaacagaacaccaaaagcaaaatgtcagattactcagacagtttgatcacagaggtaagttagacatattttgtctatgggtctgcaggtttcacttctcaaactaattgtggtgttatgttttttattgaaggcatggaagcattttcagtcaggagagttggagaaaatatatgatccaaacctcgattggaagagtcagtatgacagtcacatcatcaagaaagagatagcaagagttgttcaaatagggctattgtgcactcaagagatcccttcgctaagaccaccgatgtctaagttattacatatgctaaagaacaaagaggaggtcttgccattgccgagtaatcctccgtttatggatgaaagagtcatggaacttcgagatggttctgatggtgattcagctggttgtgcatctcttgccactgtctcacaaagttccttttatggtagatgagctttgaagaagtgtataagaagaagagaatacaaaatctttgatctttgagcagaaactaaaattttgtgtataaaccagtgagagaagctagatagtataggtaagttatatcttatgtatcatacttgataacaaaaaaaagtactcaataattcaagctctaggtgcgatttcttcaaccaacccatagcttcaaacatttatctttaatagtttgcaagcttataaacggagttgcgagtttgcaagagagaagacaacaaaaacaaagaatgaaatgtctgagaatttcccaacatatgccatcttcaaaaaaatgttatcctcattcacaccagacttgcaaacatataagattggtggttcaatgcagcagtttaaggtaggtactcgagctcaagctttgttgttgtttgtgctcctgttttcttgttgtgatctcagaaccaggctgcttctatctggacacatagatcagaacttagaaactatgtgctcctgctttcttgtacgggatctcagaaccaggcgggcttctctctggacaaatagagcagcattggtaggttgatgtcaacgtgtgttgtatttgtcaagtcctcagaaactggcttctgctccacaaaccaagactgcctgtagcaaccaccacaacatatgttaggaacagacaattttttgtatacaaagaaaccatttagaataaaagtagcaatggagttgaaattattcaacttcttaaattgatcatcattcatgttctctcttaccttttgatatataatattttgtgagcgaaaaagatgattctttgtaaacgttatatcgaaaaaaagtttcaaccaaaacgtaacttcctttttggttagattgatataattattcgtaactggaaatcgaatctaatttagatttcctctacaatatcaaatccccaacggttagattaacaataaaccaaaaaaaaaccatccttataaatacacacacttagatcacgcattctcttcttcttcattcatgagaaatcaaaatacgctctattctcacgtccttcttcttcgagaaaccaaaatcatttatcgttcccatcttttatacctgttcgcttgatgatgatccatgtaatcctcgagttcat

SEQ ID NO: 26170 - DNA, 1403 bp, Arabidopsis thaliana landsberg
actcaatgaaatcaactttctgcgagaagaagtcaacatattcagagtctggagacatgatatggatgaagcacttaggagtctggagtctggagacattgtcaatgaaactctaatgtggcatcgaatggaaaatccagcagacgaaaaaacattgggaggcaaatggatttacaagctgaagaagaaactttaaaaacctaagcttcagaaatcgatttgttctactatgtttctttatattcccgatttgtgattagcaatttccaaagttaaacatttcaatccattcaacattaagagaatttttcataattttcccagatctctaatgtaatcttcaaatcaaatccattctacattaagagaatttttcactatttttcaagacacaaaatttacacattcaaaaaactgtgttcaataaacactaatacgttaccaaatatcaaatgacaggccaaaaaaaaataacaattaaatgcaaaaaatagtcatacgttagacccaaacaaaacaatggatactactcacaaacgccaactaacgattcattaagaaaaataaatggcaaatgaatacaagatcaaagaaaaaccttgtctccacatcaaagagtgatctataaatatcaataacataaccattagtcaaacatcaaagtttcaataacatagaaagtcttccctattaattctttaatggcctaccaacaagtcaagagaagttgaccactactggtttcatccggttcggaattgccttcacatcaacccaagccatatgtaagaaattaccattttaaggcacatgtgaatgctgaatggtgttgttccgtcgcaacgataaaatatttatttaaatacatcaataaaggggttgacaaagctaccattgttgtagacggcgaagacaaatcatcttatctgattctaaagaacatttagacggcgaagaggcgacatcttatcacatctattattgtaacttgacgttactatctttacaatttcctatattagccttcttctcaaatctttatttcacaagttatttttctttatacattccgtttcttactctggttctataataaatcattaacttattactatagtttgagcatcatatattactgaggaaggagcataactaagtttgaatagcatgacatttttttggtttttacttatttcctcccataaataaaaaagtatgttcaacagtttctgattcaaaaattttattaacaatatcttccaatcaagaaaatcttaaaacagtaaatacataatcgacatattgaaatacaaaattcaaaacaatacatgtaatttgatttcaaaaaaacattattaaaaaaccttcaacacttcaaaacatgtatatataaattagatggc

SEQ ID NO: 26171 - DNA, 1269 bp, Arabidopsis thaliana landsberg
caccaaattcctcctatctaccactttcaccaaatactctttgagagtccggtatatttccgcatttagcatacatatcgatcaaagcattagctaactcaacgttcttgttaaaccctcttctaaaaatccttccatgaagttgctgaccacagttcaatgccgctatattggcacaagcagcaactaaactcgtgaaagtgtaacaatttggcacaaagccttgcgattcaaaccgctgaaacataagcagagcttcactactatctgatcgctcaagctcggatattaaagtgttccatgtgattaaatctttatcttccatctcatggaaatagtgtttcgcttctgataaataaccacacctacaatacaagtccaatatagagttcatcaccgggaggttagactgaaacccacgtttaatcacagacgcatgaatttgcttgccggttgtaactgaatcaatcgaagcggaagctctaaccgctattgttatacagtaaggcgtcacttcagcattctcctgaacacataaaacagatccaaaatgtaagaacttcaatacaaaaacgtcaccaaaaacacgaggaatatagctaaattaccagcaacatttgcttgtacatctttaaaccgccaatgccatcacccaaatgcgtaaaaccggtgattagagtagtccaagtaacatcatttttcaccttaatatcccgaaaaatcaaacaagcagcctccattgttacagaacaagtggcgtacatattcatcatcgcattgtcaacataaagagaaccttccatgccaagtttaaccacaactccatgaaccaaagcaccataagccaaaaccttcatgtttctacaagacttgagaacactcgagagcgtgaactcattcgggcttgttccttgcttaaccatctggtgaaaacactcccaagcacgagcattgtagttggaagaagcgtaaccagtgatcattgcggtccaagctactacgtctctctcaggcatttcgtcgaacagtgagcgtgcttcttcgactaatcctttttcgaaatatgtgccgcattagatcttgttgctaaaatgtgatgcttcttgggtttatatggaggatactctgtgttttcacttgattcgacgccggcgttgcgtacagagcttctgtcaaagtttgggattggtttaaccgcattggagcgagcaagtttgaaaatgctcatgttcttgcgtttagaccaaaacgatgtctgatcaaaattgg

SEQ ID NO: 26172 - DNA, 1397 bp, Arabidopsis thaliana landsberg
cgctgattcaagattgttgttggcttgtgcagcaagaaaagcaatcgaagaacggtacaacatcaagaaaagatgatgatgacagcgacgatgatgacagtagcagcgatgacgattcttcacaaccactttcatacagaactcctctgcttactcaggtacaatagattctcacttttcaagtcatttctatgaataataatgtaaaaacagaaacttagattcttgatttgacatttacaggggattggtagacttttcagatgtctctgcaatccagcattcgatgtagacgatgatgaaattgtatacaaaggcaaatgatcaataccacactcaaatatttcaatttgatgggtctcacatgtgaaatgtgatgcagcttcttaagttattaattctttataaatatatgtaatgatgataattgatgggatcaaacttaacaaattgttaaaataagtttattttctaaaagaagaaaaactccactactttgtaatcattacaagattgctatactgttttgttgtaattttctttctatcagtgttatgctatacactcaaattgagtattcattcaacaatcagtccaactagaacctggattctttgtcacattgttctccctcatcagttttcttacaagcgccgagctttcccaatctcccgaggttgcgaatatagcggacaactgcacataagcaactgagttctcaggttcaagctctataatcttctcagcagctttctttcccatggctttatatccatttgctacacatcctcttagaatagatgaccacatgcttccatccacatcgaaaggcatctcttctacaagatttatagcttcttccacataaccagcacgagccaaaagatcaaccatacatgaaaaatgctctttatctggaacaaaaccatgatcaaccttcattgactcaaacaattttcgtccctcttcgactaaaccacagtaattgcatgctgttagaacaaccataaaagtgatctgagtaggtcttataccagcaacactcattttcttgaacaagtcaatcgcttcaaatccttgaccattcgtagcataacctgatatcattgagttccatggtacttcatctgatttaaccattgtatcgaatactctcctgccatgctcaacgaatccacacttgcagtagagatcaatgagagaagatgatactacttgatcagagtcaagaccaacaatagttgccctcgcaaaaacttgctcaccgagttcgagagaagatatacttgcacacgcactaatgacactagagaggctaacctcatctgtaggcaaatccagcttatgcatctgatggaaatactctaaagtttcaacagtacaaccatttttgactg

SEQ ID NO: 26173 - DNA, 1163 bp, Arabidopsis thaliana landsberg
  unsure (1)..(1163): unsure at all n locations
cacattagtaacatcattggaacccaattcagttttaagtaggagaaattttcccatataaggttctatctaaatcaaccagaagagtttgactctaagagtgcagagaattttttgtagctaaggttattacttctacttgttacgcttcgcagcacgttttccatgacccttctttggtggtcctttgtcacgacgtttcaacatctcaagcttcgatatccgcctacaacaacaacacccaaacttaagttaaaatgcctctcaacagagagaaaacaatgataacataagcagtgaatataaaaccaagtgtaagtgaatttcaaagacagtactatccttgccaaataagattagttcgtgactatgttgcattttacaccagaaaccaaagaacatgactctgcgtaagctccacaaatcacaagaaggctcatacaatctacatctagtttctttctcatgtctaggatttcggatactaacccccaaatagcaattgaactaaaaagcttgtggaaacatgttccagctcaatcccactcaaagagttttctatgataaacaaagcaatcaattggaaagtaaacaagaaaagagaggtttaggaaagtactctttttcttctctagccaagacattgggatcctcattcttgatgtcgtatggataccattctgcaaccttatcaccaataagcttcttccttaatatcttatgaggagatctctgtcccgttgggttnnnnnnnnnnnnnnnnnnnnnnnnnnttgcttcggtcacacctcgacccactgctgaagatataaggctcttcaggctaccactagccatcttccttgaaagttgacactataccaccttaacgtaagcaacacaatgaaacaaaatcactcattatagtctgatagatttaacaaaaaaacgtaatcatttcaatcaaaattcagatatatcttcttcaaagccaaaatggtaaatgcatcatagaaaggtacaaactttgatgttgaaatacagtagcttctgaaatacgagaatctgcanactatgagaccataaaattaagggttgctatgtcaatgcgatcaactcttactaacgattctccaaactaggttccgtttccttacaatagtttctaaagactgacattttta

SEQ ID NO: 26174 - DNA, 1035 bp, Arabidopsis thaliana landsberg
tttatattgtgatataaaaagattctcttccttttctccttggttcatgattgttttttcaaatgtcatttgtcttttggtttgactatatttttcttaaaatatgacctcatctccttatctaaaagttttccccccctcatttgttaaatttatatggcttgtttaaatgattgtaaagtttatttaactagaaagccttatgtacattaaatgcaacattttccttaagttatttgaattttttttataaatctttttttcaaaaaatagagaagagaattggacttttcttgatctaaaccaaataatcacaaccattgccggtcctaagaaagatgtggcccaatacaaaacaaatattttttgatgggttttatagataaaaatttaaaaggtcatcacatttgggatacaataacatataatatcatattatttcgtaagttttgtttagttgtatgaaaatatggtatctaaaatcgagtgggcgttcagttttttcgattttacgttttttgttttgtagacattaaaaaccatatagaaaccctaagttagtttggttacggtttggtttttatggtttttagtgtctgtcgcaaggcagagactctacgggggaagtcggcgccgaaaaagaagtctcttcctccaccgctacaggagcagtctagtaaaagtgttacacaaggtcagtctcaacaaaaatcctatgctggagcggtcgaaaacagattttaaacatcaagtcacacgtttctagtcgaagtggtcgacggagcttctttagtggagatatcagacgacctcattcaaaattcagtgcctctttaggaagattttctagagaaaaactttttggacaaggctccccatggagctaaagttcgcgtaatagtaaacaagatctcgcctttgggaaacatatcaattcggattgatgtctatgaagtgaatgaaacaacagtgaaattcagaatcaaggatgcccaaactagaagtagggtactgcgaaaggggatggaatatacc

SEQ ID NO: 26175 - DNA, 1366 bp, Arabidopsis thaliana landsberg
  unsure (1)..(1366): unsure at all n locations
ctccatctaggcttgactaatattttactcttaccatattgaaaagaggtaatgcatccctctgcaacctgtattgggcaagaaatttcttaaggtaaacaacaacgagcagaaaagactacaggaaaaagaatatctaagtaggtaactaacgtttccagaagatatgagataaattggataaggtccgattctgaaagctcaggattttttgtctctgcttgtttcttaatctcatccatcataaagtttgcatctttcatgttacccatggataaatacctatcatgcaaaaaaagaaaaatcaacctctttggttcctttcaaactctgctatctctgtatccaattataaaacatgaacttacatgagaactgctcgtgcaattgcgaggtcatcttctccgggataacactgtaaggttgtattcaagtaagaaaccccatatttttggccacgagaggttaaattgaaatccagacatttcttgaaattctatcccagtggaaaaactactctacactaaaacttaggaataatagaaaatcaaagatgagacaacttgaaacaaagagactgacccttcccataaagttgaccagcatagatgcaaatttctcggggtcctcagctctaacaaaatgtcgggatatccggaccatatcctgcgagaaatatataaataatgaagaaagataaaacgtataactttataatcaaaaatggccacaagaggattacaagttcaggacactcagtgtagagataatcacccagcatagcatgcaactcaggatagccagtacgtgggcctccaaattctgcagaccatctaaaagaaagaagaaacagcactatgaaatacctacctgacatgttcacacaaaaactatggaaaataccagttgaataagtgaaataatacacatgctctggcttacttgatagcagctctcaagaacgaagtcaagttttctactcgtgatctggcttccccaagagattcttgaagattttgaacatcttcatcgtcactcacatctaccaaatgaggtggtacaggaacccgaggaaacaatttgaaaatacacctgatacgatctgacggaaatatctcagtataaccgaaaactgcaataagtcaaagcgattatatgcaaatttgaactaaccaagagtttcatcgttgcaaggagatttggctttaactagtgtgtcaacaaacaaaatagctaggtccgccccacaattcacctgagaatttgcagttntaataagaaattagctctactaaactgaacaaaagtgcacaagaagaaacaaagaaggaaagagaacaaaccaggccgtgttctagttcaatgc

SEQ ID NO: 26176 - DNA, 1555 bp, Arabidopsis thaliana landsberg
  unsure (1)..(1555): unsure at all n locations
ttttgggaagaaggctctacattgaattgcaaatgcattgttggcatccataatttaatgttgtcttggttgtcttgaaggtaccctttggtgcaccctttcatatacagagcactaaaggccgcaactgatttacttgacacatctggttcatctgattcaaacctggcaaatcttgtccattcgagtttatgggccattctgattcttttatctaggcttaatcccttacacatagcaagtgaaagtggagatgacctggacccgttcgtttttatgccctttattatgaaatgctctactcaaagtaatctccgtgttcgtgttttggcatcacgtgctctagtaggtcttgtttccaatgagaaactccaaagcgttctgctccgaattgcctcaacattaccttctaatggggcccaaggtgggtccttcaattatcttcacggtattttgttgcaacttggtaatctcctagatacaaactgtagagaccttgctgatgactctaagaaggatcagattattggaaaattgnnnnnnnnnnnnnnnnnnnnnncatggttggcttctccattgacgtgcccttgcccgatcctctgtacatcttttttgagagtgcttgatcatatgcgagtaattgaatggacatgctctgaaagcaaaaatctcagggacatctacaaattgcacttggatctatctacaaattgcttggatgcagatgcttcttatggtttctcctattatgacccttcaatcgctgagcttagagaacaagcagctgtatcttattttggttgcgtatttcagccatctgatgaagcagcggcagtttttcagattactcaaagaccaaatttgcaatcgcagaaagttcctgaagcattagattttcctgaccttaacgaaaggctccttcgttgtatatctgatcaatcatatgaagttcgtcttgcaacactgaagtggtttctgcggtttctgaagtcagaagattccagtttctcagagtcgagcagtatttggaactgggcaaaaaacggtctccaggtgatattattagagctgttggacaaggagaaaaaccataaatgtgagaactacattttaaggattcttttccagtggaatcttcttatgttcaaaaaatcatgtaacgaggaatctgttgaaggcatttacgttggttcgttgaactatgattcggtgtttcatctttggggcaggctgacttctctatatgagagcacacgacgtgctaaaacccgaggtacactcatgtgttgcctggcaatttgtgtgaagcatctcacggggttgttcatccacaaaaacgaatctgaaaaagaagaggaaccaagatggagttgtataactgattgtgtctcctactttgttaacttgatcaaacagaaaagcttaccatccgagcaagtaaatgttcgccatgcatctgcagaggcgattatagcatccggtatactggaacaagcgaagctcgtaggtcctcttgtctcaaatcaccaaatttcctctgacactacaccaagca

SEQ ID NO: 26177 - DNA, 1535 bp, Arabidopsis thaliana landsberg
cgacgtaggaatacagctgagataatggcaccatgaacaatgcttgtttagatttgttccttgaagaagcactacgagtccagcggtatatctaacaccaaattttcaaaaatttgcattaaagaattgactgaatctgtttcattttgtaatcatgatgaaagaaaaagaagtataccctgatattaaaagcactaaagaggtgatccaaagaacgtattggtatggcttgtgtttggatttagcagacggtgcagcataaccccgaggattgttccgctggttgaagtatccatactgaggacgtatcaagaaaacaaagcctagaagaaaccctgatgtgaatcctccaagatgggcaaagttgtctacatgtggaagaatacctactgctaaattaatggctatgatgaagatgagtgtcaaaagagctgcaaactgcaaatgtagaaaaaccaatgacattattgacacatcattcatcgaaagtgcggcttgtttaacaagggaagatttggctaccttattagcgtaaatagtccaattagtgagaagctctgaaagcatagcaccaagcaagccgaataatgctccagaggcaccaacggatataccagcccggttaaatagagaagataacaaacttccaccaaatccagatatcatataaagcaatccaatgcgtactgtcaaagaaaatgagaattagtaaataaaaagcaagtctttcagcatcagccatacacattttggcacataaaccaactcatgatgcataccaaatccaaattcttgctcaagtcgaatgccaatgaagataaggctcaacatgttggcaagaacatgaaaaaccccagcatgtagccatatacaagtgaacaagcgccacacctcgtgcttatgaaccaccattgatacatctaaagcccccatcttctccaatctggtatcaaagaatacacataactataacacttgatatttactgttacaatgcaatgccacaagtataatttcaccaaatttcattctaagccccaaaatctaagatctaattcaaattgtacaaagtaatgaactttttaagaacccatcataattttaacaaatccaatcattagaaacaaaaaaagtttccacatttcaaactcagagacacgaatctcaatcaaatgtggaatcttaagaaataaagttgagatctttaaggttacccacgtcaaagaagaaggacccagaagaggattctctttcataggctgaaaagcaaatctcccaagaaacctagctaagcaataagccgagttcttaggacaattgttaataaacatcgaaatggcgaaaagggcaatgttagccaccacgatagctggaacaagccatggaaaccaaagcttaaacggtctaaactcagcgaacgaagctcgttgttgttgtctccgtctcctagtcgccgtcaaaggagacgtttctacagccacattgtttgtcgccgccgccggtggattcaccaccttgatctccagaccttccca

SEQ ID NO: 26178 - DNA, 848 bp, Arabidopsis thaliana landsberg
  unsure (1)..(848): unsure at all n locations
atatcatatacgttaaaaaccgtgtatgccatattcaacgactattataatcttaagattctcaagcttgagaaaatatgcgttgaagatgatgtattcaacacagttatttcgccgtgtcattcgctcaaggttcctatgctaaatgtcatgttgtacaacaaaaggacttgcttgaagattcataacaataaccttaaggtcttgatgtggcttcctctaattcataattcgattctagatgtacgacatccttgtgatgaacatgctctccccgcactttagaccactacgaacggctctacatgtggaattctggacctccgataagctttgtaccattaatctgcaagaaatcgtgttctctgaaactcgagccctagacatagtgtagaagtattaatgaacccttggttaaccattggactaagggacttccacactcctccatcgtttagacaatatacttctcttaacagcttcttatgcgaacattttcattaggattgtaacaccccgaccatcatccttggtgggccccacattctctcttggtttgtgggctcatccgtatccgacgtccggtccactaccataaggctttaaaggcttgtgtaatgaacctacaaataactatgtgatctttctccatattgtttcctctcttacacggtttggaaaatcacttcgtcgaaaatcacctattctgaaattgctccaacataagcacattttaattgtggagttctttccggatatttgaccgaaatataagtgtactttgttgacatcanatcaatttttttaacatctctgcatgcattaccatattcttgaaactaggatgt

SEQ ID NO: 26179 - DNA, 1427 bp, Arabidopsis thaliana landsberg
  unsure (1)..(1427): unsure at all n locations
atttgtttgtcttgactacacatggagttgtaatgttgggttgccttagcataactaggagctttcttggctttgctttccctttactatcactgtttggagagaatcaataatggtgctcttgcagcatctgttacctaacaatttttccaattcaagttgcattgatgtgtatactttgcttaagtggttggttttgttgattgattattcgaggtagattccctttttattcatatggattgtctttgattttacagtggtccagccatgaagtttacaaactatgttccccaagctaaggagcttcaggatggtaaactagcgccaccagagctacccaaattcgaagatccgatcgttgcacttccacctgctgtagagaagaaagaggtgtgtgtgacagtttttcttatctctgtacaaggatcaccaaaagcgactctgtttagcattgttgtttcctttacttgtgcctcttaagcttacaaaaaatgttatcattgtaggacccatttgttaacatcgctccaaagaagccaaactgggacctccgaagagatgtgcagaagaagcttgataagctcgaaaggcggactcaaaaggcaatgcataaactcatgggtaagtggcaactgtatctacatactgatatcttctatgtaagcttgataattaagacattagtctgtggttcgtgagtaagtgagtaacatttcactgaatctgttggtagtatgataccaaatcatagaagtccaaaatagagtgatctgttggtgtttgtttattatggaactaacacatgcactttcatcatctaattgcagaggagcaagagaaagaacgtgagatggctgaagctgatggtaacaccatagaaagttgaaacccaacgacgtcatcaaagaaagccaccactgaacagtatattctactcgattttgtttaactgttaaagcattcgaagtgagtagaccatgtaaaatcctacggccattggcatagacatagtaggtttatcttcttgtgtgaatcaaagaaagtcgcaatttatttccgagtagaattaagtgcggtccggtttttctctaaatttggttcaacatcggtggtannnnnnnnnnnnnnnnnnnnnnnnnnnnntttttggtttgattcgatttactgtggtttgataaagacatcccaaactagaaaccaaagttttgattcgggctagacgggtttagtttggagtctgggaaaacaacacagagagctattaagacctttcttctcggcatgttgcttccacagtgggatgatgggagtttagatacaatatttgtttattaataccgaacaatcaaaaatagatactaaagttttntgttttccaaagctcaaacctaatgtactaattcagtaaagctttcgacaccatc

SEQ ID NO: 26180 - DNA, 1192 bp, Arabidopsis thaliana landsberg
ctacactagggtcttatttgcaaaatgccataacaatacaacttgtttgaaatttttacctagtgaatgcactctaggtgtatcaaacatatgaaatgctgatgctcatgatgttatgctcaagttttagtaacagtaacaccaggggtgttacactgggtgtcgaggatgtcgtccaatgttcgttcgcctccgcggggtgcccctcgggcacgagagacgggtggtccggcggcatggacttcttcacaaggcctcttctcccagcgcttgtcggtttgctagttcccgtcacgccgtggtgcagatggagcgggctttgttccccgatgaggtcctgggcacgctcatcggcggtgatatagaggtccgcctccctgaacagctgttcggaagttatcgacgccttttgtagtatggctcggacgaaggccgggtcattagatcctcggtagaagtcctcgatcactgctgcttcaacaacctcgggaatacgatttctcatggtctgaaaccttttgaggtatgaccggagagtttcgtccccccggagcttgatggatttgaggtcccatggttgcgctggtttgtcgaagagggactcaaagttggcggtgaagcgtcgactgaagtcgttccagtcgtcgatgcagtgtcggggtagatgtcgcagccattgcagcgcgtcttgcccaaggacaatgggtaagtacgcggtcatcacgtcttcagacgccccggcagctcgagcagcggtggtgtagacagccaaccaaccccatggatcttgcttaggttcatatttgtcaacattggataccttgaagttgggaggccattggatggccctgagacgcggagtaagagcggacactccgcacgtgtcctcctgtcgtcggggatgatgtctgtcccggggaggggagttgtgattgtggttcctcgaccgtccccgggtggtaccgccagttgaagctgttgccgactcagtcctggtggcctagctctgagtagggatgccatggtccctgtcatactcctcccaacggcgaatctcattctcatgccgctgttcacgcgaagcattgatggagcttcgcgcgtcccggcgactgttgatggtgtgtcgtagatcgtttggcgggtgagcgaggggtagaaggtgattggctgcttgagtgaatagccgtcg

SEQ ID NO: 26181 - DNA, 524 bp, Arabidopsis thaliana landsberg
taaacaatgcgcagaaacaaaacagactgccttcacgacgaagaaagactatgggaaagaggaaagagaagctctatgggctgcagctcaaagaaccctccacggacttcaaccagcagagaaaaacaacatctttaacgaaaagaatagttacagtgaactctctcagattgctgaacaggctaaacgccgagctgaggttgtcaggtaaagaaacttactcttcacaccatcgattcaaagctctaataactctatatgtacatgagctcaacccgactctctcgcctgtattactcgaaaatcaataccattaaccaaaacttgatcttactcgaaaatcgattttctttgtcgattttctttgtcggttgttccacaagtttttgctaaatgatgggttttgatgatgtctgcaggctgagagagataaatacattaaaagggcatgtagagtcagtggtgaagcttaaaggacttgacattgacacgattcagcaacattacaccggttaagctaaaat

SEQ ID NO: 26182 - DNA, 455 bp, Arabidopsis thaliana landsberg
taatcatatagatttatgtcattcaattgtgctcaatatgtctcgtttgtttctgtatgtgtcgtctacgactcattgaaggtggttctggatattgtaagtttggttggagcaagtatgcgtctccttctggacgttctgctacttttttggtgagatagtttttgtactaaatgcggatcattatttatatttacaaagatagtaagcttgcgtcttctctcttgcaacacaagatagttcttactagtttgatcgatcgccaggaatttggtaacattgagtcaccgatttatgctagacttcaacagttctttgcaaccattttcaccaggtttgtttttcgtttcttttggagtgacagctgaatgattttagcatttgtctctatggcttttgctttcccgatttcatgtggatagtttgcttacaggatgcaggtaaagccctctatg

SEQ ID NO: 26183 - DNA, 475 bp, Arabidopsis thaliana landsberg
gtgtggagtgactgcccttactccacgccttagggccattcaatggctccctaacttcaaggtgtccaacgtcgacaaatatgaaccgaagcaggatccaggaggctggctgaccgtctacaccaccgctgctcgagctgccggggcgtctgaggacgtgatgaccgcatacttacccattgtcctcgggcaagacgcgctgcaatggctgtgacatctaccccgacactgcatcgacgactggggcgatttcagtcgatgcttcaccgccaatcttcagtccctctccgacaaaccggtgcaaccatgggacctcaaatccatcaagcgccggggggacgaaactctccggtcatacctcaaaaggttccagaccatgagacatcgtatccccgaggtcacggaagcggtcgtgatcgaggacttctacagaggatccaatgactcggctttcgttcgagccatattacagaag

SEQ ID NO: 26184 - DNA, 1514 bp, Arabidopsis thaliana landsberg
cgtacaatatctgaaacttgcttctctgcaatgcaatgagaattcattcttcccatctcaattctttttcaacacttattcaaagaaaagaaagggaaaaggtagacttaatatttgtgggcttccatcgaagtcaactctgctggatctttctctctctcagattcattcccaagatggaagcctaaccaacaaacagttagtaaacatccacatacaaaatgtcaacaaaaagtttgaaatatgttcagttaaacaaattatacccaagcttcagggaagtgtcggagtcatcctcaaggggagttccactgtcgtagcttgacacatttgtggtcaccgactctgtctccaaagcctctttaagcgtcgtcagttttgccctttccaacgtctctagctgccgatatataatatacgttccctcatcatattttcttatacataaaaaaatagattaaggttattccatgatatctataagggtttagagccgtactttatccctcagtctcttattctcatccaccaattccgatccctgtttcacttattaagaaagtcactagctatagataggcttatgatccattagttatacgaattgtatgtactaactactaacccgtttctcaagtgagaaaatttggctcatcacacactcgccctatttaccaataacaacaaagtcaaacttttatatatgtacagcttattatttatatgccacgttaaggaaaatatgcatgctattagtttatgtatagtagtaaaccttcttttcagacacacggctaagtccggattcaagtagtttctccagccgctgcaactcttctaagttcaatccatcaagatcctctcctctcagtttcctgttttacgttaaattaacactcatttctatcaaaaatatctctatagatatttatccagtcagtgatatatcagatatttgttcagtatgtctaccaaagaaaaagaaaaaaaaaactacctatgctagatatagatagtaatgtatataatttttttaatgaattaatgagaataatgggccataattgaaaattacaaaactcttgtaaattttagaagtagctcttaaaatctacaaacaaaacatcaatttccaagacacacgccacaacttgacgaacttacacgtgaaatgaaatatcttcaatttccatgaaatagattctaaaacctaaaaatagcatgcacacatcattgaaaaaacattaaaaaaaaaccacacacatgaaatagatgatctcttacagctatagcctatatgaaaataggtttatctgcataacatatcaatggagccataccgtagctgcttggttttgtcttcgacttccttacttagtctggagaggttacaattctcaagctgctagatgcatagtcagcagtttcaggattctgctattaatatgtacaaccagttaattagatgcttcaagattaatgattatacgccactcaatgttactatattgaga

SEQ ID NO: 26185 - DNA, 2439 bp, Arabidopsis thaliana landsberg
ttcattattcatgttttgtcggtattcaagttttgcacagcagatttatgacttaccaatgccaatcccacggtagggtgcaagaacaccaagcgtcattatataaactcgcatggccccactttctttcttctccagccgacaggcgatagctccaacacatatgtcattgtaatatgctgagaggaagtcaatccattattagaacatgaagaattttccttgatcacaaattagagaaaatatatgtaacaccaagaacataactacccaagcaactgcaatgaaatagttagtaccaaatttaagacgttgttaacagtctttagactttcataatcacatcttattgtacatttaaagaactagttgacgcaaaagatgttccaaccaagggtttcacaaaagtgagcttgaaaaaattctgtgaatacgaaaattagtcttggaccatgttctcgaaagataatataagtcaatcagcgatagattacaaggtacacatgcttaacatacaaaaatttttgcttggttgaacaaaagaatgcagtattcatatagtcaaacaacttaaaacaacgatcaagatgatactttgtcaacatcaatgtcatcaaccacaaagttcaaacatgaatcggtaattacgaatcaacagacaatagaaagcaaacaaaatcgatccattcaaggcttagaaagaaggcttctaccaatattaccgataaaatcatcttcttcctagtatcagacactagtactgaacctaaataaaacatggctcagtcaaataaattcacggaaccgaacaaaagagaagacacagataatcacacctattacaatgaccagtgaaccaactaaacaaacaaccaaaggaaagcaggattgcaaaaggtactttctttgtagagtataccaagcctaatcacagaacagttcatcataaaccccccaaagcaaacttttcctattaaaggaacaaactcgactactaatgctcgctcaggtaaaaagacagaaatctgagagcaaaaataccaaaattcgatgaattttagttctgattcagaggcacattcccgtgaaatcgtaatagcacatgcccattaagaaatttaaccaggaattactggggaaagcaaagagaaacagaaattaagaaaaatcaagtaagaagaagacgaaccaagcttggtgaattcgccggcagcgattgcatcggcgtagtacttgtcgttgtgacgaaccgggaacaaaaccgtgttgagtatcttaagctgcatcaagtttttgtctctgactccatctagcgatacgctgacttctctcccagctcccatcgccgtcgaacaatctagatattcgacgtcgtacggacagagaccaaagaaatcaagggaagaaaaagctcgagatttaggggaaacccaaaaatctataaataatgttcgtgggagagagaatagactattgggcctataattcattctgggcctggacaaaatgaaattctaatacatagttttgacgcacaacagagatcagtttcttatttatatgaccaaacgattgggcttggaatattgggcctggaatcatcccacatagttctaatcctcttatccacccagaggtttcattaagttgaaactctctcttatcgttaacaatttgtgaagcagaagaaacatttgatttgatgagatggggaagaagaaagggaaagcgatcatagtaggaggaagtatagcaggcttatcttgcgcacactcgctcacgttagcatgctgggatgttttggttctcgagaaatcttccgaacctcctgttgggagtcctactggtgctgggctcggactcgaccctcaggctcggcagatcatcaaatcatggcttactactccacagctcttagatgaaatcaccttgcctctctcgattgatcaggtaataagaacactgagtttagttcgacaattgaaacaatcggcgtttagtttttccagctctacctaaagtttttaactttttttgtgtgttgtgggtttgttgtagaatcagacaactgatagtgagaagaaagtgacaaggattttaacaagagatgaggattttgatttccgagcagcttattggtcagatattcaatctcttctgtataacgcattgcctcagaccatgtttctttggggacataagtttctgtctttcacaatgtcacaagatgaatctaatgtaaaggttaagactttagttgtggaaactcaagaaactgttgaaattgaaggagacttacttattgcagctgatgggtgtttgtcttcgattcggaaaactttcttgcctgactttaaactgaggtttgaaataagagtgtgatcttcatttatcgatattttgtggacttgatcatataggattttgtttttttcgttt

SEQ ID NO: 26186 - DNA, 7655 bp, Arabidopsis thaliana landsberg
gctgcagctccgtcagaaacacacaaaaagtaagtaagaagacgaagaagaaatcgatcgaatcggaaacttcataaatcataaagtaccgatgacgaagacgactgaggagatcggtcgaagaatctccgattgagcatcgacctcaggttcttcgatgtcacttaatccatctccatgaggagccataaccttatccctctcttccgattctcggcgatgcgtttgattcccaggaaaaatccgagaatcggaaagaaacggctggaaactccggcgaatgagagatacagtttattcgtttttggaccttttggtcctcttttgtgtttccacttaccaataataatataataaaaacaaattatttttttgtgctaatgaccgtaattaattaaatttagctaagtttttgtactaatctggtctccttgtagttttagccaagctcttgtaatcaaattttcaaattcttcaattaacttcagaatatttatttcacacttttaaagataactcaaatgtttcatcatagccattcaagcatcataaacgtaaacaaattttaacgaaattaaaaaacagagtaaacattgcatcccatggtcattagaaaaaaaaaaaaaaggcatgagtagaatcaccacaccaacaagaggaaaccccaaactttcaattttatacatctgaaagtaaagacggttttcctcattaatctaaaacttttgggggtaaacactcaaaaccatataacatttgttgctgctagtgctgcttattcccttctatgattagtttgaaggctcctctgtatcagtcgaagttgacggcagaaaggtagccgaggtgagcggctcgtgaaccaccgagttagaggaaaccgatattggacttccctcgagctgcaacattatactccccaatatctctgccattgttttcttaaactcttcttccttcaccacatttccatcatctccattcaccatcttcaacgcttccattatcatattatccatcttataaacaaaaacaaacttaactaatcaatgccgttgaaacaaacaaaaacttcactaattatattttattaagacactagttagagggctcatttctttaacacataactgtaacatgcaaattcaaaggcaaaataaacaatttaaaagacaaaataatttagacggggcattatttacctgggacacagcgcctattggtggtaaagtggccgatggtgcaacagtgtcaagcacagctcgtagatatcctttagacaccttaccctgacggtcttttggaatcgtctccatggcaacgtttagtgcctgcgaccaaaccgttccggatcatcatcactcgttaccatcatttaaaaagttttcctttagcataaaagctagataacatatatatgtatggtagtttaccttatcgaattcgaatttattggacaagagcctcctgataccgctcccatcaaaggtgttttcgctgtgagcaacgatcacgggctgttcattgagacgctgagccacactctccacgactctcttgaatgcttccaagaatctctcctgagacgcgctcttctctcttttatcttcttcatcaagacaagagtcaacaattggttctacgatgttgctcatcacctgttacaaggactctgcttttaggcaaaactcagttgtctctagcaacatatataacatcaaatacgaacttgaatacatattacgtatcatatgtactcccaccatataagtatcgttctgatattttgtacaacaaaaaaaaaacacccgaaaagtacttttacggtcttggtaaaaatacaaaaacaaacggttcttaatattatatgctttattttatcaatcatataaatttagatttgaagttaaattaggaaaatccatagcttaacagaaatatataaaaataaaataaataggtacccatgggtcgttggaaggaggcattccatgatcaacagaaagagactggagagctttgacgatacaatcacggagcgatgcgtccttgctactggagagctctgagaaaacagaaatgctctcgatttcatatccagggccgtggacaaactccgagagatcctcaccgtccatcctgaggatgacgataggatcacgtttcagaccagcagccatacccaacaaaatgtccgacaacacttctttgaactctgtcttgctcactttctcttgactcccatgagtgaattcgtttaggacctgtatatagtttattataacgttacaaacgatgaaaaataaatgtacggataagacagctagagggttattggtttaatctcgttgtctcttctttaaatacaccaaaagctaaacctaacgataagtaattggatactgatttgtatccactaagagagagattcgtattcagatttactacttcttcttggatatctatgcagctaataactacaaatctacaatcaatgtcctctcgatctaattaattaatccacgtgattcatgccacacacgacgaactttggggtttccatgtccataaaaacatattactattgaccttgtaactcgtttttggtccactcaatagtttttgtgatactcatactcgtacgtttttttgttggatattctctataataggaaacggcgtttgatttcgtcacagattatgtcataaataagaggattgaaaaatgtgatatgggatattgtttttaaaaaatgtcaagaaagtcttgaacgaaaatgaaaccttacgcagaccgaatgcttaaaaagataaaagctttaattgataaaatattaattatttgaaaaagaaaccttttttccgtcaagaaaggacaagcattatactggaaattgttgagttcacctaaattgtatgagtttagccaaactaaataaatagagaaaaatagtcatacataagtaaataacgaataaataaacaaaatactataacagtctttatacagtaactagtaaaataataactaggtgatgatttataaagcgatgtttcaacactgaaacgacaggagaagagcgacacgaggggctagtttgagatatgatagaggataaggtcaccgaccaaagctattatcatttctttaaaacaactaactgattctattattttttgacctagtttactgtaaagaaaaacacattttaatattagaaaaaaaaaaaaaataggatgaatccaccagaccaccacgtaagtatcaagaagataacttaaacaactatggtaaaatggttgaggttttccatatataattttatatgatttacgacttagtatgacctttcgaagatcctaaaaatctatgcacaaaatggcgagagttaaacaacctgtgtccctcggtatgagaggttcgactccatctcacagactagtgacaaagttaaagaatttgcaaagggcatatatagaccccaaaaagaattgttaacagttaaatgaatactgaaatcaaataaaaataaagatgtaacacaaaaattagatgcgaacatttctagttagtagttaattagtacgccggccaatttgaaaacatttcttactagcattaaaatatacggtaatcggaaaaaatcaaagatcacatgataaccaacgaatgcaaagatcaataatacaggaaaagcgattaagaaattaaaatgctaacatatgtatatgcaaattagtcggacgggaccatagatcacgaacataaaaggtattaagaaagaagaaaaggaaattacctcggagtagatgtgatcggaatcaggagaagttccttgagcaggcaaaccaagagcagcgccgatatcagcaacggcgggttgtaactcagtcacggagagcttaccatcttcatcttggtctaactgttgaaacttttgttccacaaacttgtcgaacactttctcgttttccaccagctcaactatgtccgagccatcaagtacttgttgctgttgctggtggttgttgcttttcaagtccatttatggaatctttgcttcttctttctttatctttacctttcttgagtcgcgagagccttgtgagatatctcgtgatggaagcacgagaaaaggaagaacagaaacttgacacacccaaaagaagaaggaaaactcctttttttctttaaatccaagtgtgtgtgtgtatgagtattttgttcagatttggttcggacttgcctgttctttatatgtgtatagaagtcaggaaaatattagttgttaattaaaaatgattaaaacagaatttaaaaatttcttgctatttatgactaaatttatatatattgagtttccgacaaaaaaaaaaaatatatatatatatatatattgagttcattttatatttgtggactcgccaccaccaaacgtatattaaccatatatccttagctagactataacttcgaaagcatcttgtgtttttttccccacctaagattacctaaactaatctgtcataaaagtctaatctaatattcatgaacttctttatccaaaaaaaatcattgaatttccgttcgcgtttttgtcattttttgtaacatgattacatgaccgtatcttttcttttacataaacttttcacacaatctggattacttactcatggggcgtgttaggttcgctatttaacttcagtaaccgacaagaaaatcataaagaacacgatgtttagtcataatgactgtgtctttttagccaatggtcggttcctttttaatatctttttccgactaatgtttggctgtatcatttttttgaacttatattccgactacttgtaattaataatattagttgacatgtaattaaatacacgatcatgacgtattataaatagagaccgacgaactaagcaaactccagaaaacataaatggaacatcgaacaatcttgaccacttaagctactatgtggatgtggtccgtatgacacgggcaataacacttgtgtgcatacatgccagtccacggataaaaatataaaatcagtaaccgagtcgtgtgaattaattatattttccacataactgacggagctaaagatttctgacaagagcaatttaccctcttgatttgtaatgacgtgtcaatcgttgatgaaaaatcgtggggacacttgttgctaattaatccttctgtgttcgtccttcattggtcggcgcctctgagctggcgtcaaacacttcaaccaaagtcaaagccggccggctctagtggggctgtctatggattaagcagattttctaaatcacggcaattaaattattagatttttttttttaattgacgtgattttttaattattaataaaacggagagaataattccaaaattaagatttgacattattttggatttcacaaaagaaaaagaagaaaaaccaaaaacatatatatatattttttttttttgaataatagataggttaaatttcgaattactttctatgttcttttgtagatgtagatataaacctaatgccgacaaaaaaatgaagaagatataaacctaataattagaagtggaggggttgttaccatacacattcttcaacgtaggatagattcataataattttaacaagaaaacaaaatgtaaaaggacagaatccctaacatttcccttttctggtacaagctacaaaaggcgactatgccatctttacaaaacaagaggaaatgagatatgagagaccagattctacaactttgttccactccaagtagctttcactagattgtaataccttttcgttttatatttttgctaaaaccccttttgttttgttaaatacctaccgaaatacatactttcgatccaacttttcttatacgggactggaaatggtttacgcgggccgggatccatacaaaaaatgttataagtttatattgtatcactgagaattgggcttcgttctgataaattttgaattaaggcccaatcacacaagtagaaacgcgctatcggcgataagctgtcgatctcgcaattttccccattcgcttatttcttcttcgaactacagaggggatccttgaacgccatgcagtttttctgcgaaagagagaaacatcgtgttatttagttggttgcaactagtaacgggatcgctaatcccataaagcgccacacagttaaggtgcagagagaagaacgacgtgttgttttaagcgtgaaaaaacggcgggccctctgtcttttctatttctctcttctcaacacttgcaggacagtgccctcacggataatatggagggttagtcagatggataatggattatcaattatgtgtagccacttggctacttgactcagtgacttagacttttcaggtgctgtgtaggtatataacataaaggtcccacgtacatcatctacataccattccaaagagatgtatatgtgccatcgacaatttcatgtgaagtgcgctcgaagttgttgttagtcttctagtgtcatgaattcttttcagatataatccatattcaattatcagtttataacatgcaagacagagccatgtgaattcttcttatgcatgtcccactcttgtataagaagcccacggtttctatcacatgaaggaaattggttgtatatatatattgcattgttttcatatcgtgagcataacaacttcttcatctaatctgataagctaaaggagacttctaagctgaatctttttccaggatccatcagagcagaacaaaaaaatgggagtgttccgaggtcttatgggcgcaaagaagatctttcaaggtcgatcaatggcagcttcgacaccaaaagggtttcttgcagtgtacgttggagaaagccagatgaaaagatacatagtgccagtctcatatttgaaccagccttcatttcaagctttgttgagtaaatctgaacaagagtttgggtttgatcatccaatggggggcttgaccatcccttgccctgtagatacatttatcaccgtcacttctcagcttcattagatccaattcacaaggatcacatatatgtaacaatttttgaggtcattaattagatgtagaagatatttagaacccagctgtgtaattacttacatagaagataacatttatcgtctgatatttgccccatcttttctccttcaacattatatactataatttaggggaactttgacaacatgctgattaacaagtagtttttatttgctgacaagaaacagaacaagttgtgcattacaacataaaactatacccgccatccgctccatgacattgacacgagcgtctaaaatcgataaacaaactcataattctatgaattattgtcgaattttcaaaacagcctagcttacaataaacaaacgtttcaaagatgaacagagtcaaaggtcaacgcctaatggcgtgttaaatcccgttctaacaatttagacaatgatcaacagaaataactcagatgttgtctcttcttcttcctctgatctcactcttattccaaatccaatgcttcaccgttaagtcgcaaccgtttccgttaaaccaaatatgctcaaacgtcacaggcaacttcaccgttaacaccccttacg

SEQ ID NO: 26187 - DNA, 796 bp, Arabidopsis thaliana landsberg
taaaaaaattgtgttcgtataaaccgtagcaaacatttcaccgaaaaaaaagagagtaaatttgatcaattttctcgggtattcttgctaagacagtacgtagtttgatgtctgatcttgttcatcagaatttgagttggtaaagcattctaaaaaattattcactagctatggatttttattttgtttttgttaactagttatggttgtacttttcaatcacttttattgatgttacatatctcaaatatatatttttcaaaattggcccttttgccaatgtttcaacataatcgatttatatatttgttgccatcgatctttattgattgttcttattgttcaggctggtcacgccaccaggctcaccgagtagaaacgtaacgaaccacctcaacgcacccgatgataacctgatgactcttatatctcgggtacggactcagtatatctcgtggtctaatctcgtcaatctcttggtttttaagtgtctgcatatacgtcacactcttgctcatctctgatgttattttttttttatgtgcagttagagaactatagcaaagaagagtcccagcaccaaacgacgtcgttacacagttcctcctctgtttctggaatcagaagaccatcgtcctctagtagctcaagatcaacgagtagacctcccacgccaaccagaaagtctaaaactccagccaaaaggccatcaacgccgaccttacgtgccacctcaacaactacacgtgcggcattaacctcgtcctctactactagctcaacaagatcatggaga

SEQ ID NO: 26188 - DNA, 2547 bp, Arabidopsis thaliana landsberg
tgtgtatgtgtagggttattatgtgtctgtgtggtgataatattaatgatgtaatagatgtatgattagggtttttattatgtgtgagttagatgtgtatgtatatggtgagaggatggatgctttagatgtatgtgtagggttatattttgtttgtgtgtgttaggtagatggatgtataggatgcaaacatagcgtcaagcgacaaatgctaaaaatagctaaccaaccccagtgcaaatgcaaaacgtaaaagctatatagctaaaatgcatcataccacaaccataattatgaaacctaaatcgaaacacttaggcaaaactctagtcgaagcatgcaaaacacacactctagtcgaagaatttaggcaaaactcacacgccagttttagggtttagtcgaaatgtcgaatcacttagacaaaactcataaattagtcaaggcacttatgcatcaaattcaaattgtcgaaggcgcaacacttatgcaaactcacaaaaatggactcacatgttagtcgaagcacttatgcaacactttattctaaactagagccgtccctatgatttacaaggctataagaaaagaacaaaagtaggtcactttatacatgtttgtaaaaaagaattactttacacgtattcataataatagaaataaggtagagtgacaattctttctaatgttcatttgaaataaggttcaagttatttctaatggaaatttaaactaaaaaaataaaaataaaataaggtagagtgaacctaacattttggaagatttgaatttgagatgtatgagaactaactcatctccgacccgaccacttaaccacaaaacaatttcaaaattatgaagcagcaaaacataattatatgataatcggccgcaagcatgggcttgacccgcttgtgctcacggccggctctggtctaaacactcacgtcacgtttgaacaaacacatagttgagactcttatgcaaactcacatgttagaaacacttatacaagacactttatgcaaactcacaaaccctacggtttagagtttagggtttagggatttagggtatagggtatagggtatatggtatagggatttagggtatggtataggtatatggtttaggatttagggtttttggatccgtgagactggtcaagctttcgatcgccttggttgtcgtcttcaagttaaaaaaatttaacatcgtgttatatttcttaaatttgttactattttcctttctctttttccttggccaagagacttaacctaaattttttgttaatgtcattacttaccatccatatgtaaattaactatcatttcttatatctctctcgtcatttaattcaggacgtgtgaaacagaaactacacgtgatatatatgaaactagatgtgatatggaactcacatgatgtgcaagtggacaaggatttttcaaactacttccatgatatgtgaaaaatatttactaataattacagatctgtgattaaaaatattctagactataggtatactaataattccagatctatgaaaaatatttaccactcgcaatgagagcgcgtgctaataactcgctcaatttatctcaatttccgtggtctatatagtccgccaaatcatctaattttccaaatatgcaaaagataagcgcgtgaggagaattccactgttacaaacaatttacatcctttgtctatatcgaggaggttatctcgtaagagttatttagattatcttaaaacatgcaactcaatattttggactaatttattttactcaactaaaaaacgatagtgttatagataataataataataataatataatatttataaacggatgtgattaaaagagaacaaaacaaagcatccgattaaaaaatagccgactcaggagaaaaggaacaaaacacaactcgtgaattgaatgtcatatcaagggaaataaagaaaagagagtgagaatagtggtggtgtcaatgatgctcttcctagaattttcaccaaaaaataaaattatttttatccactcactaatttttttagtgaactaaaaaaggagtatatgtaagaaattgatatcattttaacaaaataaaaagaggaataaaagaaaaaataatccaaatatggataaggtctgaactgatcctctagtataactggcccatgaaaatcacgctgaaaatgagcccaattgttgatcatcaatgttcatgaacttcatgcctttatggaaaaatgggttgactattgagttttgactactaatactagtagttttgtgaatttatcacatatataatgcaagtttcttagagttgaatgaaaaaaaatcatgccttgcatatttgattgtactcctttcttcaaaattttgttcatgtttttgggtgcttgtatttgcatatttagagtagactatagaaaactaattttttttttttttctcatcttctcttatcagacttgtattccagaaggcttcacctcttacgcaagtggagtttttacatatcaaagtaa

SEQ ID NO: 26189 - DNA, 1039 bp, Arabidopsis thaliana landsberg
atatttgagctttctcgtgattgatgtaaaatagtgtgttgcaacggaagtatgtgtaatggtcggaccttagtcattgtatatgcagaaagagctggttatgtaaaagtaaaaatcagtttgaagttattcaagtgccattttcattttatcctaaacaaaaatgaagagtcaaggcatgtatgtagtaatgtcttgttgtcatgaacaccagagaaaaaagctcatgggctgacctggcccatccttgttagggacgtgccggtttttatatgcatttgtatattaagggcagatttggtctatttagtactacaatgaatctgctagtcctggtacaagactggtttaatgtcaaaaccagtccattttcatttttatttggtacaagagtatgttatacgagtgcgcggactaaagaacacatgaccaaatgagcgagtccaggtctttttcatctctaaaagtaaacaacttttaggggaaataactaatatagataaacacaagactataatgagtcaccgaaattaggaggtgaaagtcaagtgttggggccctcgtaggaggcgccgctaagtccctcgctcccactaacaagacaccgtgctattgatttgctcatttgttatcattctcatgatgttgattatcatgatgttgattctcttctcatctttttctataaaaagtttcttttgttttgtttatattaactatgtatacgtagcttcttttcaaagtctcgtctaagtttgcggacttttagttgtagacttctaaacttcttcttctctctaacttaaattgacatccagctacactacactacactacactccctttgattgaccctttgtattacggcttgatttttattctagttttcgtttgaaattctttttgaattagaagaattcaattttgctatgaagtagattcaatgtaacgaacgtagcgtcgttgttcaacaccatcaatgtatatgtcaaataagagtaacggcgttgaaatgcaataaacaacatgttgactacat

SEQ ID NO: 26190 - DNA, 1303 bp, Arabidopsis thaliana landsberg
  unsure (1)..(1303): unsure at all n locations
ttggctgccttggccgagtaactgctacaacacaaaatggaacatataagaatcaatctatttgctacaaagtacaaacaaactagtgcatgagatacttccaagtgcagaattagcacttgagaatgtgtgtacctcgattttgtttttgaattgttatagcctgctcttgggttgtaggttgctcggcctgtgtacgattggcatccacattctctnnnnnnnnnnnnnnnnnnnnnnnnnnnnnnnnnnnatcaaccttctcggtttccaccacctttaagctttcatcaatggacagaactccatcacattccttgctgccttcccccgtgattacctcttcatcaagcaagctactgtttttgttcgcagcgtttgacttgtgttgaagcgacttgttgtcttccgccaaaaggtccaaaaccatcgttattagaaattcactatcttcctctttatctatcaatatctctgctacttcctcaggttcctcctcactgatgtcttcatccccacgcaagaccccacttgtgtttaaaatgcttgaaccatcatactccacagttgacttgccgccttccccatcctcactcatcatccaacatttttcaatcttcttctgttcctcgttagatttatcttcattttttacaataatcagatcagccgcctctaccttggtttttgctgctgctgcctctttcctacccgtcctcttacttcgatatatgcttccaaaacttggaaggcatctgtttctcctttcttcctttgtaattttctccatcaacgatattatgtctttttcttaggttctattggcaaagaatctgtaaaaagggaaagtcaaagaacagagataagatatgacttggttgggctgtttatgcttcagcttcattctatgtatgttatatttatagaggttcattagtatgtgtgtttatgcatccagttgagatagagggagatcataatgacttatgccataaaaccgcgtaaacggcaacgacttcatcactcctttgtatcatttctatggtcttctttatgtggccaccatgtgattaactatggcagtttgtttaaaaaacagttctgtatagatctcggaatctctttcgtaatataccttccttccttctaatttccaggaaacatcaactttattacttattatcagaacaaaaatatatgttctggaaacgatattatattctaataatattggaacaactttccgatcattagtatatgaagaaaatttaatcttctttttttttttttgtcggcagagaat

SEQ ID NO: 26191 - DNA, 1666 bp, Arabidopsis thaliana landsberg
aaaatgaagtcgacaagaaaaagaaggaactagatatacatgctccaaaagtcacctttcactttatctgcacgcccactggctagcaggaggcctcattaatgacgagctccttggagtcggtcagaccgcttgacattagcaccggaacctaaggtcaagcaagtgagaactagtgacctgctaaacccgacggcccccaaataagaaagacagagtaaagtagacaccaattagcaaagaagaaagacagagcacatcagatcacaaagggggcaacacgctagaacaacaaagtatataccaaagacggccagaagcaaagatggaccacatttgaaggccaaagaaaaatgtaatcgatgatgcacaaatataaagagccaaaatgtaatcgaaccacaggcaaggccacgatgctattatagcaaaaaaatcacctttccatatgggcctgatatggaacttcatataaattacaaccttgttgttggtgggaggatttaatttcagaacggattctacttcctgaaaaggcacagatcattttaagaatctaaaacatatcttgtagtcttcttcaacattatgcttttatttctacctcagttatccaatctcacaaccataatcaaactggtaaactacttaagagattataaattcacctgtcttattaaaatctgtggctaaatgattcggttgcggaaagattcctttatacttatcacaaacatctgcaacgacttcctcatcctctgatctcgtagatgcctccgtcttgtcatcataaacatcctctctaagtaacagtgttgatacaaaagctgaaacacacaaaacatcatcaacaaattcacctttatcctaacaaattcacacaatgctgactaaaaggagctaagatttagagacatcaagtacaaaattgaaaatgtaggattcaaaatataattgtgaattgtaatcagagcagaaccatgagtcaacgaaaatgaaaacttgaggccgagagagtgtgattaaaactcacgagaaggagcgtacgacggagcagagtgaaaccagaactcagcggcttgagactcctccggtaactcttcccgagtaaaatcgtaccacctcgccgcatcaaattcgtactccagatcgatctctttaacctcaaacaccattggctcgatttccatatcttcatccatctccattttcgctcgctctctctaaaacctctacaatctctttctctcttctctttcttggggaaatgcaactaaccgaagaaaatcactgatcggttttgcaaaatacctgaagttttaccaaatgaaattgaggagacaaaaccctaattttctcagaagaatctctgattcattgggtctgatgaagaggaagcagaagcagaaacagaagcacaaggcaggaaaggaaaaaaacggcacaaatttcgctgtttcagagatttttttgtttatgcgacaaaatggaatatatattattatttaatatcatccgctctcaaaacgacaccgtattcaaaacgtactcgaagcacaaaagcatgggacgctccggtttttgtaacgactcgaaaaattgaattctaattagactttgaaaaagacgatattaaccttagctgtgagagagcgtgaggataatt

SEQ ID NO: 26192 - DNA, 2090 bp, Arabidopsis thaliana landsberg
ggaaaggttctaatttcaacgagcttgcaattattactcttggaagatatcttctagatgatgtttgttgaaacattgctgaataatcatgttgctgtcttctagtattattttggtggccggtataatatagtgaagtttatcaagattgttcaacaagctggaatgcatatgattctacgaattggtccttttgttgccgccgagtggaattacgggtaatgagctttctatacaatccttcctttctcaaatattgttgccccctttgtagtttttctaattgaatcttgtggttataggggagtcccggtttggctgcattacgtgccaggaacagtcttcagagcggataatgagccatggaaggttagacaggaaaatattgcggaatttgtttttttttctctgttactgaaaattcatttgctgtgtgaattttcttgtttcagcattacatggagagtttcacgacgtatatagtaaacctgttgaaacaagagaagctttttgcaccacagggcggtccaataatcttgtctcaggcaagacaagacaaacgacaacatataatatttcagcatcgttttgtttcctttagaatgtttttttcttgatattgtgattcattaggtggaaaacgagtacgggtattacgaaaaggattacggagaaggagggaaaaggtatgctcaatggtctgcttctatggctgtttcacagaatattggtgttccatggatgatgtgccagcaatgggatgctcctcccactgcggtaagtctatatcgaatccgaaacacaagatctatacacaccttcatctttttgattcattgcatgctttcttgtatcgagatgttagcagatgctttctgatataaacaagtgaaaatctttcaactagttccagtttatgatggatttctcttatttccttttgcagattagtacctgcaatggcttttactgtgaccaattcacacctaatacaccagataaacccaagatttggactgagaactggcctggatggtaagtagattggttccgctaacatttcctgttacaagtttcatacaaagttggagtcttttggagcttcttgttcattagcaagtgaatctgactttcgcggactaaaaagagtttttcttttcttccaggtttaaaacttttggaggcagagaccctcacagaccagcagaggatgtagcctactctgttgctcggtttttcgggaaaggtggaagtgttcacaactactacatggtaatatttggtagtttcttcaagacgaggaagttagttagctctgtatcagtttgtaatctaaatggattttggttgtatgttttgtctgaaatttggtgtagtatcatggaggaactaactttggaagaacagccggaggtccatttgtcaccaccagctatgattatgatgctccgatcgacgaatatggtaaggacaagcagcgaacaaaactttctacacattcattgaaatataagatgatgcaatgcttaatgcactaagagagtcggctgttaaatgttaaacaggtttaatcagacaccctaaatatggccacctaaaggaactccacagagctatcaagatgtgtgagaaggctctggtttcagctgatcccgttgttacatcaataggaaacaagcaacaagtatggatttattatgagagatttgttttggtttacttgtagaaactttctgtagcttttactaaattatatcctcttttctactttattttcccaggctcatgtatactctgcagaatcaggagattgttcggctttcctagctaactatgatacagaatcggcagcaagagttttgtttaacaacgttcattataacttacctccttggtcaatcagtattcttccagactgtagaaatgcagtcttcaatactgcaaaggtaagtgtatatggttgaaactcagaattatggttcctcaaattctctgtgttttttctgattcttgtggatttctcttgtttaatttaaggctggagttcaaacatcccagatggaaatgttgcctacagaggcaaaggcttt

SEQ ID NO: 26193 - DNA, 892 bp, Arabidopsis thaliana landsberg
cggtcggagcgtcgatgaacattcaggtcgtttagtaaaattcgatgaatctcccgcggaaataattagattcgatttcgatttccgtggggaagttttgtgccatttgatttgttttcgttcgtccccgttggagattttttgtaatttctggggacagaaacaatgtctaaggtagtgtacgaaggatggatggttaggtatggtaggaggaagatcggacgatcgtatattcatatgaggtatttcgtgttggagcctcgtcttttggcttattacaagaagaagcctcaagataatcaggtaataaaaatcccatgaatctagtctatgcttctgtgttgagacttgagatcagtctaaatgggtgttgttttgtcttaaactggtgttttaggatttaatatggttgtgaactagagaaatagaaagaaaaaaagtatgagcttgataatggatgataaggttacttgcttaatagatgcttctttacatgttcaatgtagcttcctatcaagacgatggttattgatggaaactgtagagttgaggatcgtggcttgaagacacatcatggacatgtgagtcttattatctccttgactgtaatgtgaaacctttttttttttttggtttaattgtaatttcagttatgcatttgcaatgtacttatcttcttgactttttttttgcagatggtttatgtgttgtctatttataacaagaaagaaaagcaccacagaatcacggtatcttgtgttttctttctgagaatagatagtagtagttttatcttgttactatacattttaatgcttcttgttagtttatttggagtatgttattactaaatggcagctttcaacatccaggaagctttaatgtggaagga

SEQ ID NO: 26194 - DNA, 1337 bp, Arabidopsis thaliana landsberg
  unsure (1)..(1337): unsure at all n locations
gcttattagctgttgattgctacactggccatcctgtccgcgtgaattcttactcaaaacccaaatacaacattgacattttaaatgctctatctggaatgcctgagatggaccttttgttgcagtctccactaggggctctcttctctctgactgtccgtcagtgttctttgtttggccagctggttcaccagttattgtgtaggcaactgtatactgatgaaccaaatgcaacatggtttgtctttggtggccaaccactccgtttctcacttatggagtttgaggaggttacaggtttgtgnnnnnnnnnnnnnnnnnnnccgtctgaaatgaagtctgtcctctcttaccctgatggtgaatcaccatattggtacaaacttattggaggcaaacttggttttgttactgttaagtcactgctgctacgactaaaatctgagcctcagatgccgcgttggcgtaaattccaaattgcccttgttgttcttgtagaaggtgtgcttctttctgagtctcatacagttcgcccgtcagttaaagtggtagagatggttaaaaatgtccccttcttcctaaatatccttggggacgtcactccttttttcgaactctgcgttacacaaaagttgggtctcacattcgttctaagcggttcctacttaagaaacttggccaatcctccctagctattcatggattcccgcttgctctccaattgtttgcgtttccctctattcccctccttcaacgccatttgccacatgctgatgatctttctacattccttgatcaacgattgcagcgtcttaccaaactcaagtcctttcactctaaaaatatattagcagttgaatatgatccacttgtaagttctctacatctttactaaattttcttctttcatgctcttttctgatacgtcttttctttttctagcttactgtctcttacccctctgctggaccttcctccttgcttcctactgtttttgctgaccccagaatatctcggctagaggcacttttttccactaggacaaggtttaccatgtcatcttgggcaggtggtgatgcattctttcccccattgccaaaacccaagaagagggttagagacagaactgatactgatcctagttgctcaaagaaaaaaaaaaaaaccccaaagaagcctgttgttgaaaggcggctgaggtttggcaaatcttctttgcttgctgaagtgtgctctgctatccgcagttgactactacccattttatctttttctactgacataatgaatccaaccttataattaacctctttcttgatgctatccaccctctctga

SEQ ID NO: 26195 - DNA, 759 bp, Arabidopsis thaliana landsberg
cgttgttaatgtgttaatcatttctttcaattagaatggaactattgaaatttgaaaactctaaattactagacaaccacctacttgattcacatcaacaagtataaattcacacatactaatgaagtaacacattgaaatatattctcttttgtggtttgaaatactattctcacaaaaaaaaaatattctactcacgaatgtatagtcttatagtgttagatgttcataggcctgaaggagaaagagtcattatgggcctaatgtttctatattctaaatagttctttatggcccaaatataattttgaaacttcagttgttcagcccatttgtatgttttctatccaaagcctaatcgtgtgtattcgagcgtttaataaagaacaattttttttttttcttatttttctaataccaggaagttctggaccaatgtcggtaatcctttcatgcacgaaaccacatcgtgtaatattagtttcgttccaagcgttactcaaatcggcgttctctaagcttcgtttacggtctttaccaattgagctaacgacacttggtaataaagaacaattcaccaactaagactctgatttgttataatctgtaaagttatttattaaaggaatcagaatttaaattacattaattaagtcttgatacatcatgaaattttaatcattgatcaaccacacatacacattctcacaggaaaaaaaaaatgcattgaaaaaaccagaaaaacaaaaaaaaacagag

SEQ ID NO: 26196 - DNA, 977 bp, Arabidopsis thaliana landsberg
accaaatcttgaggcagggtaagagtgaactgtgattctgttgattctccaaacatgctatatcccataacagcaacacccgcatacataagagtacaaattccaaaactgtgaaaaaaaaataaaaattgatactgtcagtaaaagatagaaatgtagagagttcctaagatgtgtaatgtctttatatttaagcttacgatgccaagagaacagcagaaaattgagatggtttggccattgaagtgtaaatattagggaaaacaccatgtcctgagtaacaataaccatagagtcctacagaaaccggtaatgttgcgaggtttagtggagttcctttgctgtgaataccaacatcatcaaccaaaccaacccaaaacaagcacaaaaccaccaacactgatgcaatcacccctccagctgcaagatcaaggttaagatattcacatatatgaaaaaagactctttaaaaggtccttttagattgaatgttttatacctgaaatgtaacttagtacgctgagatctcgaagccaaacggttgggagaacagcgagggtggtaagcagagcaaatagacgaggcgcatctaagtgaaaccctccaatacttagactagcatttggaaacattgatgaaagattatcaccttccaatattatgtattcaacactcatagcctgcatgcaaaatgaacttgtgtcaaactttgtgtaactttaccataacttgtatcaaactttgtgtaactttaccatatcataggaacattcagaatttctctctagacaaatatttcaatgtgtagttgatgaatttcaacattttcttatactaaaaaccaaatatttcatttatgaaacaagagagagggaacaatatggaccgtgggcaaaggtgttgtctactccacatgtggtccattgttttgacttgagattcattttaggtacttattttgaaactttcaaaaatgg

SEQ ID NO: 26197 - DNA, 1313 bp, Arabidopsis thaliana landsberg
cagtaaagtaaaatgggcctattaaactaaatgggcctgggtttaattatccatcactctgtattattttttacactaaaaggattataaatttgtaaataaatacttgcattatatttttttattttaattaatttaattaataattcaacatttgtagtttcaattggcttacattatttatttacacatttttcattgaaacgattataaatatattaataagttattgtattttattatttacagttttatggcaattaacaatttagcatttgtagtttaaattggtttggaataaaattgatttagaaatctaaacaaataaatcacatgttattagcttgttcatttggatttttttggataaaatcttgtatcctttggttggaaacaaagagtattaaaatatggtaaaagaaggtagtaaaatactaattatgttcatgcttgaagttgaaccccaaaaaaaaaaaactaataacaagtttttatgatttaaatagtgagtgaagaaaaaactcatgaaggggttgacaaaatagtcactaaatatcctcatgatttgttcactttggaaaattcagcaaaaaatttaataaccttgattgaatgtaaaccagtaatttctgatgagattaaatttacataatttgcatcgcatccaaaagatacaatcatatcaactatgctattcatgaagctcaaaattttttgttgtgggatatttagtttcacacattgtgatctataaaagagaggaagagatagatcaagcaatggatctaaaaatttctatgacgtctaaatattaatcaatctaaaatttgtaccaaaaaatgtataaaacacacactttagtcataccttgtattcaattaacgtcagaaaaaagcaaagctttattcaaattgtgacaaaatgacaatacaactatgacaacactaagtacaaaacccatatcatagtcctaaaacacccacctaattaaatctgctaacacataatttcaaagcaaatttataacataaagtttttcttcttttttaggcattaatataataaagttgaatctggtaccaaaaagttacgaaaaagaaacgcattaatctcttttttaaaaagcatctgattaagtgcctgcgtcttcttcttcttttatccctccaattcaaaattcaggtacgtcgacgacaccaccaccaccaccgacagaatattccgatttaaccctcaccgaatattccctcttcctccatggaaaacgacgtcaaagagaatctcgaagaagaggaagaccgtcttcttcctcc

SEQ ID NO: 26198 - DNA, 2601 bp, Arabidopsis thaliana landsberg
cgattcttttcttttaaagtataaatttgatatgtttgagcaaatccaaaatgatattaccaaataggaacatattcaatatgattatgaagaaggggagtaggatacacacggtctaaaatagcttcattttgtttacaaagttcatgagttaaatacattttcgtctaaaggaagaacaacaacagtgactcaatgagttaactttaaactagatcacagaaatatagtagcttttgtaacatgcataagttgagttggaaatctccatagcagtctaaaatcgaaaataatcagtaatttcagagtaatcttgttgatgcgaatgaaccaaataggtttctacgtcattgttgaatatcaaaggtagtgtggtgaatggtataaagataatcagtaagtacttcattgtcgtatcagcgatgtaagtaactcaatcgtaacaaaggcaccattccggtatccgattagcatttccgaaatttagatgatagaatcaatcaacagagataatatctccgaagaaatttgttatttagagaatgacaagtgacttaacattacgtttccagataccaaaatacctaatcacgaactgttacatcaaatctaaagcagaaccagaacaaaatagagaacacacaaaaccaagtagaagcataacaagcgagagagagaacattcattggtaatcccaaacctaattaaaggaattaccatcctccaccaccaccgcttcctccgtaacctcctccttcaccaccaccgtatcctcctcctccctcacgtcttccaccaccgtagcttccgccaccaccacctcttgaggagtaaccgccgccgccgccgccgctgtatcctcctccaccctcgcgtctaccgccgccacctccgtagctaccacctccaccggagtaacctccaccaccgccgctgcggtatccaccgccaccacctccacggtggcctccgccgccaccgcttcctcgtgactgagcctcgttaacagtgatgctacggccatcgagatcttgtccgttcattccctcaatcgcatccttcatggctttctcatccttgaaggtgacgaatccgaatccccttgatcttccagtctcacgatcgttaatgatctgttaccaaataatacaaaaaccagatcagcaaaacaatccaacaaaactgaacaaaagcatttagatctacaacaaatatacaaaatacaaaaaaatccgatcgatctccgggctcacagaagcaggaagatgaacgtaccgatttgggaaaatacaagtaacagtagtagtagtagtagtaacaaagaacgagaatagtaacagagtaatcgaatcaagtaacagagaaacacaagatcggaacagatccgtcgaggatgagatcatcgatatcactcggagtccgatctcggcgtgtaacagaccttggaatcaataacgtcgccgtattgagcgaaggcagtctcaagagctctgtcatcagtggcccatgctagacctccaacgaagcaccgatactcaacatcaccggacgccattgaaatttgaaaagaagatctaagggattacagtgagagtagtgagcagtgagatgtgaagaacgatgaagacgaagtctcgttatttataagggggctgagatattaaccaaggtttagatattttctaggtttagagtcggtttacgtgaattctggtttaaccatggttaaatctgtagttaaaattcgtagtggttggggacatatcacgtgacactttttggtttaatgcgcaaatggaaagacgacgatgcgagaaaagatattttatcttgggacaaagaaaaatatctcagtggagcaaaaaaatatctcatatgtcaaatgacatctttatcccttagtttgaaatttaaaataacgtggtgatatacaactgatactgggccggatcaattcggctagtccctattttagtcgggctagtaatctagtataattgggcctgaaccattgaggcagaaaaaatattaaattgagtaaaagagaatgttgacagtgggatttgaacccacgccctttcggaccagaaccttaatctggcgccttagaccaactcggccatatcaactttttgtataaaatattaaatctaaatatgtagactacagtttcaaatattcattatatagtagaaatttctcagatgaaaacaaaaaccagacttagaataataatatgcaagaagcagccaaaaataattatagactttagctataatattaaaacataaattaggatttatactgacaatgtcactctaaaaattatttttacattggcggaaaaatgtaattttctgatttggcaaaaaaaaaatattatttgattttgacatgtttttacagttttgaccgaaaattaaaaattatattatttgagtttcatagactgtttagttggttagaggagagaaaagtattatgaacaagatgagagatcactatgactctcctgtcattagtagcaagcctttgataatgtttggagattttaatgagactttagaacttgtggagcattctagagctgagacaaccctt

SEQ ID NO: 26199 - DNA, 1558 bp, Arabidopsis thaliana landsberg
tagtctaatcttataatattatcttcctttggtattataagtttgtgtggctttctttctccctcaaagatttcattcattagactggtatcatttgatgatgctactacatgaattctttcttggatactaaacggaccactctagaaggtatcttacaaatttggataaactagaccaaaccaaatattggaaacgagtaatgatgagatgtagactctttgaattttgtttttgggattatcttgtccagttgcatttggaaatataatcggttgatgctgaaagatctatcattcataaaaaaatctaaaggaatggggactaatgcaatgtaaaacaatatcttatcaacaacgtataatggatctacacaactatgatcaaactgatgcataccacccagagagacactctgtctcaaagtttgtggagcctcttctttcacaaacaaacaagacaaaaatcttgtcttttccctttctgtgatagaaaaataaattaacaattcctaaaaattagtctaatcaatttcaagacctcaagttgcaaaagccaactagctggatagttttgtttcttactctaattttcttaagtcgctcacatgctattttatctctcggtatatgtaattagtaataacttgttctatataaaccatgtcctatatctctccttcacattcatcccaaaacattacaaaacgttacaatggcttctaaggctcttgcagttacagctcttcttattacacttaatcttcttttcttcacctttgtaacctccacaaaatgtccaccaactactcctaaacccccaaaaaccccgaaatcgcctaagaaggctcctgccgtgaaacccacttgtcctaccgacacacttaagcttggtgtttgcgcagacttattgggcctagttaacgttgttgttggttctccaccaaagactccttgttgtacacttcttcaaggtcttgctaatcttgaagctgcggtttgtctctgcaccgctcttaaagccaatgtcttggggattaatctcaatgttcctattgatctaaccttgctgttgaactattgtggcaagaaagttcctcatggtttccaatgttcttgaagatttgagactttaaaagagaaaaatctctttggtttgctatgtttttatatgtttggttctactgttatctattgtttttgtgagaaaaagctttgttctgtcactgttgagtttgatgtaatgcttgagcttgttcatgatagaacctttgttctctcaatattgagtttgatgtaatgcttgagcttgttaatggattttatgtttttagtatttctcctcatgtccataaatgacattctataatgccgctgctctatttgtgctcatgcttcaacgcctctatttggttcagagggtctatacgtggtctcttattggttaattagtatccaacccaacataggcccatatggacctataagaacagaacagcatggaccacattagaaagcgaaagggtaaagccgtcattgttgcagtacaacacgtagaa

SEQ ID NO: 26200 - DNA, 1732 bp, Arabidopsis thaliana landsberg
aacacaaagacaagctttgtacaaaactcaatgagtatataacttatattgattcgtgaatttagaagaacaaagggagtgagctgctattgagctcttacaaacgttctagacgattgagtaaagaaagagagaggctcctttgtcctaatgagagagtagagagcatatacaatgatactggcttattcccaacaagagagcgacacatatagtaaatggctcataaaacgctccgtctgactcattaccaattgctcgaaggtaacacaagtgaaatgcttgcaatgcagaatcatatcttccgcgtaaacatttgatcccaaggaaagagtagagagcatatacattaatactgagagcttcttaggcaaggagcttacattgcttgtccccagtgatagagaacgcttataaacagctcgcaaacgcaccgactgatcttatatgactctgagttaggctcccctaaaccgggctgatgagcttcctccctgtagcgggatcttcatatatggcaacaacatcctttaacttatcaaagagctgctccaagtgattcacgcccatatttgtgtaggccaatggctttttgtaccttagcttgtatatcgcctcgaaacaatccatctgcacatgacaacaatagctcaccaaaatgtcttgtaactcgaatttgaactcttctaggttcctctcgctctgaaccgagcccatgtctgacatttcatcagaggagactcctccattggtagttaccccgttaggctcttttcctttcctctctcttctcagtagaaccacaggggaagaaggagagatgatgttcggtttcgagctgcgcaggtaaacaaatctcttgttgcctttaccatcaactacaatcacatcactcatctttttgaacagatccacaagcttggccaccccataatccgatacaaaaagcggtttactgaaattcctttggtattcagaaggaacacgcataagaggaatacatccacctgaaagctctagcagcttcacgagctgccccttcaaaccgtttaaatctcccggcgctacccacatggtggactcaaggtgacctgaaggaggacatgccaaagactcgcctgaattagatggccaacacgacattacaccgctactatactcattacgaaactgcgaaaccatcaaggaagaagactctcttggatcactactataacagttacctctatagagaatagtttcatcttcattcaacccatccatgttactgttatcaccaatattacatcccataagatacggaacaacacgaggtttacatcgcggcacatatctcttaccgtgaacaatactatgccaatcccaaacaaacttaccagcattagacaaagctgaattcacatacacactacaaggtataacaagaatcacagtatacccacgctgacccaatatatgaagcgcatgcgcgaaatcaacatcacccgatacgagaacgatagtctcaggcgtcttattatcaagcacaaacaagaacatatcaatcaaaatcgctttatccgacgcatctttcctaccatttggtacatcaataagcttcacaccgcttctttgacaaccttctcgaacccgacgagggaaaccattgaaatccccgtaagccgagaagttaacaacgggaccggatatcacatgatgtaactgaatagccattcttatgttactagctaca

SEQ ID NO: 26201 - DNA, 587 bp, Arabidopsis thaliana landsberg
aacaatttgttttatgttcgacttcatctagtagtatatactactattgcttaggggtgagcatgagcaatgtctggtttatgttcggtaataatttaaaaaatatctattttaaataaccctgatttttttattttttttaatgaatgcaaaattttattcatcaaaaaaccatggttacatcaagtgcttcttgtttgagttgttaggctcatactttgtcctatctatgccaattaaaacctagtggaaagccaaaatacaaacaaatcatcatattttgggtttccttgtttctaaagaagggtgattcggttgcgaacgtttttgtcgatgttgtttccaatggccaatggtgtgatagggttctcctcaccatgtcggcgattattcctttctctctatatggtgtgtaccgttatttgaaatgtatatctcagcagtagaagatgtttcctcccaagagacgaacttgtgaggagcgtaacaatgcggtcccaagaagaagtgtaatgaccttgaagtaggcctttcatgagcttctcccacacttgtgttgaataagggcactgaaagaagaggtgatt

SEQ ID NO: 26202 - DNA, 1021 bp, Arabidopsis thaliana landsberg
ccaatgtgaaagaatccagtaaatggctgaaacttgtatgatgtggacaggcttcagagatagccactcgacgccagatagattttttctcatcagagcagagctactccgtgattctttgggacaaggcaacacaactggatcagactgattcactgatcctaaagctgaaaggaaacaaaacagctgtgaactaggacaaacattctggtcagatttatggattgctacactcccagaatcttcaccattaataaagccctgaaactccatagcagcagaaccagtgttgtaaccatattcagctaagttatgcaatgtattgactgatgaaagcaatagacatgagagaaggagaagacaatgaaacgcctttgatgaaccaaatgctcctcctctgttaacacataaacacaaacacataagagaggtttaacaaacaatgaaattaatttggggattcaccaactacttaaaaagctataaacattctaggaaacaaaaaaaatcacccaaaaatgaaaaagggttaaaacaaaatgaaaatttgaatagtacccaaaagagagaatgtcatttgaagaaatcagaagcaagaaatagttctataaacagaaaaaagacaaagaggaaggaactattcctattgatagcgaaaggcgaaacttgaattagaactgttctatgaaaacatcgaactaaaacccagaacaagtaagtgatagaagaagcagagtactacaaaagattcgaacttgatgtaaaaaaattaaaactttctcgaaaatcgaagaacccatcatcgggaaaagataaaataaagtgaggaagaaagaagaagaaggatttacccaaggtggaagaagaaggaaggaggcgtaatcgctagggtttttcgctccatgtctgaaaagaacatcgaatcatctgaaatttaggactttttttttttaaaagattatgcgaagatttacgaaacaaaaaaatcaaagaagcgaatttcttgtggacgagagagcaa

SEQ ID NO: 26203 - DNA, 945 bp, Arabidopsis thaliana landsberg
  unsure (1)..(945): unsure at all n locations
ttttgcacccgaagagcggcctccctaggccgtatgggccccggcgtctcacagttgagtgacagccctaggtgccaggaagaggtctgcggcggacttttgcaaagattcgcacgtatgcgaccgctggcgacatttgaacactggaagaaacaaaccgccacgtgttcgacgccgtctgccgcgccagagcacgcccgcgcgcgcgcccgcgccgagcccaagctaagccagtgccctggtccgcgtccgcggctataaaacgcccaggagccttggccgtacccctccgcacgcgctcaagcctcaccggagctcagttcaccgccgtctgcccgtacgcgacgtgcccgcggccacccgagcccctgccaccgtcgaccggtaaccaggcccttcccagcctgttctgaccctcggagaagactgagcacacctcggtgaagctccccgagcgaggaatcgaagcctgcttcgccggagaggnnnnnnnnnnnnnnnnnnnnnnnnnnnnnccgccggagtgcgtggaccgggtaatccactgaaccaatttctgattccttgtgcacacagtctctacgtcaccccgtggagctcaccgtgcccttgaattgaaccagatcgccgtgttttggccggcacacccgcctccgacgaggacacccgcctgcacacgtggaccgagcgattccggccatccccgccgtcgagccgtacatcgctgtgaccgccagagcctccccgagccaaccccgcccctcgccggacctatctcgacgccggtaagccgcgccacccttttctttcttgcgggcactgtttaaacctagggaaggaccgcgggggagaaggaaagaagtctggggggttttgtgaaatgtcagtgactcaaatgaatagtagtgcgggggtatactaagagagttagtttggaaataccca

SEQ ID NO: 26204 - DNA, 1082 bp, Arabidopsis thaliana landsberg
acgtaacgacttttcgtgttcaatgtgtttatgcaagaagaagttattttgtcaaattacttataggttaatttattcattaaaagacaaagagtaaagaaggaaaactatctaaatagatttctgttgacgaagattgttttcacattttcaactttattcaagacacacacaaaaatgtacatttgatttggttgattttacttatacaacacatacatgcttcaaaaactcttcatcagtcgataatttttccaaaacactagacgatgaacacgtttgaaactcgatgtttccttcttcgatcccaggataagcaatgagtttaccatcggtggtatttcctggtctagctcgaaccgctattggattaccccaaccgaaattgtttccatacacattgaaccgaggagagctagcaattgttatacactgactaaaagccttagcatacaatgtactaagtttcttcacccaattctcagcaaactctctaaactcttcattcgtttgtgatcccaacagttttgtttatttgcaatgcagcccaaccaagcccattgtgaagcatctccgccacagtagtcgtcaccgtcgcgaatccgaccacgttaccgaaacactctttctcaagcggagggtttagtcttcctctcatatccaccagtaacttgcaatgaatcacttcttccggattcagaccactgtttctgattatcgatcgccacatatacgctgaaaccgcttgaagcgacgatattttccgatcatcggagtcaacctcgccgttagctttcgctttaagctcagagatgtttctactcgtgactcgaaaaatcttctcttgtaataacgatgaagtaacaacaacccggttcggtgtctccgtctccggtaacggaattcgaatcggatactcaataccgtcgagaaaccatccacggagaagcaaaggaggaaactttctccgatgatcggcatcaaacccgctaaagcaaatctccgaccaagtattgaagaaactccaaaacgaagatccatctgcaacaatatgattataaccaaaccctataaaaacccca

SEQ ID NO: 26205 - DNA, 1545 bp, Arabidopsis thaliana landsberg
  unsure (1)..(1545): unsure at all n locations
aaagtagaagaaaggtttggtggatagagaatgtgagctctgttaaggaacaaagaaagaagaatggtgaatatataatgtaagggaagctaagggaggtgatgtattagaagacattgttacgacaattattagctatagtgaaagtagacggtgttgattcttttgattaaaaagcccacaggtacaaaatgatttaattattatgacccccacccacacgtaaaatttttttttctattaaaagcttataatattttttaatggtatgataatttttagaaaatgtttttccttgttaaattagagtttacaatttggaagtattatttatttgtatttattctctcatttcctttgagtttccgatgtatttgttatcctatctgtatgttcctttttatttttgatagtggacagcaaggacataaacaaaaggtagacgtatattataagatcggggatatttttaatcatgcaataaaacaaaatttggagatttgaatcacacaatatatcaatcatacttcatcggtttggtagaaagatgctgatgaaagcaatgaggtttaacatgtagagatagaaatggcatgggaacactttatgcatatgaggtctctcccatcttaagcttttatcgtaatcttctattattgttaatatgatttttcatctttttactctttcaccagggaaacaataattgacgaaaactcttttctataacgtaactcttttttttattgcttcttctatttttgtgttatttgtgggaactcactttagttttttttttttttttttctagtcgttcctatgctctaaagttttttttgtatatgtaaagcacacaaaaacgtctcagtcagattttcaaattttggaaagtaacccatcttaaaagtgaaaattactatgaaagttgacaaagaacgggaaaaaagttataagaaaaatcttgttgagcttataattttggttgacatggaatgtcttgttttagctttctagtatattttcttccctgtatagtaacaaaaatgtctcagtcagtcaaattttcaaatatatactatgnnngcacgaaatcttataatttttgttactacctttaaagtaactaattttactataaaattttcacacgtacagtttcgttgtgaaagtaaacacaagggaagataatataccttaatggatcatctccactaattgcattaaattcaatatctcatttcatcaccaatttcatcgttagagcatttcaaatcacttcaaataaacatcaattataaagacatagaaatgggtcatagcctcataggtaatcatatcaatgtaaaaaaaaaaaaaaaactgcaagatgactctttctagcaaaataattgtataacttttgaataatgcatgaaactcacaaatcgaatcatgacactccttcaagaaaataagatattgttctcataagacgcactcttcacttttgatgttgaatgatcaggagaaaataaatatctactaagcttatcttaagaacaagat

SEQ ID NO: 26206 - DNA, 1365 bp, Arabidopsis thaliana landsberg
  unsure (1)..(1365): unsure at all n locations
tacgatcgctccgcaatactcgatgtcccctccatcatcttggactgatggtcggtttctcgtctccaagagttccttaatcattgctacagtttcagagtcatcctgagaaacaatcattgattagtatttggctttttaaaagtctaagtctagcaaacattggcagcagcctacctcatgaatagcggtatccttggcagctgtagcttgtgagtcgagaaacaaaggctgaccagaagagtaaaagtccattaccactgcaaagatatcaggcttgagtatatcccatgttacatcatctgactttgttacagtaacaaaatctgacccatagaaaactcgaactacacctgcatcaacagagacaatcttagtcacaaaacacggattatatgaggaggaaacaattgtatgttgtagcaaaagacgaggaataccatcaatggcgaaaatggctttagctaaaggtgaactcatagcagagcgagaattatgtgaagtcagcacttctcaatctccataactggtttaccaggactaaacattagagaagaggggtttggtgttgattgtgtttggataaacattgtcctcctttgctctgctcattacaccaatttcaagccatcagatttcattttcaagaatcatgtgacaaaaagactactcttttaacattttactgatatacaaatgtgaagattagcgacctagaaattaccataccgatccaattgaagggaaatgaagaagatctcgaacagttacgagaagcattagttgttatcgactccgagaaattcaccggaaagtgtgtcgccgccgagataaacagagagcgacgtgatatcagaagagaagaagaagatggagaacaagttacggaagctgtatgtcgcgaaagagaattgagaagcctcgtaagccctttcatgatcttcgtcttcgttgcctaaaacggatggcgaaagagaagcttagtacgacgtggaaatggcgatcagagaaacttcctctgtatannnnnnnnnnnnnnnnnnnnnnnnnnnnnccgtcaattgccgttaccgttaccgtcaattactttaaccggatttaactgaaccaaaatttcttactacatcgataaattccatcaaaccaaagcatcatacaatttctaaatgagaacaattttggattcatcacgaagcctttagccaaacacaatttgttgattttcagaaaataaaatagctacaatattattattttggttggtacaaaagaaatgaatgaagtgaggtatacattttcaaagagcttgtgcctaagtctaaaccaatggatagttgaagagcaaaacttctttcaaaaccgatt

SEQ ID NO: 26207 - DNA, 1150 bp, Arabidopsis thaliana landsberg
gcattgccgctaagagacatattgactctagcacaacaattctagttttccaatttgtggtacttataaaaccagattctgggagtttttggtagtgtagtgtttattgtcctgcatcttattacttataattgcttaacttatgttttgcaggggtttcaagaattttctttaagcctgcgagggatctcataatccagctgcaaaagattgataacgataactaccctgaggtatgagctggttgctattgattttgttacaaattgtgtgttaattaaataagtttgataaaagataatgtgaggtaatatttcacctatatgcagacacttcatcgtatgttcatcatcaatggtggttctggttttaagctagtctgggccacagtgaaacagtttcttgatccaaaaacagtcacgaagattcatgtaaatttacccttttatgcatatccatccacatttcctcaagttatcctaaagattatctttaatcgtattaactattgtcgatgtgttgttgttataggtcattggtaacaagtaccaaaacaaactacttgagatcattgatgcaaggttgagacatttcaatcctcttgtttggttcacatgagtccaaaatatgatatagcttgtttggttcacatgagtccaaaatatgatatagcttcctaaccatttttggaactttttcagccagctgccagattttcttggtggcacttgcacctgtgcagatcgaggtggttgtatgagatctgataaaggcccctggaatgaccctgagatattaaaggtaaaaatcgatcttccgcagcctattttggttaaaaagattaacaccagacagaatagtgttacttaactgatcttccccaccttgtagatgcttcaaagtggtggaccgctctgcaggcataattcggctctaaacagtttttcccgtgtgtcttcatgcgataagccatctttttctggggtaaaggtcttctatacttaagatacgaaacttgttttcaaaatttgtgtcttaccgtaacaacaatgtcctcattggctcagataaaagctagtgacacctcgacagcagaatcagggtctgaagtggaagagatggcttctccaaaagtaaatagagagcttcc

SEQ ID NO: 26208 - DNA, 1470 bp, Arabidopsis thaliana landsberg
  unsure (1)..(1470): unsure at all n locations
gacactattatgttttatgatctgaaagcactgaatctagatgacattatgaatttataattgttttgtttcttaatctaggatatagtaagtttttaatcacttttctgtaaggtattttaaaagtcattttatggatttcgatatctgaattttggtactttcatttattagtaaacaatgatcgttggcatcgaccgagatcaatattagtcattgcaaattacgtttggtaccaacttttaaactactgaataacaaatactcaaaaatatattatcatagttcaattttttaattaaatacatattctgaaacaacgaaaagctatgcttcatcttctcttccaacgaccatgaaaaattgaaaagagttgggccatcgttatcccaataaaacaaagaaaataaaacctaatccttccttaactacaataatcgaaaatcatgttttaaataatagatacttctaaaaagcgaaccctaattttcttagtctcaccgaatcaaaacgcgtttctcactcnnnnnnnnnnnnnnnnnnnnnnnnnnnnnnnnnnngtcgtctcataaaaacatgacgacattaatagagtacatagcaaaccaatctaagtaaatcgagatcttggatatcataaaaagataattggtatgtaagacacataaaaattaatagaaatattttcttttgacaatgcaaaaactgtgttcacatacacaaatatcaatttcatggacttatgaacacaaacaaacaatacagaccttttcttctcccatgagttctctctactcaattctaaggttttacgaagatacaatatgtaagaattaagaaagcttcacagtttcnnnnnnnnnnnnnnnnnnnnnnnnnnnnnnttggcggtaactccttcgatatctcagcccaatccggcatcccctgaaaaaacaaagtttttattacttaccacaaaacctcctcaaaaaccaataagtagatatcaaacacgagaaagcaagagaggaaaaggtttctagatgaaacttactctacccgatctgcggactcgaccatctaaccgcagtatgatgtacacatcatcgcccgggttaactccttcagatatctgttgatctcttatccacctgaaacaaacaaaaccagagacatctttaagactcaacaacaaagttgccatctttcttctatcaaactttgatcagcaacaaatggcaatgaaagtttcgacctttcccattcaccaggcgaaacagtctcggccttgaacctgatttcacctttcagcttcgattgggctacaaccgattgagcccgtgtatcaaaatctttctatcaagttaagagaacatcactggtttgcaaaatgagaatattttgtttgttttggtcaaagacagaatcttttcgtaccccaaatgaagaagagatgtaactgcctttgaagaagctcaaacctttttt

SEQ ID NO: 26209 - DNA, 1275 bp, Arabidopsis thaliana landsberg
gcaacagacttctccaacgtatgcgttaattttctaattgactcttctaaccctccaatctgttgtttcatttgattctgctgatgatctacatactgtttaataaattggatgtcgtcggttttacttacgttggggacttgaagcgaagatagaagagatgcgacgtcgggtctctccatgtttgacaactttctggtggcgatccaccgtgtattgtgataagaatttctccctcgcttgacgcatgtagtcctcgtattgctgttgctcatcggccgtcagactttcaacagccggcttcaggatattgtccggggagatatcggtgtgatctttagaaccggccatttgagggcctgatttttagtagatctaaacaccttccccagcggagtcgccaaaagtatgttgacacctttttgggggcgccaaacactcaacaagaaccggcggcggtgctctctgcacaggcgcggacggtccgcgaccagggaccggacggtccgctgcctggtgcgaggcgcggtgatactctctgcgcaggggcggactgtccgcggcctgtggccggacggtccgcggcctagtgcgcggctatggcttctctgcctgacggccggacggtccgcgccctagggccggacggtccgcgccctagggccggacggtccgcgcgtgcgcaggggcggcggaagatcgccggcggcgcctggatctcgctcccgggagggaccccgtcggggaggagagatcctaggtggtgtctaggctcgggtagaccgacctatactcctccaatcagagtagagtcgaacagaggctaatcatttggggatcgagaggctaaacctaaactagactagaactactcctaattgtactggaaataaatgcgaatagaagttgtactgattcgattgatgattacaaatcggccgtatacctctctatttatagaggaggggggctggattctttacagactaatttccgagcttttcccgtgattttagctaacaaccgtaccaccaaacttcggacccctaatctgctctggcacgcgggaccgtccggcccctaggcgcggactgtccgaaccgcggatcgcgtcgcctcagggccggaccagtccgcaaggctcagtttggttccaaacatatgccccctgccttttggtggagctgagcgaaccaaaagcaactaactcgatgtgatcacatcagttttcttaggcatcttgacacttaataggatggctatcatctagagtct

SEQ ID NO: 26210 - DNA, 1119 bp, Arabidopsis thaliana landsberg
  unsure (1)..(1119): unsure at all n locations
atgtatttcatactatgaatcctgggtgggatgaagcatgcttgtatctgtgcaggtcttggtttgctttacaacgttagcagattcttttactttaaaggttatgctactggagatcccatgaagcgtcttactatcgggtttgttcttttatcctcttatcagtgttcattatctttattgattaatttagttatgttagtcaataggatatagattagacttatatataaggttgttgtaagtatagtttcattgattctaatgaatgaaaatattttcgttagctgattttttttggttatggtatcaaagcattgatctaagctcaaccattttccgttttgcgtatcaaatgtttctccctttctttgtctttgatctcgggaaatttctttgtttctgcatcacagcttttctcattccaattctttactcagttctgtatttactacgacttgattccgtctctaaatcgagtttgcgatagataatctttgtaatctatattgttgcagttaagttagtcagagtaatagtaagtgaacattttcttaaaactgagttcttctgttagggtatcagagcgtgaagctaagctcaacaatttcttcgtgtttccgcaaatttttctgtcttcgttcatttcaatatttctacattccggatttacttggacttgatttcaatatttctacattccggatttaagttcatctctgagtcgactttttggttgagaatcttataatctctatgttgcaggaaatacggtttcttgggattgctaggtctgatgatatgtaccatctcgtttggtgtcactctgatccttggttgagccactcgtttctggggttgatgattctctgggtttgctctaagaatatagaaccaatccttgtaagctgtccacaaaacttgtgtaatactttagagtttgtcacttttaaaagtttgtaataaatcatggcttcatagaacagttgaatttcacatccatatcagttaataaagatttgaattatgaggacacttttgantaatttataattccatcttgtctcttcatttgggntttgaatctttgggtntattatnccatctatgnatatctct

SEQ ID NO: 26211 - DNA, 882 bp, Arabidopsis thaliana landsberg
  unsure (1)..(882): unsure at all n locations
tccttatctcgtgattcttcgaccaacggcgtttcctttagcaaaaactcatcaagactgtcgttctctgtatcaacctgaacgagctctttgaacatcgtcatgacttgaatcatagttggtcttttgaatggccgatcgtccaaacattgagacgcaatcttcaagtaatgaagtagctcaacatcgccagatttgtctgttactaactctgggtcaagtatctcagctcctctcttctctctgtagagctgtttagcccannnnnnnnnnnnnnnnnnnnnnnnnnnnnnnnnnnnnnnnnnnnnnnnnnnnnnnnnnnnnnnnnnnnnnnntataactccgtagctatacacatctcctttggctgtacatcggaaactctggtaatactctggtgggacatacccgggagtacctgcgagcgtgctcacgctcaagtgtgtgtccagagcgctcaccagccttgccataccaaaatctgagacacgggcaacaaaatcttggtctagaagaacgttgcttgatttcatatccctgtggataatatgaggaatgcagctatggtgcagaaaagctagcccacgcgcagctcctattgcaatcttctttctcgctgaccaatcaagaaagattccacccttcttggtcttttcgtgcagaactgtctctaagcttccgtatttcatgtactcatagacaagaagtctctcttcaccaatcttgcaatatccaagaagaggtaccaaatttcgatgtttgattttaccaatcgtttccatctctgccatgaactctctatcaccttgtcccgtgacttgaatcaacttcttgatcgctacaacagatccatcagccagtttagccttgtagacatctcca

SEQ ID NO: 26212 - DNA, 1632 bp, Arabidopsis thaliana landsberg
tgaatacgatcacaagtgtctaaacatagataataagattatgacttgtaacatgacttaactagatacatgaaaggattaaaagtttctctgcaccagattggaattcgtcaatgagttcttgtttgattgccaacaggtcctttgtgcataccctccaaataatttttcagtttctcccaactttgcaacgtagattcccaatcctggaacatggaaaaggcaaacaattcaaagtctttacttcttaaaatctaaatgagctcaatgtaatccaaaaaggattttacctcaaggttttccctaaactcttcgttgtcaataggaaaaaaatactcagctggaacaaaaaaaaaaaaaaacccaattcttaacaacaacaacaacaacaacaggaacaacatcaaaaggctaaagaaaaaaaggagagaaaagaaatcaatgttcgtgacatacaggctttgtatcctccataacctgctgaacctgtgcctagccatttgcacaccatcaaacccttttccggcaatcctgctgctgcctcaaccaatgaagaggacatgtggagaaagctctatctttagattggccagacctcttagtgctataggatctcgttccgcggccaaactgtaaacatccatcaaaaataaatcaatcactggaaagaacaagaccaggaaacattcatatgattcatgtcttcggctcaccttcgcgcacacggatccgaggttccttcgtatcatcatcgtcatcatcgtcttgctcctccagccgaaaattagggcttttttgctccttccctcttttaataatatttcgatcgattgggaatttttattatttttgtactactgaacgaacccattcaataactttgctaggtgaccggcccaagcccatacggttgtactattgttcttttctttttctctgttttgtgcaaaatatttatatcattcttacgaaaattgatatgaggtacacatttttaattctttttcatatcattttacttttagtttttcaaattttaaaaaccaaatcgtttctctattttttattattattattttattgctctaatttttgtttggtgagtatcaaaataattgaatgttcttcgaattatttaataagctttattgaaataatgaactttcctaaagaataaaattaattttttaaacaattaataattaatctatgttgctatgaacgaattacagcttggacgcggatgaagatcatatatagctggtagatgttaagatttattattaaggaggagcaagaagagtgaaggcactgcgtcatttgcggtttttactgtgctattttctatgatatttatgtttgataaaaaaatttcgatatttttttatttatttcttgtcaataaaccttaaacatattaactgaaaattctacgaatttttaatgaatcatagtttatttgctttctacatcgttatattaataagattatatatatatatatataaatgaattcaaatcaaatattttcctttttcttttgtcattgtagattttattaaaaacatgttggtggtattacataaaattagaaatattttttatttggctaatttaattaatatttggtga

SEQ ID NO: 26213 - DNA, 1122 bp, Arabidopsis thaliana landsberg
  unsure (1)..(1122): unsure at all n locations
agcttcctccggggccaccaaagcttccgttcattggaaacttacaccaactccaagaactacctcccaggaatctcaaccacaagtacgggccagtgatacttctccgtttcggattcgtccccttggtcgtgatctcatctaaagaagcagcagaggaagttctcaagattcacgatcttgaatgttgtagccgaccagagacggccgggactagaaagatctcttacaactttaaagacatcggattcgcgccttacggtgaggaatggaaggccatgcgaaagctctcggtggtcgaactcttcaccgccaaaaaacatcagtattttaggtctatcagagaggaagagaatgacttgttggtcaagaaactaacagaattggctctgacacgatccccggtgaatttgaagaagacccttttcactttagtcgggagtattgtgtgtcggatcggattcgggtttaatcttcatgagtgtgagttcatcgatgaaaatagcatctccgaccttgttgacaagtctgagatacttgagatgacttctatgttctctgatttctttccaggaggaatcggtagattcatcgattggatctccggtcaaaacaagcgattcgataatgttttctcggacctcgacactttctttcaaaacattcttgattatcatnnnnnnnnnnnnnnnnnnnnagcagatagctctgatataatcgacgtggtgatcaacatgataaagaagcaagagaaagatggagactctttcaagctcacaacggatcatcttaaagggatgatctcggtaatgtttttggacctttattagttgtgtagactaatcttcccttttttaattaaatattcacacaatttttgttctgtcaggacatattttttgttggagttagcacaagtgcctccacactgatatgggcgataacagagttagttaggaaccgtaaagtgatgaagaaagtgcaagaagagattaggacaacactcggagacaagaaggagagaatcacagagcaagatctcaccaatctccattacttcaagcttgtggtcaaagagatattcagattacacccagcagttccatttttgctaccaagaga

SEQ ID NO: 26214 - DNA, 1294 bp, Arabidopsis thaliana landsberg
cgtaaacgacttgatctgcagtgatgggggtcgattcgtgtaagagtacgtaaagcgaaacgtatcctgaagtaccatcccacgtgagcccgttagggtgtaccttaagtaccctgtattatatatcatgtcttttaagacccatcaaaagatttttggtacataagattcgattcatgaaaatgaagatcagaattaccaacataccagttgtatccaccagctgcaaagggacgagattcgaatcccaagtaggggattttaaggaacgagttataagactctatcttgaaagagtaagacgagggaggaacttctgttagacctttcactatgtttgaagctgatactttataatcaagtgatgatgagatctcattatgtttatgcaagtaatttcctttttccaggtttggtgttggtccatcttttcccttctctgtttcagacaaaaaaacagagcatttgaaaaaagaaaaaaaaacagaggattatgtccacacacaaaatctaagttacgtagatgaatctaagagtgaaagagattttatacgctgttgaattgtgttgaagtcatcactgaattgtcgtataaaggaacccgcagacgaagatgtgatgaagagacaaaacaggagataaacaaaagaggatgtgtttctgtagagactcgtcatctttcaaggttatgacttatgtgaatgaagtgaagagaagagaggttagtggaacttatatattaaagagatagagaaatgctttaggatggagtcttcgaatattagttagattcttacgtaataatgttgtttcaaaaacaaaacatgattcgatggtttcatttagcatcgttgacttttgaatccatctcaagtttgggagtgccctcacttgaagttttcattaacttgaccataaaataattctacatcagatgaataaatttttataaatcctatatgaacttcaattttcttaaaaaaacattcaaaaacatatgattggaactgaatacagtagtttgaattaaattataaaataggttcaaatgcattgtaagttttgatacctatgaataaaagaatcaatggatttttttctatggggtttgggagtctactgctaaagtactatcattaatgtattgccataaacaataaacaatattataattgctaatcttaaatctccacttgattataaagataaagactaaatcgatcaaaaaacaatacactagatccaattgctctattctttaactttttatgattttagatggatttatttaacc

SEQ ID NO: 26215 - DNA, 1626 bp, Arabidopsis thaliana landsberg
  unsure (1)..(1626): unsure at all n locations
tagatccgccatggtatggtggtggtccagacatatgttattgtctgtaatgagctccggcaggcattcggggggtgtagtttaaatggtaaggcgaacccccagaaaatgggacgtcataaggaggcatagacgatccattaaagagaggagatccatatggtgacccgcccatatatactggagggggacccccacatcctaagtatgccccgggtgatgagaaaccttgttgatgttgcataggtttgggagcagacttctgttacagacgtgcaacaaataggtcatcaaaaactaagtagataattgtttaaactgaatacccactggtaatcttcgtattgctgctcttgttggaagataacaaacaaatggcttctagatttgaaagaatctcttctatttccttaaacaaaatctaagtacaaaagccaatagactggacaaagcactaaggctaatcttccacttcattccttattttcataacaaacacctgaaaatcctaatcaaaactactcaccatcctaagtctctatacatgtgtgcctcaaagagctctatctactaaacccgtcaagaagtcaatgactgctttgcacacaaaactgtttcaaagcagaaagacatatattcgatattgcaacacaaaataacttactccattatgatctgcaggtctaggctgagtgcaattacgcatattgcaagttgtcctgaatgaaaagttgacattgccacaacttgggcagatccaatcatcttctctacgcccccctatccacgaccaaaagaataaaccaaacaactattcatattggtagtctaaaatcaaaaaccctttataaacatatacgctgaaagaaactgactatagactcaatataaccgaaataacacaacattgccaatgttacacaggataaaattttccactactaaaagcatgcaagacattggaaacaatgtacacacagaaacactatcttcgggtatatatggattcgaaggtaagaaatgtcataccgtcagttctagcacgcttggctgctgatgaatttctgttgtctacctaaaaatccagaggaaatataagtcaagaactacactaatcaaaaccagatcaaacgatacgaggaaggatctacaaaactgattaagaaattgaatgattcgatactattctagtaattgtaaccatagaatcaatcacaaagcaaagctccggtgacgattcagtgtcagatctgcgatattcactataagacgggaacaaggaatatagtgggcagtgttgttacctgtgacatagctgtggaatagtctgattagtagcgagataaccggagaaggaggcggtgcggnnnnnnnnnnnnnnnnnnnnnnnnnnnnnnnnnnnnaggatttagttcgacggtaggagaaataggaggtgaaattagctcatgatgtttttatattttaacgagaaaaataaaaatgaaaatatactaatttactctcatatgaaaaaaaaaaaaaaactttaaaccaagaagatttattggtttttaaagagttaaaaaaaaactctttaatgtttttgacccaaaaatcaatggactttaattttattcaataatg

SEQ ID NO: 26216 - DNA, 2021 bp, Arabidopsis thaliana landsberg
gaagttatttccatggaattgggtaaaaagatataaataacacaaaacatttgtataaccaaggaaattttagatcgaagcctagacactaatctccgaggatccgatctcttggtttagataacacaaaacatacaaaaattataacagaacaaattgtacctgaagactatgtttctttctctatccatctgtctctaatcttttgtgcggccaagttcaacatcttttgattgtgtagtttctacaccttccttcaaaagttcaaactcttcctctgttaagctatgtttcacactgtttaaagcctttgctgcaataatcgactgtttctccaattccattgcccaactatagattaccatcccaacaatcgcaacaatcatccccgctacgtttttgaaagtcattgcagaatcaaataggagccatccaagcgtgaggatacagacggttttcatgtgaccaataacttggaacgatactgctgaaaaccgcccgatgcaaaggtactggcttatgttgcagaacacagctagaccacatgagagaagaatgaatagctgcaaattgtagaacattagccaatgataacataacaatactagcagagccatgaagagagatacttacaaagcaaccggaagacatattatacttcataatgaacttcccactaagaagataatcaactaaaggaccgacaacaagaagcgaaaaagcttgaatcggcgctgttttactcaacaactcaaaggacccaattgaatatttcttctgtagagaacctattaactaagcaacacagaaggaaaaaacaccaattgatcagatttgaattccacaagcttcaaaaccaaatcaccaaacaaaaccaaatcaccaaacaaaaagacttacaatttgctgcaaggatgacgagaaaatcgcaacacaagcacagataaaacctttggcattaactttaacatcagtcacagtacaaataccaacaccaacaacaacaaccacaacagatattttcacttctcttgagtatctcttgctatgtagaatccattccattacacataccacaggaatcatgctcagcttcgagatctaatcaacacaaaaaaatgtgaatccactaaaccaaaatcaaagtctatatatgctcaaatcaaagcaatttgattctatatgctcaagatcgagatcgagatgaattacttggtagaagccaacagagttcaacataagactaaaattcatagcagcgattgagatattagcaacgagtgagaaccaaagaagctcccaaagaggaacatgcttagatgctgataaaccagtcgcattcgacaccataccaacgagagcagtaagagcaaagtgaaatcccgtgagagttgtcgctgcaaatcacaaatcaatttcccaaaatcacacaattgaatgaaacgataatgatcatgcagatccaatgaaaatgggagagatagagagatcaggaaaacaaaccgaagctgaagccgaatccagatgatgacattagttgtttattagccatgatgatcccaacggagctcgttacgttcatagcccatgctccgacgtcagatacagccgatggcttcttctcgttctctgctttctccatttggattcaaattaaaaaaattcgaaatctgaaatcagaaccaattggttccaacacaattcagatccggaagagagtaatatatctgaaaatggtggaatcaaaatcggaggaagatgagacaatgtggagaacaatgcgaatcacgccgttcggcttcttcgtggaagccgcgaagaaaagccaaaaagcgtagaaacacacagagaaacacgtatctctctctctctgtgtgagtgtatcgtcttccttatttgttccagtggctttcttcttcttcttcactcgtggctattacaagtaagcttcttccgccattgatgctttccttgatgcctttgattattaatttataatcaaaaattcttctctcaaatat

SEQ ID NO: 26217 - DNA, 2071 bp, Arabidopsis thaliana landsberg
tacgaccccgccaaatacacactcaccaaatactcctcagacaagttaagccttactttaatcagcttatactgctgatgatactcaacaataccatcagtcttatgaagtttctttaattctgccattggatcatcacaagcatcctcaaaacgatccttttagtaatttgacatattcaggccaggtatacaacacatccaacccagtacaagactgaataaacgaatgatgccatgtcgatgcatgactatcaaagtgtattgcagccatcttaactttcatctcctctagagtaaattcactaccaaaaaattcttccacctaaaacagccattcattgattctacttcaatcaaatctaggaaaattgatcttccccaacctagtaagactcccataatggtggttaatctcaaatcttaccgtatcgttacgatgttcccttggatgatcagagaaacccgatcgagcctctgttaaagttgatgagtacgacgaactcctatctaatctctcttgttcatccgctaccttctttctcgtcgatctactcaacgcaccaaacatatcatcatcgctttatgttgctcagcgaccatttcctccaacctcgtcatgcgtgattcgatcagattctccatttctactctttttcccttcagatcctcttcccgcgacctcgtaacaaccatcttctccgagaaacgacacagctccgatacctttaatacagagaaacaatggattcctccgattaattgaaaaatacttctaattaacaaattccgtcaccaaacagtcaaatcgatgttcatgaaacaccccaatcacaatcgctagctcccaagatgagataaacctagcttacaaagattttaagattcaatgtttactaatggttttttgataatgaaagagaaaagtagagtcagctcatatagctgctctaacggcaaacttgaatcggccagcctcacacgccacgtgtcaactcctgattccttctttatttcacttgatttcccacgtgacaaccgcacgtgtggggttatgcatcaaggttcaaccgcctttgatctctctagtatctctcaaaagagtctttctctgcaaagggtgaagaagaagatgcagtattgtaatgtaaacaacaaataggactcaaattggtcctagcttgttgccaattcctaatactggatgataaaataggaatccgccgaacaagagccattcaacaacacacacacacacacttgcacatgattcaaatcattagtatcatcatatagaacagtcatcaacataaagtatactcagaaactatgtgattggtaaaagagaaggattcatcaaggaggaactaagaacaccaaaagagcaacaagtaggaccaaacccagattcaattttgacaaaatttactccttccattgaaaaccctaactatggtctgggcccttaagtctaatagatgttagaggatccatatgaaacccaatatagtgtctcatgagtaagccaaaagcccatgtaatgctccatgtaactagggttagcaagatagtgacttttcattgtaactttgagagttgtctcaaaacaactttccttctcatctttatgaaagtatcaattgaatcattgtgttcttggtgacaacaaattaatcttccctcttttagtttctttgagtaataaagctcttaatgagctatctaatttcagttttatatttctcttaataagctcatttgagcataaatatcattgctttagaaatgtcaacagtactcgccttagatgtaaactcttatttctacccttcttgcaaactcttttcttcttcttttcaacccaacttagacactttggtctttttgaaccacaatcctcaagatcaatcctttcttgttagtcacctaggaaagacttattcttttcaacactttgcccttttctatctcttttctaagtttttcttcgttcccaaatacttatagctttgcaagcttcttttcttttggggaactaacttgatattcaactttctctttatacttagaga

SEQ ID NO: 26218 - DNA, 1101 bp, Arabidopsis thaliana landsberg
tggaaactttgagtagaattgtggcgagagtgtgtaccagctcattgttgaccgagatattttacctgatatggtcaaaatagtgaagaagaaggtttttgtttaccattctcttacctgcttgttatatttcaattctgttatccaatctgcttaacctggaaatttatcaaatttatacagccagacctgactgtgagggagaagatacttagtttattagatacatggcaagaagcttttggtggaagcggcggaagattccctcagtactacaatgcctataatgaactcagggtatagtactcgagccttttatgtatatattaatattatgactccgagttttgattatccttttgccttgaaaacactttagtctgctggaattgaattcccacctcgaaccgagagcagtgtaccgttctttactccacctcagactcagcctattgttgctcaggcaactgcatcagatgaagatgctgctattcaggcctctctgcaaagtgatgatgcttctgcactcaggtatactcttcttgtagatttcctgttccaagttctctttctgttcaattattttgtattccgtgttatagactttagtatcttcacattttcagcatggaagagattcaaagcgctcagggatcagttgatgttttgacagacatgcttggggctcttgatccaagtcatccagaggtagaatagtaacatgattaggtttaatggctttgttgtttgatctgatttttaatactctctgttctaaatgctgtgacagggtttgaaggaagaacttatagttgacttggtcgagcaatgtcgtacttatcaaagacgtgtaatggctcttgtgaatactacttcgtaaggatttgtttgttttctccctcatctacctgttgtctcctccattttatagattttgttaatactgagagagatgctccttcctttttccagagatgaggaacttatgtgtcaagggttggcactgaatgacaatctgcagcgcgttcttcagcaccatgatgataaggcaaagggaaactctgttcctgcaacagctcccactccaataccgcttgttag

SEQ ID NO: 26219 - DNA, 1508 bp, Arabidopsis thaliana landsberg
ttatatagtcaacagagaaaagaatggtaaaacaaaaatatatcccgccaaaaacatactctttttcaaaaatgtccctttttcggcatttttttttgtcttcttttaatttttaatgaccattttatcctatttaaaaaatattgaagtcaacaaagtgaagatgtgaatttagcggccaaaaattagtgatcccataatttttggcatgagacataatcctagattattttttttgcgagaaatggatttacaagaattttttaaaggttttaacaggatttacaaattttcttaaaatgttttaaaaagatatacatatattttaaaatattttacaagaggtttttaaggattttttttttttttttttttttggtcaaaccaaggggtttttaaggttaaaaataagttacaaggacttttacaagattttataagggtgtataaaagatttatatggggttcttaaagatttacaagggttataaaatctcttactaataaaatgagttgttttgaggcctcaagcaatggacatcagcaaaatgaaaaactatgtaagaggatgccacacctacacctagccaggtcacctaaaacatagagaaagaaatcgtctcttcgcatatgaaaacgttcggccacaaactttccctgaatccatcatctcccacgatgcctcaaactctttgatttcaaacttatctcaactcatataacttccgttttaacccatatcaggttacttttggattaaatttaaatttcagtacatgttgtttgaagctcctctcatctgatattatgagagaagttcctcttatatgatctgaagttcactcgattcttttataagaaatttaaacattataaatatttaaactttgtactacgggtgaaattttagaattgactgtttgggttgataagaatttgcgatagaagtaggagttaaattttagaatgacaatcaaaatataattatagaatgaaatactaccacgagtgaaatcctagaattgacgagtttgaatcgatattaatacggaatagtgtactatggtgaaatcctagaattaacaattaaaatacaattatacaattttaaacactaaacaaaacaaacaatattaagaaaaaaatacaacttaaaattttcatttttagttataaatatttgaactttataagaatttataagaagtttaaacattataaattgttataagatattaatatgagatgatatactatggatgaaaacctagatataacaatcaaaatacaatattgaagtttaggtccatattagaacttttatgaagtttcaaatattctaaatattttaacttcataaaaaatgacaaaataatgtttaatttcatgagacggaattatatggtggaacgagtttaggtcgatatgaaaatgggatggtatactatgggtgtatttttataattaacaattaaaatacagttatacattatttaacattaaacaaa

SEQ ID NO: 26220 - DNA, 1434 bp, Arabidopsis thaliana landsberg
ttttcggctcacaggagatgggttagggggcagcgagagagtataatccatctcttttgaccaaaaaacttcaattgaactagacctattttttatttttcataacactcttttaagatttacaaattagcgaaataattccttttttttctgagtgagctgttaggtatttataaggtctgtgttaaaatgataaaatgtataggaaagcaaatgctgcgacaatctttcctctgcctaggcaacttaccatcgccccttgacgttagacgaatgaagtttccccatggtgtgtttagcaattcttaagccgctttgatcactctatagtgaggctgaagcgttacctttctcatttacaagcgtggaaccaaaatcacgcaaacctaagaccaaaatgtgtttgaatatttaactacatttgaaaaaaaagttagtaagcaaaatattttattttaaaaaatattctcacgaaaaaaaacacctagaatgtcatattaaaaccctaaaatttttcaagtaaactctaaacgttattaataactcccaaacctaaagttctaaacaaatggcttatttctttatcattagagattgttttcatttttttggttagataatcttttaattttgcttccacaatccacctaactcaattaaaaatgatcatgtttttattttccaatttccttcttcttttaaatttcttgatttgagaatctgaaaatcgattaacagtatatatatatacaagattacaagttgtagaaaactgtcaacagaaaacacagcatgaacagaacatccctttgacttaaaaatagcgcaattacacttcagaatatattttctcgggataacaataaacaacagagagatttcttctataaggaagtggtaaattttttgagaaaggaacactgaaacaaagagagttcatggccactcaaggagaagcgacgttctccgcggccgcgacgacgacgtcgagctatccgacgggaggtgttggtggcaaattgaagcggcaatcggcgaggaggcatgcggcgacaccttattctcgaccaacacagaaccaggtacaacggaggccgtggatctcgagaatcgtcgatcctgcttatcggattatttccggcggcgctaccagaatacttccatatttcttctcgaacgccgcctccgctcctgctcttgctgctcctccagaggatcaaaatcaacatcaaggtttttggtctatcctttgctctttctagtctcgtattaaggcttttcttcctggaaattttctgcagctttcggggtgtgttatatcaattgatctctatggtggtatatctgttctctgcttaggagtatctagggttttgttgaaattgtttcgatgctgtaaattagatgtgccaatcgccaggatagaagaaggtt

SEQ ID NO: 26221 - DNA, 2005 bp, Arabidopsis thaliana landsberg
gttccgatgttttacgcaagattttcgaaaccttaaagagccctattgattctcaccgcgcgtttgctcgaattagtattcagtttggaaaacatgcgcgaacaagcctccatgtccatggcgattcatacaccaaggtgattctcccaacgtaggaaaaatcacaagaagaaacctctccggactctcaaaaacaatctattgtatggctagctccggaaactgtctcctgatggtcgatcgtcgtctcaaattctatattttgaaccttttgacgcggacaacgatcaatcttccatcaatgtcactaatacgtggaggacaagtattctttaaacctcaaaatgaatggtccaatgattctggatgcttcttcgggccttctcgtaatgataacgtgtcatatgactttgactctgttgaatggaaaaactcggtagctgttctatggataaacgagacaacaggagattatgtcgttgcttggacattcatacagcattacttgttcttctacaagtcaggatattggtcttggtgtaatctgaatctttatgggaaaagtttggttgtgtttgatatggcatgtgagaacaataagctttatctgtacacagctaatcatcatatcaggatttttgatttctctggagcttatcctatggaaaagaaaaccgaaaacccgtattggaaatatctgtttaacgcggttgaggaaccgtgggaatacgtttggaagaggaaaatagcgattcagaaatcatcaggtgaggttttgatcatcttgagccttaaacaagtgttttacgaagcagagagacttttgttttacatctttaagatgaatcttgagagtttcaagtgggaaagagtttattctcttggagatgagatgttggtttttggtcaaggtgttacaatacctactgctcttaaagatcttggtgatggaatcaagagtgattcaatctatttcgtcgataaagacgtctggccagatcatcaagatcatgatcgtcgtgtttcgaattgcggtgtcttcaatattgccacaagtaagatcaaatggcctacgaaaaaatatcgttccgtaaatgaaactcagtggtttgtgctcggagttgcttattaggtattactcatttatctatatcatagacatttgttaaaactcttgttcaattcagtttcgatttcgagtcaatgttagtgttattcaatattactaactgttttgatggtcatgtgatttggaaatgatctaatagaaagttgaataagacatgtgaataacgaaagataaataatgtaaatgcttaacagagatctgtgtggtccttctacacttacatgaaagttacagagcagttctggtttcaactgcaatgttgattttgttgatgaagtcatcaacaggaatggttccaagctctcctccaaacctcgatctaacggtaacagttccggtctcgacgtcttaatttgggtccaacaaccgccattaacgggatattctgtgtctttgggttccttatgagcttcggtaatctctccccattgcacaacttgtaggagctaaaattagcaaacactttacgtaaagtaattgaaatcgaaatcataaacctttaaggaaagacaagtatagagtcaagttgatgaactctttctttaaccctttgaatcacccatactgtgacgatttcgatgttatttaaggatctcaggatacaacctctataaactggttttgcaacactcgaatatacagttctacaacactcgaaaacacagttctaacaaacatagtttctacgatactctcgagtttaagacatagagaggttgttggagatgttttactttcaaaatatgtgtgaacgttcaagtggtgctctgctagtgtccacaaaaacttgaactgtaaccttcttctataggtttgatatacttaggttttaatttgtttcttcgcaaaatcaaaaccatgtcaaacaaaaatata

SEQ ID NO: 26222 - DNA, 1727 bp, Arabidopsis thaliana landsberg
tggagatgtggccgtatcactgacggccttcaggtttatctcgaacagatcatcttggccgtcttcttcactacttcccttgccatcgtgttcagggtcgtttgcttcttgtttctcctcttcttctggtccacggctaaccaaaccaacacaacgtgtcattgttgattttgaaatatatttccggtttaagagtacttgtggttgtaaacttgattatgtggttaatacgtatatataaaggtgattaaagtacaaggtgggttagtagaacgggcctcaacgaatatacaactatctttggtgggaatttctgggtcttgcaaaagattttttttatacagagaacaatgtgcacttcaaaagaaattcggtatacactcgtgacttgagatcgagaatcataataacttgagtacattaaatgtgtacggtgcaacagtcactgtttagatctaactatattaatagctacttccgaataatatatgtttaggacttaggagcaaatgataacttctcttattgtttctcagttcgttgccacaaacatgtagtcaccaaaacgagtctatttttacttgtgactatagcacaacatccaatcgaattacacgaaccggttcaagatattgaatcctaagcttttctcaaaagtcgattccaattccgaatgtaattgtggagtgcatcaacgacatcattgtcaaaaataaatgataataattatataatggtattatactataaaaggttttatggaggagaaggtacacctaacacgaatcaaatatatacctaccaacatataaacacacactcttttgtttaataaactttgcacaatttttattttcactttttccgttttttcgggtctaattttctatttcggttgtaaagataataactttttttctattataataatttactcgtaaattaatcaacgaattacgtggcttaaggatattcatcatctcaatcctattacgttgggttaatggacaaacaaacaaaacaagacacgaccaaagttacaagtaaaccaaacaaaatctaacctgtgcgtgttaattagaccaaacctctctcttctctcacttgccagctacttctctctctcgcgctctctctttcttttttggcaatggctactggatcaacaaccgattccgccaggtctccttcctcaggtttgatcttttgtctcttccattataattacgcccattagattctgatatttctttttttttgtcacttacaaagaaaaaataccatatatgtggaaaattttctcaaaaatcgcagacgaagattccagttttgtacttcttgaatttcgttcaaaatagtaatcctagctttaaacacatacaaaaaaagttccagaattgggtcagctgatgtgaaatgaaatgattactgttgttgaactttagacaatgcatttaatgatggctttcaatcacataatcctagctttaaatttcgttttattagtaaagaaaaccaaatcaatccttgcccattttggtggaatttgattgtttttttttttaagttagatagtaagtataaacatgttacaggttcatgatttgcttatgttcggttttatgttgcaagaatatttgattgaggaatcttaataagtgcccatgagtgagacttcacagcttgtttcttgcccttgaagaattcctttaagagacaggacaata

SEQ ID NO: 26223 - DNA, 1097 bp, Arabidopsis thaliana landsberg
  unsure (1)..(1097): unsure at all n locations
aggactgggccctggcttaaattgccagaggtttatcatatggtcaaacaggccagtgtccctcgctgtaggctgaaaaagacagattcgaatcatgtcacaaattcatcactcactcaaattcaacaaaaaagaaagatgaaaacaaaagcaaaaacaagtctttaccttaatccatttcggcctctcggattcgacatgggaaatgtaactctcaacaagaaacttgaaaccaatctccaattcagcatcaaatgacccatcagggtattctttaagaacctcagagcgctgacaccaaggaacaaatccatggtacaagtctacagctgcaactacgttaaacatttgctccggagtatacctgtaataaaatgaaacacacatgagtaactcaatcttcattgcttgannnnnnnnnnnnnnnnnnnnnnnnntcagaaatgagcaatgtatagccgacgtaatattctcaatgcagcaaacaaacaatcaaggaatccctgaaactgcacagggaacacacaacatctgtctaacaaatcatatttctgcagaattagttcatagaagatcactagatcggttggaaacaagacaaacacaaaggcaaatcatattcctgaacaattaaagatcattgaaccattctttcaatgttgatttgatctacaaaacaagaacttaaggaccagtaaacaacataatagatcattgaacctattctcaaagttgtgccatttcagatgattttggaagaggcgagaaaagctattgtaagcacaaaacagaggatagatcaaagtttttaagtaattaccctaagacacgtctctcttcatagatctttgataactcaccaccaccttcttccccatctccgcaccccagaaaatgccgtctctgaagtaggctcacagagccaggcaatctccggaaagagactctagcgtcatcattggacatcaaccaattagaagaacatctctcgacgccggaaagagaaccaaatctcctaatttgatctgatacaaaactccctcgagggatcccagaacgactaacgagtttcctgctaatcgcgtttcgacatgaaa

SEQ ID NO: 26224 - DNA, 234 bp, Arabidopsis thaliana landsberg
agtatggagctttatcaagaggagatggagctatatacttacggtttcctcataaaggataccgcgaaaagatttgggaccatgtcgctggtgctatagttgttacaggtaacattaaagcttactctctatgaagctaattttatagtgtcgacatgcggatgtaaatagataaggaatgcaaggttgattcttctttttggtgcagaggcgggtggaatagtgacagatgca

SEQ ID NO: 26225 - DNA, 1098 bp, Arabidopsis thaliana landsberg
  unsure (1)..(1098): unsure at all n locations
atacacatttcatggtcccattattattaatttatagagtttcttatgtatttaaaaaaatgttttgtcagcttgaatgtaaaaacgttttgttaataaccagatttcagttttgaatttaaacctaaataataagttagaaaatgttgatggatgatgtgtagatatatatttacctttctcggacatagttggagttggaaaagtagatggccgagtcaacacggatgatcaagattccgggaatttgggcagcgtccggatactgtagagtgttccgatacacattcgaatttggcagcttccctagaaccgtggttcttggtctcgtcacttgaagcaatatctttgcaaaagagatcaccacctatatgaatagtttcaccaacaaccaaaaatataagtttgctttatatagatatctattgtagataacaatctattatataaatgatcttacagcgatcaagagaccgatctcaaccgagatgaagatgactcctaagaaagctcccatgcaagccaagaagtcgagtttatcgatcctccatatgagaatcgctgcgtcaatatcgataagaccgaggacagccgatataatgatggccgcgaggatagcatttggagtgtacttgaagagtggtgtgatgaactctaaggttagagctacaactatggccataactatgtttgaaaccgccgtttcgactcccgccatgaagttcacggcagatcgcgaaaacgaacctataatttttcataaatgctcatcaagatagaaactaaaatatcattgcgtttggttcttagaattatgtgacaaatattgaagttaaacagaactcaataaaatttaatgttttcgtagcttacccttggcactgtatcaagaggtttttgaaccgacgacgctcataggccctcgggggcnccctctttggttccatcaattcgatagtgcatcattgccgccactgatctcgctatcgctacagcctactggcgaaggaaattatgctgccatcacgtggttaatgagactacacatatcttaaggagatcttacttaactcttatgcatatgtgacttaccgttaa

SEQ ID NO: 26226 - DNA, 2394 bp, Arabidopsis thaliana landsberg
cgagaagagtaaacataagaataattaagatatgcttagtcattttgtttgatttcttctctttgattgtttttagtgcgagagttaagtagacaacggaacacattcatatatacttggtggatcaaacttttttcttaattgcactgaatgtgtgcatgtgatcgttgacacaaaaatagacaattatatagttaatgctttaaccttaaattagtttttgtctcaacgaaattattagcctatcatctttttacgtaccagttaagtccaaagaggtatgagaaatgagatgaacatgcgatcattaactgtttcgatgtatttgaagatttttatgatgaaacaatgttttctcgtctttgaaagcaatatcttcaaagtcttacgcggcaattcaaataagtctgttattactttgttgcatcgaatcatgtgatcgttagtttaaaggattatcactaggttcactactttatcattttcttcattgtagtttatatgacatttaattttctgtcaattaatatgattgaataaaaccattttaatctgtttcttctaatttttatgagaatcataaattctttctttttagacagttactattattaagaaagaaaaaaacatgttctagggggatggagattagacataaatattttgaccttaacgaagtctttgtaaataaatattatacaatcagtaattatcttttaaaggcatattgtctatttattttatgtctagcttgtatattgctttgtggttctatagattatgtgtgcagggatgatctttttcaattttcattgaggaacttattgctcacaccttcttttatagatttaaaagacgattaggagcatagtgagatttatatggtgccttaggaggaattttaaagtcattcatttgataatggttttcagttattaatatgacccaaagaaatgtttcgtttaaaccaaatgtcacttaattaggaggtttatgccaataccaattaatgtcgttgatgtttcttacaaaattgtaagtttcttgttgactttttgaacatgcacaaaaatgattaaaattgtgaagatccactctgtattaaatgtttaaaattacatcgaaaaatgtgaaaagggcccatcttttatactatttggcaaagttttgattaatcataaggttgtagctttgaacgtttatttgtgaaaataaaacgaaacaaagaaactatatcaaccagtaattatctttttttctttttaatatgatcagtaattatcttttaatttcatcacacgaaaaacttaataatgtttgataaaaatctcacaaacaacaaagaacggaacttttattcgatcgaatcattttcattattgccatcacacgttcacaagacaacaaagaacaactctccaagttacacacacacatacacatttgacatttcattcactactctcacacgatccaagagagagtcttccggatctcagacccgacccgaccgacactttccctaagcgaaactggacagttattccgaacagcactgagctcatacggcgatgtatcggacgcaagccattgctcaacatcaaagctttggtacgagcactttgcatgaactccggctgtcgtgacttccacgtagttaacataccaaccgtggtggtcaccggagccgtcagaggtcagatttaatgaacagactgggctcggaagacatggtgctttcccactgaaaatgtcgagattacccctctcgtagtagttgtaacctggtcccattaaaccaccccatgcttctaggtttcggatcccgatgtagtctccgtatttgtcgtagactctagcgcttatgatcgaatctgtaccggctttgaaggttgatccggttctaaggtagaatgtgtagacacaatctgcttcatcgtcctgtgaaatcaagaaagtcatttttttaaatgggaagaaacagaagtttgtagtctaatagtttaaactaatgtcattgatgttgtgtcattatacatattcaaatctggttaatgtgtgtgtctagttctagacaaaatcatatatgagaggaagcaagtcagatttggaaaacttacggctaatgcgacagcggagacggtggcgatgacgaggaggagtgagaggaagaggacgtcacggcgaggcatcatcggtgatatggatgtataagaaagagagatctagtctatggaaatattaatagaaatgttgaaaatgctaaagtatatgagagtttagatttcaatgatttaattatcgtctgttttgggagttgcccatgaagacgacgtggtcgtttttggtcaaatggaatgaataagaaataagaataaaaatacttaaggatcc

SEQ ID NO: 26227 - DNA, 1340 bp, Arabidopsis thaliana landsberg
  unsure (1)..(1340): unsure at all n locations
aattgcgtgttgtgtatgaacgcaattaccacaatctaaaaatatacaagctcacttgagttatcacattaaaaatgttcttcccataatgtcgacatttattacacattaaattattatttatttagtgcattaaactgttttttatgataatcagtatattaataaatgaatttacacccatacttttttacacaaacttcaagtgtaactccacctctatttactgtactgagattagtttatgacaccctatcctaattactttgaaaaaaatagtctatcaatatgaagtaatacattgcataaatctgaaatacttacatacaaactgagaccaaaaactattgaagtaaaaatgatataaatgtaccaaactatttaggaaacaaggaattaagagcattgaaattttcaaatcgagacaaatagaacatttggaatccgtaatcacagttccaaatacgaagtttccaaagaccttgtctggtgtttaacgtgtaatcttgttctgttaaaaaaatacttttgaccatacatatcaacaacatcatttttagaattattattattattatatttttgatgtactaattaattccatttcttttcttgttgtcttgcttgcattcatggaatctccaaactttgatttttaaaactaattatttctgtcatcaacttgttttaatggtgaacttatacatttttattatgtagtaacgactattaataaagagatttcattcaaagttttgagtataataaccaaacaaatcaatactaccaatataaacatcagtgacgttgactaattccgcctttaagaaggtcaaactgtaatggaagattatagatgaagcagttaaagcacatacaaagccaaccaagctcgtccaaaaaaattaacttcaagatcttctaactaatttataatcatcaaaaaagtaatttactatctatccaaaatccataattaaatactgttttttcttttgaggaaaatccacaactaacaaagcaagcaaccagatgccaaaattaattagaaagatatttttctctgacaaaacaagatatctgaatatagttaaattagtaccctattttctattaaaagattataattttaataaattcgaacgacaagaatattaatcagaagggtaagaaagtaaaactgtaaaataaagaattaaagaaagatagagccactactttaatcttcttccctccttattaccatcttggatccacttcgatttcacacctanaaataaaagcttataattaaagaacgataaagacgaacacaaaagagactctcacattctcaagag

SEQ ID NO: 26228 - DNA, 1741 bp, Arabidopsis thaliana landsberg
agctgcaaggtttttgagacggtcttcaaaaccatcaagagcatctgttacatctaaacgtatcaacaagcccaatgcattgagataaacctaaagagttgcagacagttgaatattgaatagatgacgcaaaagcataaatttgttaatcaaaaagaggattacttcaggaggaacagcatcgtctttctccaattctttccagatgtgatgatcataaatctcctctactttactcattggggaccctccttctaagtaacagagagcaacatgccaccaattgtgtgtatacctgaaaattatgcacatgttaaaaaaataatatatcagggattgttaacaataagagaagaacttgataatctgtgagagccttcaggtaagagggaaatgctttacatgaaggatgagcaagagggccaagttcctgcgagtgcttccatgaactccactgcttctttaaaccgacattcatgttgaagaacatgacacaactgcaacaaataagtaagatagatagaaaacatcattagtaaaaactactgagtgataattattacatggaaactgagaatagaggatgcaaatgctcaatgttaagtaactcacacagtgatgtgcccaagcgtcttctttgtttatctcatagccttttctggaagctgccgcagcttcttccattcgaccaagttctaacaatgggaacgcaagtaaaccatgaatataactttcttcttgattcgcaggtagaacctacaatattaagcaacttttatagtcttagacaggtgaaccattcagtgaccatcactatcaataagaacttaagtacctgctgaacaagacccaagaagggatcaggttgacccatgtagaaacttaaaagctgcgctcttttatagaaacccaagcctttgggaatccttgaagtagctgcaaaccacacttaaaattcaaaaacaagtgactcaaaaaggcacagaactttacattctgaaccataaccattttttgggtgccagatacaaaaatataaaactagattctagaataacatttcagataaactaacaatgaaagtgataaccaaccttggtgtgcatttcaaaagccaagtcgtcatccctatcctcggagattaggtaagtaacagcctcgtaaaccgctttctcataaggtgtagattgttcctgaagccaaacaaactaaactcaggaaagcccctcaaaaccaaagtaggatctgaactacaaatacagtggatataataagactgacaagattagatgccgcagcttcaacataggaattagctctggaaggatcagatgaagaaaggaaatgagcagctaaaatgttgcccaaaacacaatctttatccaagagtggtgcttctagaatcacttttctcttcctcccataactaagaaccttcatcaaccacagaacatgatcaacaataatcactgatatgaaattacaaagatggaaactttaagaataataatccagaaacagagcagaagctacccacaagatcgtaattaagctacatagtgactcaaaaacgtatcaaattcataaaatgatcagaccctagtcataaatccgattgaagaataaaaaaattgatacttttcttaatgaaaacctcaattttgcatcgaaatcttaagccctgttgtaaccaatgttccaatcaaatttcatgatgattcagtgactaaaagagggataa

SEQ ID NO: 26229 - DNA, 1190 bp, Arabidopsis thaliana landsberg
  unsure (1)..(1190): unsure at all n locations
tgatatgctggtttaattttgacgcatgactatttggaaattgcaataattgagttggatttttctaattttggttgattttgatttataaatagaaacattttggcttcactagtcatttttctcacaattccatacaatttttgttaaaaatcaaagtaagactttaaaagaacgttctaaatgctatattagttgaccaaaaaaaatgctatattagctaacaatatcgtttgaactaattaacaaaaacttggaactattcaatagaaaaatctcaaacgtttgaactaatctaaacttgattatctcaatcaagtttttatgagaatgattttcatccaagtaacttggctcttttaaattttgattacatattcgtttttgatctgatctatgaccgacatggaatttctcataacgacaagagaaaaaactgtgtcattgacttttgttaagtggtacaaagtggcattgactttgactcagaaaaagccaatcaataatcgtgaaagatgtctaacactgatcaatatttcaatttgaatagaccaaatttacactataaatacatcaacacaccttcttcatttcttcacacaacaccctccatagacaaaatggctaccctaagagcaatgttgaaaaacgctttcatccttttcctcttcaccttaaccatcatggcaaaannnnnnnnnnnnnnnnnnnnnnnnnnnnnnggatgtgcagccaacttatgttgcagtagatatggatattgtggcaccacagatgcctactgtggtaccgggtgccgaagtggaccttgcagctcctcaaccacacctatcccaccaactcctagcggtggtgcaggcggtctaaacgctgatcctcgtgatacaattgaaaatgttgtcacaccagcattttttgatggtatcatgagcaaagtcggaaatggctgtccagcgaaagggttctacactcgccaggctttcattgcggctgcccaatcgttcgacgcctataaaggaaccgtcgctaagcgtgagattgccgctatgttggctcagttttctcatgaatctggaagtaagttctttataacccttctagttctactacatgaatgcatgtatactaattatntaattaaggcaaattaatgaattattattatcaagaatattattacactaattaag

SEQ ID NO: 26230 - DNA, 1504 bp, Arabidopsis thaliana landsberg
  unsure (1)..(1504): unsure at all n locations
tatatataacaaatgcattcaaaactcaatataagtaccaaagaagagtaaatgtttggcatacctctgttgcttggtcagctgtgatattctgaaagcggggatggacaatcatccgagacttaaaatgcttcctcaccagctctttttcctttcgagccttctcttttacaagctggagactgtttctatcctcatggtaatatgcatccacattctggttatgctggtgtctgttgtttctcatttcactttctttgcaaataaggaacacttgatacctctgcttttgaatcgatttgatcttgcatgtgaggatatcgccttctttcagctggtccgccaagtcaacaatatctctcccatcatctgagaaatcttccttcataagcatcccagttaacccagaatctaatacacatatggctcttccattctgcaatctccgaacactggcctggacaattctgccctccgctatggtgtcctcagtttcacctgaaatcatgtaaaattcttcatctggacttggctctttaaatggtatccgccaatcctggaaaccacaacttaattctcttatgatattgctaataagtttccttcttattctcccgtttcttgctggcaagatattcatcaaggacaaacttttcttaaagaagctgggccgatctctcacatgctcaatagccatttctatcgcatcctcatcatcatttgaatcacctctgacatcctcatcatatatatctttcgccannnnnnnnnnnnnnnnnnnnnactctggatggattctggtgtcatccaataagtcaataaattgactgctactagcagccagcccacttctgcggatgcgcaagaaaccggcagcatttacaaaaacctttttaccaagtccatgcattatcaggtccttgcggacaaagattgaaccagctcttacaagcgacctctgcaaggatgcagctttccgaggcccaagtccagaaatgaactgtaaaggagaaaagaaccaatcatggctagctgccaagttaatatcgattccaacctggtttgtaatgtcaaccataacctgctcaaccattccatacttctcatctagctgaagaaaattctccaagggatgaagcttccaagacaaaatttcccgacctggaccgcataaagttgccaccattgctagtggattctggagatagcgtccaagagcaactgcacgtctcacgttcccagactgctgaggtagctgttcacccgagattcgagaattttcatatagcctaggaagtgattcatccacataaacaatgcttaaatcatccatcccatgtccgacatctttaggtttttcctccaccatctggaatatgacctgatatatagaatagagcataacacaattttactattcaagaggagtcgttatgaaaattcgaacacagcgattaagctttcacaaagtgatatataagcagaaacttaacttatttcatca

SEQ ID NO: 26231 - DNA, 910 bp, Arabidopsis thaliana landsberg
tatatttgaaaactgtctccaagtgcaattttgaatattggggaaagcagtttaagtatccaagtcttgttatcgatgctattacgggaagaagtaagttgaggaaagagatgaagatcaattaccccatgacatcatagattgcaaaagcctcagtatcatagcccaacttttcaccattctgaaaagggagaagataaattctcttaaaaacagtttgaacgataggtaatgatttctaagcttttagtcattcatttgaaacaaaccacagtttcaattttactattcagtatgcgttcttaatatgatggactacataatggaagcctaccttggttgtcccagtcgagtttatgtaaaggtaaataggcttttcctcgtcttcatactgaaggtaaagaaactccgcaagtatcaactcagtaactgaaggtacgagagacattcccaaatatacaattcggttcttgaacaaatatgatgccaaatcaggaggaggttgttcgtgtgcacttccctttgagaaaggtataacctgttgataagacggaagcacgaagataagaatcatataaaaagaaaaggcttacgaacaacaataaacaaaagactatatgtgaagaatatagcagcctccaaattctccatcataatcataatcaaagcaattgatgcatattataagtggcacacacaatcaagggaaacctctgccacataatacctcaactttttccttaccagccaaccacacagaataatttcttcccaaactgcattattaaatcttcatactcaactctctaactatacatgtaccatttccgatcaattaaccaacagaaatgaatgagccgtctttgctatctaattgcatatatcaatagtaactctaatccattaattc

SEQ ID NO: 26232 - DNA, 1747 bp, Arabidopsis thaliana landsberg
atcaataagaagattatttaatcaatgatttttaggatactaatgaatttgattttatagtttatatttttcctttccaaacaccattgaatgtgaaaatcaaatattcgtcttgaacatattccttgcttagtaatgaaagataagaccatcacataactcttttgctattagataaatatattactaagcaaaattaactttataatttagtatgatttccaaagagttatttcccaaaaatcaagatttgagagccatgtgttacacttacaactttcaactgcaagatctgtatttaccatttctgattttggtttccaaatattaaaaccataaatcccaaaaaattaaataattaaaatctcaaagggaaacttgggaaacttcgtggaagttgccttggtggacccaataaacaaaactaatcagtagtatttaaacaaatcatgacgccatttctttacaaaacaaacataaagaatcagcaaagcaaaattcgaagagacacaaaaaaaccttcgtttgtgtctcagaatttacaaagttttgagtcagtagagaaatggcgggaatcgtgacagagccgtggtcagtagctgagaacggaaacccaagcataacggcgaaaggatcgagcagagaactaagacttggaagaaccgctcacaacatgtcttcttcttctttgaggaaaaaatcagacctccgagtgattcagaaggttccatacaaaggtcttaaagattttctctctaatctccaagaagtcattctcggaacaaagcttgccattctttttccggccatacctgccgccattatttgcacctattgtggcgtcagtcaggtatgcatatttttccgctgtttcattgataatacattgagaaaatcattcaaaatattcccaaaaagagttagaatacgaaacgcctaaagatttttatcaatttgtcattagtatttaagatatttcattacatctaatccaaattactacttaccggttactattaaattagatttgcagtcattgatattttaaaataaaacttttggtgtatcttgtaacgtttaatataaacgatttatcaccgtatatacataatacatgtactaaatcgtgatttttattacagccttggatatttggacttagcttgctaggactgacacctttggctgagcgagtcagctttttgacagagtaagtattcgaccatcatctcttattttatccatttacatatttctataatttgaattcttcacattacgacattttcttatcgatcgtgacaaaacttagccaactgacgataattttaaccgcatctatccatctgtagttaaagggatcacgttatatcaatacttttttctctctctcaaataaatctagttaccaaccactcattggaatacttatcgttgctccataatactttccactaagtttgcagatgttcccactactagctttaaatctgaggggttataatcatgaagatcacgttagttaggtccaattccaccataatttatgctttttgaaataaatggacatggaccaatattctttggggataccgcaatgcatgattggatttttattacaaccacacacaatgatttgacactcatatctcaacgtgccagcatagtacaaactctatcatttaatcaagtacattgagattatctagaatcatcttatcaagtgacgccataaaaagtttttttt

SEQ ID NO: 26233 - DNA, 1491 bp, Arabidopsis thaliana landsberg
ttttagaaaactaaaaataaaataataaaattatgctcgtttttctctggttgtatttcgttccaataatttatattattattttctatcaagcaggtgcaagaaacgtgttcgttaaattgcatgttgatataaaaaaaaaaattaaaaaaaaattgcatgttaattctatctctacgactctgcaacgttacgtactatttattttgtcgtattaataattgagtatattttgtacttcatgacaagaagttacataacaatttaacggataaaaaatattaattcaaataatcttgacataacaattatgttattttttttttaactacaactcaaacaagttctttaaacaacaaatgttatgatcacaaatctcttttttcttttttttgtcaaggatgattataaatcttaaaattataaataactacagagtttatatacagagaaatatgggatgataaaaagactaatatttgtagtcctattagttttgtttcataagtcttaatctcacttcaagtacagttaatacatgcatgatcaattctactatatatgcatatataatgcatgcatgttgtagagttgagggttatgacacaatgctatgcatattttacttgtactaattaaataaacattgaaagaaagctgtaaggaagaatatgtagataaaagacaaaaagtaaaatgagagtggaatccaatgtggacttcaactagatattatattttgtatttttctaatatcaatgtttaacgtatatttggatgtaacgttgggtgtcgaataattttgctttatattcttcactttaacgtctaaacatgaaccaagcacatggtggtcttggaagatgaactataaatatcaagattaatgatgtataatgggtgatccaaaccaaagcacatataatctctagagtttgtggaacgcatagtatctttgccatttaacgtacgtacgtatctagaaccaataatgataaaaactgtagtggattaattactcgaaactcaaaagtcttattcccaacatcaagataagtggttaaatttaatactggaataaaccattatcccacgaaagagaatattataaagtttatatattggttgactttgtgttaaataatgatgggattatattaagaaaaacttgttaaatgaatatcagaatcaataatcgtatcaattagacaacttgattaagatttgattctggtaagtaaaatatatgaaacatgctccatatgctatcatatcttcaataaaataaacgaattgaagacgagtatatcgctatcatggcaggttccaattagttatctccatcctcttttttgtttccacaaaggagccactttgtgttctttatttttgaaaatgtttgattggttaattaaccaagtgaagttgtaatactattatgcaagaattaattgcagcactctatgggtcttgtaatttggttaataagtt

SEQ ID NO: 26234 - DNA, 2995 bp, Arabidopsis thaliana landsberg
ccattttactatttacaatttgaaaatagtcactttttattgtttgattcaatggaatgatttagttaattttttcagggaagaaggaactcggtggtagtgggaagagaagggtttgaagaagtgtacatgtacagtcctggttcaagacttgaaagttacacaaagtctgcttatgtctgtattggaccatcttcattactaaatctaatctctttggaatctgattgtgtatggagaggtgttttacatcttcacaatcctaattcctaaggatttcttttctcttataacaataataaattgattgggtgaaaggcatcaacacaaaattctttccaagtttcaaccaccaagggacatggaccatggtcagaaacattacctgaaaactacacaagattgtatcttctatacaatacctcctttgatgtcatcaaaacagagtatatatgaattatgcaaacccatgaaaactaaaaataaaaaaactttaacataatagtaaaggaaaaaaattaaaaggagaaaccaaaaggcttatagatcaaattcttaacatattgaaatacagaaaattgatttcttttggcagtgactcattcagagtcagactcagtctcagtgtctttctagtcaactggtacaaaattttcagaaatacatttttccgtacaaataaatgtacaaaaacttatgcatcgacttatctcaaatacataactctgaacacaaagaatacagtattacgttgagagcaaaacagccaagagtataccatcattgcaagcactttcaacttcatcaagctctagacctgtaaagaaaaatgtggtggggattcaagtaaaaataatgcttcaagaaacagttgacaacattgagtgtttgtctatcgtgtatgtagtgggcctcacaaggcagagtagcacacttgattcccaaaaaggacttacatttaatacattccaagaaataggatgaacagttatcagaaccacaccccatgcaattacctttggtcaagttaaagaagagaggatgatcatggggatgacagtcatgaacaaaaggatctggaagggaagcacatctgacgtctaggagaaactcatcacaatctttttcatcgcatttgtagaagaaaccacagccaattcggccgcaaccaatacattggaatatgtctttgctagtagcacctttattttttttttgaatttaatgttaaattagattcaaaaagaacagaacgtttttacaacaagtgcaaaatttttttaaaaaaactttgaaaattttaaatagaaactcttaatcacttttctcaatgtatcctccttgatgcaaaccaaagttggagtccattgttgtatctctgatcgccactgattttgagagccgaaagttgattgcgaatgtgtatatcaatccatttgataagacgactagatgggttgggtcgtgtaccatgtttacgctccatacttatttttaacccagagtacttataaaactcatcaaaaaccttcactataccctatatggatctaaccttaccatccgttagaaccatcaaatcatctgcaaaacttagatgagtgagctttaaacgttgacaatgaggatggaaaccaaacttgtgagctccggcagccttatccaacatctttgagagggcatccatgcttatgacaaacagatatggcgagagagagcaaccctgacgtaaaccccttgcactttggaaataaccagcgagatcgccatttacttggactgaaaaagaggccgtagtaatacacagttttaaccaatgtataaaaaccgcaggaaaattcatagccaataaaacattcagcagaaaagccaattggaccgagtcaaacgccttcgagatatctattttaatagcacaacgggtagagacttaatctttataatagtccttgactagttccgtagcaagtaacagattttcgatgagtaatctgtcttttacaaacgccgactgatttcccgcaacaaactctggcagaagcactttcaatctgttagcaatgatcttagaaattaccttatagattacgttgcagcatgaaataggtctataatccttcatttccttagcttctagcttctttggaatcagagctaaaatagttgagtttattccttttggaaggaaaccttttagaaaaaaagattgaactgccaaaatgaattcaagtcctatggtagcccatgttgccttatagaactctgtggtataaccatctggtcccggagatttgtccttcggcattgaaaacagaaccctctgtatctcctccgcagacacctcacgagtaagcagctcttgatcagattcagaacaacgaaaaggtagcaagttctgaagctcactaacatcgcagcctgcatagtcctctgggataaaatgcagaaattctctaaagaatctctcagcctccacttttatctcatcaccctttacaatgctaccatctgcacattgaatttccttgatctgattcatttgtctccctagctaccacaactcgatgaaaagtcttgttgttcttatcacccactttcatccaatgcaactttgatttttgttttagatatttttcttctagatctgacacaaactcccatcggttataagccgcattctctgcttccatattctgcaatgaagggttttgataagtttgcctcttgtttcttacacaaaacttcatatgcttcttttgatttcttcactaggttaccaattctgtcttttgcgagcaactttaacgcaggcttaagaccctttagcttcttgttgaaccggaaaagagtggatgtagacaagaataacgactcagtattcttccaatagttatctatcattggctggaactcatgtaattctgcaaggacattaacgaacttgaaggttttcgacctttcgcctgactcccttttctcttcttaagtttattcg

SEQ ID NO: 26235 - DNA, 1666 bp, Arabidopsis thaliana landsberg
  unsure (1)..(1666): unsure at all n locations
ccaaaatcatttgctcagctacatgtatctgccacaactgcaaacgggaaagaaatgtgttgcgagtttcacaaagattagaaagccaataagcctaatgagtaaacatagcaaaaatcacataaccaacccttttgctcaggaaaataccttgtcgacataagggtgatcagagagcagcccttcctcctctggctttgatcctggatcttttctaggttcaggaggtcttccacaatctcgctgtacaaacaatgtattagataagagggagactcttcacgagaacacgaaatggattgatattctaggaaaggattctactgacccgtatctcatctggattagnnnnnnnnnnnnnnnnnnnnattggtgggaagtcaaatttattaaatctggagcaggaatgtaaaaacagtcaacacatataccataaccaagaccattgaggacagaaccaaaatgccaatttttactggatatgtaaagagaattaaatacgtgtgaattacatacatcatgtgatctatgttaggatggacgaagcgcaactccaagggaaaccgaaaccggtatggatctctttttgcctgaaagaacaaaagaaaaaggagaatgaagcaatttccattcagatttttataaatgtgaaagaagaatatgtgccttaagattaccgtgatctcaacgataacatgcatcccaacttttatgaaatgccggatccaaaaccagtcattaccttttataggtacccatctgcaaaccaatagacacataaacttacatctttcaaaaaaagcatatgaaacaagagacaacattatattacgttatataccctaaatacaagaaccacggtaagtctatctttacaaagtaaagagacataaacatacccttcatgaacacctccaatgtcaacaaacgctccctgatacagatgtaaagtggtaactgtgcctttacaaacctgcatggacattacgatattgctcatttaaaccaatcattagttacaatatacaaggcttagaataagaattcttaccatccctggatagtaaaagggaagctcatactgcacaaagaaaaataaagcaattaacttacaaacagttcatcacctagcaaactaatcaaacaatcaaatccattagcataataatatttaccatcccatcttcgtaatccttccctcttttcctcctacccggataaaaatcctgatcgagctgtataaataaaaacatcatctttattagaatccttctcttagccaccactaagctaacaatatctcattgttcaaaaaaaaaaaacgaaccttgtaagattcttcctccaacctatctttattatcttcaacccattccttgtattgtttcaagaaaaccttaaacctctccaaacacatcttatcaacagtagcatcttcaccaactctcaaatccttatccaaatcctcaagccaaactctttcagccattaacttatgagcttccctaataaactccagctccttcctatcaacttcccaacctctgggaggccaatcacgcggcggaatttgcctaagaaccatcggaccagcccaagatgtttctaaaggaggtggtttatcacctctaatctcaaattgctttgcataccattcgtcttttgt

SEQ ID NO: 26236 - DNA, 2615 bp, Arabidopsis thaliana landsberg
  unsure (1)..(2615): unsure at all n locations
gtttctctttttgttgcatgttgaggttggcaaaaagagagcgcaagttatcttcctcatcactaacattttcatcactagaggattcatatctagtggaggatttagatttaaccttcttctttttgccgtcctttgccatgaggcacttgtggccgacgttggggaagagaagtcctttggtgacggcgatgttggcggcgtcctcgtcgtcggaggagtcgctagagctttcgtcggagtcccactcccgacaaacatgggcatcgccgcccttcttcttgtagtacctcttcttctcctttcttctccccttcttgtcgttgcccctgtcactatcacttgataatggacatttagcaataaagtgaccgggcttaccacacttatagcaaaccttcttggagcgggacttgtagtctttccccctcctttgcttgaggatttggcggaacgtcttgatgacgagcgccatttcctcattgtcgagcttggaggcgtctatgggttgtcgacttggtgtagactcctccttcttctcctctgttgccttgaatgcaacgggttgagcttcggatgtggtggcatcatcaagctcgttgatcttcctcgagccttcgatcatgcactcaaaacttacaaaattcccgataacttcctcgggggtcattttagtatatctaggattaccacgaattaattgaacttgagtagggttaaggaaaatgagtgatcttagaataaccttaaccacctcgtggtcatcccactttacgctcccgaggttgcgcgcttggttcaccaaggtcttgagccgattgtacatgtgttgtggctcctcccctttgcaaagccggaaccgaccgagctcccctcaatcgtctcctgcttggtgatctttgtgagctcatctccttcgtgcgcggttttgagcacatcccaaacctccttggcgctcttcaacccttgcactttgttatactcctctctacttagagaggcgaggagtattgttgtcgcttgagagttgaagtgctcgatttgggccacctcatcctcatcatagtctttatcccctacggacggtacctgtgcaccaaactcaacaacatcccatatacttttgtggagtgaggttagatgaaatcgcattaaatcactccacctagcataatcttcaccatcaaaagttggtggtttgcctaatgggacggaaagtaaaggtgcatgtttagaaatgcgagggtagtgtaggggaatcttactatacttcttacgctcttggcgcttagaagtgacggagggcgcatcggagccggaggtcgatgttgatgaagtgtcggtctcgtagtagaccaccttcctcatcctcttgtgtttgtcgcctttccgatgcggcttgtgggaagaagatttttccttcttctctttgtggtgagaagaagatttcttctccttccctttgttggaggagctcttcttcttctccctccttttggtgcgggactcttccgatgaagtgctcccgtggcttgtagtgggcttttcgccggtctccatctccttcttggcgtgatctcccgacatcacttcgagcggttaggctctaatgaagcaccgggctctgataccaattgatagtcgcctagagggggggtgaatagggcgaaactgaaatttacaaaaataatcacaactacaagccggggttagcgttagtaatagtaaatgagtccgcaagagagggcgcaaaacaaatcgcaagcaaataaagagagtgacacgtggatttgttttaccgaggttcggttctctcaaacctactccccgttgaggaggccacaaaggccgggtctctttcaacccttccctctctcaaacggtctctcggaccgagtgagctttctcttctcaatcannnnnnnnnnnnnnnnnnnnnnnngaccaccacacgattggtgtctcttgcctcaattacaagtgagtgttttgatcacaagaaagaaagccaacgaaaaagaagcgatccaagcgcaagagctcaagtgaacactacaaatcactctctctagtcactaaggctttgtatggacttgggagaggatttgatctctttggagtgtctagaattgaatgctatagatcttgtaatgtgttggaggtggaaaacttggatgccattgaatgtggggtggttggggtacggtatttatagccccaaccaccaaaaatggccgttggaaggctgctgtcgcatggcgcaccagacaatccggtgcgccaccggacactgtccggtgcgccagccacatcaacagaccgttggggttcgaccattggagctctgacaggtggggcctctaggctgtccggtggtacaccggcaggtcctatagactgtctggtgcgccaactgcgcgtgctctgtcctctatgcgcgcaggcacgcattaaatgcgttgcagtcgaccgttgagcgcgaagtagccgttgctccgctagcacaccagacagtccggtgtgacacggacactgtccgtgcttcaccggatagtctggtgaattatagcggcggcactcccattttcccgaaggtggcaagttcagcgtcgagt

SEQ ID NO: 26237 - DNA, 501 bp, Arabidopsis thaliana landsberg
gcacatctctcaagggaagatgctgagtatgatgagatcagggaaggagaggactatgcagatcctctctgttacacattcccttctcaataagtgtgaggagtcaagctagagactttaaacaagctgcacttgggaggaagtcccatgattatccttgtaaataatttttctttcttgttatttttgattcgtttttgttgtgtttgtggttctcaggaacacatgaacgacgtggagatagagtaaaaaaaattcaaaatttactctatctcaaaggtggggatcgagtataccagttcagaggagtgcaaaaatttgaaaattttctgttgcacctggagaccttgtgatcgagtatggggtcgagtatttgcggttttgctcacaaaaattcaaattcatcactagatactcgatcacaaggagaactcgacgatgagaatgtgtaacaaaggaccctgtcaccatgaggatcgagtataatgtcaaggagggccc

SEQ ID NO: 26238 - DNA, 1532 bp, Arabidopsis thaliana landsberg
tgagacaatgcctctcctaaagagttggcgttgaaagcacaataataaagacaatttttacactggcatgatggcactgtacgcatcaggtgagaagagggtcggcacaaagaaggtgtacgcaatggttcagtgtatgagagatctagttaagcctaagatgtgtaaggagtgtttggaaagcattataaaggagtttcccgagtgttgcgacggtaaacaaggagggaggattttgggtacgagctgtgattttaggtatgaactttacccttttctaaggacttcagattcaaaaactgtttgatgacgatgcacaacacattctcttgacaccttacttattttacttcagttccggttttttgagctttttactagtttttatttatattgtttattcttggatttccctttgtgctggtttagatcacatgtgcctatgactaagatcccaagctgtgtttttcctcactctttatttggttattaattacagttgttggctatgaataagaagctctattattcttgacatcttaaatttgttaacatagaactccgttttctaatttattgttggcgactaaatagcgtcacgtgtagttaatttagacgaatatttccgcgtcattgcttaatctgagtcatgatcctacaatttccaagtcattcaacgggtaaaactactccctgattgacaagataattttgtgattatccgtagctctatcaaacctgtaattaagataatgcaaacttctaacaagcaagaaatatttaaccgatcataaagattatgtactggatataagcgtcagttatggtgaatatatattcagcataaataatttatcatcacccatattatgtcgttcaagaagattcatgatgtatttccgttgtgttacgtttatcctattgaaaaaatctgtgatgtcaaatgtatttggatcaacgaatcctcgtagcgttagaaagtttccactctatcgcaatgcatgggttttagctaatttccatggaacattttcttttttaaaggaagtctacgttactacgtatgaaagttaaaacagcttcacaaatcacaagatcccaacacccaaaatcatcctgctccttgcacaaaaccggccagtgcgtatcctatgattatgttttctaaaagttttaatttagtaaaaggcgttgaactttgattttttcatctgccctccccatccctcgccgaaaattctaaaatcctctctcatttctgttacagccaataaccattttttctacaaattgaaatgattaaatctaatttgtaaaggtaagttaaacaaacaaaaaaaaagattacagttgaaattattagttaatttagatctaatgaatccaatcagctaagtccttttgtctcctatatatatatagaaacatcccaatcttagcctttcatatatggaaaacttctaactctggaaaaaaaatcaaaaccagaaacaatgcacaattcatattctttatcaaaacgacttgttttg

SEQ ID NO: 26239 - DNA, 1010 bp, Arabidopsis thaliana landsberg
caaaggaaaatagtttttaaatttaaccggtttaataactaaataaataaaacggtgacgggcattaaatttattggctattaaatatcccatttactattttatacatatatttaataatttattaaaaatatatttacaagctcaagaaaaaataataattattaatataggattcactgtaaaagttatatcctactactatataatagttgcttaaatttataaatgaatcaaaatgtaagttcaaatttgtttttaataattttataacttattttacagaattataagtaatacatttatattgaaattaatgagcatttcaaaaattaataatcatttgtatataatttaattttaaattttctatcattttgtaaaattcatatttcaaaaaataagaaatgtattttaattttaataatctaaaattactttaacttcaaatgttcttttttatttttgtaactcattttataaaaaccacaagaaatacatttatatttgtgttactctaaatttcaaaagaataattatatgttattagccataagtttttataaagttatatcacttttaaactattttttgtaaatacatcatttctaaaactaatcataacaagtcttaatttttattttctaactatgatctccgggggcattccttaccattctgccactttatttactctgattattacaaaaacattaactatttatattttactggtggcagttgcccccaccatccataatgtgggtccgcccctgtatgatctatatctttattcttttgtttttattgtatttatttttttattttgtaatatcttcttcatcttcataatttgcacacaaaaaaagtgaaggatgaaaaacaaacatgagctccaagctaatgcagaggagaaaaaaattgtgtctttttgtttttttttattgtttattcttcaagtacataccttaccaggatttttttttatattagaattaaaaacaatcaaa

SEQ ID NO: 26240 - DNA, 7011 bp, Arabidopsis thaliana landsberg
  unsure (1)..(7011): unsure at all n locations
agataggattggcaaaggaaggcggttttgttattgactgctcaagaggagtggaagaggagtggtggtagagatcatgttgttcttgctcatcatccgaatagtatgttggatgctagaaataagctgtttcctgcaatgtttatactttcggactttggaaggtatcctcctactgtggctaatgttgagaaagatgtcattgcgccgtataagcatgttatcaaagcgtatgaaaacgatacatcgggtttcgatagtagaccgattctgctttactttcagggtgctatctacaggaaagatgtgagttcttctgttaccttgctttcagttccttgtgtttccttgtttgttctctaaatatggtttgctccaatgtgtcaaatatctcagggtgggtttgtgcgtcaggagttgttctacctcttgcaagatgagaaagacgtgcatttctcgtttggaagtgttagaaacggaggtataaacaaagcaagtcaaggaatgcacaattccaagttctgtctcaatattgccggagacactccttcgtcaaaccgtctctttgacgccattgccagtcactgtgttcctgttattatcagcgatgacattgagcttcctttcgaggatgttattgattactctgagttctcggtgtttgttcgcacctctgatgcattgaaagagaacttcttggttaacttaataagaggaataaccaaagaggaatggacacgaatgtggaatcgattaaaggaagtggagaaatattatgagttccattttccatcacaggtagatgatgcggtacagatgatatggcaagcgattgcacgtaaagttccgggtgttaaaatgaggattcataagtctagaaggtattctggatctgtttctgagaccgggaaagaatcaagatggtcgtctctgatacctcggactttctggtgaagaaagatgagattttttttgtcttcagttttctcagaagacatcaaattgttttgtttttgtgtagagagataagtttatgttggatcaagatgagttgtcaactttttccccaaatcataagttatagatagagaaacaagtcttcactctaatttgatttctgcttttcaccatagaaaaactaataatgttgtaagttgatttgttaaaattgttcattttgatatcttttttttataaagttggtaagttgactttgtatagagacttgtgttccccaggttttgccatttgccaaactgttttgtacttaaaggccgttttgattcaaaagccaaaaaactaaaaacttgtcagtttacaatgactagaagaactgttttatttgtcaattgatacctaaagaagttcgagtacaacatcaaccaacaacatagtcaatacattaagttaaaacatttgcgtagctaaacagattttagatgcagagaggagagagtttagagtatagaatttcttagatcttatcttccatgcccgtccaagattgtgtgagtaacaaacatagaaactgatgagttccttacactggagaccccaattgcagataatggttccatagaaactggcataaaagccccgatacctggagtagacggcgagaaatttggtaagggtaagtcttggttaaggtattgcaccacttgttccatcgcaggccttgattctggcatagcatttgtgcagagtaacccaagtttcaaaaccatctcgacttcctgagataaaattcccttctcagtttggaatctctggtctcgagcaaaaaagtctgtgtccagcattcacaaacccacttgaccagatatttcttttgcaactgaaaactcgggttcaaaaggtcgccttccacaagttacttcaagaaggaagataccgaaggcatacacatcagtttctttagaagttccagttcttattagctcaggtgccatgtaacctatggttcccacagcagctgttgcagataggttgccttgggggtcctaaaacttggccataccaaaatctcctaatcttccattatactcagaatctaacatgacattagaagcttttatatcccggtgcaaaacagctggattggctcctgaatgcaggtaattgagagccgaggcaatgtccttaagaatagaaattctttgcaaccatgaaggagatgggttttggttataaaacaagtactggtcaagactaccgttggacatgtactcagagaccagtagtaactcaccttttctcctgcaatacccgaggagaggaaccaagttccgatgttgtaaatttcccatggttacgacttctgtcacaaactgtttcatcccttgctctgcatcatgggatagtcttttcacagctatatgcctgcctccgggcagagttcctttgtagacttttccaaacccacctttaccaacaagagcatctttgacaaacccatttgttgctttgtacagagacttgtaggaatatcggtgtgggccgtattccttttcccatgattcttttacttctgcatacttctttcttctgtaccaataaactcctccgagaaccatcagcacagggatcaccaataagatgaccaaaccaataagtagcggatgtaatttctttttttcctctctaggaacgggggcctgttcatttctaggaataggagcctgggggnnnnnnnnnnnnnnnnnnnactgcataaattctttgcttttactaaaactccaccctagtatatactggttactggtcaatctcccatttgatccagagaacccaatatacatcttatcttgaaaaatttctgacagattgatgtctcttgatataagaggccggtttggtttctgaatctctagaggggccagtgtaacatttagcaacgatccatcataatcaatccacacctgaacaggctccccactcacgagatttatgcttatattcttccccaaggcgtcagaaaagtaagacgggagagcagactcaatagatatcgggttgttcacatcaatcccaacatgagccttttctagatcatgaaaatctactgtctcaacagtatcaagctcaatagctagcagatgagaagaggaagtcacatttgttgagctgttgaagacacccaagtactgagttggaaacgcgtgagagaaattcatggaaggagatacaacaaaggccataccgtggcctacctcagctccgaacttaggaggcaccagcgcgcatacaaaatgtgtatagaatgagagtgatgaagatggatcaaaaccaaagggctgcttgaaaaaagcatgaccaattttcaactgtgaagcatttgtcaactgcaaaagtccaccaggaaggatcctggcgatcccatcaataaaaagatcttcttgatggaagccattgtagacaaacccagtttcttgttgacctgacaagcaaatcagacaaacacaggagaagaacaaaaccagatgcagtctacaatccatatctaccaaaagagagagtgaactttatgtgcagaaaatttttctccggtaacaagcaatctatgaagctgctactgcaatacaaggtctattcacaacttcaggagaagacgtcaaacacaattttcaacgtcaggagaagacgtcaaactcaacattttccgacctgttctcctttggaattgtagccatataacggtaaaatatattcccaataggcataaactatgataataaaatcatgacaaataccatcattttttgcataatctaatctatcatgtaaactaaatacaaccggaaaacacttgatagtctactatggttattccaaggtcaactgaaacagaaattaatcccgaaagaatctcgaataccttggattacaggctggttgtagcattcagacttacttagataatagatattcaaaaggttaacaagtacttagttagcccccttaacttttcaacagagccaatgtctatagaaacagtaaacaaactttgcttggtcaaattgatgcaatccttgagaagtaatccacaaactttggatgagatttttttcagcaaaattaagttcctttgccaagtaagagaaacgagaagtaagtagaatctagaggcaaactcttatctttttcatgacaattaccaaaaaattgatctaagaacaaaaaaaaagatgtattcatcaaaaagtcacaatccctgctctgatcaagtcatgccttatgaattccaataaacttaaacgcgaaatggtaaatgcaactctcacatagaaaccagtcccgatcaaattttttctccgactattcaaagtccttaaaccctaaaatttctctttgaacattccatcgttatcaaataatgtgagacgtacataccttccaggagaagagcttcgaggtcgaaatctttggcgacgttcttctctgtcgccggatgaataaagacggcaccgtcatcggcaacgatattccgggacgaagaagaagagcttatggaagcgcacgtgtagttcacgcgttggaatatgtttaaatgttggtttaattagttacaaattcgggacgataactttggcccatggaagcccaaatgtattaaccgggtgaatcaaaccgattctatctaaacaaagtcaattagaaattgatttgaaactgtttttatttggtttagggggttaacatgtaactacaaaagttttgcatcccttcaaacttcagttcacaaaaaccattttctgtctatcaaatcaatcaaataaatttagcacaaaatttctatttcatccgattttatagaaattacacttaaaccacgatttcttaaccgaattcttttggcaacaacagtaataattattaccccgatcactaaagaaacagtgaaaatacaacaaaggaagctgcaacattcagaaaaatgattgttttagagaatgaactacttcactaagatcactcaagcatctacgtcttgaagattaacaaatctggcccatgtaatgaatactcaaaaaacttcattacctgtcactgtttagcttagagagacgagattcgatgtcttctgattccgcaactacgtttaatgagctcttcgattccaatgcttgttcatgatcctttgagttattggctgaggaagaagaggccgaaggtgctgaccagttcctcgaagtaaatgagacggtaagtgaggctgcatcgacaactaccggggtaaacgagccgattccaagcgtatatggtgagaaatccggcaatggtaagttcccgcttaagtaaagtaccacttgtcccattgctggtctagattcaggcacaatgtttgtacatagcagcccgagtttcataaccaactcgacttcctcgggtacaaattcttctcccaatcttggatctttagcatcaagcaaagaatctttcttccagcattcacaaacccatttgatcagaaatcgtttctcaacttgcacaccgaattccacgggtttcctcccacaagctacttcaagcaagaacacaccaaacgcataaacatcggttacagtggaagctcccattgttattaactcaggtgccatgtaccctacagtgccaaccgctgccgttgtggctgcattgcctccatggtcatgaaacctagccataccaaaatctcctaacctaccgttcaactcagcatctaacataacgttggaagctttgatatctcggtgcagaacaacttgttcagcttctgtatggaggtagaagagagctgaggctatacccttgagaatcacaaatctttgggaccaagaaagaaccggactttgatcatcaaacaagtgttggtcaagactaccattaggcatgtactcggaaaccagtaaaagctcgccttttctcctgcaatacccgagaagtggaacgagattcctgtgtttcagacttttcatgctcacgacttcagccacaaattgcttcatcccttgttcgccatcatgggacactctcttcacagctacagttttgttcaaagggagatctcctctgtacacttctccaaaacctcctcttccaagaaatctatccttgtggaaacctttagttgctatgtataaggatttgtaagagaaccggtgtgtaccatatttcttttcccatggttcacttacttctgcatacttcttcttcctgtggtaataaactcctgcaagaacagccattcctacgatagcaagtataacgggcagagcgataatcagcgcaaattgtactttcttatgctcagctctaggccgtggaacttgaggaagttttgagaagtcaagtaactgagataattctctgtttgtgctgaaactccacccaagaagataatggtaactgattgatgtccctgttgctgcagcgaagccaacaaacaatcttctactcgagaagatttctgagagattcatggatcgtgacaaaagaggcaaacttggcttctcagcttcaagaggcgccacagaaacattaagtacatttccatggtaatcaacccagacctgtataggttttccacttgagaggtttatgctcacattcttctgtgctgtcttggaaaagtaagaagccggtgctgattcgactgaaatgggattgttcacatcaatcccaacgtgattattctctgtctgcggaaactctggattcctatcagtgtcgcgctcaacagcaaacaggtaagcagagggaggtccatttgttgatgcgttgaatatccccatgtgccgagttggttgcgcccgtgtccaatccccagtaggagatgtgtcgagagtaatgccgtggccgccttcaaagcccggcttaggccccagagcacagtctgaatgtgttgagaatgagagtggtttagaggagctgaacacgattggcttcttgatgagagcatgacccatttgatgctgggagtcttttgctggctgtagtaagccattggcnagcaatgtagccgncccgtcc

SEQ ID NO: 26241 - DNA, 1576 bp, Arabidopsis thaliana landsberg
  unsure (1)..(1576): unsure at all n locations
gcaaaagaaatccctttcttctgtaaacccttctccaaataattttacataatcttgaaaaaaggcagtactttaaagactacgagttccccaaaaaaaaaaaaacccaacagaaaaactaaactcaacttctcctccagcttttcttcatcaatcctgatttgccttgatgtatagtataactctcattgaatctgacagttccatgaactcgagagaaagaagagaaagaaattctcattggttaaacagatgagaagaaaaccaactactttcaagccaccacagtgttctctcctcttctatcaagagaagacgactctgcaacactttctcccatctctgtttcatcttcttcctctctgttcgcgttttcttcaccgctcacatcactaaagccctttgctgcatcatcatcttcaacctttgattctttatcttctttcttcacatcatagctctcagttggctcctcgccatcaaactcttcttgtaacttactctcctcaacaaacttgtctgtgtcgtctagcaatgacccttcaatcttgtgtatgtcttgagtctcaggcaattgagggatggtgtcgcaaagctccatatcatcaactttggtgacagcatcatacatatgtgttccatcgtaaaccgagtttgtatgactaagcggtaaatgcatctgaccaacctcaaccaaaggtccaaactgggattcatcttcactacctccataatcttccattggatcaataccttttcttctctttcccatccccttccttctcaccctttctttaccgcgcattcttttcccaagttcaatctgctgctggctttctggtgtagccgttaccccaacttgatctctcaagcaatcttgcgcaaggcctataatccgtgaaatcatgttgcctctttcaaggtccaaatcatgtatttgaaaattctcagctaactccaatatatccctcacatttgaaatctgcaataacaaggaggataaagtaataaggtcatacctacatacatactgtcacaatgacctgagggtcaaaaaatttgttcttagctattaccgttctttgaaactcgcttgagagagagatgggccttcctacaatttttcgggtaattcccagataccacctcatgtagtctgcttcgtcaacaccttggacatcgtcaggtacaatgttttcccacctcatttcccattcgcttaactctgattccattttattcgacaggtcaacccctccatcaactccccgagactttcttacccacctttgcacatctgctgggatgtcttgaaacaagtcaaattgtttgcgacagcgatcaggcagatgtctctccgccttgtcaaaagatatcagcattgttttcgatctacccagcnnnnnnnnnnnnnnnnnncggtctgacatatctcctccattcatattttcatacggaagccacaccacctaattcccaaggtatatcagcaacattagatcaacagaagtatacacacagaagagtagctgatgaatatgaaagataaacaaacttacatcagttggctttatga

SEQ ID NO: 26242 - DNA, 984 bp, Arabidopsis thaliana landsberg
ttttggttgtcacaaaatgggctttctaccttatataccaagcttcaagacaagacatccaaatgttatttccttaatatttttttccacctcacagcgtgaagagttatacaagaagaaacctcataaggttctcttacacatcagagctaattcatctggtctctttctcaatgactttagggaaaaataagagaaaccaaatggtctaagatatttaccttccatattatagctgtacaatcgcttgatgcagtggccagatatttgccactattagagaattgcacaaaccacacttcatttttgtgtgccaccaaaatctgtaagataataagagattgagaaactataagaaccactaacgagtttatgaaaatgaaaaccaatggttccctaaggcagaaaacagcacctggactgtctctgaaggaatttggtctctaccgcaacagtgatccttgtaaagcgatactgcatcccatgagttatgatacatacacgtatcaatctggtccatcacagcagtctcaaccaaatgttccaaccttctctcaggaataacaattggcaagggaatcaacttctccagttcaaccaacaactttctcctcaaatctagaactaaacagttgtctacttcaccggattccatctctttcgaataaacaatatcacaagcaagcctatgaatcttctcttttcccatccgtaacaacggagcttgcttccgtaacacattcaaggccaaagaaacatccccacgtttcaaatactccaacaaacattgcttgaacactagatataaagccgtgttcctcgtatcatccatggaattatcaaaaattctgtgtagaacctgtacgcaactatcccagttcccactcaaaacttgcttttcaagaaacacagaatcagctgttttatacaagatctttgactcgaattccagacaagaagcagagttcttgaatcctaacgagt

SEQ ID NO: 26243 - DNA, 1724 bp, Arabidopsis thaliana landsberg
  unsure (1)..(1724): unsure at all n locations
acaaaggccccaatccattccttagcatcacaacttgttacttctatcttttgaaggatacattcacttggtggttttggtaaatatgattgtttctttacttccgaataagcaatatataaaagtatctaaaaacggaagtaacttttgatgatcctaaaggttttgtaattgatacatgtccaaaaacctcttaatattctttctcacaaactgttgatggagttaacaaagggagacaaggtaattgggacaatatcaacgttagatacaggacaagtgaaaaatgtggggttgatgtcttcagctgcagcatatcaccgttggtatatattgtcaattattagtcctatggatttgaaacgtgttttagtaaataagagtgtccaagtgggacatttccaataacgtatcacagctcctagagcttttgctattttttctctaggcctgggccgcctagcccacattccaagcaaggaaatgaatggagttgggcatcaaaattttggaagcatttttaagacaaattatcttttaagtttccttttttaaacataaactatattttaggcttttttaagataaatattatttgggtttcctttcactcatatttttggatttcaacttaacaaaacatagggcgtgtctatttgactccacctgcccaccctactggagttcgatcccactaaatcgcgttatcccgcgtagtaaagattgactatagatcgaattttctcgattcaaagatgtcaaaaaaaacataaacaaatatatactaacatttttatcaaatattagaaaattcagtcctatgaactcattatgtttctttatttttttaaattatttgcaaacaacacattacaatgcaacaataaaacatactttcagatttcaatccaaaatgttaagtaacatatacaaaaaccaaaacatatattgcttgtacacgtaccactaccttctcaagttttgcaatctctataataataacataaacatacattatcgttagacacttgagagatgtgagggagagtgcagttttgtaatgggccgatttacgacaaaataagcgaaatataaggccctgagtatataaatattactgtttagcggtaaaccctgtctgtgaacgctaacgttaaccaagtaggcttagattagtctaacctacgcccttttgtttctttggctccagaggaacaagagtgaagacggtgaagttccacagcttcttcgtcaactccaataaaccataaacgctaattccaacttaccgtgctcaaagttcgatcctttgaatctaaatcaggtatagaattttgtttaatcgacctctttattcgagctcttagcttttgtctttgttgttttgatcgaattgaagaaactgggtaacaatttcaaaacccagatccttaaacttcattaaattgaccaatccaacttgatttcagattctaaaacatgattcttaaaaccaatcctctacatgcttgcttagtgtatgaacttgaattgataacaaatttatcagtcaagtatctgaatttagctaagaccttctcttttttggatgttctgatttcattatctgatggacttaggtatgtggagctttgatttttgagtgaaacaaanacaattatggaaagtcttggaggtattggattcagtcataccagtagtgcaacaaagaagaagagaagcac

SEQ ID NO: 26244 - DNA, 1331 bp, Arabidopsis thaliana landsberg
  unsure (1)..(1331): unsure at all n locations
aattggaaccaaacaatgctgttccttatgttcagttatctttcatgttttctgcagcgggaagacaagacgaagctgggaatgttcgtagattgatgaaatctcgtaatataagcaaagaacctggttgcagtttgcgttgaagagaaaggtaaagttcatagctttatgtctgaagatagaagacatccgagaatggttgagatatattccaaggttgatgaaatgatgcttttgatcaaagaggctggttatttcgcggatatgagttttgctctccatgacttanataaggaagggaaggagctaggtttggcttaccataatgagaaattagctgttgcgtttggtctacttgttgtaccatctggagctccaatccggatcatcaagaaccttcgcgtctgtggggattgccacagtgcaatgaagtatatatcaagagtatatcttcggcatatcatcttaagagattctaactgctttcatacttttttgatggaaagtgttcttgcggagactagggggaacatttgcaatagaaggaaaactcggaaaattctgcatttctgtctgcaacaatgaaagctacaaagttacaaacttacaattatacactttcaaactgctagtcgatgtggttgcagaggtcagtgagggttcataaccagcacaatgctatacttgtgaacaagaaactctcaaaataaaaaaagatttatatatcaacatctgcgtagagaagcagccattaacccaaatggtcatttccttgcatgctcaggtattaagcgatgacgcagttcaacagatgccccagcaagttctgcaagaagagaaagataagcattttccggttgggaggtaagttataaaagaagcaaagtgtagttgccaaaaccttgagctgtgaaatcaaacaatggaggaagtgctcttccattaggcaaggatgctctcgggtctctcagatcatcgaagaatgggtgtgcacatgcttcaagctgaaagcagagtcaaattaaaggaattgaagcagcaattttaatagtcagaaatcaactgtttttttttctctcttaccgctgtgcatctcaggtttggtgaatactggagcaatctagaggcaagatccattgcttctggagatacctgtctccggaaaatctgaaaaatcatcggaagattttgagtgtgaaaagttgcagattcatttgtaagcaacatattatcaaaatctgtaaatcacttggttaaatttgttatgtataaaccttgtgccacggctgagctttgatctgagggaacttaaaatcattgtaacgaggatt

SEQ ID NO: 26245 - DNA, 726 bp, Arabidopsis thaliana landsberg
aacttatttacgaaagaactcaactttaacgtgacccactgcttctttgttggcaagattttataaacctctcgatatttactctgttcggcttctcacaaggtaacatcagtcctcttcaacagcctttttgctttcttagactcaaactaatttgatgttttatagatgtcaagcggtctttaggaaagtgtgatgacaagttctcatctcacttatattcaatgcctcaaacccaagataacaaaaggcaaaaactcgaaaccggcttcttgcgcaaggtgctgctctcaaacatcatctaaactcactgctctcaacacattttgttttggagctaatcttaaaaagctttttgaagtaggtttcacggctggaccaaactccttttttacataaagttccaaagaaggtaatgcaatttaagattaaacattcactgtatcatcatttttgtgtatcttacatttgtaatttttgtgtttgcaggggtccaaagtcactgttccaagagagcctaacctcaagactgcccaaagagctgcaagaaaccggtaaggactctctttgaatatattgttggttcctttaatggcttgtttataacaacttctttcttatgaatctctttcaggtttaaggctaactcagcacccgagcagattgcaaaattcatctctaatatgaataaaacagtgcgtgtgtgcctacttcattttttgtttc

SEQ ID NO: 26246 - DNA, 2116 bp, Arabidopsis thaliana landsberg
gaacattagctaatactcccagcaacaaaacccaccgttcctagccaaacttgatttttcgaatacatttctcgagttaaaacgatagaaaccttagaccattcttgtttcccggcatcttccaaaacccataaatcatacatgctcatactttttgcagcatgttaagctagtttcccttgatagttcacaagattagagtaaccaaagttcatatcataaacattactagccccgaccggtatttcaatgaaatcaccaaacttttcagtagccacgtagaatctaacaagcgtcagtccatgcgccgtctgagcaccgtaatacacaaccccatcgatgcatattcctctggttgagggagaaggaatattctcaacctcgatcatttgtccatgaaccttgaccttccaatgtaaacacttccaggttatagggagataataaatattgttttgagaaaaacaagaccttgtattgataattgataggatcatatcccatataccatttcctgaacttttgatgtggagcggattgaggcacgagtacacccttacgcgtggccggattgggtatacacagttgagacatgtattcgacacatatcaagccattgacacaatcaggcgtatgagaagaattatcggcgctgcatgtcgccttggtaaccaaagaaggttgggatgacgagaagaaatgccaacgacaagatgtgaatatatcacgtaaagcaaacatgacatgtggctgacgagtagaggatcgagattggtataagttgatgaaatatcgactgcggatgattgtggcccaaagcttgcacacacataggcatctagctaggggtttcacaggcaatcttaagagaatttcgaccaaaaggtcttcagaaatcatacttgataagaaaaaagtttagtatttttttatttttttttctgtttgataagatagataatctataaatcaagattctatcttatatatacaaatgcaatgggagagtaatttgcttagtcattaatatataagattgacttgactacattttttttaaaatgtatattaattaaattcgtatctaaatgattaagtcaatacaattaataaccgcgactagctttttgtatattactccctcggattcattttgtaagactagaaatgcgtggttttaatactacactatattattttgaaaaattattttatttacaatttctgtacttaaaaaatataaatggaaatgaataagtggataatcatctaaaattattttatatttgaaattttggttaaaataaaatatcgactgtcgatctggtgaaacaaagcttggactgtgttattgtgtagtccggttgttgcgctctatctctctccaaagaaacaaaaaacggtggcttggccttaataatccaagcaattaagcttgttgttcaaatttcaatcaccacctttctcaaaagagagtgttaagccttgacgaagtatgaatcgttaattcacaagagtaaagaattatatgcgtgtcaaagttttagttttttagaatgattaagctgtcttgatactcagaaaatcatcatatatataaacaagaagagtgagttcacaagtgtagatttttctggtcaaaaccaaagtgtagattattttgtttaagttggggacaaagagacggatgtcgtttcgggtataaacctataaattcttagaaacgagaacacaaaattgatagagagatctaaaaagaaccttatagactataatatcatttacaaagagaagttttatgaaaatccatttgatggaaggatataaaacattatcttgccttcaagtaaaatagagaagaaaacctgggaaaacaaattgccaacaaatgatgaagctcacaacaaaacttgtctgatgaaaagtcacatttccaagtaaactacctagactatgagttatataaacttgacatcttctgcatagtcaacaaaggtgtaaactctactactaagattcttctctgacccttcaaaaccttggatttcaactttttccagagtgtttctttcggggttgaagtagtaaacaagaaggattccgatgtataatccat

SEQ ID NO: 26247 - DNA, 1648 bp, Arabidopsis thaliana landsberg
caattgtttgactgctgcagtaattttagatttagcattcttaattatgtgcccctcatccaggatacagtagttccatgaaaattgcgtcagataatcaacatccttgcggaccacatcataagatgttataatgacattatggttgttgaactgttcacggagagaaacgcggtcttgagcagagccaacatattgcaacacgcttagcagagaaaggtcgatatacttctcaatttcaaatgcccaatgaccaactaatgttgaagggcaaacaattatagatggaaaaacatccagttcatctgttgaaccacgacgctctgctgcatcggatgccacaattgcagatgcttgaagagtcttaccaagccccatatcatcgcagagaattccatggagcttaaaacgctttaggaatcctaaccaattgattccttcttgttgatacctggaaacagaaaactgataaatattccacaataatatttcaaaagcaataaagttcccactcagttcaattcaacaatatagaaataaaaatatagattataaaatgcgtctaatccctatcaaccagggaccaggctaagtcaagaccaaatttcgtgaattcaaccctgctcaacccaacaatacgtggaatgtcctaccatttctcacgaaccatcccctcaattttgtttagatgcaaatgagaaaaccaaggaagaaagccagtgaagcgaccaaatcagaaagacaacacagaaaccatgagacactcagaacagagaagaaactttcatttaatctagactaaaataccttctcaattgaacttttagctcagtgcaaagcttgtaatcatcgatatgggagttgtcaagaagctgctccaaaaattttgcatcctctgcattgctagatagatctttgctcaacccgacgggagggggaacaccacgtgctaatggaagcataggtacaagggcagcaaagctacgtgttacgctctgcctgactgaactgtcaacatcgctcatgcatctcaggagagggaacaaccatagaggagaatatggaaccagttcaacacccagcccttgcacaagcaaaccaataagcattcctgcttccttgtctaccactaatgcatgttaaatctcccaacattggaatagcactttccactactgctgccatgacatctgttgtcattgatttagccattgtcataacacatctagaagcagccaatctaacagccacatgggaatggcgaacacatttgaaaatacaaggcagaagactgagcagtctaggtttcagtgtttcttccatcactggtgctattgaacgtaccacctggaaaacataaaatataaaagtacaccatgttaaggctctgcatattcaatattaagcttcatttttggcctatcctcaaactaaaccttcaaaaaacacaagctaaacacttcactgggtatacctggatgttgtttattaagacctgtggatccgaaatagattctattttaaggtcaatcttctgttgatctgaaggaatttcaggaacaagaacctcagtgaggcactcccataattttgggagtttgtcaaacaaggaaccaccaaatttcaagcttaaatgcttcaacctgag

SEQ ID NO: 26248 - DNA, 1683 bp, Arabidopsis thaliana landsberg
ttaagacggcatcattcgcaatgctgtagaaaactttctttccttcgtctacatttcccattagaccgtgcgcaagaataattctcgaaagcgttcccctgttcggcgtaatcccctgtgtcttcatttgattaaaaagagcaagagctggaccatagctaccatgtaaaacataacctccaatcagcgagttccaagttatgatgtctttcgtttccatacccaggaagatggttcttgagtattctatatcccctgacttagcataagtatctgttaaagcgtttttaacggcatgaatagcatcaagatttctccgcaatacgcaaccgtgtatctctcttaccatttttgccccaagaagattagcacacgctggtaagagacttagaatggtaactgaatttggcatgaagcgagaaaactgcatttttcgaaaaagttccaaggcctcgtctttttttccgttttgtatgtaacctgcaataattagattccatgttgcagtattccgctgaactattccattcttatccatcctctgaaataagtccatagcctcaccctcgtctccattcttaatatatcctgagatcattgtgttccatgtgataatatttggtcttaaatttgcatcttgcatcctcgtaaacaactcataagccttcccacaatagcctgcttggcaataccctgttatcattgagttccaagtatatacatccttattctttaccgaatcaaaaactttccttgcatcttccagttttccacactttgaatacatatcaaccagagaattgcccacaagcacatcatcgataaatcccatcttcacagcaatagaatgaacttctgagccctggtttataactttcaaacatgaacaagcagacacagcactcataatagtgactgcatttggcactacacccgctaaaaacatcttcctaaacatatctaatgcctgatatctcatcccattatgaatcaaacccgaaatcatagctgtccacgtaaacacatcagcagttataccaaaagtctccatcttctgcatcaaatccattgcagcatcacatttccctagctggttataacccccaatcagtatgttccaagtaactaacccaggagaaattccttccttttccatctctttaaccaattctacagcttcttcatgtttaccattttggcagtaagctaacagtactgagttccaagcaatcacatctctctccctcatacgtctaaaaaacttggtagcgaaatccaattcaccacatttcgcatacacagctaaaatcgagttactaacacgaagacacgaactcatcccgagttttataaccaccgaatgaatcaacttcccagcctcaacatctccacaattagcacatccctgtaatatcttaggaaacaagaaatcatcaggcaaaacaccatctttcatcatcaaacgaaagagcttcgccacctctctccaccgattcttcctcgagtgagcaccaatcatagcagaccatgtaaacagatttctctcacgcattgaatcaaacaccttacgtgcatcagcaatacacccacatgtagcatacatgctcaacagcttcgtctccacaaagacgtcaggttcagtaaacacaccaaaccgagcatgaaggatacgacccaaatgga

SEQ ID NO: 26249 - DNA, 774 bp, Arabidopsis thaliana landsberg
gactcaattacattggggaaacaaaattctacatgtgttatttaaacctattcttggattttgattaattcagcattaatgttgtcgtctctttaagatattagaaattggattaaacacttccatcgtcatattgtttgaaagcaacttgataatgatcacagacaaggatgattaaaaacacttacattatcacatatactaaattgatgttattataattaattatagaagggttgattaattaagagaaatggcgaaatcaggagtggggtggtaggtgggagaaagagagatcgagcacactgtggtagttggtgagtgtgtgggggagccttgtacttaggttttgccgacttctttagattccggttaagcttttggttttggttccggtttaagttagagatcttaaattagtgattatacaagagctctcatgtagtaatattattctatttgtggtccaagatatatggcataagatttaacgaaagtattgaatgttataatgtgttgcaagtagaagttttttacgcttttaattaatgttcttagtttataccctaaagttatgaagacatatagcagcctagccctcgatggctcgatcaatttttatcttatatttctcattgttcattgttattccgttatatttctagtatcgcgaaactggtttcaggtgacaaattgaaagtcaagtgatcaatgaagaaatatttggcttcaatatatgtattttctacgattttattttcttaagatgtagct

SEQ ID NO: 26250 - DNA, 2030 bp, Arabidopsis thaliana landsberg
tcatgtactcgtggtcactgaaaaactaaaatagtcatccgactatgtccctaaagttttttgctaaaatttctggttttataatttttagattaatgttagaaaaagagataaaggtgccttgtatcgacatgaaatatccaatttgaacaaactcgatacaagaactagaataactatcgggaaagcgtgtcttgaaaccacattaagagcgagaaagcgggtctcgaaaccacagctcgagtgaatcttaaaaccttgatagatgcctacgggcggatcaagtgttacggattccacggtttgattgttatgaacaaagtctctgctagagtccctaaagtccaaaattccgcattgtatatactatttatttagcttacattgcatcttagaaggttagctaaagaagcttggttgggaaatttggcctgaaagtgaagaggttaagtctttctagctaagcccaaagccatgtgtttttcaagctcagctaggatactagaagcgggaaagatgttgcaattgacattcatcagatcatggagatgatgtagtcgtctaaaaagactacaccatctcatgacattcattagatcatttggtttatcctaccacaacattacctgatcaagatttggcattgctttaattaggaagtgtttgacgtgctcgatctgctcctttatgtcttcattgtcatcacaaatttcttcaaacttaaatatcttaaggaccttcaccggacttgataatagagattaacgaactttgtgatgacaacgaagacacggctgatcaaatcaagtaggtcaaccactttctaaagacaatgccgaatcttgaacaattgatgttgtgctacgatagcaccaaatcatttgatgataccattagaaattacttttattcacccacaattctgtatttggaaaagatgagacaattaaatatgcaaaattaggttttgaatcttatagtcattcttaaactcatgaaaggcctcctttagtcgagatgacaaaattgtttttggaagaaacaaacggttttgcaaaacttgaaacatgaaaaattaaacactaatttagtaaagtttgttattttagtgttcagaagaaaatctaaaattttaaaattatatgtttagtgtctttatatgtttagtgacactaaacatataattgtaaaaaattggatttccttctgaaaactaaaattaaaacatttactaaaatatgttctattttacatataagatataatatagcttctagctagatagatttttaatttttaaagttattttaaacttttgtgactttacagggtgatattttaactttttattttgttttagcatcttcttttccattgatattatgaaccagagttgtctagctataaggctgaggaaattacaatcggaacgtaagaataaaatttaaattgttcattctggagtaagcgacccttggcaagaatatccgtcggtttgttctgttttcgattgacccatgtgaatctgcactcctgaaatcgtttcttcgaagcttgaacatccctaatccaattgaaaatatcaaaacgggattttctcttattttagttttacaattatattttaattttttaatattgtttgactactaaaaaagctacatgtatatatttggtgttgagactgttccttaaataagggtttttggagtccctctctcctctgtccctcactttttaattatttttctttatttttattataagggactcacaatagataccaccattgctgctactctaattcctaccagtggatctcatgtcttctcgaatatatggacacaccactgttgggcggtcgcgtcacgttctaagaagttttaaagatttgttattggccctacaaattattcaggaaggtcacctatcctgaaattattccatccaaacactcttaactgtggggatctctaaagatctttgaccgaattttggtgacttaggtgaccaaatcatgttttttcaca

SEQ ID NO: 26251 - DNA, 1176 bp, Arabidopsis thaliana landsberg
  unsure (1)..(1176): unsure at all n locations
ctatagttttattttgatgtagtattcattattgatgtttggaaattggagtgattgcaaagatggggagtgtcgattcattgaccaatttggaagaaattattctagcatcagatggagccatggttgcaagaggagatctgggagctcagatacctcttgagcaagttccagcagctcaacagagaatcgtgcaagtctgcagagcgctgaacaaacccgtcattgtcgcttctcagctacttgagtccatgattgagtacccaactccaaccagagcagaagtagccgacgtgtctgaagcagtaagacaaagatcagatgcattgatgctctctggagaatcagctatgggacaattcccagacaaggcgctcacggttctaaggacagtcagtttaagaatcgagagatggtggagagaagagaaacgtcatgagtctgtgccgcttcaagccataggctcttcattttcagacaaaatctcagaagagatctgtaactcagctgctaaaatgggtaaatttaggttctttgttttccatagaaggcaatatgtctttagtgtctcattttactatccaaaaacttgcagctaacaatcttggagtggacgcggttttcgtttacacaacgagcggacacatggcatcgctggtctcccgatgtcgcccggactgcccgatctttgctttcacaaccacaacctcagtgagaagacgcttaaacctacaatggggacttatcccattccgtctcagcttctcagacgacatggaaagcaacttgaacaaaacattctcgttactgaaatcaagaggtatgatcaaatctggtgacctcgtgatcgcagtctcggacatgctgcaatcaatccaggtaatgaacgtcccgtaattctctctctttatacaatttcgcaatcccgcaaaagagtgttttgtttcctacttttgttactgtttttagactactcttacattagattccagaggcatcatcatcttcggtttgttaacaacagtaatgtgtaagctttgtttgtagtgagtacctgttgtttttggttttcaataatatcagtaatcttattcaaatattcgattctatcatttagtccttttggtttatcttttttgttagggatatnatatgtaacacccccaaatagggatg

SEQ ID NO: 26252 - DNA, 3036 bp, Arabidopsis thaliana landsberg
aaattttccgaatcaggacttgaaaaaaatatcagaaacgaaagaaggcttagcatatgcctgataggagtgatggacttaattatgacagaaataaatgagcccagcaaacaagtttaaagagatcagtagtcttagagagtatatgtgaaaagggaattgcataacatatttatgcataaatttttgaattttcatggattagcaaaaaagaagcaggcaaacagctatatcctacctctttcacgttgttgtaactattccattgtaacaggtggagaagaaatgccctttcagacttttccagctgttcattacaagcagcctgcaaaaggcatagatattgttattctttcaaacgataagaccacgtcatgctaagacacaaaacatgttggcttaaatcaatctaatacacggaaactcaacattctcaaataccatgcaacttggagaaacaaatggtctgatactatctaccaagcttaacacttaaatatgcttacgaaaaccaaattatatcagtacctacgatttttttccaggattaaaaacacacttattacgacgttaggagacaatcaaccagaattgggattctcaacaaaactgagaaagtaaagaaatttgcatttgtacaatgtattagaggcacaatgaagggtgcttacacttatcatttcagataaaaacgggttgaaagatggcttctgtgaagaataacactggtatatgataccaaatgcaattagacgttcagtattcttaaacatctgctgatcctgaaatggaaaaaaacttcattcaattagttccgcaaagaaattagaaatggttatcaaatgtaaacacgcctcaaaagtatttgttatcatcactttcgaattgtcccctgtgtatacaatcagtagaagaacactcttaacactagatttcatcaacgaattcaatatacagcacagaagagaccatttcagcagacacgaaaccaaacctcgaaagaaaaccctagattcaaatcaaatcatttcgagtgaaacaatccaaaaacccctaaaactcgctactctcccacacaaacacgaagccaagcatcgagagaaagttcaaaaaagagtaagaagaggaacaaagcatgcctgcaacatcatggaaagagaattgcagacactgaggtaacgagcgctttcgaacttagagtcgaattccgataaaacgtcttccatcggccggagatccgatttgagcagagacaaaacaatcgccgactcttcaatcctcataatcatcatcgttgatcgattcatccctaaacctggattcccaaattcaattcccaatctatctctctgtagggattttgttttcaaagtttcatgctctgaaatagaccttatacctctttctcagtgagaaggttcgagtctttttgggaaggctacttttggtaatttgacttttcctcacagctttattaactttgtaaaggtttttaagagttttgtaaacttagtaatatctatgtttttggaaatatattcaaaggattaaatcaaaatgaatatatttagttaatataatagggagtttgacaaatattaaatctgaaaaaatcagaaagtaaataacaagaaatatatacatttttagattttaagatttgataatttaaactagatttaaaattaactattttagactacttttattattacgtatttatgatttttgtcatattttttaaagacttttgtcgtttctaaaaatgattacgtgttttataagattttatgcaaaataacattaatgtcttttcattgatatatccgtcacacaatatatttaatataaataaattatgtcatatttaaagtcactttaaatttggtaaaactaatatctttattttggaaactatattgatatatgtatgtgtcttatgaataaattttagtttctcaaagttagtattaactaatatgatctagtacttgtcaattaattgattggattgtgacacgggttacactttaacaactatttaataaacccactttaagaatatttttttttttgctattattaaccaaatttcttttaatcattgctatatatttacttacctgtttttcattctatgtcattgggtgcaaaatgcaaatactctataagtaaatcaaatcaaaacaagtttatccaattaaaattttaagaaagaacaagttaaattgagactgagttatcttatttcatactcttgtactcggtagtcgatacatatatcttgcgagtgaaataaacaaaaccgagtttcccacttcaacgtgtgtggctcatagggcaagagcagagctaagattcatggggtgcatatacttggtggtaccggtcaggatctgattaacgatgatcctattggctttctctgtcggatgaaacgcatcccaaaacgcatataagtctctattcggacacaaattcgagactggtgtgcatagtcctatgccattgtacggtccttgtccacaacatgccaccttcgatgtcacaaaccctacaaatacaccacacaaaattatcaatatttaaaattttaacacttgtcgaatatattatatccacaatccaagcatatgctttcaattattagctatatagctataatctgttatgaacattttcgagagagatcaatcatgaaaaaaaattaccccattcaaattgaactatttaaagaccagacagttcttcttgttgaaacaatgaaataatactgataatgtatagaaaccgacacatacttattaattacttatatcattaatacaatgtttttaatggaaaagtttgaaaaaacaatattgtgtataaatgctataacatctatgaaaagatggtcctacaaagtggtcgtgctcatttataagttttcgtacaacactacaactatatataataactccaaaaaattggtccttttatgcttatcattaagactttttggaccaaattttgactgaagtgttattttttttc

SEQ ID NO: 26253 - DNA, 1712 bp, Arabidopsis thaliana landsberg
tattagccgtccacccacccacccatcaaaaattaaaaataaaaattaaaaagacaaaataaaaactctcttccccttcttaagaagaagccatcttggtttcatttcgtcccataatcttccaaacttcaccagaagaaattcttaacaaacaattttcttcataatattaattctcaagatcttaaagattatattaatacgaagagaaaattcaaatgggtcttgatgattcatgcaacacaggtcttgttcttggtttaggcctctcaccaacgcctaataattacaatcatgccatcaagaaatcttcctccactgtggaccatcgtttcatcaggctcgatccgtcgttgactctaagcctatccggtgagagctacaagatcaagactggtgccggcgccggggaccaaatttgccggcagacctcgtcccacagcggcatctcatctttctcgagcggaagggtaaagagagaaagagaaatctccggcggcgatggagaagaagaggcggagagacgacggagagagtggtgtgttcgagagtgagtgatgatcatgacgatgaagaaggtgttagtgctcgtaaaaagcttagactcactaaacaacaatctgctcttctcgaagataacttcaaacttcatagcacccttaatcccgtatgatatagttaattatttccttaattaaattaatcagcctcttcttatttacgttaatcatatcgttaattaatttttctatgaatttacagaagcaaaaacaagctcttgcgagacagctgaatctaaggcctagacaagttgaagtgtggttccaaaacaggagagctaggtaaatttaattgaataattttgtgaattttaatatcatacttttctttctttattttggttcataaatatatattttttaattaaatttgaatttgaacagaacaaaactaaagcaaacagaagtggattgtgagtttttgaagaaagtgttgtgagactttaacggatgagaatagaaggcttcaaaaagagcttcaagaccttaaggctttaaaattgtctcaaccgttttacatgcacatgcctgcatcgactctacgaagggttccttcttgtaaaaaaatagacggcggcggcgggggtaatgaagtagaaggtggcggcagcggggctaccgcggtgattgtagatggaagtacggccaaagaagctttctctatctcctcagagcctcacttcttcaacccttttactaacccatctgcagcttgttgaatagtagtaattcgtttaattttattacttaaaatattaattttcttttttttttgggtggcattttaactagtaggaagaacacaaaaactatgttagaaagggtaagatgcgtatagatggtctcttgtacaattcccactttgtttttcagtgggattgctggtttgagaaaaagaatagtttgtaattattattttatttgtagaaaaaggtaaaatagtcttcactttaatttatacatcttattttctcaccttcaattttagtcaagtaaatcatgtttgtaataaatgaaaaactatttaacaatataattatacatgggaatttttcatgcatactaatgatcagccgatgattactttcatcattttgtgtttagatcttaaggggctgtattgttcataaaaaaatatgaagagtgaaatat

SEQ ID NO: 26254 - DNA, 1032 bp, Arabidopsis thaliana landsberg
atcattgaatcatcaagaaaaggagagtaaacagttcattaaagcaaaaaaatccaaatatatggaatcctaagcctcatattaataaggagtggtcacaatcataaaagatgtagtaataatgaattggtgggtctactacttactcatagggcaaagaagtatttaaaagttgaaaaaggtatgaacattaaaaacttaagaatatgcagataagttatatcaaaaaggcaagagatgttaaacgttttcacctgttagccaaagaatctgtagattgattattggtatgatgttgtgttccaacagcagcggcaaggctattgttattatctgatccacgcatcgcaacagctgaagtccccgctgccgctttggacacagcagcagcggtagaagcggcagcagcagaagcagcggcggcagcattagtattgtggccattttggccttccacaggctttcttgaacgatggcggcctctgttaatatgtcgttcacagtacttttgatcgggaacagcgtccctcgagcaccgccatttctttccatctgtccggcgacatctccctggctcgggatccatgttaccaccggaaaagcccagatgaaaagagccccatccaacttcataatcacacaaaacaaaaaaatctctcaagatctcataaaaacaccattcccctaacaaagcaagaatctttaataaacccaccaccaatccatacaagattcaatgttccaaaggactatacactaaaaaagatagtataaagttaattcttggctaatgtattggagataaaaggaatcaaaactattgatcaataatctcaaatctttgaaaacaaaagataaggaagagaacttacaagaattaggaggcaaggaaccataagggaaaaaaggtttcttgagatagagaagtaccctagatggaacagggacattggctgagaatagctgatagataaaagcctgttgctctagctctgcccactgagtcgatgaagaaggtcacttttctcccgt

SEQ ID NO: 26255 - DNA, 760 bp, Arabidopsis thaliana landsberg
agctattggctgcacagtggtcaacattggaacacaggacatagctgaaggaagagtgagtaattacaatgaaaacatatatctattgttcctctgtttgcttgatttatcaattttaattggtcctcctccttcttcttattttcttgcagccatatctcgtacttgggttgatatctcagattataaaggtaccacctttaagctttttcattgatagtttataggaatttatatgatggtttcattttgtttaatgttgacttgttaaaaaacttactaactcctgacaaatttggtgttcttggtgcaaaatatcagatccaaatgttggctgatctcaattttaagaaaactccttcgctttttcaactggtggacgacactcaggtaaatatatttgagttgttcagcgctttccatgaagatttgttttcatgatattgaaacattacaaaatgttcttgacgacgcaggatgcagaggagctcatgggattggctcctgaaaaagttttgctaaaatggatgaatttccatctgaagaaagctggttatgaaaagcaggttacgaatttttcttctgatttgaaggtaacttgcccctgctactctttctcctcaataacatatatctcatataatagacgtttctcatgagttacgactttataccagtcttgacagtgatacattctccttatgttaggtatctggttatgatttgtttagcaactaagaatgttatgaagtccaatttc

SEQ ID NO: 26256 - DNA, 1898 bp, Arabidopsis thaliana landsberg
acgcataaatgtatgctaggttcaatgattctaaataaattggcagtacgtacatgtgtagccaatataaaagaacataaagcgaaatatctctatcaatacaaaagtgagaaggttgatattaataaattcataagaattccaagtggaagtaaagtttggagtacgactccacaaggtaagggacacacaaaagaatgagagacaaaggtctactatagaaagcttacgatcatatgatatgtccaaatcatctcatgtgggagcaaacctttctcataataaaaaaatgggtttattcattgtttctatttttaaattggattactttatcgtgtgtttatgtactataaacctcatactaattacggtgtttaattagtctttagagtcctcgtcgatgactagactgtatatatttattgttttttttggatacaattagcccctactcttaatatactataaacataaaatatataaaattcaagagattgaataatagaataaattaccaagagaattatgagtaaacaaaacttagttgggccggggattagccatcgtaagtgtttggtaaatattattttcaaagtagaagaaaagaccaaataaaaaaaatagaaagaaagagaaatgaccaaacacatatcatcatgggtaaccatcataattccattttctcctaaaatttatattattttttcgatattttattcattgtcttagagcttgtttcctcgtaactcttatgaatttaggtaaggttgggtaggaaaagtaacagaatgtgtaaattagaagctttcggcgtaaaatgccaattttcaaataaaaaaagtgttataaagaaaagaaaaacaactagaagcaatgatcagtaccataatcttgtcacgtttagtctcgatccattgcaagtattatattttcttttataagtaccaccatcttaacattaaaccaaacaacaatcaatatagtaccaaagaaaactacaatctcatgatcattgataccgaagatggaaggattccggttcaaatttcatcacggtttattccggttaaaccggttttgcttactcaatttatatgtttttttttctttgttgtagagcaaaaaaggcctagagagagatttttggggttttttttattattcggattagagagaaaaataaaaagacccttttaatatcaaaattaggtggcgcgaaaataacgccctctctctctcactctttcctttttttctctctctttgatctcctcgaacccatcatcttaaatcgcccgatcaattctatctccggcggtctagcatttttcatcgccggcgaaacattttttaccaattctccagcttggctaatcaactccgatcacgttccgtattcccaaattcgatctcgaagggggacatagagaagtctttcgcgaaggagaatcacgagactttgattacttttggcactcttatgttttcttactggtatgattctctatctcccaacctcagattcattggatctctgattttaagcttctacatttggtttcatcaatcccaattttgattctaattcaaaatcagaagaaccctagattttttttctgggtaataataaatgcgatctgacgttcatgagttagatcattgatagaaactatgaatgaatctcatttcgtttataatttgtgaggattttgcaatttcatggaaaaattactaaatttgattggataaaaagagtctgtgtcattgagagacacaagtcgtggtgtcagtaactgacaaaatttccgttttggattcttcgtcagaaccatctcattcactttgaagaaacataataaggtttgtgtttttttcattaccagattttcttctttcat

SEQ ID NO: 26257 - DNA, 2602 bp, Arabidopsis thaliana landsberg
ctcctgctagcctaacgttcgtgaaatgttcccttaatgactcaagacccttataaaaaaaacagctttttattattccagcgtgactaaacaagagattcatgaagatctttcttgtttttctttacctggatacgagcataagtgacctcacagatctttctagtggtggtgaaatctctccaatgttgattgtgaaagctcttgtaaagtctccacactgcttctggtgatgtcatgttcacaaacccatatcccacattgcttttgttgctaacaaaacaccaaatttaattagcacactcatcactaatatactattaatcacatagaaaacgggtaatcaactaattacctgaaatcaatggggaggtagacaaagtcataagaagacataggagttttgttcccttctttgattacactttggttacaatctttacaatgtgtgtccaacatcttcaaaagcagcttctgtctgtaaatagaaacaatactataaaattgactagtcgatatttgttaatctccatgggaccagaatatacacaaaaatagtaaacatatgaatacaaatagcttgttctcattactattatccattaggtcttgttgactttttgcaaacccaaaaatcataaaacagaacaaaagcaattcctcgttttaggacaatatcggactaacaagagaatcaagaagcacatgcctatcacaatcactaagctataatgaaaaagatgcatgctttttttttacttacgtgtacttgttagggatgttcttgatcatcacggtggttcttccgtctctgaactctccgccggtgatagcgttttcgtttatcatgaaataaggatcaccaagattcttctttacatacttcttcttcttcttcttcttctgttgttgcttgtacattagaatatccgacttcaccattcgtgatggtggtggtggcggtggataataatggtgttcgttgttaaagatgaagtttttatggaagtgtgaagcgaagaagagtttcttggttaaaccaccgggacgactaaactggataaccattggtttaccggagataacttttccgttcattacacggagagcttttgcagcgtctctaacgtcaaaaaactccacaaatctttgttctctcttacacggcgtctctctcacctgcttcacttctcctacaatgattttcgtaacactaattagcataaagtttgcaactttatttgtttatctcgttaaaaattgaaactttaccataaacttggaaaatgtgacggagagttgaggaagagacggtgggttctaagttcataatgacaagagagccttgattgttccttcaggaacagcattgagttgaggaacacgaaatgggcccaaagagaatgtccggagacgagtccacgcgccgtcgtgaagtggaaatgttgttgttgttcctgttgttgcatgtgacggtaacgtatctcgttaaaagctctttgtgagtttattagattgtagaaatggaaaatcacgattccttcatgtgctctttccatttggactccacggacttcaccgaatagttccatgtctcgtcttagagatgtctcagtgacggtagctgggacttgtaataacatcacggctctggttggtgttactgaagtcggtggaagatgaggaggaggaggaggaggaggagggagagagaaataagaaaagtatagcggcggcggcggaggaggaggaggagggggaagagggaggaagaatcttgtcggaataaaggaggggttttggttttggtgttggtttatcgccggaaagaacgccggtgctgttgggttaaggtttgttgggtgactgaatggtccggtgacagacattgttggtttagagggagaggtgatgagttgggaactggtttttccggtgacaggtaatgactatggacgtttgatattcttcagtgatcgtactatttcgtctctctctacctctttatttggtgcaaaggagggagagggagagagcacaaaagtggaattttttgttggttttgtttttattctgcagagatttctattattatttcccaatttttgtttaccaacaaaacaagtcaaggttctttaatttaatggtgtactaactcgttcgagaaattgaccattttgtccttttgagagggtttcattgcaatggactgatggagaatgcagagtattgatgaccattcaaacataggttacataacaaagtctcattcatttttctatgttgatttagtttttaagataatcgaatcaggtttttctctaaaacattatttacgaaagaatttttcttgtttaaaataaatgtaatagttagattttatgcctaggaacacaattttcgattagttgggtaccattatccatgtatcatactatatagaatttgtatttgggtgcaatagttcgtaatgtcgtgttccccaatttcaccgcaaaagtgcatgggccgatttgtcgtgtctctctccatctcaatgcaaagtgtaaactatctaagcctatacatttctaaataatctgtagaattgttatgttccata

SEQ ID NO: 26258 - DNA, 1211 bp, Arabidopsis thaliana landsberg
tatattacaagacatgaccataaaaatattgcaggagcatacagaaaggtatgtacggtttatactcgacaaaatgaaggaggaaagattgtgggcgtgacaaggaggccccattatattaggacaggtgacaacaaagaaaagagaaacctatatatttatatatgatttgaaaaatgttataaaatgatgagttttggaatgaatatgaattgcagatagaaaacgaatatagcgcggttcaacgtgcatataaacaagacgggttaaactacattaaatgggcatctaatttggtggactcaatgaaactcgggatcccatgggttatgtgcaagcagaacgacgctcctgatcctatggtaaagttcatttttacatgattgtgttttatccgaatgaggaagaaagttttaaaatatttgaaaacactgtggaaacagatcaatgcttgtaatggaagacattgtggtgatactttccccggtccaaacagagaaaacaaaccatctttatggactgagaattggactactcagtgagtttggttttcttactcttgaattaaacatgtaaaaaccttaggttcattcatataagtgttgaatatcttgccaatttcttcaataggttccgcgtgtttggtgatccgccaactcaaagatcagtagaagatatcgcgtattcagttgctcgattcttctccaagaacggaacccatgtcaactactacatggtaaaaattatgatccattcgagttaaccatatatgcaaaaatgattgtcaaaattctcaaaatggttctttaatcttgtagtaccacggagggactaactttggaagaacctctgcacattatgtgaccactagatactacgatgatgcacctcttgatgaatatggtttagagaaagagcctaagtatggtcatcttaagcatcttcacaacgctcttaacctctgcaagaagccacttctttggggtcagcctaaaaccgagaaacctggaaaagatacagaggtattagcatatatgcatgtacacatacaaacagactctgatttgttttttcaaaatgcttaaaggattcaactttttggtgtgtaataacagattagatactacgaacaacctggaaccaaaacttgggctgctttcttggttaacaacaatacttgaagctgcagaaaccatcaaattcaaaggcag

SEQ ID NO: 26259 - DNA, 1240 bp, Arabidopsis thaliana landsberg
  unsure (1)..(1240): unsure at all n locations
gtcattgttctgaagaacgacttccatgaatccacgataagtaccattgataatcgaagtcgccactttagctggtccagttaaaggtctcttagggaaatcaagcttatacacatctttaactttaagcttatcagctagtctaataggtgttgaaggattcttgaacgatatgccattaagcgttgttcttctcttcccactaatcgtcacaggcggcatgttccttagaacgtagacatcggttacattgatcgaaccgtatttaaatgatccttgcgggttaggacgtgcaccacttnnnnnnnnnnnnnnnnnnnnnnnnnnnnnnnnnnnncaaaggtcaaaacttgatgaaactacaaggaaaaagaattcgctttttcggataaccaacctgatggatcttgcttgattcatggagaaagttttgtcgaattcgtcttgtggtccagggggtaactgacctttagcttttcctttagagttggtatacttcaagattccaactccagtgactcttctccatatggtttcgttaacaacccgagcactcgcgacaatgtagtaatcagagctcgcgttttgatccattgtaaccaagaaagaataagactgtccaacatgaatatccaagcttgtatagttttgttgaactgtgtatgatccttctgattccgcaagaactaagttgtgaccttgaatcctaaagttcaaactcgtcgagattcccacattcgacactcgaagtctataagttttccctgttaccatcaaaagagaaaatagtccattaaacacctgtatcaaaaccaaaacaaagactcttgaattataaagactcaccagaatggactgtgattgtttcgaaatcgatcccatcagcaacaagcgtgtcattgtatcggtaaggtccttttccattaatgagaactccatcaggcattccaagatctttaccatcatccaaagccttcctcaaagcctacattttcacaaaatgttagaaagaaacctctcaaaatgtcaattgcttgaagagaaagcgaagatggctaataactactaaccgtgtggttccttatgttccaatcaccaatggtaacggtaatatcaccgtctggagtagagaaaggaactggaataatagctctaggattgcccacaaaggagccaaagccaaatacagctctaaggaaatgtagagatggaaagtagaagaaactaccaattgggtctt

SEQ ID NO: 26260 - DNA, 1376 bp, Arabidopsis thaliana landsberg
ggccgctcctgtacgcctaggcggaaaacaaatatgaatttcgggtttagtattatgtttgttacatctcggagtcactgcaaaaaaaaagtggatcattaatcatcaaacaagaaaagtaaagtggatcattagctttgttctgttttaaggattttgaacatatgaaaaaaatagtattaccagtagcgaataacggagttgtcgtgtctttaaatccgcggaaaacgccttgtgccgcaagtgagagtagaacagctggtgcaccaagtgatcttaaagatagatatctctgagaaggtctcatcattggagaatcctgaaaaaatcaaaccatgttaagtgattttgaatctcataacatcatttatagagaacaaaagatcgatacgttacgtgttttactcccatgaaactcaagagaggtttggctgcggatataagaaacacggcttgaaaaaggccgagaacgcctccaatgattaaagcagatgaagctgatggtatgtttcttttcttggctggaggtttactaatactaaagatactgctactggttttaaattcatctgataaagaatctgaaataaaaatgaatatacttgtaattattaccaccacaaaaaaaaacagaggagtgattatgttagcaagaacaaatatatacctttatgtttttcaggaatcaattctatagattcctcagttggattgttgataccaatttcaatacattctttatgatctcggactgtgtcttgctgagaactacaagcatcttcttctgctacaaaagaagttgtgatgctaacaagtgggaaaataacaattcttgaaacttggttgaataaagcaatagaaactccaactgcagcaagctctacaggacctatcagtcatcaccacaacaagaaccgaaaattacaccaataattttcatttataaaataacaataaacaaatgaaaagagttgttgttcttgttgttaccaatttggcctatgaaggctgtgtcaactagagatgcaataggatcagctgttaaagcaagtgctgcgggtaaagcaattcgcgctatctctaaaccgagctcatcaaatttcagaactgatctgatacatcaaagaaaaaccaattctcaagtttcacttcttgaggccatgacctcaaacagaattatacaagaaaatatattttacctgaaatcactaaagaaaatgtatagagggtttcttggaaaatctgtgttgtagccatcttcagacatcattaagagatgttactgaagcttcttgagtctcttagcgtcacatgtacatataagaatatgtatacagaatctagcatagtaaatgattctcggtttggttggtgac

SEQ ID NO: 26261 - DNA, 1317 bp, Arabidopsis thaliana landsberg
tccgaggctttctcctccatggttccaacaattcaggtgcaagcaagcaaagaagaagtgtaagaaaagctaacaataaccgttagccctaacggacagggctcggctgttgttgctgcagcagtaaccaaagatgaatttgaaaagtttttcttttttttttagaaaacgaattatttttattatttttaggtgaaatgatttgagagagaaagacaaggacggaagaagaagagaggacaggtggagggacgacgtgatgggagttgtttgctcactgacgacattattccgtgtagatctgagaggagtcgttgcacacgttcttcatctagcttctttaatcactgaactttacttcattagtttacaaaatctactgatgacgaatttgattttagaatgttgtaccaatagttttctagacgtaaagaaataaaaagctaatacaataatgctaaagttgacaatgatgatgtgaagagttcttctctttgtctggacaaataattaagaagacaagtcaaaaaccagctatgcgaatctgatgatatcaacccaccacatccattggatagttttccaaaatttgcttcatttattatatacaaaataaaatttggaaaaatgattaatcatcacaaaaataaaaatcccaaaaaccattctttaatggtgtggataaaacaagaaataaacccatattggaaagtcgagctgtttaaacttttaaagtggtcacacgtcaatcgataattgtcggaaacaaggaaaaaaggcattctcgattcgtatctactcaatgaagcaacagcagtaacataaagaatcctttcatgaattacaaatgaaccgtttcacatgtttactttctgaaatagaacaacacagcaaaaagccaaaaactaaaccatacgaaaagcccaaagtctgatatgttttcgtttttctatgtttatactattttctttttgggggatgaggattggatggatttatggatcagtttggaataatatacaactcacgaaaaaaggatctattaagaaaaccttgttcacaaagttatccacagaagatcactttgaaacggtcccttccttttctcagctttcactgtctcttaaatcatgacctgcgggttacacgatatcccaagtggctaagttcgtgagctagtaagacttgtaaaccccaatggttccaagagatttagacgttacctaaaacatggattgccaattctcactctctttcaagggttgcctttatcatccttactggcatctttttttccagtcttgtcctttttatcgc

SEQ ID NO: 26262 - DNA, 1389 bp, Arabidopsis thaliana landsberg
aacatagcatacacttttctaagattattatatatgtatatgtaaatatactttttgtaactcactagaaacaaggttaattaagctcttaatgaacccactaaataaaaaatgtttttgtgaatctttgggaagtattagtaatactaaggaataagtagtaacaaactgatgaaaataagaaaatgaaaaataataggaaagtatctttgctatactctcatcaatatatcatcatatcatccatgttagatattaattgatgtaagttgacccaaataagatatactgttgatctttgattaagctttaactcgagattagtcagaagaactgtttttaacatgtcagagatcctatatcacaaatttaaggagacctaaaataaaatatgcccactcattttcaatttggtttaaattaaaaatatataaaattcaacaaatattgtatttaagtaataaaaaataatattatttgagacctgtgaatagaaacaaaagggtagatgttaggttatcagttccctccttttgctgaccaatttttctctactcacgttcacatcatacacacattgtctttcaaaactttccatacttatgatacgagtatataaacaaacgtacgtgtgaattcacatacgcagaagaaaattcacgtacgcgtgtggacatgtgtgatcgactcagctctagataatttgtttcggaatgtagtaataataaattcatcgacgtgaaagctatttttaattttatctcctttttcgaattttcttagggtcccatttccattggcacttattatattctctcttactgccaacgactgtaaggaaaaggtaaggtggcccataactcatactaattttgatatatgttcataaattatgtaggacgacaaatattttaagaaattattttactagagaaagaatattcaattcttccaaaaaataataaaaacataaatgtccccacttttattttgtctatacaagatgaatgttatgctcgttcacaaacgaatcagattagtaaacatagtattcggtgagatataatgtttccatgacttttttggtcaatttttaccaaaaatgttgttgtctgacaaatatgccctattaagtatgtcgaaaaagatgatatactagcaatattttctcgcatgagcatgacgtatatatttactagtttagaataaagttgatacgttctcatcatattcaacgtataattctcttctcctctaaaatcgaggtcgaataagtccatggaataaaggatctttccaacataatcataattaccgttaacgcgttctttttttgtttgtttggttaatttggattttggtataaaaaaaataataaaagggagaaaa

SEQ ID NO: 26263 - DNA, 598 bp, Arabidopsis thaliana landsberg
gaaacagtaacaaactcttcaaactgcttcacaccgacttttccattaacgaggtcgcggttcgcatgagcggctggtctcaatgctttgtatagtttctccaagctttcgtgtgtttcatcttccacgatcgtcaagacaatctttctctcatcgtccttcaacaacttcaatgtgtcatggttaataggtagaatcaaaggaagaaaactctgtttcacaaattcctccaagaatccatctgcaaacaaaaaccacatggtgaagcatgtcactcaatctactttagaaagatctcactgaaagttaacactgaccttcgaatggcccgtaaaacacgctatgctcattgtaagttggatgattggcaactaatgcaggagccttatcaaaatcataagaaaccatagtatcctctgaaacttcctttgaaacagcaaaccatgccttcttcttatacttccgacctaatcctgatattatcgattcgttcaaaccaaacccgataaacacagggaagaatgtcccagcatcttcaacaaactccttgacagctgagtctgactcaagaaccgcaacatctggagcaacaaacttc

SEQ ID NO: 26264 - DNA, 2792 bp, Arabidopsis thaliana landsberg
tagttttgttaattaatactagtattttatatagacaatgcccccaaacgtgtagtgttcttctatctctacaatatattttaggagttagtttaggtcaaagtgtcctaatatacaaattttaaatttagtcttctgatcttatttatacccgtatagaaatgaataaaagtcattcgaacaatgacaaataaaatttgtaggtatttgcaaattttcctaaagcgtggtatgttttggcattttgctagattataccgacatcaaactagcttaattccaaaccttacgaaacataatgaaacctttcgatttggttgcaaaatattttgttttcccttaaaacttaatatgacttaaatttcacacttgttgggctaacttaaaatttatacataatatccaaaattaatcaaaaaaacgatgaaacactctttatgagttatgtaagaaggtgctactttagatggtaaaagacaaaactgctgaatgatagtttgatatagcgtgtatttgttgttgcacaatcctagtgcgtacacgaaaaaataaacagtactcgaaagtcgaaagtataaccagctcgaacaagtaaaatcctctagctggatattcgttattggaattttagaaaaatgattctctcaaagtgtaaacttgtggaaataaaatatatagcaaagtcgttgacagaaaatatcacaaaagtcattctcgactttacaaatatatacttactagattttaacccgcggtaccgcagaaacaatttattttttaaagttagtatacataaaagtttgcaaattgtatttatctataaaatatttttattgtgtagtttacaattgttattaagtaacatcctgccaaactcgtcccgccaacccgtcccgtaaaaaaaaaatttattttattaatgttgatcttatttatgatatgtttatgaattattgtctaaatattttgtaattttgtagtaattaaatgctatcaaatatctctgcggtttgatgattataatcgaattgttatagtcatggagaaaatcaatatcaaaaataataattttgaagtaattaaatgatagtaaatattttggaagttttattttaataaataatgtggagagatttagggaagattgttaaatgtcaaatatttattttgaagatgttttttttaattatcaaaaacaaacattaaaatttagtggcagccattgtaaataagtcccaactacataatttatttcacaaaatgattgcaaaaatgtatatatagattctaagagaaaaatattaaactaacatatatttgtaaattgcaatagtattgacttatccgattatgtaacttttttttttttaattaagtatcttgatactacatatcttatcgatatgggatatgtatgaacgatttctgtttattttgttcttatttatgtgaatgcaacgatttaatttctttatttacggtctttctctcgcaatttctggaattctgcatagtggggatcatcagcctagttgacacggttacaaactgacagtgaccacctacaactattaaagagacttcattcaattctacaatattctagttaaactaaaagtttgcttcacattgtaacagacataaatccccaaaattatgggcctacaatttgcaataacttgtttatattgcacttctgttttttttttgtttatggtataagagttaatcatttggtcaacttcttaattgtatgtgtttgtacattgatctacttgtaatttttagcttattaattattatatggtgatgttggcccaatttcatcatggatagaatttaacctccactttttcaactctaacatcagttataaattgacttaaaaattaactacgtcactttccaaaaatatttttcaaaactcaacgcaaaacacatcatacaaattagacaatgggaaaacacgcgtttataatgacatttttgttcatgaagtgacaaatcatttcttcttcctttactgatctgacaattaaaaagcccgactcatccaagttttataatcaaattctaaacatccaagtttataatctaatcacctagaatcattctaaccgaccaaacttaaccggttgttttgtctcacatattttagttttatgtaattattatcactcgttagacgcgttcctcgtcgattctgtttgactcgtatctctctatcattcaatcaacacacaataataagttgaataaaatatccaaaaaaggtatataatataaatataaagataatggaaaggaagaggattgcatgggctaaaatacatacgatggaagttttagtggtgcacatcacaactttagtgcaagaaagaacatccaaacaatattatttttattatacagcttggaatgataaaaaataataatctaaaagctaactttgacttgtttgcaaaataaaataactgagatgattacatttcggatcaaaccccaatcttcactttttaaaaaacttgtccaaaatccaacttttatatgactacatggtgataattcgcatgatacaattactaattatgcatgttggataatgcagtaaattacactttaccagttaaaatagtttatattataaattactctttcggtttccaattactaaatcttttgagttttcacacacatgacacatcaaaaagaaagttacaataacaaaattatctatatgaattgttatttggtatttaaaatagggaatggtagaggtgaaccatgaaaaa

SEQ ID NO: 26265 - DNA, 1173 bp, Arabidopsis thaliana landsberg
tttgtctctcatcaccatccttgaagctagcctctccaattttggcatggggagaattcagcccaaattttatggtttgacttttcaaagtcaatgggtagacacagatcttcttagaagtagaagattcatcatcactaccatttgagttagggtaaatacgctgggaagaagcagtaatggagtctgatgtgtcatggctattctcacacatgagtggtgcatgtagggaatattcatataaaatatcactatataattgtcaatacatggattgtgaacatgattttgttttgttttgctaactcgaccagctgagacaatagaggcaggattgaccatgtcagcagaatattcaaatagatgttcctctagtaggccaccctggcaaagaactttatagacttcctctccatatgatatgtgctctttttaaaccaacaccaagcagagaaaggtcttactgtactttccaatactaacacaacactctagcctttccaatctaaaaacacaaaaattattgttaaaatcaaaactggtgaacaattcaactcttcaagtcataaattaatttcctttggtaatcaaggaaatctacatctctatgaacaaacatctcccactttggctgcctatcacgggagatgagacttaggacatcagatggcagtctgtaaacacaaaatttcataagtatgataatatgataaataagtaatccattcactcattgtaaaacagttaatattgaacattacgcttgtttgaaaaactctatttaagagaattgcggattgacgtccacttaagtaacatcaaaggaatttgatagactccttacacctagcttgttagagattaaaattatattcactacaagaaatatgggcgctcttagcacacggaaaacgctacaatatcgtttacatagcggattcataaacgttgtgtttgccggagctatcttagattgacacatagaatagcgtttttttgctatgctatgctatataaacatacaatagcgtatattatgtgatacgattatcttttttgcagctcaattttaatgttgtattatattgtgttgtagcattttatatttcttgtattatattatacttataccttttgtttattgttctattacatctttatgtgcgatcttat

SEQ ID NO: 26266 - DNA, 5548 bp, Arabidopsis thaliana landsberg
ggaccaagattgtggatttcacccagccatacattgagtcaggccttgtcgttgttgctcctgtcacaagacttaacgaaaatccttgggcctttttacgcccgtttactcttcctatgtgggcagtaacagcatctttttttgttattgttggagctgcaatatggattcttgaacaccgtataaatgatgagtttcgtggtccaccaaggagacagatcattaccattctctggtaagtacacgagagccatcttatttgtctgcataaaatgaagattactataccttatgcaagctttaatcttttcttacgatgcaggttcaccttttcgacgatgtttttctcccatagtaagtctcaaaaccccctcaagctaattactgcaattcctgtgtgaaatttcgtaacatctttatgaaatcaaactctcaggagagactacagttagcacacttggtcgtatggtgcttctgatatggctttttgtggttctgatcattacatctagctacacagcgagtctcacatcaatacttacagtgcaacagcttaattcacctataaaaggagtagatacactcatcagtagcactggtcgtattggtttccaggttggttcttttgctgaaaactacatgaccgatgagcttaacattgccagctccagacttgtgcctctcgcctcccctgaagaatatgctaatgcgcttcaaaatggcactgttgcagcgattgttgatgaacgtccttatattgatctcttcctctcagattactgtaagtttgccatcagaggccaagaattcaccagatgcggttggggatttgtgagtcatccatcttctgaatatcttctctctttaccagcatgtttgaacataattctgatcacatttttgcattttctgttcaaaaaggcattcccaagagactctcctttagcagttgacatgtcaaccgcgattcttggtctatccgaaactggagagcttcagaagatccatgaccgatggctttcgaaatccaactgcagcagcccgcatgggtctcagtcaggtgactcagaacagctcaacgtgcatagcttctggggtatgttccttgtggttgggatagcctgtctcgtcgctctctttatccacttcttcaaaataatccgcgacttctgcaaagacacacctgaagtagtagtagaagaagctataccttcaccaaaatcttcacgtttaacaaaactacagacttttttagcatttgttgatgaaaaggaagaagaaaccaagcgaaggttaaagcgcaaaagaaacaacgatcattctatgaatgccaatagcattatctcgaggactgcatctagaagacccatatgattatccttatgattttgttcatctgtacatttcaacacacacctcatttgcaacaaaaatgagattttgtttatataccaccatttacaatcatctaagctaaagccaaaccaaagtggacaagcttaccggttcggttcagttcggtttgttgttaaaccgttggattttcactggtctgaatctgatctcatcactcactgcatctttaaagtaatcagctttactggagaaaacattaggttaggtggtcacgtttgttcatctctctcttatatatttgtttaaaggcttcgtctttgttcatttgcttttgttgatctcattacttgttcatcaatggcaagtctttgtttccaatctccttccaaacccatttcctatttccaacccaaatccaatccatcgccgccgttattcgccaaagtctccgtctttcgatgcagagcttccgtacaaaccctcgtcgccgttgagccggagccagttttcatctccgtcaagacttttgcgccagccaccgtcgctaatttaggaccagggtttgatttcttaggatgcgccgtcgatggtctcggagaccatgtgactctccgtgtagatccctctgtacgagccggtgaggtctcaatctcggagatcaccggaacgacaacaaaactcagcacaaatcctctccggaactgcgccggaatcgctgctattgctacaatgaagatgttagggatcagatcggttggtttatcattagatttgcataaaggtcttcctttaggtagcggtttaggttctagtgcagctagcgccgccgcagctgctgtggcggttaatgagatctttggtcggaaattagggagtgatcaattggtattagccggtttagaatcggaagcgaaagtctccggttatcacgctgataatatcgcaccagcgatcatgggtggattcgttttgattcgaaactacgaaccacttgatttgaaaccattgaagttcccatctgataaagatctcttctttgttctagtaagccctgagtttgaagctccaactaagaaaatgagagctgcattgcctacagagattccaatggttcatcatgtttggaacagtagccaagcagctgctttagtcgctgctgtgttagaaggtgacgcagtgatgcttgggaaggcattgtcgtcggataagattgtggagccaactagagcgcctttgattccggggatggaagctgtgaagaaggcagctttggaagctggagcgtttggatgtacaattagcggagctggaccaacagcagttgcggtgattgattcggaggagaagggtcaagtgattggagagaagatggtggaagcgttttggaaagttggtcatttgaaatctgttgcttctgtgaagaagcttgataaggttggtgctaggcttgtcaacagcgtctccagatgatcttttaatgatgtttgattatgctaagattggaacaaatcttcctttgtactgtaatttctagatgataataaagttgtttgttttctacactaataaaggacaacgttttatgtgtttgtttagctctttttggcttctgggactatgaattgtgtcagacttgagagtatcaaactctccaaatcagtagcaaaattgagtttcagctttcaaccttctgtagctaacaagtaacaactttagtcactgactagtggagcaaactttatagttgagagcccaaactataaggcccatgaaagcccaattcgaaaaagaggaggactcgtatataattccggtaacggtaaagcaacgaatctatccgccggcatgaggaaacctaaattgaaattaccatttttactcttaaagattcgatttttccgccaacccgttcccgaaagcttggaactttatttgttgaaaaagtaaaagagagagagccttgtgtttatttctgagccttgtctttgtccgtgagacgtggacgagcgatctccatcagaaaatgagaacccttcccacgtacacactctttgcctttccttttatagctttcctgtgacgtgtttcttcgtttctgggttttgggtttactagcgaaaacgtcaaagatcaacttttgttctgagagattacgattagggtttatcggggattttgaaacgatttttggtaagaagatgacaagagtcaagagtaaactagacgaggaactgtcgtctccttggttttatactgtttgtaccatgggaggaatgcttagtgccggaacaacccatttggctataactcctcttgatgtcctcaaagtcaatatgcaggtttgtgtttcctttctctgcttcttgacttcttcaaatctctaatcttgtttgtttcttctagttattgtctttttagggatgtataatgatcgatataactgctaaatttaggatcttttgcttttctctgagcttaaatttggaaccatcatgattgttcagtcaatgaggatcgatcattctctcttgtaggtgaatccagtgaagtacaatagcattccttccggtttctctactctcttaagagagcatggtcattcttatctttggagaggttggtcagggaagctattaggctatggtgttcaaggtggatgcagatttggactctatgagtacttcaagacactctacagcgatgtgttacctaatcataacagaacttccatatattttctcagcagtgcttctgctcaaatattcgccgatatggctttatgtccttttgaagccataaaagttagagttcagacgcagcctatgtttgcaaaagggttgcttgatggatttccaagagtgtatagaagtgaaggtcttgctgggtaagcccttttttcagaatcattctacttggctggctcactttgcgttcgtttttgagtcttttatctcttcaaatgcagcttccacaggggactttttccgctctggtgtcgcaatcttccatgtaattttactgcttcgtgcaatgcctgttttcacttaatctatttgatcatcaacgtctctcgttatcagtttgatcttaatcttattacaactctcaaactgtcagttatgtaatcaaatcattcagttttagtcattagcatatgagacagatacttgagctatagatgcacattagcatgtctgtagacttggttgtgttttctaccaaaaccatatcttgttgattatatcttctatgtggtttcagtttctatggtgatgttctcaacgtttgattagtttgttgagtttatatatcaaaagattagccaggaaaggaagcaagattgctctaaagctcaacaactcggtgtcacatgtcttgctggctatactgctggagccgtaggtacaatcatctctaaccccgcggatgtggttctttcgtctctctacaacaacaaagccaagaatgtgttgcaggtcgactcttaaccatcattatttatcttttaaaatccatttcgaaatttcacaatcatgaagcaaagtattcttattgatgttggttatttgcttgagctttaggctgtgaggaatattgggtttgttggtctattcaccagaagccttcctgttcggatcactattgttggacctgtcattactttgcaatggttcttttatgatgccatcaaagtcttaagcggattgtaagtagaaatctctcaaaatttccatatcagaaactcgaatctctctgctccaaatcctcatctaaccagcttgattgtacaattgtgaaaattatagccctacaagtggcggagtgaagaaaccagtggatgcagctaaattatcagtgtgaagcttagaagagtagatctatctctatcaacaataaaaccaggaactcaaaacatacggtcatgtaagattctcttgcaagtagatacgaggcgttgtgtagcgattagaaggagctttttgatattttcgtttcatgcgcaaatgcatttgtcttgaacccctgcctgaaattggattgtaagtaaagtgctaatgatggatattgctgtaaacagaaacaatgatctttaactgattgatgtcaaaggaatgagtctggttttatctttggtatgctctgaacaatttttgtatgagatgagaagactgagattctgctgttttagatt

SEQ ID NO: 26267 - DNA, 1597 bp, Arabidopsis thaliana landsberg
cattcccaaaactctttcttgagaagagggttagcctttgctatatccgccgctacattgcattgtgtttcttcttcccggtttagaccactgtgtctgatgattgatagccatagatatgccacaaccgcttgaagagacgagattttcagatcattggtgtcaatttcgttgttggctttcgctttgagatctaaaatgttcttctttgacaagtgaaaaactctctctttagttgaaggttcccaacgtggtagcgtctccatctctaaaaccggaacatgtaccgggtaatcgatcccgtcacaaaaccaatctttgagaacaatagactgaatactaggatccgaaccattcagacaaatcttggaccaagtgtgaaagaacttccagaagcaagtaccatcggccaccatgtgattgtaaccaaaactaatgaacactccatctttcatctcggtgacttgcaacgcaagcaagggctccgagacaagggcatcacggctttggacattgttcgcggggaaaaatttcgatatgaaataaggaacagacccatgagattgaaggacatcattcacggtgatagattcggctttcgcatggacgaatttagcacccaaaccatcacagtcgatgtaaaacgacaccgtatcatcttcgtgattgtttactttgacgagacgaccagcaaacgggaaataaatctctaaggcagtggaaagagaagccattaatcgaggaatgatactgttttccgggtcgggtttgtggaagagtagacctctttgaggataaaaaagataaagaaggtcaagatcatgtggagttagatggattttttgacgacccgtttggtttatgttttcgggtcgtaccatagttgaagatatcacggtcacttctaccattttgcgtctatagaaaagaagatgaaaaactttgtaagatagaaataaatcaaatggcatagacacatatagaaatactcgaagccatatctttaaaacttggtacctccaccttaacgatgcatattatatttatagtattttttcgttatattggatgtggacagtagaaagaattagtatttgttcttaaaaacatgcagataatttggcatgaactattcgtacccaaaagcatttaattatctatgtaaataatattttcagaattgacttgtttaagctaatttaatatagatgtcaaaaaaaaaaaaacatgcggataacgtgaagtattgtaaaaattgtaatgggacattaagcagctatataaatattatctatagaacaagaacatgtgaaatatttgaacttctgattttatatgatggagtgtcgtttactttaccgtccatacttaaaaacaaacatattttggtaaacaattttcatagaatataaacgcaaaatatagaagaaaaatacatctcttgcttacatgtcataccattagttaattacatccttcctcgacatcatttggggtccctttgatgttaaaccctacttttggcaccatactttacattttttggtacaaatatgatttgacaagccattagtttttggttaaacattaagttttg

SEQ ID NO: 26268 - DNA, 610 bp, Arabidopsis thaliana landsberg
tgtggaggaggagagaatggctagagaagcggaggagatgcaaaacaagcggctcttcaaagagttatcgtctgagaagtcagagatggttcggatgaaacgagatcttgaagaagagagacagatgcacaggttggcagaggttttgagagaagagagagttcagatgaagctgatggatgcaaggcttttcttggaggagaagctatctgacttagaggaagctaatagacaaggagagagggagaggaataggatgatgaaacctaagatactggagagagcgtgtagctcaccggctaggaggaggtgcgagaatccgcaaataaagagaggaatcaatccgttcccaagagtgatgagagcaataagatcaaagagtgagaaatggggttcaaagctggagtgccaaaaggttcagctcaaaattctgctcagacaaaagaccaccccaagatgtactcctcttctctcctctcctcctccttgatactgtatgcttgtcttttgttcgcctcgctcaatctcaagaattcacatctaagactgaagatgtactaataagattctctttgtctgtccgttagataatattttattcacatggatg

SEQ ID NO: 26269 - DNA, 1120 bp, Arabidopsis thaliana landsberg
  unsure (1)..(1120): unsure at all n locations
aaccatgacgtcagggtggagtctgtcatcagtgaagctgatcactagaaacttatgtctcttgcttcgacttcctaaaccttttcatgacaatctcaaggatctgtaccgtttctttgcttccaagtttgtcacttttgttggagtgcacatcgatgaagacctggacttgcttagagaaaaccacggtctcgtgataagaaacgcgattaacgttgggaaattggctgcggaagctcgtggaactctggtgcttgagtttcttgggacaagagaattagcgcacagagtattgtggtctgatttgggccagctggattcgattgaggccaaatgggagaaggcaggtcctgaagaacaacttgaggctgcagccattgaagggtggctcatcgtcaatgtttgggatcaattgtccgatgagtgatttactacttatctttgtgattgcttctttttttttttggttcttttgatggaaatgactttgtacctgaatcaaagtgatcctttgtaagttgtttgatgtgacaatcaacaatcactaaacaaaaagtgaacagtttcagattctttaacgttcgacattgtgtatgaaacaaactatatgttggttctgctttttctgatataactgagattttgtgctggtttgatttaggtctggttttggctaaagattagaacaattttgttttgctaagaacaagagtgcaaatggatgtgtgtaattagaaagataaaatttggtggaatcaaatataaccatttaagttgaatggaataaattgaatattccactcattccaacacttacaaattatactcctgtttaagctcaccaaagtgtaagagagacactaatttaataatgaaggagagatgccaaatttaagacaagaggacccccaaagatattcaggtttcaactgtaatagcatcaccttcctatttatgactatatttgttctgtctgtnatttataaaaagaaagaaacaaagaagagtgaagttatgtgatcaagaggcgcagagagatagatcttcccacctgtctttcttcttctgacaccgacacttatcncgctgtcacccttaaaccctatcttttttaactaag

SEQ ID NO: 26270 - DNA, 6547 bp, Arabidopsis thaliana landsberg
tgaaaacccccccagctcacagagttccatagtgagaattagaagtaaagacccagacatgtcaaaaaagcccaacgttaaggtagatagtaattagagtcagacgaagatatctatcgccattctcctccacccattgatttcgacaaaccttcattgaaactctccctttcatcatctcgttttcgcaaccccctcacaaagctttgaagttttcattccaaacccttcccctaaaacgctccctatcactctttaagaattcgttccccttcatcatacttcaccaaagttactcgatcatttccaagttcatcctcaagcattcaatcggtttcaagctcaaaatttcatcaccaaagaaaccaattcccttcccctttgatacctcttggagaaatgttcttgtttcccctgtcgaagctcatcaccaatctctatggattcaagaaggaagagttcatctcgggcaagaagatcctctgttgataatgaggaagttgaggcgtttgacatgagtggcatgactgaacgccaaattcgccaagctcgtcgtgctcaaagattaagcttgattcaaggttgaagctcaagccgttcaaccatgcaaagagaagaagtagctcggggaaagagggtccttgaagctgaagaagaacaccatgaagaggcaccctttgaagaagcggtttctgaagaagaggttgagatcatcggggatgatacaccaacccctgttgggagaagaaaccgaccaaggaggaagagagaaccaaccccgagcgagtactatcaatacttgaaagagttgaagtttgagggaactagataccctcataaggaaatgatgcaagagcttggtatttgtggtgatgtggaaaacttgatggaattggccaatctttcaacattcatgagctgccaatgtgggggatacaaagaggagagctgccaactccttgcaaccctcaaggttcatttttgtgttgatgattcggagaaagaagagagaggaggtcttggttacataaatttcaaggttaggggtgtcgagtatactcttgatatatgcaatcttgataccattttcgggttccctagtggagaaggaatccgccaagactatgatcaagaagagctgaaatccctttggaaaacaatagccggtccgaaacccttcttaccaaccaagagtacgcgtttgtcaatttgtaatcccctgattagatacctccaccattgcatcgccaacaccctctttcgcacagaaggccaccggctttgtcagtgaagaggagctgtgcatgatataccaatctttggtcttcattctgagagaaacaacagcttcgaggaagatggcgggtgatagagcggacacttcgttgagtgttgttctcttggatcaccttttgagcttcaaggagtatgctgcaaccatccatcgctcgggaattcgcgggagtctttgtgttggtggtctcttaatgccaatgctgggagctgtggggatggaattcagaacccttgacgtgttgcctaagttcattgacctcgactatctcaaggggaaggattttcttgagaaaacaactccggcggatctctatctcttcaagttcaaccatccatagcttggaccttctctgttacccctaacatgcgagaaccagacttcggtgaagacaagacgcaaaatcaatttcatgccatctccctctgccttgaacatcgacattggaggagctcgagaagatgaactagaatatagtccagctgactatgagcaacatgagtactttactcaagctgattataagcagcaaatcgagtttgagcaacatattgatcaatcggagcatgagaccagcgaacaagagcaagctcattgtaaagaaggtgctgaccaaggaggagatgagtttgctgaagttcacaagaagctcggtgtacttgaagagcttgggaaccttcacagctagacaatgaagggtttcaagaagaagatgagaacaatgaagaagtctctcaagagtatggctgctcaactcaaggacttccatagcaagccaaggccaccgtctccaacccccgaagtaagaagaagcggttcaacgagctcagatgcaaggagagctgtaaggatcgatcaaccccgagcttcatcttttgagcctcgggaagtgatctccgagctgagagagccatggagtaggcagagacgagcttccacacgctcgaccggacagaacgagcaacaccctcccgcctcaacatcagtccatgcttatactcaagagagtatggatgactatgtctccataacatctttttatttttctttgtatgttatgtgtttcggtcttgaattctctttcagatttttattacacaagggaatgtgtaatttaagtttgggggggggttaaaacatgtttaacattgtgttttcttttcttatttcgaatattacatcatctacggcatagaaaaaccataaaaatttgaaaaaaattcagaaaatgatttcatcaaaaaagagtgtcatgtagattgcatttcattttaggattgtatatagagtgcttgcatttaggattgctcatttgcataggggataatgatgatttcaaaccgataagcatgttttgattcaatgaagtaagttcaatgtccaggttgttagttctctgttgtataaccgattgtatctcggaagtaagactacaccctactttgaatttgtaacttgactatactactttgattcgaaacttgcttatctgatgccatttcctatatattagaacctgaactgaatttgcaattataatgtctatgcattatttgtgaactcatggctaccacatacatacttggattatcttattcacttcaccaccatctgttaatccaagtaactgtctctcatttttagagcagtttcccatacccttagcctagccttatttcaagccaaagatcatttgtgtatgattgtgaggtctttttcgattgagcttggtataacgtgttaggtatgagccgacaagagcaatctttcatgtagacctagcccacgctttttgggttagctaggactaggtggagacttgtatttgggagtgggaatgtgtatggaatgaatgtgaatgagaatgagaatgaaaagaaatgaaagagagtaagagtttagagttctaagggggataccaaaagtgttaagtctagtaaagggttttgaattcaaagaagttaggcattgtgattcaaagaaaaggataaatcgtcctatgtgctaagattagaagaaaagccttaagtttgttaaagtataaaaccaaaccctctagactcttaaatcgtttcaaagagaacccctaagaacttgaaccaaaaagagagaaagaatgagaaaaagggtagagttaggacatctatgggaatgggatcatcttatgagctatcatactatatcattgggtagatgggagtctgctcttgtatgtgtccattggcttttacctttagcattctactgaagctcaatcttttctttgagagtcccttgttactcgaccaaaccattagaaccaaaccattagagggaccatttttgtctcttagcctaagcccgaaaccaagtgagttcataaccattgcattgcttgatccactgttcgtgcttaatgaatgttaaagggaattggttgatgtgaatgcttgaatagattaaggcaagttgttaggttgcattgtgacgagtatggctaacgtttttaagtaagggtctatcatcttgcaacctagaattagctacctggacattgagcttacccgttttatatgcatgcttcggttcttgaatccccaccttcaaacctctccttcaacttaagattttttgtttgtttgagggcaagcaagagataagtttgggggagttgataacactgtattttactcattttaggtgtatgtttatcatcatttagctttgcatttgctcaatgtatcatgtcattttgcaccattttagcttgttttgcatacttaggcatctaagatcatcttgcattcgcattgcatgttttggtgtgttttcaggtgcaaaaggagcttaaaaagactctactcgatccattcactcaatccaggcagctactgaagaggcatcattctactcgacctctttactcgatccaggatgccacagaggaggctgcagtttactcgaccctcctactcgatcaaggcaacctcagacgaagcagtagattcaactactcgcccctcctactcgatccactactcgatccatttactcgaccaagggtgaccatctctacagacttgttgagctatcaaagcgtcttcggatcctcctcattccccactcaaccagacatctaagcatacggataggagaggatgaagcatctactcgaccaattgatcactcggagcttaaacacaaaggcgcagactttgcagcaccccctttactcgatccccaaggtcaagtattcacccaaaccgcctcaagtctcttggcttctatggaatctagggtttcaacattttagtataaatagaccactttgggatttgtccaagggatctatgctttatctttcagtttttctttgtgtttatgaatcttgaaactttaattactcttaatctatttcgtttttgcatttgctgtttaagtaaagttgtttagcttgtttagatctacattttggtatgattttagtaatttctgggtttgtgttcttgagaatgttgcttgagtagtgattagggttcttgaggatggattagattagggtaatctctaggttagttaggtggttagtgtttaggtttatacccttctggattcgcttggcccctatgcagttttcgctggctaatgtggagattcgatcatagacgtccagcgtccaaaagacgttcaaatggatgtctgatcatcaaattccagagatttgtagactcgaccaagagattggcttgtctgcttattggctttggtagattgtttcttaaacccttctttactatgtttcatcaacgacagttaagattaggaagtggtagagttatggggatctctgtcccaagtgtggattgacccggtttctgaatctatcgtcaagggtaactccctttcacctgttagccacctcatgaaccctaaagttgctcttatcaatgaatccatccttaggacttctattgttcttagatttatatgtattcaccccctgattgcactttgatttacctgtaatttgtgtcacctgctgattgcattttagttcttaaatttgttgcctattggtattactcgacccaatgatcgagtagggcttttaagttcatatttttgcttgtttgaatcctcacctaggattgttactagaaaccaatcatctctataatttggcttgacttagttgattctgtacaaattttgatagctagcaataacagtggactggattgacaccccctatagctgcatcgacatgttagtgtttaagggggaattgaactgaacacaccacacttctgcatataactaggcctaaaaaacttgcttatcacacccttccctttatctgtaattacagcaccttcaaccatctcagttatctctgcattctttacctccttaatagcgagttcatcattaaactcaggttcagatttctccaaatccaacggctgacacaaagctttttggaactggatgattgttccgagtctgtcaactttgtagcataaacacgctaagatgatggagtaactgagtctgaagtctcttggctcgaagttaacataagacactgtaaacacgaaaacatagtttagaaaagtttcattgataaagtttcatttacacctgatttgttaaggataacatgtgtagaatcatacatggtccctagaaccaatggatgcagggttgacagagtggtctgagtctttgaggacctcatcaccatagagaccatcggtagacaatagccttgtgaccttaaaagaatccttaccatcccatatgttttctttctcaacagagaccagaaatagaaaagtcttcccaaccaaatttcttcaaccgtcagggatatcatttggatcctcaatctaaatagtaagaccacaaattgttagttagccagtttatatactcttgcaacatattagattccacaaacataagaagataactatttcgattgtaagtatacctcattaaaagagccacctaacatggatgtacatgattcacgaaccatgtctgcacagatggtatcaaacaggagacaggaggcatttggtttcaccactgccatccatgactttcacataaagcatgtaccttaaattatatcagggtcaattaatgtgtgcatttgctagttgagttagaacttgttataaactgtgaggtatacttacttggcttgcacattagagaaagcattcttgcagaatgaagttgtgttttgatgacttcaatgaaggtgtg

SEQ ID NO: 26271 - DNA, 1292 bp, Arabidopsis thaliana landsberg
aaagttaactgccacgatcacgaaacaccccttaattccattttgcaaatgcatcccctcctcacctttgtttgagatgtttttatatacagctcagctcgataacctaactcgacaccctctaaacaaaaagttacaaaacgaatataataatgtcttcggctgatccggtttaactgaatcccaattcccaaattgtaacatacataacatgaacttaaccggacaaaactggttagcagaattttcaagtgagtttacggaaacacccttttccgcatagcttttgtgtcacgtgggacccagctaatattcttcacaaaaaatccgctaccttgccttggaaacatattttgcatgacccaacaaacatgaaattaagaaatactttactttacaaggaaataatacaaataaagcctttttatcttatttataatatcatcgatcattgtatatcagaattcagaagtcctagataaaatgttaaaagttgaatcttgtttgacctaatagaaaagattccactgacaaatttctatgtctatgactatgatcgattttatttcctctatatgtaaaaaaaaactcgacttcacctaatattttttgaatggatcgtgtcttatttacttttttaaaaaactctgctatttttccaaaagacaatgcgaaaaaatctttgaacgtgaaagtgaaattaagaaaatctctattatagtcgaaggattcaaatcaagcgtaatattaccgagaaaatataaacaatagacagaaatacccttaaagatcatataccaaaacggcaaaacttgagagaatcgtgacgggacccacgcgaagagagacacgtcatggaacttacagactgtaactaaccaccggcctgtcttgccacaaacagaaatttcatgatccaaccaaaaccctcgtttctaaaaagaatgtaacttaaaaaaaaaaagctctaaaagatgcaacttataaagaaaaagaactcaaatttgtaacttaggtcataaaattactatttcttttaccaataaggtaaccaaatatttcaattcagtaagatgtatcaaagtaggtattgtcacacataaaaaaaatctgaactttaaccaaagtccagtccagagtaccaccattaattgttattgataaaaaaaaactttagttttcaatttttgaatattacggtacgaacaaaaaaaaacactagcgttttgagaaaataaaaaatatattgaaaggaaaaaaatgttagttgttaaattaacttttgtccccgt

SEQ ID NO: 26272 - DNA, 1534 bp, Arabidopsis thaliana landsberg
agaccgtctctgtgctgtttacagtaccttacaaagtagttctcacgagtagggacaagcggcgatgggacttggaactctgctgtcatcttttgcataccaagaaaacaaagatcaaacacatgagaaatctcactacatgattaagaataataccttgtaaagcaagtaaccaaatcaaggtctttgagtgtcataccacttgcaatgccccattgtagttccctgctacgccagttgagagaacttctagagtcaatgctcttgatacaatcccgcagaacacactagaccattgattctatacagagaaagaacagcaaaagtgtcaactataagttagaacctttgttaaaattttaaaaatcagagttagagtaacagaattataccacatccattagaatctcaatgagattgatatgattcatgataacaacagtagactctcttgaagcttctgatctcaaaccgataggtttcggtccaattcctctaggaaacgtcctaaaatactcttcttcattgagaatctcaacagaattatcgcttgaaacccataagggatcaccagtttgagccattctcacaagctcttccattgctgcaacagctaactcaacaatcataggcttatcagcctcagaaggtatcgaaaccgacctcaaaatgtcgctgcttccaaacatttccccaacgaaaccagtgtggctattgttattgttcccaaagttcccaacttcaagatcaagcgagcgcgagggaatgtggtgtgaagaagagagctgagggaaagaagaggaattagccattaaaggcttccctacgtatttagcagctatggcagagattctgtcaatctcttcgcgtaaacgagcattttcgatccttaaatgctgttcgtcgaaggacatttctcctatagctgccggaccaccacagtttgggcatgttgcgttgcttagagcatccttgtacctattgttctctgctcggagcttgtcattttctgacttcagtatctggttctcgtgcctctcatgttgtgcctatacaagtcccaatgttatatatcttctgatgtttggtctcatcaagagtatataccagacctaacggatggacctttcgacgacatgcgcataatcttggaactacactatccacatagctaagttcatgtgtctaaataaggcttcgtagtatcgaattcgatatgtggttgcaaatactcttcaaatgcatatgactattctgaaacatatatacatacctctcatgaagattcgagaccggtaaatgtaactcatagaattcataatcaaaattggccgtagtatatagatgctatatagtaacaataccttcctttgagtgcgtttgttttggaaccagaacttgacttgaagaggttctaagcttagctcgcgactcagctcctttctttgcttatcgtctggatgaggacattccttgaagaacctaaaaccgtaaccatacaaacaaatacacataaaccctaagtgatcctcga

SEQ ID NO: 26273 - DNA, 1807 bp, Arabidopsis thaliana landsberg
  unsure (1)..(1807): unsure at all n locations
gcatgtactatctaggaaccttcaaggtatatggtgcagtctaaatatcatagggtaatatccttacatacataggacttatctgttgttctctcttcacagttatacttccaaaagattgctgaacttgcaatgagcaagtcaaatcctcctctgtataaagaagcattagtgagcttggcctcagactcaggacttcatcctctagttccatattttacaaatttcattgctgatgaggtaacattatgcaccaccgaggaactagtgtgaaccaataagacccacgttaagtttttgcagttttaattttctccacttgtgcaggtttcaaatggcttaaatgacttccgactcctgtttaatctaatgcacattgttagaagtcttctacagaatcctcacatacacatagaaccttatgtaagttttctctggattatcttttgccactatctaaaaaattgtagaatcatgtagctccattttctttaggcttctgatttgggtttcttcaagttctatattagacatattctatataatgggtatcaaatggttagtggtagtgtttgtccgaggtctgcaagctcgagtgcttaagtactctcagtctgcttgaaataacaacaagttttgcctttgatctgtattgagattatgtaaaccagccttgggataatgagttggttgtttgagcaatgtttcataaccatgaagctgagtgaactttttcttttggtgccagctgcaccagttgatgccatctgttgtaacatgccttgtatcaagaaagcttggaaatagatttgctgacaaccactgggaactcagagattttgcggcaaatctggtttcactgatatgtaaaaggttcattatttccctttcatgtcatgaactctgtgtttgttttggttgattgtggggatctatacatgatttcttactggagctaataatgaaattctataaggaaatatcatgagatgattatccatagatgttctgctaagtttatcttgtttgatctctttactattgatatctacttcttttttgctcgagctgaaaaacaaatggttagatctatattaacaacaattagtaataacttgctatagtcttcttcattatttaaaagggtacattgtctcgcacttttattttacatatctcacctttatattcttttagcatctgaaatcctgtgattttaataaaatcttgcaggtatggaaccgtttatataactcttcagtctcgtcttaccagaactttagtcaatgcactgctggacccaaagaaggctttgactcagcactatggtccgattcaagaattagcagccttggggcacactgttgtaagtcatcccttgacctttcagaaagtttgtgcttgctatttcagatatcaccgagaaatattgttacccagcttgtccttcaatatagggacttttcagaatttgaaatacaatttgatttgcccaaaccatttttccgggttaggttattcattttattgggaaattaggacttttatcgtcttacacggatactccagtgaatcagatacccctgctaccaaaaactttagcacagctatcctgcattgttatctgttgtcatctgaatgtcatatattgtgtaggcacgccttcttattctatcaaatctcgaaccatatctaagtcttctcgannnnnnnnnnnnnnnnnnnnnacaaaaaataacgatgaagatctacgaagcttggcgtgtatatggagccttgctggttagtaaacacatccatgtgaatc

SEQ ID NO: 26274 - DNA, 1143 bp, Arabidopsis thaliana landsberg
atccgcccgtaacttgttaagctaacaattagaacctatttaacacttgttattttgagtccaccgacaggggataggggataaaaaagaacaggctggtaccagagccaacaacaacgtggcttcttcttttttttttttaatataatcaaacaatcatactttgtcctatctctttcttgcaataagattttgccacgtcacatactaagaagctggagcgtctagtggggaagccagaacggctcactttaaaaagtagagagatgataacttgagccgaatagagccgagctgagctaaaacggtgggagaggaagaggctactactaccgtcaccatctccggtaaaataatctacttgtcatttaaaaattaagaaaaaacacatcactctgcgataaaataggcaaaagcagatttgaagaagaagcagcttgagatatcaaatagagagagagagtgacagaggagtgtgtgaacatccttttttagaagatttgggttttcgagatgccgtattgaatcggctacgaatttcccaattttgaattttgtgaatctctctctttctctgtgtgtcggtggctgcgatggaggccagtgccggcttggttgctggatcctaccggagaaacgagctcgttcggatccgacatgaatctgatggcggggtctgttcatcttccctttttcccatttttttgttattgtttttcgttcttacaatttttgatgtgtagatctcatctagatttctctgtttctaaatctcgtctcttttggatccataattggatcattgaaactcagatttcgcttcctttgactgtgtagttagttagtgtcagttgatcaagtaagtgtctgaaaatggaaacttttctgctccaattcttcaaattgttgtgatctatatcaattaatgccgcatctgttttcttaaaatctcttatggaaagtgtcggtggatttcagttcgttaacttttttaagctaaaatctttgactcttaaagtttagctttacttattgagatttagctcaactagatctcgttagttcccgccatgggatacattgccatgactgtgactcgccttaatcagatctgcattgattggtttgatttagatccttgct

SEQ ID NO: 26275 - DNA, 1000 bp, Arabidopsis thaliana landsberg
  unsure (1)..(1000): unsure at all n locations
acattacatatttacattaccaaccacattaaatggcaacttctgcaatatctaagctcttagtgtctgatttcgcctcctccgttcacatcccttcaaactatgtccgaccaatctccgaccgtccgaacttgtccgaggtcgagagttctggcgattccatccctctgatcgatctccgggacctccatggacctaatcgagccgaaattgtccaacaacttgctagtgcgtgttccacttatggtttctttcaggtaactccatgttagtatttctctgtttcaaattcactctgttttccttgcaacacactacgatctctgttttccttgtgatacacgtttgctctgtttcaaattttcttgtttattatgttctagatcaagaatcatggagtaccagatacaaccgtcaataaaatgcaaaccgttgcgagagagttcttccatcaacccgagagcgaaagagtcaaacactactccgcagatccaacaaagacaacgagactctccannnnnnnnnnnnnnnnnnnnnacaaagtcttgaactggagagacttccttagactccattgctttcccatagaagatttcatcgaagaatggccatctagtcccatctctttcagagaagtcacagctgaatatgccacgagcgtaagagctttggttttgagacttcttgaggccatctcagagagtttaggccttgaaagcgaccatataagcaatatattaggcaaacacgctcaacacatggcgtttaactactatccgccgtgtccagaacccgagctaacttacggacttcccggacataaagacccaaccgttatcactgtccttcttcaagaccaagtctctggtttgcaagtctttaaggatgataaatgggtcgctgttagtccaattcccaacactttcatcgtcaatatcggcgaccaaatgcaggtttggtaatcaaaacaaatcagattccgttgtttaacttttactag

SEQ ID NO: 26276 - DNA, 945 bp, Arabidopsis thaliana landsberg
taaaaacggcaagcagtctactttttgtcgttatcactttttaacccttttcggcttctctccgtcgattcaaatcggcggcagtttccagcgacattaatctccggcgagacagtttactcggtgagtttcgcgtctacatagtttttttgaacttccttgaattgttcattatttcgggatataaacggaatttgcttttccccgatcgtcgtatcactgtagagattccgatacttgattggttcttcacaatttttgatgtgaaattcgatttttgcactcttaaattcataatcctagtttgtatagtactctatctcgtgaaattctctgcttttattgattaaggcgttgttgcgtacattgcagtgtttattgaagctatgcctaaaagaacagcagaagcgtgtccatcatctgaaatccaaagaagcagaggagatacttttggtagttacagatctctagtagctgaggttttgtctcaaggtgagaggatctcacatcatgatcaacaacaagaagccaatgagagacattctgagagtgttataggagctgggatgtcaaatgtcgagaaagagaatctgaatgttttgttaaggcagtgtgtgaggaatctaactccagaagttgatgaggtacttcatagttctacttctaatatcgtatgatgaaagagtattcaatattattgcaattcgtttgcagatgcaggaatgtgtacgctctctgtatctgatttctcagctagggaacaaatgtcagtcatcgtcgccgagcgattttgttcctgaagaatccggaggagcgagagtatgccttttacttatatgttgctaatcctcttgcttgaaacatatacttgaatatctttcattttcttttctcaaaattccttcaggaagatgatattcaactacttcttgaggtctgaccctg

SEQ ID NO: 26277 - DNA, 1249 bp, Arabidopsis thaliana landsberg
aacattatataactttatagaattacgtattacgtacgaatggaataaaatgaagaagaccaacgtgtctctttcaccgccggcttagcgtccatttcgcgcatccgtagctaatgtacaacatgcatgtgtcttacctaatgcattgatgtttccagcttagtataatattttgaaaatattgttgatctttttggttaatggttatacttatttacattatatataaatattgttaatttacaagaatatcttcttattctttttattttttttgttaaagagtcatcaaagtacaagaatatcttaatggagagacaaatgtttgacatttgacatcaaccaaaggtcaatgagactatgagatcgtacggttcattgtaaaaagctcattcttctaaacataattgcagtttgtcttttgtgtattccatgtggtcgactcatcaaattaattttacttttggaaatagttgtatcaactttattcaaaaattcattattattttttttgctttcaattacccaataataccataagatatgaaaatctcttgatctttatttatttttgggggtttaaaacaaggtcgatcatttcttatttggaacgtaaactcatattttagaaaaaaaactaaaattgcagagagcaaaattttggcaacaaaaagaacgaaacaagtaacatcagcttttgaaagttatcaaatgaattgaatgtagcgataagttatctttcttacatattcctcgatccccgcaccatctatatcatctttattaattagtttgttacacactatgtcactatattgaatattaacacctcccattggtctttatcaatagcctaataattactataatcttagttagtccatacagattaatgcatttgttaaaaaaatttatatcattttgtcatttatttagtttaatagtttgtagtccattataggtaaagaacatgtttcgttaattcattggtcttcttttttttgggtgcattttacgtacccaagtaaataaaagtcctatctttataggtaaagaaaattccaataatgcgggataagtcaaacaaggactcgtaaccattgatctttcatcgggatggtctttggcttgtataaagtgaacgtttttctcttaaaagtagttgcaccttgctacagttctagtgatattatattcgattcaaaaagctaatgcacaacaacaagatctaactaatttatatcccatt

SEQ ID NO: 26278 - DNA, 1046 bp, Arabidopsis thaliana landsberg
tcagatcaactatcaactatacatagtgaatgcatgtcactgtcagaataatgtacgtcgacaaaaattttatagtactgtcagttttatttgtgaacatggaatttgcaataaaacaatacaatacttaatggggtataaatgtataatattaattaggatacattttcaaggaacaataattttgtgtgtgggaatatttaggaaattgaaacctaacatttggcatatatatggctagatccttacagcttttgctatcttcttccgtgtctgccctgggttcttcttatcttaatatttgtcgccttgtctgaacaaagatgtatacgagtatagaaaattagagataactctccttgctattatttaatttataactttttcatgttcgattgtttttattctaattttttgtggttgtttcatttttgtgtgggcatctagatacaagaaaactattaacatctagatacttaatttacgtgaactattgtagtgtccgtgtggcgaacgaattaggagctggtaatggtaaaggagcaagatttgcgacgattgtatcagtaacacaatcgttgataatcggcattgtttttttgggtgttaataatgcttctccataaccaaatcgcatggatcttcttcttggagtgtagccgtcttagacgccgtcaataaactctcacttctgctagctttcaccgttcttcttaacagcgttcaaccggttctttccggtacgtaacaattttacttacttttataaaccgagtcaacgtttttggttgacttttttctttggcttactgagtaggtgtggcggttggatcgggttggcaatcgtacgtggcatatataaacttggaatgtaactattgcattggtgttccacttgggtttctcatgggctggggttttaaactcggtgtcatggtaatattcccgattttcttcaactattcattttatatttaaatagttttttttattcagtggaataatgatttgtggtttaatttatctataatagggaatatggggtg

SEQ ID NO: 26279 - DNA, 1727 bp, Arabidopsis thaliana landsberg
  unsure (1)..(1727): unsure at all n locations
aattctttcttagcagtagatattcttcttaatgattacaatcttttagcagtagatattcttctcaattatgatatgtgacgtggaatatatattttcatctgttatataaaaacagtcgcaattattcaaacaaaatgtataggaaaataaataagtggtgtgaatatgtgattcaaatgaatctgtaatattctcaaaattcctacctccgtgaattctagaaaatgtcgtcgatcggaacaaatttgaaaatagaatgatttgtgtggataaacttttaaatcattgtgtgggaacgcacggattctacaaaatcatgctggccaagttaagcttcatagccttaatgcattcacagctatggacagtcgagttgtacgttaatatgtcttctatggacaggagcgggtaagatggccaatgaggtcattatgttgagatgtacgtagacaaatttcaatgttgttctttctgagtattaaaagagtgtgatcactgattttgaagtcagaaaaaacaaaagaacnnnnnnnnnnnnnnnnnnnnnnnnnnnngtctcggttctcagattgtgtatttggtagctgcggtggtggctaaattgcggtctcttttgttgacatcacttgtatttcttgactagttatttgtgctacctggttttgaatgtgtcttgctagtgcggttctttataattgaagttagtgctgcaatgagttatcacctcttgttgcgtttgttttgtgttctagaagagttagtaagatcgatggtgttcgatgtggttatgaatcgcataaatcatgctctgctctatccgactttggggaaagaaattggtagatggagcttgcatcgttcgcataatttggttcttgaggttccatattattggaaagcttatggacttgaacaacgagtcactgtcacatgacgcgagaggagtttatgccagagaactttgagtttctaccgttgacggctcatccttagacctccaattcaaagtttttaatgcaaatagtttagcattatgcttttttcaagcagtagttacccttcttcttaaaaaaacaaaaaacaaaaaacttaattataagataaaatttcaaaatagtcatatttttatctaattcgttcggcttcaacgctttggttgagttgattgaccaaaacttgtgaatcacgatgtatgcttctatgttttatttttcttgttataggatcatttgtataggcttaaaatcttttgattgtaaatttatatttttatcatttcaataaaatatttttatttttatttaagaaaaaacagaaaaaaaacaaaaaacaaaagaacataattgttgcgtacaaaatgagtggctaatgggtttgaactagacagaaaaagttagggacgttttatcaaagactattgtaggcttatacttgtttgttttaggacttgtcgttctatgtctatttgtagtagcctctacttgttagaataagatgattttttcaaaactaattttgcacaagtgatttgaactttaacaaacagcgacaattattaatttattatatgggattcagcccatgtgactagaattaaattgttcaatccaagagttctatacccaaaaaaaaaacagtactgccctttccctttaaaataatttgagaatcaattaaagagcaaaaagtagttgaaaagtacataagtccaatgtagaaaaggt

SEQ ID NO: 26280 - DNA, 1928 bp, Arabidopsis thaliana landsberg
tactatcaatatatttatttcaagccaaattacatttagccccacacctagattaagacagccctaggcttatatagataacaaggtctaagcaatatactcaaattgcaaacatagagaagataagcacggccgccaagacaccaacaaatggagcagcagtggccggagcaggctcagcatgctggtaatcagtcctctcatctccataaacatcgttatcgttgggtcctccgacaactgctcccattaaaacgttagggtttggtgcaggattgttaaaccatgcatcgaatccttcactacacgtcactggtgttttgtccttggtgatcgatacaatagaggctgctctatggtgtggttttttgggataattggtcccaactccaaccatgtagctcatgttctgggggttcgacccaagtatatagtctacctatataacatgttgtagaaatcacacattaatattgtatgaacatcagaacatgtcttatggtatgtactatattagggttagttaactacctgggaacgagcgaggtcgagaagatcagaagcttgaagagcaccattgggacattggatggaggcttttgcgtctgtaagatatttagaatatgctgagaggacgaaagtagcggctgtggtgtattggaggttgttccacggcaagaagtagagcaaaccgccaggggttttcttaacgttgttggaacctttttgagcacagttgcagataaactgctctgccatactcttgtactctgcgatctttccattgctctctactttcccttcaagtgcaagctgcatttgcaaaaactttgtgttatatatgtttatttcttgtcacataagttactgatatgttgtctttagtgaaatagtaccttggcgaccaagacttgtgcacccacgaacttatcatcccaggaaaaagcagtcctcggacctcctgtaccagatgcttgtgttagataatcaagataaatctggtcgttggtggcacggtggagccaagctgcagcccataacaactcatcttcgtatccactgctcgcgtagaagccacccgcgttagtaatggagttttggtaaatgccagggtacgccttagcgaattcaaataattctttcgcatgaccaatgagtatttgggcataggcttcatcagatggtgcaaaggcgatagacgcagcagccattgctgctgctgtctcacctgctaggtcagaacctggatgttgagcatcaatgcgaaatgaaggacgtggagttgtcatatcctcaggcctcatccagcactcgtggtccgagtttccatcgcccacctgtccgtacaagacattgggctcaggatgggctttaatgagaaaatcggtggcccacttgagagcagcgagggcgttttcttgctcttgatgggccttaagctgtgttgccatctctatattgctccaagctagcattgttgtcaagaaggccaacggaaatccaaacttcatgttgtctccggcatcatagtaccctccggttagatcaacctatgtatttttacaataagcaaatattttagttgaacttgataaacatatattacaatacaaaaaaaaaaagggattgagatttagattacatgagcatcagaaccgtctctaagcgcagaatctcctctccaagtaactctttgtttcgaaggcaattttccagaacgttgagcttcgaaatacaaaagactctttgtgagagcgtctccataatttgtagagacagctccacgagccatcaacaattcaaataacacagtgcaaagacttgatcataagcattgtgaagatccaattttaagttgagacatagtttgtctaaacaatgtttatacgaactcaagaccaattgatgaattgacactatcttctctt

SEQ ID NO: 26281 - DNA, 1825 bp, Arabidopsis thaliana landsberg
gtagattattctcccaagaagatattagtctgatcagggaaatacatcacatagtgaccaccctgtgggttatcaacaccaagagaccttgtaatatatcagttaggaagatgagagagaagtgggaaatgaaaagagatgaaatgggacatcgatgttgtggaaaacacacagtgaagagaggtctttggtctccagaggaagacgagaagcttcttcgttatatcaccactcatggtcatcctagttggagttccgttccaaagcttgccggttttgtatcttctatctctacttcccttttctttttactattttttgttcatgagtctaaacatacaacatgtgaaaaaataatagtctttcaattcaaaactaattagcaatgagtgaattagcctatgttttttatatactatatgctcgatgtggattaatcctaacagtatctatatgtgtgtatagggttgcagagatgtgggaagagttgcagattaaggtggataaactatctaaggcctgatctgaggagaggttcgtttaatgaggaagaagagcagattatcatcgacgtacatcgtattcttggtaacaaatgggctcagattgctaagcacttacctggacgcactgataatgaagtcaagaacttttggaactcatgcattaagaagaaacttctttctcaaggcttacatccttctacacataatcttatgccttcacacaaaagatcttcttcttcaaacaataataatatccccaagccaaacaaaacgacgtccatcatgaagaaccctactgatcttgatcaatcaaccactgctttttcaatcacaaacatcaatccacccacttccactaaaccaaacaaacttaaatctcctaaccagactacaatcccatctcaaaccgtgatccctatcaatgataacatgtcaagtactcaaaccatgatccctatcaatgatcccatgtcaagtcttttagatgatgagaatatgattcctcactggtcagatgttgatggaatggcgatccacgaagctccgatgttgcctagtgataaggcagtagtgggagtggatgatgatgatctcaacatggacattttgtttaacactccttcttcttctgcttttgatcctgattttgcttccattttctcctctgcaatgtctatcgatttcaatcccatggatgatcttggcagctggaccttttagcttttactctacaatattttcattttctcaagtgtatatatatgaataattgccactttctgcttttcactagttttgaaaagctgagatttttccaaatcagtgtctcatttttttctccatcaatcccagtaagactttgttatgtgcaacttgaaattttcaccatctaataaaggctttttggctaatctatacttgcaccgcccatattaacatgcgcctaaatgggctatgttaattgtaaatatgggtgtgagattcaaccaataaagaaagtagcccactagaggcccaatagattcaataagtgtcttgcgttcgcgcgctatgattgatgagagactacacggcggtattccattgaaataataatgctagtttttaatgaaacttcgtgggaagagcgaaggcaaagaggggacatgttacattgccacaccacattcttctaattaaattgcgggcgtacacttgtacatgaatatgcatacaggtgttgaaaaggtcaaattatagttatcagaagaaaagattcacaaaatgggaatccaaatattacgtcccgcgttaaattgaaatgaacaatacggatgaag

SEQ ID NO: 26282 - DNA, 1088 bp, Arabidopsis thaliana landsberg
cgacaacacactgcttcgacaattttattccgtgagttttaccttattttgtttagaacttcattttggtggcgatacgtgggtggttagttattgtattccgagaattctattttcagcgagtgttttaacatgtgtagttcgtgaaatcggcaaagctttgtatcgtttaccatccatcgacgaaagatggtgtattcttgactctggagatcccatttgggaactcaaaagagaacttccttattttcgacaaggaatgagtggaaaacctgaagaacgatggagataatctgcctttaaagacatttttaaaactgtcattaaaaccaatgatttgatagcatatagattctgtctgtcaaaatcctctatacaaacacacgcacaccgtattcaactttgctcatatcagatctctatggcactaacaagctctggcgactagacagatatcccgcaatcccatgactccaggcgtagaaccttgacaagtatatgaccggttatccactgtgcttagcggtcaatgaaggacttattcatcagctcgacagcgttgtccatgaactgcattctcaggaacaacagatagatcattattaacttacaagttacaaccatcgataatagaaaacatcaattatcatcatgctaacaaaacagaaaataggttctaatgcgttcatactacgtgctgaacacatttcattactaattatgataatgattgacacgatgctcaatcaaaattccggtctaaccgatattttctgccattagctgtttgtgtgcagatgattaatctatgcataccaattagagttcaggtttctcggttagaaccaagtggcttgactagtaatgctaccaggatccaactcccactaagtctcccttgttgagccacataattactttaggatttttcctaactaacgagcttacccacacacaaaaaaatgaccatctatgatcttgagatgcgaggagttataggatacaataacctaacccttttttataataacttcacataacacactagccttaggcaaacaagagctttaagagtttaaattaacaaa

SEQ ID NO: 26283 - DNA, 786 bp, Arabidopsis thaliana landsberg
cgcgaacagcgaaacgaatccaaagttcgttacttaacgctacccagaagaattcaaatatcaggtactctgtctgtggatttgatctgggcactgcttatagctagaatcttccgtcgttttagggttcttattagggatttggattggatctacaaaattctgtcttctgggtaattcaatttcacggaaatggtgaggattaagaaagtagaatcattctacgcgaagcttcgtgagtcagctacttcattatcttcacagaatccacttttgatatttccttcaacatctgatgttgattcactttgtgcgcttaaggttattactcatatccttgaatcagattcgattcagtattcttgtttccctgtatcgtcttttttggagattcacaagtatgctggtcctgctggtttgtgttctacttcgttggagagtcctcctgttactatactgttgattaattggggttgtcaccgtgatttgaagcttgtgttgaagttaggtccctcggctcgtgtttttgttgttgatagtcataggcctattcatttgcataatcttagtgattataatgagcaagttgttgttcttcatactgatgatgatgagaggcaaggtgatttggcttatgatttcgatgtgttgaaattggcgaacgagagctttcagttacgtgtagaagatgccggtccagaatctgacgaggaggaggaggaggagaaagaagatgaggaagaggatgaggaggatgatgatggtgatagggcaagtaagaggaga

SEQ ID NO: 26284 - DNA, 1473 bp, Arabidopsis thaliana landsberg
aaaagttttcttgatgtgctttccttcataagaagaatcacactcttaagtacttgcaatattgtattcttcttgactcttcggctccatttgcttgcacaaacgttttgaatctatgtatagtcgctccactttatagcaaccctccaacaacttcatgaacatcatcttctctttcttatattttgcctttccataataagcaagataaaacctatgttcagtttcaccaatggaaaatatttattcattgttgtaagggataagtcatatagagaaacttgttactgtaagattttgttagctgattaggtacggttttacctttaccttaggaattaaggggatcatacaagagaaaaactaactttgtatatattgattgtatgttcgtaaaatgaaatttcttttttcaaaaatttacatttttgaggtttagtattccactattcggattaaaaatatagcattttggtttaatactactaccaaaatagtagaagtggtagatgacagatttgggggtttcaagcatctcggaacatgatacttgcattttgaatcaatatgagcagatttttggtggtcttgatggtggtcctacgaatgtaccaagaacggcggcaaattaaaaataggatatggctgaaaatatttggtccattgtcacttttgatgcaatctttccttgcccaccgctacattttttgtattcttctggactctttggctccttctgattgcacaagcgctcgaaatctacataaattggctccactttatagctacccttgaacactttcatgaacttcattttctgtttcttatattttccctatccacaacatgcaagagaaacccaagttaagtttcaacaatacaaaacaaaaacattgatttttgcgaaggatacagagaagcttcttaccctaagatctttctcattttcaaccgcaattagatttatcggcatacctccagaccaccacaggaaatcccaggccacaactttatctacctccactatctgcctcggtccatccctcttcaaaaccttcctttttttgtttaccttcataaaacaaaaaagagtacacttccaagtcttgctatgtaagaataatatgcatataccacatttaattcacacaatgatatgagaaaaagaaaaccagaagttggcgccaagacttgtcactgaagagtggtaagttgtctggattagtgaaaagctcgaagacagatcgtggaggcaatccaaatgtcaattctatgtacatatggcaaagacccttttttgttgtcaccttcaaccataaaaattataagaaattttttgggatctttatcttataactcaagtaattcctcgaataagagagaaaatattgttagcaatccggtcttcccttgactttaggaggtgcatcgaaccatgaatatttcttctctgcatctctccaaagttttcct

SEQ ID NO: 26285 - DNA, 1111 bp, Arabidopsis thaliana landsberg
cgaccctaaaagcttcttccatgaattttctatatgttcactccactattatcaccactctttatatccttccattttctcagctcttgttttgaatgtgaaacaacgtaattacgtaactgatatctacaatgatgtcaacaatattagcagcatcaatgccttccaagatttagcagggtcattggatgaactcaaaacaacaagtttcattgtcgttttgacgttctgggtttgtttccttattaaggttaatggaaaatctctaccatttttttttgagtaattttccttttatatttttctctatatatagatagagaaataacccaaaaatcctttgatatcagagagactccgatcaaatttcgaatcgaggggacaacgccatcattccctggatctgttttcgcccttctccacgattcaggtttgtatctatttgctttcacttcttcatatgaaaagcttgcacctttaattaattcagcatcaaaaaacaaaaaagcttcaaccttttgttttctatacggtctttgaagtttcctttttttttcctctctgaattctccttaattccgcttagcatgctcatatctatatacttgcgaaaagtggatgttattgtttttgtggactgtggatcttctctgatactctctgccatctttagcatcctcattcaattttttgtgcttgttgcagtctggtaacccagaggttgaaactattcgagcgtgaaagcacgaccctttaatccataccaaaaaaagcttgaacctttagtttctttgctgtctttggccattattgaattattgtttcctgctacaatgtcaattccgctgcatcatgtagttgattgctcaaatctttgtgattaatccagcagtttcaggcacttttatctctatggatgccaaaaagtttgacacaatctgctcgagagatgcaatcagctggctccctgacgaggttctgggtaaaatattgtctttaatccccaccaaacaggctgtttcaacatctctccttgctaaaaagtggaggactatctttagattggtggatcatctcgagttagatgactcaaactaaatgcaagccgtaa

SEQ ID NO: 26286 - DNA, 2828 bp, Arabidopsis thaliana landsberg
ttatcagtaaacgataatgttacgattacgtacgaatgaatgtaaacctcttcaatttcgtgtctatctcgactaaaaaaaaaagaaataacaatttcgtgtctatctataatatgagttggatggcaattataaaagtaattggtatggttatataaaggcaatggacatctactaatggaaaaatcatgaaaaataaactaattcacacaaaccataccaaacaacatgcaataataattttcccaaattttaacaagaaaaacaaaccacgtaatctacctatttataccttcatcggaaaaatgcgaataatacagcccaacacgaatactatttctagacactaaaacaatcctatctttggaaattacaggtcacagaaacatttgcttccagaagatttttccagttctacaagccatcaccgttttatagtcaagttccttttcgtttttttttttattggtttacaaattaaattttaacagtaataaaacgcactagtggaatatgaacaacacatttgttaaatctctttagaagctttgctgttttttctttcacctttgtcctcaagtaatttcaagttcaacatttcgttaaatcttttttgattatcaatttggtatcaatttcccaaaaacactccacaagctttgtttttcttctttcccttatttgtcctaaagtaatatcaaaacactaaatagaaaaaaaaatatttaagttgactgcattaaataaaaatcatcaactatttaaataagtatcttattatcaccagaattcaaatacgaattcgattaaaaatagtagcattactacgaaattatcttgtcaggtcacaaaaaaaaacttctagaagaaaacaaacttagagtaagaacaggacaaaacgcaaactcaaactccttttataccctcactcaccaaaaccataacacaaaacaataaggatactatagtcctttcagtagcaaaaaaatcaggggtaatatagtcatttacattaccttcaaatatgcccgggatatatgcacgcttttatatgcagcgtagacacctaaactgaatcagtctaacagagagcccaaaaaataaaattccccttctctgatttttcggagcagagaaaaaaaaactcaaaatcggagagataagaacaaatctcaaatctgaaaattctcgatttcgatttcgatcttctcatcgtggttaaacaatggcggcggcttcgaatgggagtgagtatttcgaattcgatgtagaaacaggtagagaatcgttcgcgcggccgtctaacgccgagacagtggagcaagatgaagaagatctacggtgggcggcgatcggaagattaccgtcgcagagacaagggactcataatgcgattctgcgtcggtcgcaaacgcaaacgcagacttctggttacgctgatggaaacgtggttcaaacgattgatgtgaagaaattggatcgtgcggatcgtgagatgttggttcgtcaagctcttgctactagtgatcaagataatttcaagcttctctctgctattaaagaacgtcttgatcggtttgttacgactcttcgaattctctctgtttctaattttagggagaaaaagtaaattttatatatatatatatggatcgtttgaatttgatacaaattttgttcgtagagttggtatggaggttccgaaaatcgaagtgcggttcgagaatttgaatattgaagctgatgttcaagctggtacaagagctttgcctactttggttaatgtctctcgtgatttctttgaggtttgtcttctttgttttatcttgtgagtattctaacacaatctttttttgatgattgtatctaatctctgtttgttgcagcgttgcttaagcagcttgaggataatcaagcctaggaaacacaagcttaatattttgaaagatattagtgggattatcaaaccaggaaggtgaattaaaagactgtttttagattatcgctatgtcatatgtatgatcacaagtactaatgttttttgctacttttgaaggatgactttgttgttaggaccaccgggttccggaaaatcgacgttgcttcttgctcttgcagggaagcttgataagagtttaaaggttagttgatccgtgaagttattaactatgttcatctatatcacatgtaacttatgtttgttatctcatttcgttttaaaagtcacgtactcacatgcatgtgtcctttttgttttttgcatctatgacagaaaacgggtaacattacctataatggagagaatcttaacaagtttcatgttaaaagaacttcagcatatataagtcaaacagataatcacattgctgaactcactgttcgtgaaactcttgatttcgctgcgagatgtcaaggcgcaagcgaaggatttgcaggttttttcttatttgatgttactactcactatgtaaacttcttcatcaagtcatagattctcaaatattttctgttttgatgttgtgtaattctaggttacatgaaagatctaacccgattagagaaagagaggggtatacgtccttcttctgagattgacgcttttatgaaggttagtatcatatagctcaataatctctcatgtttcttgatcacacaacaaagttttgacacatgctctttgttattaggctgcttctgtcaaaggcgaaaagcatagtgtttcgacagattatgtgcttaaagtacttggtcttgatgtatgtgctgatacaatggttggtaatgatatgatgagaggtgtgtcaggaggtcaaaggaaaagagtgaca

SEQ ID NO: 26287 - DNA, 2277 bp, Arabidopsis thaliana landsberg
caaccgagagtccacacccttattatcttgattattccttttaccaacaacttgatttcttctttgagcctcggaatcaccttggaagttttaagtcttctcgactgagtgacttctttctcaatgtgtaaactttcctttttatcgggtttttctgcctaatacttagccctgacgaacttgcttcctctaaagtagtctgagaatcagatgataattccatgtccaaaaatcctgaccgagcttcagattcttggatcttcttgaggttagctttgaaaggaaaaggacctctctgtatctcctgagataactcagtcaaaggaacaggaaaggctggataagtagaattatcctgagcatccttctctttctgaaagttaatcaaatccatattttcagtactttcaaagggagccatagagggagactgaagagatagagtcttgggtctagactctgaacctaattctcctttctttaaacttgcatctctaataatcttctcaaaattagatttatttctttgctgagaaaacggacaatcacctttctcatgagtcagacgttggcaaagaaaacacctcttcctgattctttcataatcaaaagtaaccgagacaacctcaccggtaggaatcagaacctctttacaattgcgcaaaggatttcgaacatcaaagagaacctgaactctgacatagtcctgtgcttgagacttttccaaatctaattccacagttatcactttcctaacacagcatgcaatttctttgattgtatcttctgtgtaatagttgatcgggatattttgaagtctaatccagactggaagaaacatgagtgaatcatctgaaggtttttccacccaacgctccatcagaacacaccactcatcctgagtttagactccagtttttaagatttcataaaaatcatcttccgatttgaaaaagaattgaaatctctcttgggataaagcaacacctcttacttttgtatacaacctccaaattcttggcatgtctaaaatccaattagacatcctttgattagaaggtgttcaaaaatcttcctaagatactgcaagtattcctttcaatcgaacaaaactgagcttggtttgacaaaacaagtggttcctcatctttgattgacatctcttgaatcgcttgatccaaatccatactcatcccaatagaatagaagagagaaagattttcaaggcaacagctgaactcaaaactgacaaaaggtaatcgaagattcttctgatcctggctccgctctattagaatcgatgatttgagggagaagttcttaagcccaatttgacgggacggcgttaattacggcgagcaaagtattatccaaaaacgacctcctaaaaaagagaacagagagttttttttgaggattgaggtatgaggtatctaattgaaagacgcaaaagtaatactataaggaaaaaaaaaaaaagagcatgtttatggacctaataatattcgtctgggtcggatcatttgatttggttgcctactaattatccgaatgagacgaaaatgaaatttgaatgaatgggccctatccgagcataaaatccgagtaattcgggtcgggtttgggtattccataaaaagcaactctcacaccaatccgttgctcaatcctctctctctctctctcagctgccttcgcgccggcgaagtttgtctctgtgaaaacagagagtggtagtgagagcgtgagaaatgtcgaacttgctaagggatttcgaggtggaggctaagaatccgtcgctggaagcgcgtcaaagatggaggtcgtccgtgtctatcgtgaagaaccgtactcgtcgtttccgtaacattcgggatctcgataagctcgctgactacgagaacaagaagcaccagatccaggttcctatttctttggtttctctatctctattattcagtttttttttttgctgtgagtatgattttgattttcttggttaaaaggttttatagaaaattattcattgtgatacttaaaagttaaaaccttttgaagaaggaattgataatggttgaccctgttaagcttttttttctgccattgatgatccgtacaaaaggactttatcagaaaggcgttacttgttttttttcatagtctaatccacacttttgcatacgaaactttttttttaattcatgaacttaaaactttttttttctgatgccttgtgtaatcaagattcaaattcccctttaaattttccaatttgtt

SEQ ID NO: 26288 - DNA, 3654 bp, Arabidopsis thaliana landsberg
cgattctgttggcttccctctgatagtcttctttgtcgaccacatcaaagctctggctagtcaatgaagtcggccaccatttcggcaaattattctgagctttaaggtggagatttctaggcgtagagttacttcgagaagcttgatcagaagctatgaagctcttggaatctcttgaagatgaacgaatgttatcaacagagacgaccacttccttcccaccaagactcctatctctcctaactacaaatttgggattactttggaaattaccctttaaagctgatcctaatttcacaagaaccctaattgcaaaaccaaatacgaatcctagtataaccacaccgccgacgaattgcatagttgattttttgcatgagacaacgactctccggttatcgtcgagtgagattagtgtttgcaagtcggagaacgcgtctttgctggaatcgagaaacaattggaagcggtaattagctagagttgaaatccggtgaacgtctagggttaagctgagactttggtcgtcggctccggagggagaggaagtggagatagaaagaagattgccgtcggtgtggtcgtaggatgagccattagatttccggttccggcgaggacgaggacgaccacgtttaggagtggagaaggataaaactggagctttatagatttgggatttggcggcgaagagtcgtgggaaagaagaagaagatgaagaagaacacgaagtcatgttcattgcgtaatgtttctcacttgtggactgagaatggagttagttgaagagctccggtttggttaaaccaaccggttaaagggttcggattatgactctctatagcgaatcagtggcttttaagtgacatatattcattctgaaattacatgtaatgtgtagagatgttttgttctatctgaaaaagaatacaggttttaggctttagagatgtttcttaactgacttaactgactctttgagagaaggacccaatctcacgaagtttattgcgctgaatccggcgggtacgggtagtataagatcgaaattccctgatctctaaaaataatctttggccaaaagaattcttttgaagctaaatcctgcaacaacaagtacaaatgtaaacatgggacgggaggttccagattatgattgatgagtggaggaagttttgttacttacgctgagaaagtttttatctgggaagaagtggcactctgtcatctgattcaatgtggtgactagcctgcggtaacagagaaggaagacataacaatgatttcagtttttgagtcgaattttttttacaagaaatggatttcagagaagatgggaatgtgtatgttctttacctcttcatttgctcctgctgccatgttgatgaatgagtctttaggcctgaagtatataagagaagaagaaaagaagttaaatggtgtaaaagaacaaactttgtttataactgtaatacggtttcagagaaagaataattgaacacacctatggccatcctttgcgtcaactaactctatgtttccgttttgttgttcgtcttttgcttttgaaaggggtgaaaagaactgcataaatataaggtagagaaaacaagagatgaatcagaggcagccttatagaggcgatcctttcagaaagttaattgatacacgcttgagaaacggtttgtataacattacctgatgcattgaaatgaaaactatagaaattcccagaagaaaattcattgttaatatatgtccaaagagtgctgcagatgctatgccagtaaatattgtggctactgtggacgaatatttcttcaagattgtatctgagaacatatggacacaaaggcaactaaatatcttagaatataaccttactgaccggtttatattttccaagtatagcaaaattcaaatttaatatattgaaccaccatatccagaactaatccataaattaactgaggtaacaaagttgagtgttatttttacctgcatatttgaagaaaaaggaggatagaatcccttgtgctgcgttgttcagtatcagaaacatagtagccctagaatgtccctgtaggatgtcaaaactgccaggacctgtcgacacagtggcaagattgtgattactgcgtttaacaggatttaatttaataagcttttttgcattctacttaaatatttatcgtactcttctctgccatgttaaaataaccatacctttatatataacagttcctagtattccgaggaagttgaatatcgcaccataaccataaagaaataagttctgcacaagggaaattaaagctttacattcagaacgcaggagagaatcttcgttagaatttgactagactaaagaacatgactaatacaacaacattgctaagagaggtgactagaccaaataatcgagcaagttccacaacacgagccaaaagttctgtatcaaaccacagtgtcaacacagccagctaaccatagaactgaaaaaagagttctacaacccaggcaaagagttctacttttactatagaaactgctactgtgatgttcatgccagttccagcgatgtgcctcacagattataatactaaagaatcaacagctataaccaacagttacaaacaacggtcagcacaagccttctccaatattattataagtctctcatttatcggatgctatatggaagaaaaaaactatgcatcaagattagctaacctggagataaatgcttgtgtcatactgactctttagagcatactcgttgtagacagatgccaaagatgggacagtaacctgcatgatgatgtgcttaataagcctctaacatgaattacagcaatgggatcacttccatactaaatttccaagagaatcatatataaaagccagaaaataaaacttacaaagataaaggtacagatgtatgcacccgtagcaattggaacagccacagttgtagcaccttcaggaagagaacgcagctgatttatactaatccctatgagcaacaaagcaagtgcttcccactacaacaaaaaataatatattaaatcccaataagagtaggagataaggatggtcaaacagatacatccataagaatatatctgatactataataatcacacatacaataaccaagaataagtgaagtgacctgtatgatggaaaaccgacgcttcattatcatcttcagtagtacagcaatcaccagaacttttagattgctgagcatcttcacagtagcaggattgaaatatagctggcacagcagaaaagtgaattgctgtgtgaaactaacataatagaaaaagagtagaagcaaatagaagccgagaaggctagataaatacaacaacagagcttaatgtaactatcttgtgagcaattgttcagtgcaactttcacagcacactcaaacatctatcaccaaaaggcagcatgacatattgcagaatgccgagcaggacttgggaaagataacgattatggaaagtagagggaaataacctctacttagaaatgataatgtaataatatactcaaggaccagtagtgtcaagaccaagaaatgaaaagtaacaaaatagagtatatcctcgagaagaagttaaaccaatgatcaacaaatttgat

SEQ ID NO: 26289 - DNA, 1484 bp, Arabidopsis thaliana landsberg
ccagtggttagtagatacagctataggaatattcgtttcggtttgtgtagtgtcagagcaaacgacggcggaagttccggtagtgagagttgtgtagcggtgagagaagatttcgctaacgaagaagattttgtgaaagctggtggttctgagattctatttgttcaaatgcagcagaacaaagatatggatgaacagtctaagcttgttgataaggtctgtttcaatgtcccttgccttgtttatgaagaaaacaaaccactattcgttgtgtatttatggatttgattgtggatttttgtagttgcctcctatatcaattggtgatggtgctttggatctagtggttattggttgtggtcctgctggtttagccttggctgcagaatcagctaagcttggattaaaagttggactcattggtccagatcttccttttactaacaattacggtgtttgggaagatgaattcaatggtaaaaatctcaatgatccattgttttagtcactatcttcatggtctgtgtttaacatgttgtttattgttactgttgaagatcttgggctgcaaaaatgtattgagcatgtttggagagagactattgtgtatctggatgatgacaagcctattaccattggccgtgcttatggaagagttagtcgacgtttgctccatgaggagcttttgaggaggtaaagtatggttccactatgcatatcttgagaggctttttctctagttatttttgcatgactttgaactgttttaaatacataatttgttattaatgtcttctaggtgtgtcgagtcaggtgtctcgtaccttagctcgaaagttgacagcataacagaagcttctgatggccttagacttgttgcttgtgacgacaataacgtcattccctgcaggtaacaagtcagctagtactattctggttttaccactacgaaaaggttctgacttctagcaaatgcaggcttgccactgttgcttctggagcagcttcgggaaagctcttgcaatacgaagttggtggacctagagtctgtgtgcaaactgcatacggcgtggaggttgaggtataatttgaatatgatattccacagcaataactatatggaggaatcattgttcattgagactgtttttctatttgaaatcttcaggtggaaaatagtccatatgatccagatcaaatggttttcatggattacagagattatactaacgagaaagttcggagcttagaagctgagtatccaacgtttctgtacgccatgcctatgacaaagtcaagactcttcttcgaggttctctttggtgtttctctctccttctagttaaatcgttattgtgataagtctgttgctcatcagctggaaatcctttcaggagacatgtttggcctcaaaagatgtcatgccctttgatttgctaaaaaagaagctcatgttaagattagatacactcggaatcaaaaaa

SEQ ID NO: 26290 - DNA, 1128 bp, Arabidopsis thaliana landsberg
caagcataaatattgttcttgtattagaaagagatagagactgactttgttagcccatccaagtcctcaacagttagtgaacacgcactgtctaaaccatcagttatgagtgttttagccggctcaaatgccgaacagctattacatcacatctaagataatgtaagactactacaaaggatgttgctttacacttctcctgccacaatagaataattaaacgaatagatgagaaagattctgatggataaatgccaaaacatatcaatcaactttgataaaggttggtctttactaaaaattatatttttactgtgaacccggttccttttaatgtcaaatgaaccaagtgtatacaagatttttctgccatggcttgctttggtcgtggaaccatatataaaggaggcacaacattcatatgaatccattttcattcttggttttggaacagaagatgaaaacgaagaaacttaccctacaaattcggcctcgtcgaagaacatgagcaggaaaatttatgaacttaaggaaggcagctgcatgacctcgccaccaattatcaccatcaagtttaggccgcctgcaaataattgcaaggaagtttcttacattgatataatatgtatttgtccgtatcaagatcagacacaagggaaaggtatgaaaactggaaagagtaaacttcaaagaaacaagttgagtttcttcaaacgagctaaccaggtatagtataccatttacggctccaaggtgttaaaatcccttgtctacaaatccatgtgcataaaaataaagcaggatttctcccaacatcaagcagcggcccctgcacaacacgtgaaggttagagaaatctaccattttaagaagagttttggagcctgtgttgtcaaacatacagtataagcagcttctgcaaatttatgcaacatagcagcctcctgaagatgaaatgctggagcttccatacagtcctcatatgattcaggaaactggctattactttgcagcagagcaaggcctgaatagataataaggttcacacactgggattacttagcaagaagagtagtgacaagagactacaacacagagtgtacatcatagcatatcaatttaagcact

SEQ ID NO: 26291 - DNA, 1622 bp, Arabidopsis thaliana landsberg
ctcataaaacattaaaaaccatggttttttatagcatcataaaccattctctgataccaggttgtaacacccctatcgggctataaaaatataaacgaaataggagcgtcacgttaaatgcccgcaatcggccaacgcaggtttccgaaatgaattcgttcgcccgagtcgtccaaccgtaagagtccagcctctcgcccctggcctaaggcttttcaacccgtactgcggacgcgagttgtgtaagtaggacaagactaatatcagtcagtataaccatataaattttagaaatccaagtcttatacatatatatatatatatatatatatatatatatcatacgagaaatgcttaccaaaacgtatatagttttcggatcctttttgaaaaccatacataatatacttagtaagaatttacaaaaagccgtaaaacctacattggttcgtcctaagtcatgagcatcctctacaaggttggcaactatggtatcctgaaaagaataagtagcatcataagtaatatacaattacatagtgaaccccagatctagacagtgttatcctaatacccttccttaccccctaagcagcaaacaacacgtaacaataatacaacctaacaagcaagatataaaaaagataacacgcaacacacaacacaagcaaaatataatgcacaatgcaaaatgcatgcaaattcgaatttcttaatatgtagaggataactaatgcaagcatgcttctatcaacctaggtaaggccctctacgaatccatgatctcccaaggacatgcctccatactcttagacacaaagtctataagagacatagcattcctttatacttcatcgtcatgtagcgcccaatcggtagcgatccagccccgagccttcgtatgccataacggaacaaagttacacgcaacgcacaacatacggacgggatcctcatggttcggctaatgctagtcatctaattaaagactaactaatatgacaacagactcacatactatcatgcattcatcctatatgcaaaactctactaatcaaacaactaatcgtacttaattactactaatcgcggttagtccccttaatcatggtttaactagccctaatcatgcttaggaaatattaatcctaattagtcatactaatcctaattaacaattactaaacctaattaactatcctaatcaaggattaagcgaataattaagctaagtaatcataattaacctcctaagctatattaaggacataaatgaataaactatcctattcacgtgctacttcacgtggctcaagactcacttggatttcccgagcggtttggcttctaaaggtttcctcccgcgaactaagctcttctcagtgatttttgggtctaaggaatcaaatgagcggagggagtatttatatgggtgttaggtcggctatggggaagcacgaggtggcccggaccagtcagaacgcaacaaatgtcgtcccacgggcgatccaggacactaatcggcctccgattggttccttccgttttttcggataaatatcatccaaaaaaggataagcacgaccctaaatggataaggatgaatggcttgtagataagct

SEQ ID NO: 26292 - DNA, 1630 bp, Arabidopsis thaliana landsberg
ctaataccgagtggaaggcatttttagttaatatagttaattcgtaaatcaatataactagaaaattattggaaccatattttaaaatgtcaaaatatcaaagaaaagcagtggtatctacatatacatttttgcagtgaaataaatcctggagttaatatagttaattcgtaaatcaatataactagaaaatgattggaaccatattttaaaatgtcaaaatatcaaagaaaagcagtggtatctacatatacatttttgcagtgaaataaatcctggagttgagatttatttacaatggctgtcactgacttttaattattggtttttttggtaataaattaattaacaaacaaaaaatattccaaatatattctaatcacatatgtcatgcagatttctccaaaatctgaagtagatttcagcaactatttaaaacaaaaaatgtttgacaaaccaaaatacaattgcaatcccttaaaatgagcaaaacacacctaaatacattctttatctatacaataaatcttatttctccaaaatttgagctagattttggcaactatttaaaacaaatatttgtttgacaaaccaaaatacaattgcaatcccgtaaaatatttattttaattataaatttaaattagcggggtaccgcgggttttttttacaggacgggtttggcgaaacgggtttggaaggacgttacttaataacaattgtaaactataaaataaaaatattttttagataatataatttgcaaaattttatatatactaattaaaaaaaaaattgtctctgcggtgtaccgcgggttaaaatctagttattacttaaatgggttaatccatttaacaactcaacccatttaagaaaatgagttgggtctacccatagctcatttaaccctaaactcatttgattataagttgagttaagttaggttacccattttgacacgaaaaatatttgggttcacccctagtggtgaacctttatattcacctccttaattttagccaatcagaatttgccatttaataataaaaataataattttatttaattaaaaaaactaatttttcactaaaacgaaattatgtatcggtttgggttttttaaaaagggttagggtttagattttatgattaaacaaggttaaatattagtttgggtttataaatagatttaaattttacaattaaacgagggtttagtttttttacgattaaatgagtttaaatggcggtttgagtttacaaagaaaaattaaagtttagatattggaattaaacgagttctatatcgggttggatttacaaaaaagtggattttaatgatttaatttttttttttaatcagataacatgacaaattcagattggttattaaagagggagtaaatgaattaagttcaccttttaagaattatcataatctattagatgaatttacatttttcttttcttttctctccctccattttgtttgaaattatggatttgattgctaaccttgattaatagcaaaaatgggtgaaatggaccgtttttaaatgccatttcaacaggtatttttatcaaataaaaaatttttttattgttaaaaccagggaaaaaacgcatta

SEQ ID NO: 26293 - DNA, 1398 bp, Arabidopsis thaliana landsberg
ttagatttttttaagaaataagaaaattgataaaacttttttctaatcactatttggtcggtttacgaaaatgggttccaactttctatactgtattagagtaattaagcccagatctgagcatatttggtcttacatcagcccattacgaatgcttgattaaacccgtagtgttttcaagtacggattctacgctctcccagccgtcggatgataagcgaccaatgattatgagccgttcgataaatcaccacaagaatctaatgtgagtgcgatcaagaactggtttcagtcatttttaacagaagtctctctttctcaaaagtcaacccgttgttttgcaatcttgtgaatccctctgtaagtccttcgtcgttctcacagactggagattttgtttcggaaaatctgataaaagaaagatgtctaaccctcaagaagatgacaagaagcccatcgaccaagaacaagaagcttatgttattctcaaggtcaagagccaggtttgttttcactgtgtccatctatgcaatttctttagataaaaacttgataacatcctttcgcaaactgtgatatctaaagtaagaatgatttattgttttttcaaaaaaagaatggttaaatctttttcttgattggtgatactaaggatggagatgaagtcttatttaagatcaaaaaaagcgctttgcttaaaaagctcatgtacgcttactgcgaccgccgaggtttgaaattagacgcattcgctttcatttttaatggacttcgtataggtggcctggagactccagatgaggcaaatcactctctttatcatttcccttttacaacttatatgtttgtcaaaagtgtatcatttactaaaccaagattctccaattttacagcttgatatggaagatggagatgtgatcgatgcgtgccgggcgatgagtggtggtctacgagcaaatcagcgtcagtggtcttatatgcttttcgatcataatcggctttagacaggctttgtgttattactttgactactttcttcaagaaaaattacttgaagtgtaaatcatgactcataatcggttatcgtgtgtgtaaatcataacctgctcatgagttattggatcttctgatattaatgggatctagttatggatttttagaatctttactttgttagttttagaaccatgaataaacaactcaaaacctctaaattcaagttggttaattgtaaaaggccacacaacaaaaccatactaaacaattgaaatctttaccggttcactttgaacatcttcacttttcccaactcaaatcaagccggtcattgaaaaatcaaatccataatctagttcataagaaagacttgaaatttctcataacatacttttctcttga

SEQ ID NO: 26294 - DNA, 768 bp, Arabidopsis thaliana landsberg
  unsure (1)..(768): unsure at all n locations
ccctgttgggagaagaatccgaccaaggaggaagagagaaccaaccccgagcgagtactatcaatatttgaaggagttgaagtttgagggaactagataccctcataaggaaatgatgcaagagcttggtatttgtggtgatgtggaatacttgatggaattggccaatcttgcaacattcatgagctgccaatgtgggggatataaagaggagagctgccaactccttgcaaccctcaaggttcatttttgtgttgacgattcagagaaagaagagagaggaggtcttggttacgtaactttcaaggttagggatgttgagtgtactcttgatattcgccatcttgataccattttcgggtttccaagtggagaagaaattcgccaagactatgatcaagaagagctaaatctctttggaaaacaatcgccggtccgaagcccttctcccaaccaagaacaagagttcttcaatccgaaatcccgtgattagatacctccactaatgcatcgccaacacccnnnnnnnnnnnnnnnnnnnnnnnnnnnnnnnnnnnnnnnnnnnnnnnntgatagaccaatctttggtcttcattttgaaagagacaaaagataggaggaagatggcgggtgatagagcagacacttcgctgattgttgttctcttcgatcacctattgagctacaaagagtatgctgcaaccatccatcgctcgggaattcgcggaagtcttgtgttggtggtctcttaacgccaatactaggagt

SEQ ID NO: 26295 - DNA, 1200 bp, Arabidopsis thaliana landsberg
attatctaaagactagtaaatttatttgttttgaccaaatattatcttaaactgctataattaaagtcggattataatatctgattttgcaaaaaaaaaaaagaataccaatttaacgtctgttgaaaaaaagaaggtacaatgtctaattttggaacgttcctaattttgataacgcataatatatttaaaaaacaatatacccgaagaaaaaaaactaatgatatttaatttggttttaagataaattttgtttgaatcgtaaggataagtttgaaatcgtaaattaattagtcgtttttaatttgttttattatttttttaataattaaaaagattctgaatttttcagagtggtcgtgtgttcaaagttttccgttacgtccgtactagttgttgttacacgccacgccagaatttagtctatgcaattactgatagggtcttaaattactatataattacgagatttgccaccaacagtacaattcacaacaaacacatgcaaaatctacgagcgatatcatgggatttgtttgaccaccaaacaaaattcatgggacttgctggccacggaaaataaaccggatggttatttcaaaattttatatcgggttagcaatgcaattccggtttagtcttaaatgcatacgttttactgatttttagggaagactattagtatcctgaggtcaaattctttattttttgcgtagatttctgtaacaagatttacgtttattttcaaaattataaaaaataattaattcacactgacatagattttgaagattttaatttttaacgcattgcacttattgtggtcaaattcacaacattaattagactgtagttttggactagtgctttcttccttccaaaacaggttattagaaggattaatagtctttgcagctctttttgtggtttggctccggagctaaattgtcatggtatgatatatgtttccataagctagagggtggtcttgaattaaggagcattggtagttggaacgagacttgtgctttgaaaccttttttggttgttgttttttagaacccgttctttatggatagcatgaataagaggtaagtatctttctacctctcctttttgggcgtttaatgagaaaaatgctatctacttttggctgtttagaaaatttcttcaacttcgtcccaaagctcttaagttttt

SEQ ID NO: 26296 - DNA, 1196 bp, Arabidopsis thaliana landsberg
ccatacctattaaatcagatgagtccatagagttaaccaaatttccatcgtcattataaatgttaaaggcgacttagggcattgaatttgtattaagcatgtcaaagatgacatagtgacaagatagccaattactattacatccccacaatggagtataaaaattctacaactttatttgcatgtaagcaatcacaaaacattgcataagtgagtaaataacaaaagatcaaaacaacaaagatggagtccattaggctcaagtcatcatcatcatcatctcttacgagagctgcgcagtgatcttggagatggcaaacattcaaagagatcaaggagcatattctcaatgtcttcacaagtgtatcggatgtgtttttcgcctatgcgaactgcatttcttccaagaaatcctctgtaagactgaacaaccttgacagaggtcgagatgtgaagatcatcgcggagctctgaatcagggactgaccaacgggtttggttcttgtaaacatcatcaaatgcaaggctgaaaagtctgcatctttctctcagggttcttacagagtcgttgttgtctctgagcaaagcgagtatggagctccatgtggatctctcgtagttagtgacattgcgttggtagcttgcaatgtgctttctgatccattccgctccaaacaagcgtttcagctctgatccctttaccttctggaccatgtaacgaaagttgttcatcaggaaaatggatttcagtgcttcgtctgcgtacagctgagcttttcgctcaaggctggattctagagttgtgacgattgacctgaggtgtctagccattggagagaatgtcgaagggaggacatcttctcctgttttctcggggatggagtcgtcaacgtgtatgttctgaagcagtgagtttagtgagtcggtatactccgggagaagcttcaagtagttcattacatacctggtcaggtgatgaatcccgcctccatgaaaggggcgtgtggattcatctgaggctattgcgtctttgaactttaagaaggttgtggttgtatgatcagctagtttttttgacaggttgtgaaatgcaattcttaaagacgagcctgtttcatcggggaagaggttatcgacatccacgagaatctctgctgaaacctcatacatactaaggaagcgctcaagcatttctg

SEQ ID NO: 26297 - DNA, 873 bp, Arabidopsis thaliana landsberg
  unsure (1)..(873): unsure at all n locations
ccaacattacaaggtgatcctttctctactcactttcttcttttcttttcgatctaacttctaattttctgcgtttacgtttgtatttccattataacatagaaatatgtaaaccatggaaacgcaaacgaaaacgaaaacagaaaaataaaagaaccttaattacatattaggatggatcaccagaataattttcgtgatttgttgcaaatgtactatgatcgtgaacttgtctaatgcatattacttgttatactatccatttttaagattgtaaaacgatttttttttttttacttcagggcatagttgatcaactttattcagaagcaaagaggtccatggcatagataattagataccgatcggctattcattttctgatgctatttgggtttgtatgatatgttacaaaattgtgttcggatcctctcatcatgtgattcttgttacactaaatttatagtttggaaactatatatatactattaagcaacgtttactaaagatttcttgatacattttgatttatcttttagttgtccatacttttgatactatgataagaaaaacctcaaaagagtatcgaaattttaacttttcatcgtttaaaagcaattctcacttctcccatctttttatatatgataattttctaatggttgagattatttttctttctggaagattgaccaatcagaaaacgacacagcatattaagttagcaaaaagaatctccaaaaaaaaaaaaaaaacatttcgcacagccccacccatttcaagattttttggtccatangaatctcctaccgtacgagactctcgccacccttaatatagaggtttaaaatatgaaaattttaaagaaaggtt

SEQ ID NO: 26298 - DNA, 1204 bp, Arabidopsis thaliana landsberg
  unsure (1)..(1204): unsure at all n locations
aagtagagaaatcatcgtatgcaagatttatattcataagttatttaatagatatgatatatgcatacgtgcaccatgattccatgtgaatgtagtatgtatatgtattttgtaacacacaagcgttagtcgtcggagtaatagatagtatatatatgattcaatctagtcgttaatttccttaaccttaatttacaataataaatatatatatatatatatatatatatatagatatttaattgtttactatttgctcatacagatttgagtgtttttaaagatcagctgaaattcgtctttagctaatatttatggtctggccaattttaactcaaagggtaagaagactaaagtcactgtacataaaatacactttatcagtctatatccaaatgttattaatttttttatttattatatacttaaaattgtttagttattagtaacaaatatgcatgtaatcaaaatttagtataaacaccggttaaaacaataaaatgtataaattccaattcatgaggggacaaaaattagctttatccatactatattcactagacgaaaacacatgacagcaatgagaagatagaaccgcacagcagattttgcacatgcattagaacttataaaggtctcaccgtcttaatcacaaacatctcttcattagttgttcttcaatcttggtttagatttggaaaacacatgattataatttttataattagataataaacatactacgttacgtatagtaacatcaatcattttagttatgattgtaagaataatttaatgcattcctaatatgatatttataagatcgactgcattgaaataaactttaacattggagccaaagaaaaactatgtaactctttcttttttgtggccacgagaaaaatctataacccattaacattttctttttaatagaatcccaaaaacttattgacaaccataggtaattttatcatccaaattattgagaattgatcagatagtgatttgaagtactataatttcttcgcagtatattttattaagataattttttttatcttcgcaatatatttcatgcttcacctttgaagccttgccataccttcatgtgggttggattgatagcattcgatgtggcctttgnttccgacagttggttgattgtgccaagctgccaagcgataaatggtggttaaaacta

SEQ ID NO: 26299 - DNA, 1475 bp, Arabidopsis thaliana landsberg
tagagaagtgactaaaaactaaagagattacatagtatttgttttttatatatggaggaaaaacaattaggcgttgaagaaattttcttgcgtgtattacgcatcatcatatgaggaggagcccttttgtgtttaggagggacttgttctttttcttcttctgcttcttcttcttcattgtcatcctcatcatcatcagcttgatcagttgtccaaatcatcttatgttgataatatctgaaggcgacgagtaacatgaatgctgcccaaacacgggcagtgactgaggagagggttcccactgatgtgaaaagtgcccaagccactgcctttttgtgattgcaagattcccatgcgtccctgaatctcctcatccagaaatttcctgaattgtacacaactttgtttgattaaaaactgtttcatagaagatgtaactgaaagatattaaaggagtttttagttaccgtatgcagagaagtgtgttgagtatgatataaagattttaggtattgtaaatgctcccaaaaagcctgttctcgcgaggacaaagcactcgcgagtcagaaatctacatacaccacttcttaaaacaagaaatcttgaagtctagaggtaccaaatttggcgaggttccaaagagtgatagaagagccacacctggccaagacaggcagcactactcccatctgcaaaacatcatctcttctttattaaggtcaagggagaaagaggaaacgaaggagagaaagtgaccagaaaaagacttaccttgagagtggttgatggatcaccggagaagagagctctgagttgatgcagagactcgttatgataaggcattatgagtctgagcatcctcttaacatcttcctctctaactccaaccactttatgtctctcctcctccaccattcccctgcgtccattattacatgcctattaaacccaatcacaaaaacaacatgcaaagatagagagagagaaataggtctatgtatcaaacctgtggatcagtgattttaatacgaacatgagaccgagatagatgagtcccatgtacgctaccaccgatatgaagctgtacattttcatcacattttagttccatactacttaactaacttgtgtgtagattctccttgatcaattgaaaagaactaaagaacctgaaattgagatcattggcgtaggaagaagagatgatgaggaatgttccgaagccaaacacaagcgtcgaccttgatacatccctccacatcaccagatccactgtccagatttcatttcattatttaacatactttagacttttcatagtaaaaaaatttgtagatggaattatgcacagtaaactgttaagaaactcacccagactctgcaatttactctgtgaatgagtaaagttgtcttcttgctctgcaaatctatctggaaacagtcgtgaaaaacagagaattcatcaggaatcagta

SEQ ID NO: 26300 - DNA, 1227 bp, Arabidopsis thaliana landsberg
aaaaaaaactaaagtgcagagatgatcattgaaatcataaatagaggaatggaaatttacctgcactgcggtacggggcaattgagatcttggcaatggtacacatgaatccttattgtctgccacaatttgtagcaagtattacaacgagttcccttctttctgattttgcattgtacattgtgagtgaacaatgctttaacttcgtggcatttcgggtatgagcatgacttagtggtcttgtgctgacacagaagcgcatgcgatattgcgttcaatatctcaagaacctaagagagtaatacgttgattaatttagtaaacaagtcaaaagtaaaccaaagaaacgatatatactttcaggtaacatatacttaccattacggttctcgacggcgctctattagctgaagggagtgtagggaaaatatgaagatgacgaagggttctgtttttggtatagcatccagtgcaagctcggtaatccggacagagcaaacaagggaagtaaatcgttgtcgaaacatcttttttgcaggccgtgcaggtgagactgctagagttttgagagcaatgatgcttgtttgaggtgtgaagatggtgaagtatcataaaagaaaaatgcttggcatgtcgaagcgtgtggaagttgtaattatgcttttgagaaaaagctaagaacgcttgtctgctttcgaacatatcgttttcttggatgatatcattatcctctgttgtagaaaacagtacgccgttcacctgaacctttgagagctgatgcttctctttgtccatcctcttatatatgtgttctccaggaagctcttgtcctgcatcatagcagctttcacacaaatgaagattcttgcacttctcgcaaaaccatctcaatcctgataatacggctttcgaacagcgtgtgcatgaataattcaattccaccaccattaaatccttcttatttgggaatacctctttttccagctacacaaaacagaattgtcaaagattaatcaccttcaaaagttaccaaaataaacgaaaaaagatccgtatttaactctatgtccattcaaaatgtaaataattaccttttccatcaggagaatgtttttaacatcatcaacatcaacatcacccgtagttttggagctcatagtctctcttttctctagaagcaatataaccttcttctgcaactcatattgcttctctttcatgtcttga

SEQ ID NO: 26301 - DNA, 1422 bp, Arabidopsis thaliana landsberg
acaggaacaatacagacaagcttgacttctgattctaactgtttattcaaccaaagaatagaagccaatgggggggggtttgctaaacctgttgtctccaataatatatgatcaagcctgcatagaagaaagaaaaagcagaacgtctattaagtgaaagatacattcttctccaaaatgcaagtaataatactacaatttcggcgatatatgtgcctatggtttgctaagccatcaccaatcttagagctttaggcctaacaatcatcacgaatatctcagtgtgtctagaaattagatagaagatcataaatttgagctgaaccagcgtttaaagagagatagagaaacaaagcacctgtcttttctctgaacaagctgctcgagagcttgaacaagactatgcttgacagtacaacaaacacagccattagcgagctcaacccattcttcaacaatggcaccttcttctccttcgttaatcatagccctctcaactccaatctcttccccaaactcattcaaaatcacagctattctcttcccgtgtttcccgttcaatatataattcacaagctggtgcaaaatcaatcagattacacaccacaatcaaaaaccaaaacccaacacgtaaatcagtgaaaggaagggacttacagtggattttcccgcgccgagatagccagtgataacagacacaccaactgaaacagtgtcgcttgatgagtgaacctttccgacagaaacatccggatggatttgaacagccatcggaggttcttcatcatcatcttccattttcactccctcagcttcttccttcagcatcgccggtatatgcagagacgccgaaaaagacagagctccatatatgggccgagctcacattagcttggttcggttcggttcggttcggttaaaatgtcaaacgactcaaaaaccctaatttttaacaaacaaattcttagtctcctctgctcgattcttgcatctgagagaagagcaagaactaaagttctctcgttgtcttttgttttgaaagagagcattttttggccctttagtctccatttctctctgctccttctaaggttataaggttttttttagtctttggttaaacgatgggaaggacaaagaaacctcaaaagtttgcagtaatgaagatgatggtaagccacaaagctttgaaacagtaagtaacaattctacttccttgaaatttgatatctttaaggtttgtttacttgatacttatcttcagttacaaggaggaggttctgaatccaaacaagaaggacctcactgaacttccgagaaacgtgtaagctatatttgccctccagcaaaaataaaaaccttcgtgattttggatcttcttagaaactttggattttgatttgtgattttggtggtggtttg

SEQ ID NO: 26302 - DNA, 760 bp, Arabidopsis thaliana landsberg
tcattcttaggttatgcaaagatctgtgttatacatttatattaccagaatctcacagaagaaaattgcatgaatgtattctttggtaacacattctttatactattaaatcagctgcaatataaaacagaccgataagacaaacacgatttctcatcatacaacacctcgctcaaattgagatatcaatgtaatatcagttgagaaattaacgcctaacaacaaagtgtcaaagataccaacaactcctttgaatagaacttcagcatgataaataatgcttcaaaaaaaatcaccttagcgaaagcagtaagttcccaattgagtttaagaaaagagcgaggagtagttgaaagacacttacatttgaaattggggttacactgggatcattgtcctgtggattattctgcaactcacctagtataaagagagccaaatgttaaacaatgacagctcgaacgaataactcatctctctgtactaaattgtaaatacattgcacaaagtcgagataacaattgcactatatattttacaaacactactttttgagccaacaagtaataaacccatcactcacttgacactaaaagaaatttagtaacaccagagcatacatctggtcagtatcaatgtgtctcgctagcaaaaaaaaactaacagaggctaagactaagaccacactgggtgacaaaatcatcttacttgaccatatatagtcattaacaacaacgcaacctaggagcttaacttctat

SEQ ID NO: 26303 - DNA, 1102 bp, Arabidopsis thaliana landsberg
  unsure (1)..(1102): unsure at all n locations
tgtctgcttacgtttcccccctgaacgtaatcaacgttggttcactctctccctaaaacataataatggaaccgtagccaataataagtcaagttgcaacaagatgcaagcttgatatatagtcctcgaccatttgatatagtctaatgtgtatcgccaatcagaatttgatgcttcattagctttgtcgtctttaattttgcacatgcactcaattaggtttaaattttttgatcataacaaaataagatcatcaagataataacatgtaaccatgttttcgatactaaacctcactcttagtcctcctgaaacaaaagtatcaaaataaaactagcgaacgcaagaaaagaatcgaatggttcgtttgtgtatcaaaacatgggaacttgaaagtaatggtccaaaattctagaaggaataaagagttaataaagaagtgacgtgagagaattaaacttctaaagtagagaaataatgacagatggttgtcatctatacatatgtccaagtgtaccacaccaaatagtgaaccaactcactaacaatttttattttcgtttttgggggttatttcactaaaaagaagtgtgttcagaggaggtcattgttgtttagaaatccaaacatataacatgttcacaaatcatcatatgaaataggtaaaaagttataaaataccacaaaacattaaagatttttgtcaattgacaaaaacattatgaagcttttacaccatcataaggtagtttactttacaaactttaattagtgatgtttttcttacctgtaaatatgacacaccaagcatcctcaatattcttcaacaattttcattaaaatttgaatttactttttgaagaccaactctataaatacaatccttcgcttcttcgctaaactcactcacaactattcctccttttctaaactcagcctttttttcctttgtccatattcttcttcttcagagtctccaaatggctggngatgaggtatttcttcatttcttgtgatccaattgtcaagttcaagtgttattaatattgatactcgaaaactgcaaaatccttatttcattgtctaaaatccgttgacataa

SEQ ID NO: 26304 - DNA, 1570 bp, Arabidopsis thaliana landsberg
  unsure (1)..(1570): unsure at all n locations
ttgactgtggcattttcacaactcccgagaaacatttactacttgaaacagatgaaggggtaaaaggagacaatataaccgccaagtcacatgttttgtctgatgttctcgctgctgatgtgccccattctcttatgggagactctgagccagatgaagctgaaaaaacctccgtagagatcaaggatgtggaattgttgggtgaatctaactcttccactaatccagagagccccacactgtttggaaactccgaactagatgaatcaagagattcttcagcagccacgtgcgaagaggcttttgttaccacttctccagagaaagaacttttaattaaccctggaaagcaagaacaaaaggaggtggacgaaaatgtggttcaggaaagtcacgttgcagctccagatttcagaggaaacaccattgttgactcaagcggtggtatcgcatccaaagtttcttacaaccatgagcttaatgcggggcaagaaactgcatgtgcagagttaatgtcaaaaggttctcaggcagaggatgttgtaggtcttgatgctacacaagggacatcaaagaaaagaagagggcattctccacatgctgactcagtaaatctttttgattctaacattgaggaggtagatacaatcatggaagcagaaagaaatatttcctttagctcctatgttgcggtaccagccgagggtaactccgagacaattggcgaaatttccagctaccttgaagttgctggaacctgttccatggtgtttggtgagcaactttcaatagaaaattccatagagccaacataatctaaatcatatgacgtaaccataagataaccctcttgtctgaagttattatgcttatgtcattctagaagtttgagtttagattttcatatctctttctttannnnnnnnnnnnnnnnnaatctggatcttccacagacattcagaaccaaataaatgatgcgctgaaggaatgggcaataacaggtaattatcacattaacactcttaattttcatcatcaagtactttgtttctggatgcatttcatgagtgaaagatagtctaattatctccaatcatttgtagacaaaaatgaagcagatgagctcatagaagcaattgtaactaagaacattcaaaaagacttcgaaggaaatctccttctgaactcctcaggtggtggctctaatgtctctggagaaacaagcatcttagctggaacggcggatgaagatgaagcagctggtccaattgctattgccttcggtaaattttctcttttacagacatctaagcaatttccaggtgttaattattatattgggatactctcgactaattactgcttctactaaatccattctcacagttaaagctatgtctctgactcctgatgaattgactgttaagaatcacatgaatgaaaaaggttagatttcttacagatgatatgcctcttatattcaaaacaatgactaatctctagaatcatttacctttatgtttctttttaaaatagctgcagatgaggaaatgatcacgagagaaactac

SEQ ID NO: 26305 - DNA, 2416 bp, Arabidopsis thaliana landsberg
gtaacgaagttctttaagaagttttttgttatgtcatattaggatcttgattgtgttcgaactctatgtttttatcagaaaatttgaaaaatctatatttgtttgttttaaatagtcaaatgataattggtatttaggtttataaatgtgtagtatcgacattccatttgttttttatatgtatagtatttttcagttgcatttaatgtgtgtctcctgaatttatgatgcaggtgggttatggtcggtgagtggaaatgcaaagaaggagaatggaaatttgaacctgaggaaggcatgtttggtcgttgtgtacgcgttcaggaaaccatgacgtacacggactttgtccgtacactccgagacgctttcagtttgaagtccaccgagatcaatcccataattagctactggatgccgggagagatgttagtgatgatagatactaaacgccctcctgtctacattgatagtgaagtggggttgaatacgttcttttttatttgtggtcagtatccttctctcaacttgtttgtctctttcattacaaccgtcaagacactcggaaataatgtctctaggactcatggtgacgatgctgaaagtgactgtgtgtgtgatagtgtttcaaatgttgatgaaaataatgaggtcgtagatgagcaagacgacgttgaagacgataacacagatgaggatgaagaggagggggacaacgaagatggtgatgggtatgatgcttattagggtgaagatggatctattgggggaagtaccctcgatcctactattgacggtagtgaaagtagtggtgaagattatgattacaacaagtagaacgatgtaattgtagaagaatatggaatagggaatgttgaggagaacgtcattctcacaccaggggaattcagtcgtttattggcagagtgtacgtacacaagtcaacgtgtacctcgcggagataacatttctcattcgggtgaccgtacaccagctgtgcctctaagaagtatgtgtcaacatggtttgtaccaatgtacgttcactatagattgagaagtgtttttaagaacagaaaagttatacaacaaacaatgtcttatctcagccactaccaatattggtttaatattgtatcaataaatttttcttgataatttaattcacaaacaaagatgtacgtatcttattacccatgtacatacattcatttaccaacaaaaatatacgtacattattacacatatacgtacataactttcaatatgaggaacaaatattatttcaccatctatttctatttaattattatgtatgtatggagattattgagatataagaatacgtaataaaatagcttgagttattagaaatcataccatatacgttcgactaaataattttgtgtacgtacactttaaattgaatatacgtacacagaagaaatttaatgaagggtataattgtaattttccagtcatcttcaacctcttcttccctaattttgcagccgcttgttaactcattaacatccgaaactcctcgccgccgactactcttcttcatctccgccatttgactatgaacaataattcaagaaaccagaaaatcctctttttgttatcctttatcacgagctcgatcgaaatttcctcaacttaagcaacgactagaactcgcacagagcctcaatcgaaatttcactttcgatcagagtttgtgtttcgtcggaattgttcttcgtcttcgacaaacagtttttgatttcctttggttgtcagaaagttaataacgtgttttttatttaattttaaatttaaattttggtaacaagaaaaataaagtaacgaaactgaaccgcctcctttcatttctcgttccaaggcaaatttgtccatttttggctgaatggctaaaatctggttgggccagcccactttgtctttttgtgaaagaaaaagtcagaaagggtgtccacggtaaaaatttcttttatatctttagctcattctgtttttggtggttatcgagtttgtcgtatcaagtgagagagagagatcctttgtagagagagaaatttatcggtgatctagtggattctggagaatctccggagagacgtacgctaacctcaccggatagctgaactcattaaagcttggtgtcgtttctttcattctaaaaaaaacacacgagagacgagagtgttttggtgagctgaacttgaagtcgattcatcttgaatcgtacagtaatgctgaccagaaccagccgctttcatcgatgtaactgcttgcaatggctccctacatttttcaactctcatgtctaatccaacattctgacatcgattttgcatcttcttgtggggaacattgggagacagtgacctcgatgaggctaatctgcatgtact

SEQ ID NO: 26306 - DNA, 1314 bp, Arabidopsis thaliana landsberg
  unsure (1)..(1314): unsure at all n locations
cccggcttttgtatttgggatacgaaaccacattcaattatataactttttctgcggttgctcgctgttttgatacgcatcggtttagattaaagctcgtcccgaatcatccatttacttgtctttaaactacttgttgcagaatttgacttggagaacgagaaaagcctgcttgacgagcaagggcttagaatagctgaaaatcaagaaaacagccaaaagaatcgccgaaagcttgcatagagcacacgaggtacttttttgtttcaccttttatattgcttaacacttcaacattttctcctgagggacctcgataggttccagcgaagagatgttaacatattctttggtttatcttggtaacaacagannnnnnnnnnnnnnnnnnnnagaacaaacttagtatgtttaattccctcctcaagggatatcaagaagaagtagataatattaccaagagggccaagtttggggagaatgctttcctaaatatctatcagaaactctatgaagcacctgatccgtttcctgctcttgcttctattgctgtaattatccacttatctaatgttaacataatagacacctaaagtcctttagcctgagaactaactaattgctgtattccaggagcaagatcgtaaattatctgaagtggaatctgaaaatcgaaagatgaaagttgaacttgaggagtttaggacagaagcgactcatcttaaaaatcagcaggccacaataagaaggcttgaagaacggaaccgccagcttgagcaacaggtcagcttgcttttaacctcttcttctaattgatatagggataaaactaaatgaatgtaaagcacagcttccttgattatttttcagtctattctaggaggtcaaatgcaaatttatacactgagccataagcatgatttatatagagatgctattttgtgatcttgtaacgaataactgtcgaagattagcagtgatatcgagttgttatatttggattcagatggaagaaaaaatcaaagaagttgttgagatcaagcaacgaaatctggctgaggaaaaccagaaaacgatggagcttttaaaggataggtaaaaaaaaaattctcttctgcatgctttgggtgtttagaaagttttcgaggaagcaccaacctttccttgttcactgtttaacagggagcaagctttgcaagatcagttaaggcaagcaaaagacagcgtctccactatgcaaaaattgcatgagttagcacagaaccaactttttgaactccgtgctcatcaggtggtgcattgagccttaatatg

SEQ ID NO: 26307 - DNA, 3723 bp, Arabidopsis thaliana landsberg
cttaactaagaaacgactcaaccaagaataaaaaatgagtaaagtcttttcacttactttggtggcgttgtcgtttttagcaactggcttgaaaggacaagctggaggaactctcgctggcttcctgtactcccatccgagccacgcgtacaatttagcctagtttattttttagcatgaacagacagtacttgagttaacaaatgttcacaagtaaatactacctgcaagattcactaaagcactgttttttttttcacttaaaaaagatacagtctaaagaaatcgatatgaaacaccaacagaactaagatctaaacattgctaacatgttcaactttccaagagccaacctcaagcaaataacaaaagctatatagctcttcgtttttcacttttacaagcaaagattatgatcatgtgctctctcgcttatcctgattatcatcttcactatcttcttccctttctaatctctaattttgtatttctttcaaataaagatatctcctttgagactaaacgaattccacactctttagaaccctataattcgaaatttggatcctgacatttaatttcccatgaaatctgatcattcttcccatcaaaattccaaggaaaaatcaaaacttcaaggaatattaagaaagcacgagtcaattaccatgaaataatcgatgattcgaggcattaaattgatgagcgggacgaggaacagaggcaccaaacacataacgcaaacctacaaaattcaggaatttcttcaaacaatctgaaatggaagccgcaagatagacaaacggaagctagatccataaaaaaaaacaagcgatatcgaacaaatcttaccatgttgaaattagggttcttgactcagggaattgggaatttcgaccaaaagatgaaaattggagagagatcacaaattatgattgtagttctctgaagtcgtcgttgcttttgctttatgactttaaaaatctacaaaagacagcaaacactctgtatcagcgagagagttttgacggcgttaataaagtaacgtgcctcttccagagaagataccgaaaaatccattattattttgacggcgttaagatatcaacgtggctttgacgctccacaaacgtgcaataccataaaagcccttttagtattgttgttgcaagtttggtgtttgtgctccatgtaaaccaaacatactgataagagattatttatgataatcttcattcaactttagtacatgacaatgtggaacatcaattaggtcccaatatggtttagtagggtttaggcgcaatcgcccttgcaaggaacctctgcacagcggcagaccggttttccagaagcttcccaaccgttaaagccgcgttccaagatcatgatgtttttgattccagtatcttctttcttctcatcaagataattcacgagccttctcgcacaagtagggccacgaacctgcaggaagaattggtttcaaggctttagcaatcacttcatgttgagtgcaacgaagtactgatttatgttaggaacaaagaaatgagaactgcctcaaatcaaaggttgctaaaagactgagcttgatgatttggggagctaagctaatcgttgttctttcttttaagaatataaaataagttcctactccatgacatacataagaatatatggactagtaggcaaacttatcggaaaacacttggattttgcgacctcgaatccactttttgacacatgaaggacctattgtagaccataagagatataaatcttctaagaaaacccaattgatgccacttatctaacctatgaaacatgaatcaactatgtataacatagagatgtacatctccttctacgaatagccaattgatgccgcttatctaacctatgtgttgtttctcaaaaaagaggaaaagaagatcttatggggaagtgaaaagagtgtaaaacacacacctggctcaaggcacaatggaagacaagtgtgtctttgtccttgacattttgaacaagatgtgagatcttgtcatcaaacgagccactcgcatagtgtagcgatccagctatatgcccgtcataattcctctcttcatcccttaaaaacatacaattcctccaatgtgagctatacaataggttcataaaaagtctaaatttgtttaagccataactatgtatcagaagaacctatataagtattacaaaaagtctgtttctttctcagcccatctaaccacaaaacctttgttccaagctcatgaggtccctaatagttgtttttcgacagagattctacaaaatatccagttttagaaaacatgttcataattaattgatccccagagttcaaaagtaaagtaatctcttaaaacgcatatcagtattacatagtagagcaaaatcaaacctaagaacaataatcgggattgattcgaactaaaatttggtaaaggatcagattagtgactaaaatcgacggaaataaatcgattatgttatacctgacatcgatgatggcgatgttgggacgacgatgaagagggagaagctgagtagaggtgatgtaagagatgcttctcgccatcgccatttttttcttcttagtgaaaaaggaaaatatgcttctccccatatctctccaaacaccttttcttccctaaaagtcacgaacatttcattgaagactgcgaccaatttgacgtgacgcttacgtttagagattattaaagtttaaatattaaatgataacaacaaagcggggatagctcagttgggagagcgtcagactgaagatctgaaggtcgcgtgttcgatccacgctcaccgcatttttgtatttttcaattctcttataatctgctgggtcccacatcattggatatacccaacccggttcatgtcggctctgatgtgtttatttatttacggttcaacttctcggtttcgtcttccaatttctactagtctagtttttgcttcggttcgataattttttccacgtacctctagtccagttcaattttattccagtttatgtcacttacaaaaaaccacaggaacacaaactcaaaaatgagaaactttggaagaaaaacgaatcctctgtttattatttcctagcttggaagcaaccagaacaaacacttaacagctcaatacataagatgattatcgttatatgtcaagtaaaacagacactggacactttttaaacggattaacctgagccagtttcgcagctagactcttgttcgggaacacattgtctgccttcatcctctcaatcatcccgtaagcaggagttttggcgttgatataagccaggagcacggtttcatactgcataagctgagctgcatagcttgcccttttcattttcatgaataccttctctgtgttatgaacatcgcctctttttgcatattcttcaagaatcgccatgtaagtagtgaacataggtctcatcttattatcctttgtagctctgttcaatatcaactcagcttttccaacttctcctgctttgatgtatagcttcacaagcgcgtgccatgtcgacggcccaatcgcaatccctgcatttcccattcttttaaccagatctctgccttttgctagcatcttgttctctgtgtatatctccatgagggcaaaatatggcatcatagggataattttgtatttctcctacaagtctctcaaacactg

SEQ ID NO: 26308 - DNA, 2601 bp, Arabidopsis thaliana landsberg
gaactttggtgcgggattatgtcgtttgaccagcttgccctgaaaatgttttaccagtgaactagtattatatgctaaattcctgatatttattggagttaacaaacttctaaggaacaatcaactagaacaatacacaacttaaggcttcaggagattctaattatgattctgaaatgaaattttaaatgctgaaaacgaaaaaaggtcattgtggttggggcttacttggggttgtaggaaatgctgaaaacgctatgggtcgatatggcatgagctacttcagagaaattgttgtggttcatattctgattatattgagccgagagagcagcggtgccttcgatttgagaagctcttctaactcccagtcgcagtttgccatcatctcctctgtatcagagaaacccatatatcacaaaacctcttacagaaaatcaaagaggttgtgtagtgagaaaacatagaagcatttttaactacctaaggaaaagcacagcatcaccagagacaagcttcttcttgttcacaaacgcactccaccgcggtagtgagcaaatgcctcctaggttgccctaaaagtcactcaaaccattcaaattttccatctactaaatccaggcaagaaaaattgcaacataaggcaacaaacttacctcgataaatgtggcgaaatcgccactccaggccatgaagatccctagcaagaagctcctgagaaggccggggctggctatagtcctacataacaaaatgattatgtagttaaaatctctcaatatgagctaataagagaactctagaacacaatgtgcaatgtacaaagctgattacagaatctacggagagtggattagtaccagaggagggaagcaatcctcagcagctcggcgaggaacagagaaaccaccatgggtgcttgtatcagaagcagtaagggttttgcaaaacatgtgaggagtattagacctcttaagcacttcataatcttcctctccaccatcaacatctataattccttcacgcaccttcctctcaatgtcctgtaacaaatcaactcaaaccccctaagctcgagcaaatttctctctctttgttacaaaactcaagagcctaaagaaaaactcacctctgactcaggaagaagagagacttgagcataaacttcatctgtagtcgtctctgcctacgaaatcaaaatcccccacattttgtttattaatcctcacaacaacaaaaaaagtttaaacctaaacagagaattgaattgttctgaaatcaattgtcatcaaaatggagcaaaaggcgaaactttgaaatcaaattcattatcatcaaagaaaaaactgaagataatttatggggatttcaagtattcgtcatcaaaatgccacgagaagaaatgcaaatggagcaaaagaggaaacttttctcccaacataaattcgtttgtctcaaacaattcaataaaccaaaggcacaaatctccatacttgtatcgaaaacccaactcagattcaccaaacaaacaattaaaaaaatcaaagaatcagaaaaacagaacaaaacccatatctctctgctttgagagcagaggagaaaacataaatgaagaaaacaaaacaaaacaaaaaatagaaagaaagagagagttagttacatacgtgaagcttaacatcgagaatacgacagaacacgtgaggagggagcccgtaaatcgcggcggagaaatcgggggcttgttccaaatgtccctgagggaaatacaacacaaggcttcctctttttggtagagagataaggggtccagcacaagcatgccacagctccaaacaaacccctccaccagcagaattcgaagacaccacagacacagaagctgaagaagacgaagtaggagagacagacccagaagctgaagacggtgtttgcgtttgcgtttcgtcttcctccgtctccatcacgttcagatcgattaaaccacccattaaggagagagaaacagagataaagataagagctttattataagaaagaaagaaaaaaaactcagaggagtttcttcatgacttttaccctctcagccaaaagaagagagagtagtagcacagtgatgagtgagtctttaagccgtggagaaaaaaaacttttctattaaagaaaaaaaaaaactagaaaaaaagtttagatttttaatttggacaatgttaaaagagagaggagagagagaggtatcagagaaacagaacagtactgagtgctctctgcaacagtgaggctctctgctacgtctggtgactgatgtgtgtggtgtggcttttagaccttttgtgcgtggagagagagacattagatgggattagatttttgaaatagattgatttctttgctttctctttatattattattatcttttacacaacagtttctttgcaatgttgatactattggattttagtactgatataattattgttacaagatcaatggtttctcagttaatcatttatatataataagatctacaaaagaataatttcgtctctgttgtctctttgtctttgaatcatttttatgagtattactgtgaagaaataaaa

SEQ ID NO: 26309 - DNA, 1246 bp, Arabidopsis thaliana landsberg
gcaaaatctcaatggatgaagtatattatggtaaaagagaatagatttggcgcataagaaactctcccgattcaacaagggtagaagccatagtcttcaacatcaagcttttgtatgagcaaaaggacatggcaatagaaagccatgttaacggtaagaacacagcaacgaaaaagctgtgttgacggcaagaacacagcaacgaaaaagctgtgttgacggcaagaacacgacaacggagaagtcgtgttgacggctaactaacagcagaaccggacttcatccgagtataaactccggtaaaaacaaaccggacggggatgatatataaaaacctctctctctaaaaaatattaaagaaagaagagagagagtttaagtaaaggtatctaccatttgtactaaataaaagttttaaacagtctttttcaaaataatgtgattgataaaagataaatttctaaagtgagtgattagattccgcaaatcagattatttgagttaattattctgtttctttcatttggggttgtttttgttcaataaaaaagttgagaagggtgttattgataagttcaaaacaaataggggtataaccaaacattcaaggaattaagagaccgtcggtgtgaagcagaatctataattgggggacttaaaacataaaatccacaattgctgcttttcctcctcccgctcttgcttcttgccattgctgtttcgagctctcctcaaagccctaattttctcctcctcttcttcattctctcaccatgaagctcgtcaggtatggtttctactcggattctctttatttcttcggtttaattggaatttgcttcgaaattttgagatttctctttgttttcatgctcttcgatgtttgatttcgtatctggattttttcgcaggtttttgatgaaattgaacaacgaaacagtttcaatcgagcttaagaacggaaccattgttcatggaaccattactggtacgcttctcttaaaaacccagctctattcgctgtttagggttttgtgtaaaatctacgatgcttacctgtaatcgatggttactcgcgtattcacaaattctgatggtgtagtttgagtttagctagtgtctttcccctaataatgctttgttggtattaaccctagtgacactggtcaagtcagatgcagatgagtacactagattttacttgaatcgggtttatgagatagtttagttcttcttcaaactttga

SEQ ID NO: 26310 - DNA, 1008 bp, Arabidopsis thaliana landsberg
cacctttatgattcaacctcggaagtacacaaattctatctcgaggatagtatgatttcacggcctggtctcgatggtgagatagttactatcaaatccttgaaagtaagttcctttagccactttcatagtatgtctcattgaattattgttgttaatattgattcgacgaatgtttcatcgtgtttgcaggggattaatgatcagataatgtccgttgactacaaaagctcgaggatcgagattctaactgctgattctcaatcaactttaaagaatggtgttgtaactctagtcacgggtttagtgatcgggaacgatggaggaaggaggaaattttctcagagtttctttcttgtgtcgcggaatggaagctactttgtgctgaatgatacctttaggtatgtgtctgatgagtttgttgaaccagaagctaccaaggaggttgaggagagtcagtcaacaaatgctatcactggtaagtcgttttaccaatggtttcaagaatctgaaaatattcaccaccttgacattgttttgattcatgtggtaatggttttgattagcagagcctgcaaatgaaagtgtagaggcggttattgtccctactgaagctaaaactacggtgacgaagccagcaagtgccataccaaacggacatgcgaaagtccctgaggagaaagttgtgaatgaaaacagtagcttacctaaagctgctgaagcaaaacttcaagaggaggttcccaagaaatcgtttgcattaattgtaagtctcctcctttgtgcttagttttttatcgtataatatcctctaatctgttggtgtgatttcaaacttacaggttcaatctctggctcaaagcgctggtactttacaggttaaagcctcgccggtcaagcgtaaacctgtcgaaaaaccggttgctgctccggagcgcaaagctccttccccaattcgtaaacaggcttctgctgaaagcattaaaccacaaggttggttattcattg

SEQ ID NO: 26311 - DNA, 1722 bp, Arabidopsis thaliana landsberg
ctacgtattaggacactgggctccttgggccggcctagacctaatcatgagatatcaaattgttcttggtacagtcaatggcatttgcttatcttcaccataactgttgcatcttctgttcagaaagatgtatctagatccctagctttgaagatggtctagacaaaagttcatctttctgaagaacaagattctactaatgttagatccaaaataattgatcgaacacaagttcatggcaagtgttacagcaagtttcaatccattgtcgactaccttaaacttcattgttttataacagtagagtcatacaagaacttccaagttattcataaaaccgaaaaaagagcatctcaactcaaaacatcattgccaagcagagagtgttcaatgtcgagacagattactattcagttgtctcagcaagctgaggagcttcactttgtctcaagctttcaagagtagagatccttctatccagagagtcatgaaaagacttcgcctgtagaaaaagagagatcaaatctaacagtcaatgccaatgtcagtatcctatacgtttaaagctacatagaaaatgctgctacggttcttcacaaagctaacactcaattcaaccaacataatgtttggcagcattctcatgttaaaactttggcatctcaaggttctcaaaaaaactaattctaaagcatatctttaatcatgcaattgcagtataatcattaccatcaaagctacagagaaatggcaaccatggatattcacaatgatgacatctatgtgcatcaactctatcagtattcattcatcaataccaaacgtttgaaggcgttctcgtattatcaactttggcatctcatgaatcacaaaataaaactaattcatagtaatgctaatgaagcattaacgtcatggtggaacttatgaaactctaactccagaacagaatcttaccagtagctaaaatggcaaacttaaaccagaaaccctaattcctattataaacatcaaaattgtgtgaaactttcttccaccatgattgcatatgaatctcaatcggagaatcacagagatgacaacgagaaccctagaaatggtctacagatcaacaaaattccattcttaacaacatctgctaacgaaatgtatcgattcagctactcgaaaacaaaatctacggtgacagagcttgttcgcaatagataatcgaaagaaatggatccgataagagaaacaaaattagaaatcgatggattacctgctgagaaatcgattcgtgagcgactttgtaatccttgtagagaacggagagtccgataaaagacgcagtcgcagctccggcgaagaaagaagccaatcgtactctaaacacgtaccccatcgttcctcttcttcttcttccttcgttctcttctcaaatctctccgattctacgaattttctgctttagagagagagaaagaccaaccgcgaatcaaaacgacctcgtttcttagaatagcttgagagactagtccgctgatcaaaacgacgtggttttcaatactccaattacgtagagcagtgaaacctcggcgtttatttactagaaacggcgtcattatgattgtactggtcctctaaaaaaaaatgtaagaacccttcattggcctatatagaaaaacgtaagtcgccgtaagttcttattcttcttcttcttcttcttatacatgtcgtttt

SEQ ID NO: 26312 - DNA, 1249 bp, Arabidopsis thaliana landsberg
  unsure (1)..(1249): unsure at all n locations
aatctctttcacacacttcctctgggtccacatcattcctctctatataatcttcttctacacacacacacacacgcaaccatatacgtacatgtgaagtagtgagatcaatatcgttagcaatgaatctaccaccgggatttagttttttccgaccgatgaagagctcgtcgttcacttcctccaccggaaagcttccctcttgccttgtcaccctgatgtcatccccgaccttgatctttaccattacgatccttgggaccttcccggtatatacatacacatatctctctatatatgcatcatgatcgcaatgatccatagttcactaaacatgcatgtacttgtgcatatgtgtagttgttattgtcatgtgtgtatataatgatccaaattaaaggacatagattgattgttgtcaccaacttaagtaaccaaactgtcttttttttttttagtagtacacttttgttgggttgctctttttaaggattgttttagtttccaaatcttaccatacacacaaatattaatagtaccagtctttacctaataactttcttttttattccctcggaaggaatctattaattggtgaaccattatcaacattgctttgttcatagtcatacatgtgcaccaatttcaatcattcgaaattggtgcgatctcatgatacaccaacacaatcaatcatatacatattatacacactcaccaaagcatgtacgtagacatacatacgaacaaattacaaatacacacataaaaatatattgatgtttcatccactaaactagtttttactgtgtggataatggtcaatactctgctaaacttcataagaatctcagataagcgtgtatcaacactaactttttatacgtataaactacagggaaagctttgggagaagggaggcaatggtacttctatagtagaaagacacaagagagagtgacaagcaatggatattggggatcaatgggaatggacgagccaatctacacaagctccacacacaagaaagtgggaatcaaaaagtatctaactttctatctcggagattctcagactaattggatcatgcaagaatattccctcccggattcctcttcttcatctagtcgatcttctaagagatcaagccgtgcttttagttctagtcacanacccgtgagtactctcttttgtttcataagcctagagntgtcagctttaacttaaattgtacattttcttttaacct

SEQ ID NO: 26313 - DNA, 1303 bp, Arabidopsis thaliana landsberg
  unsure (1)..(1303): unsure at all n locations
tcaaaccttttcatgattgtatgtgctgatgataattttttgcatttaaattatagattagtgttggaagtaatagtaatgcattcaaagaagcagtgaagagtgtgaaaacgatcttgagaaacctaacggacggggaaattacgatatcggcttacgatacagcttgggttgcattgatcgatgccgnnnnnnnnnnnnnnnnnnnnnnctccgccgtgaaatggatcgccgagaaccaactttccgatggttcttggggagatgcgtttctcttctcttatcatgatcgtctcatcaatacccttgcatgcgtcgttgctctaagatcatggaatctctttcctcatcaatgcaacaaaggttatttatttatttgtcttatttattattttgaagtacaagaaaacaaaaagaaaatcttaactttttgcagaaaatccaaactttnttagtggtctaaactttttaactatatacgttgattatatactatagttatataagttagtctagttaaaacaacaatcttcttttgaagagtttcaatcttttctatgtttactttagtaggtattgtacatgagttttatacatttatcaatggctacttcaggaatcacgtttttccgggaaaatattgggaagctagaagacgaaaatgatgagcatatgccaatcggattcgaagtagcattcccatcgttgcttgagatagctcgaggaataaacattgatgtaccgtacgattctccggtcttaaaagatatatacgccaagaaagagctaaagcttacaaggtttgtgtgttgggccaaaaatatacatttgaacattctatttttatatgaatatatttcaaagtatatatagatgggtcctatgtacttcactcaaagccaaaaaaaaagagttatacgatgatatatttgcatacgtaatatacatagactaagatatgaattgattttggtcgtacatgtgagatcttttataggataccaaaagagataatgcacaagataccaacaacattgttgcatagtttggaggggatgcgtgatttagattgggaaaagctcttgaaacttcaatctcaagacggatctttcctcttctctccttcctctaccgcttttgcattcatgcagacccgagacagtaactgcctcgagtatttgcgaaatgccgtcaaacgtttcaatggaggaggtttgttagctagtaaccacttctcctgttatattgtatctatcgaagacatatactcataacttctaatttttgttagctatgttattat

SEQ ID NO: 26314 - DNA, 1485 bp, Arabidopsis thaliana landsberg
taaccgttatctggtataggttagtctaccatgtggattcaagatttcgtatttgaatccattagttaaatcatatatttcccgttattggagactggagaccatatataagccgagatataatgatgttgggccggaataaacgggccaggtttgttataaaccacgccatatagtctatcaagactcgcgaggattacacgttagtacaaagagaagctaagaagaagatgcaaagaaaaccaagagaatagtcaaagacttaaaagcccatagaaacagagacatataatagttacacattgaccgttacacacaacgtaacatcccgttttctttatacagatacattgcacttgatttaatagttttccccatgacacatttttagcttcgagacaaacaactgtcggttttatgttttttttgatatggtaagaatctgctttcacactatacagacaaaccacatatatagatgtgcccatatttaagtacatgtaactggtgtttatttacatatatatcctagttcacggggacctatatttgtatatatatgtagtttggatatgatatcttaacaattaaagagagtctagtggacacctaaaagtggggaatgaaaggaatcccaattatgaatagccaccggaaatacaagtatcaaaccgagaaatatcattatctccttcatgaacccatggaaatcctaacgacattgtagcttcttcccatattgaagaatcatccattaccggcaaatccacgtttatatgctcccatgatatctcctctgtcactcttccacatgatgacatctcgttggatgaacacggcgactcagagtcgctgctgctttttccaccggtgttgctgcttggtgtagtctgggacgccggagacgacgccgttttagggtaacttcttaaggactcagggaggttgagatgagcctcaggcccatagagcttacgagctgcggagtcataagccaaggcagcttcacgggaggtgtcgaaggtaccgagccaaagacgagctcctcggttaggctcgcggatctcagcgacccatttgccccaagtgcgttgtctaacacctttgtaagtgcaagacgcgttatcgggtccaccttttcctctcatacaacctttcctcgaactagcttggacggttcgttgtttcttattagcaccaaccatcattacttttggctctatggatgacatgtacggatgttgataactcgaaagtgatattatgtgacgacttttggtgagtgataaggcaaagacatgaggtaatggttaggtgtgtatatatactagaagagagtgatgaaacgtggcgaggagaagatatagctggcgcagacatgacggagggtcgtgtcgagaggaggaagctggtgttgtgtttgtaatcctaacacttgtctcgagagaccttctttttttggcaacagtaatcgtaaacccagca

SEQ ID NO: 26315 - DNA, 1436 bp, Arabidopsis thaliana landsberg
tatttatgaaacagaaaaggtcagctttaacacaaggaaaagtaatagcaaatcacaccagcttacttcaattaaaacataagaataaactcacagatattctgacaccattccggagataagactgataatgcttacgccgtatcctgcaagtccaagaaaaacccatccaagagaacgttttgatctgctgaataggctcctgaaatttcctattctgaaaagaaccaaaacagaaaccgattaatatttttcattatctaacaagaaacacctctatattccaaatcaaaacaaaaaaaatagcacttagatttagtttaaagcagtaccataaaagtgctcatattgaaccctccagcatctttttcagtcataacagtagctggtacatctgctacatgaggtatctcacctaaaaattgaagcaaaaccaataacaaaagatcagcaatacacatcaataaacattgatctctaatcagaaaatcaatcaaaacttgaagtatatcaattcgtgcagacatgctcagtaccaaaaggtggaaaccggatctgtctgcagcaaaattaagtcattaataggtttagctgcaaaaggtgcaacggaaccagttaagatctctaacacaaagaaacaatatttccaatttatttagataaacgcacatgatgatactaaacacccataaaatcaaattatcaaattcttcaaatcatgttgagaaaaaaaaaacagattctttcagaaatttcagaaattgatacgaacccagatctaaaattcaaaatttagaaaagggtagagaagaattcgaaagatagattaagaaaaattaccagaaacaatagaatcgagccaaagcgcaacatcatctttagaattaagctttttcaagacagagcgattcttcttcaaagcgtatctaaaagacatgcgtttagaattcttcaacctcccaataacagctagatctgcaattccatctttcctctcgagataataatgaacctccatcttttctttcgtgttcttcacatgtcgctcattccaaccgcaatacgacggcgtttccgacgaccacgccattgttaatggatctctcaaatcggaaaaataaccctaatttgagctcttgcttgggtctctctctctctcgctctcaatgcgcgtgaagtgatagaaatcgcagaaagagaggattttggaggcggaatttgaataatataaaaaaaaacagaggagggagctaattagggtttcgaatttggggataagattaagggtggtgattggatccacgtatattgattcgaaaggagcatgattttgttaattacgattcttatcctccggtgttaggcatattactataataccctttaagaggggttgcttccgtcacgattttggaatttttataacggaaaaaagg

SEQ ID NO: 26316 - DNA, 4912 bp, Arabidopsis thaliana landsberg
  unsure (1)..(4912): unsure at all n locations
ttagttgatttttagtcgtttacgttaattagttatagatggaattgatgcatttaaaatctagtttcgattgcatcataatatgcaacttattttgtatccaaatttctacatccaaactcacttggacaaaacatgttgtgaatgctataattttgatgtagcattctggttcgggaatttttaaagtgatgggctgcatatactacaaaaatattaggatatcgttatttgttgggctttgacgaaatcttaatctgtaaattcaattagtgagcccaattaagtgtgttttgctaaagcatacataactcaggtatttagtttacctattaactaatttgagtcgaaaatcatttgacacatcttcctttttctttccaccattcttttggagattttctcacattaattattcattaatcatttaactacaaatattagtttagatgaggacttaagtattgaaagttttcgtcttcaaaagttcacatactttcgataaatttatttcaaaggtttcccttccacaatagtacacaagaacaataagcttttgttaaaagtaaaaaaagatgatctcaattccatcatacattgagtggttaattattatttccacttatactctaacttgggcgtttctttgccatgagtgaaatagattccatcttctctagcatcccaaaagttctttttaccataatgaactatgagaccaccaccttgatatgccataaatgatgcatgaaacttgaaattaggcccttgccataattcacagtaaaagtctgatctcacaatactatcatggaaactaaaatcataggtttctccaggacgcaaaaaatggaaacctagattgtcttctgatgtgcaatgaatcttcaaaacattgtttcgaccaagggaactcttgaagaatacagtgtttttctcattccattttaaatttgcgttactcaatcctatgcacaatccaataacgagcagaaaacacgagagccgattcattgcctttgttgtttgaattggccttcctttttttaaattcagaagtaattaatctgtagataatgaaaagggacagacggatagtgtctttttatacaagcgtatcacatggctatcctttcatttttggtatttcctatttttaaacatggttttcttgactaatccatttatcaattttgctatttttttcttattcttatcggttttccttttttgcatctagttaaaaagagtaatcttctatatatacatttttgtagacgtttttagaagataatattgaagatttgaggcataattcaccaattaattcaaatgggtgggtataacccggtttaactctgttcagatcttggataacatgtttaattctgttctaatcttcgataacattaatttttggaaaagttacctaaaaactaataattaaaatctaaaattattgatttaattaccaaattgaatataaacaatatctctaaactaactagtatttcttatttaccttaactaatttccaaaaatatttctacctaatttaaacataaatatataattcttctttcaattttatttgatcttatactttatttattttgaatttatataaaatatatatagttaataaaatattatacttttttctgaatatgatgtaattcaaattttttaaaacggacatatattattcaacctatgaagaaataatatgtgtacaatgtcccacatcgcttagaaaaattggacaatggttcagacccatattataaaaggaccaaaatgattctgattacgaatgagcaggaaccttgatttatcaggcatccaaaattaaaatagttatccgattttactcggattttttattttaaagaattgaaactttaaaatgtttcaagaaattataaatattataactttatcaaaagttaaatattataattttaaatttttttataaagtttatctttaaaaaatgctttaaatatttataattttaaaacttataaagttttaaaaattataaattgaattttacaagaaatttaacattataaatatataaaaaatatattaatacgaaacgatatattacagaaaaaatcttaaatataacaatcaaaattcaatgatgaattttgggtcgatattgtatttttttaagtttcaaattttataatattgaaattgataagaaaatgacaaaaattatgtttaatttcacgggactgggttatatggtaggacgggtttggatggataataattacgattttacaatgtcccatatcgcttaaaaaaattggacaatggtcaagagccatactataaaaaggaccacaatgatttcgattacgaatgagcatgaaacttgatttatgaggtgtccaaaattaaaatggtttgtttattagggttatttattttaaaaaattgaaactttaaaaagtttaaaaaattacaaattaaattttaccagaaatttaaacaatataaaagatattaatacgggacgatatactgcgagagaaatcttagatataacactcaaaattcaatgatgaagtttgggtcaatattaatcttttttgaagtttctaattttataaatatttgaaatttataataaaatgacaaatttgtgtttaatttcacaggacggggttatatggtgtgacgggtttgagtggataataacatgggatagtatgctatggaaaaaaacatataataaaaatcataatataattatataatcttaaacactaaacaaaattaacaatattaaaaaaaaacttaaaactttaatttttttaaaacacattttgattcttttataagaaatttaaacattataaatatttaactttatacgatgggtgaaattttataattgactgtttgggttgataagaatttacgatagaactaggagttaaatcctagaatgacaatcaaaatataattatacaattaaatactaccacgagtgaaatcctataattgacgagtttgaatcgatattaatatgggatggtgtactacgggtgatattttagaattgactggtttggattgataataatttgcgatagaattaggagtgaaatccgataatgacaattaaaatataattatataattaaatactaccacgggtgaaatcctagaattgacgggcttgattcgatattaatatgggatggtgtactacgggtgatattttagaattgactggtttgggttgataataatttgcgatagaattaggagtgaaatcctacgatgacaattaaaatataattatacaattaaatattaccacgggtaaaatcctagaattgacgggtttgattcgatattaatatgggatggtgtactacgggtgaaatctgagaaacaacaatcaatatacaattatacaatattaaacatttaacaaaataaacaaatataacttaaaactttaaaatttgagttataaaatttcgtctcgcggtgaattatacatttaaatcaaacaataacataaatttattaaatcatcttaaaaattattcaattattttttatttaataaaaatataaatccgcagtatactgcaggttaatatatagtataataaacaacattccaaactaaaaaagtactacaatcacgaccaaagtttgctctaattccagtcaaagtttcaaaccctaactgtaaaagctctagttcgagaaagatcataattgataaagacaacgacggcgacgaaactccacggtaaaagatgctaccaccgcgtctctgaagaagaaactcctgagttttggaggcgacgacgaggagggagaagacgaagcttcccgtgtcaaatcctcttcgtgtccgaggaaatacaggcggtttgttgtttatggatataaattatggttaaaagaacgtaattgatgtttgttgttttatcccattatatatgggatctcgtttacttcaatagtttggaaaatcaagtattgaagttgaatatatagaagatatgattttcatcattttaaataaaagtaattaaatgctagttgatatatttttcaatggcatatcttataataccccacataacatttgattattttgctaacaacattgcataaataatagtacaagatagctcttgttgctaaagtacacttgatttaatctttttgccgtgctccagactttgtcctagagagttgggtcatacaggcttttgattggcattataattaagtgtgtttctctttttctttttcaaaatcgttcatgcgctttggtttagtcaaatacataaaagatatctagtattacattgaaaaccatagaacaaagtaagaggaagaaacaaatataaaaagtgtgagatgatcaagtatataagagagtgaaaaatgttttcacttaacactggaagcttccagaaaactttgaaagccttccttaacgatatattcctcaaaagagtatgttctaaaatgcggttagcataaccgggtcgccctagtcttcttaggtctcatacgattatggacccacgagatatatataacaggatttcggatgtacaaaagaaaaaaatcaaagatataactataataataaattataatccctttttgagataaaatgatttaaagaaaaaaacagaggaatcaattttggtgtttaacttttaccggattgtgtgtttgggttttgtttttataacttctactgtcccgtcttgagccgttttggtttccgagtttgcttgacattgtcgtttctggttcgagaaaccggttcacgaacttcatgatcctatcgagatgtgaacaanactatanactatcaagatccaactcatgaaaaatgtgttgattgaatcaa

SEQ ID NO: 26317 - DNA, 1960 bp, Arabidopsis thaliana landsberg
  unsure (1)..(1960): unsure at all n locations
tttgggtccgcttccaagagctttgctcagatgctacacctgtgagaaatggtatgttgcttcgaaaattctttgcaaaactttatttaaaacatgatttcgtttatttaactagctgcaatcgatctgcagcgacgggtttgtctgaagaggacaatagcaaacatcacagcttagtgctctcttttgcatttggcattgttgttgcctttatcatctccctaatgtttctcttcttctgggtgctttggcatcgatcacgtctctcaagatcacacggtacatatctaatagtctctctctgtctgtcatatacaatatatgtcaagactttgctaaaatctgcattactttttatggatttcttagtgcagcaagactacgaatttgaaatcggccatctgaaaaggttcagttttcgcgaaatacaaaccgcaacaagcaattttagtccaaagaacattttgggacaaggagggtttgggatggcttataaagggtatctcccaaatggaactgtggtggcagttaaaagattgaaagatccgatttatacaggagaagttcagtttcaaaccgaagtagagatgattggcttagctgctcaccgtaaccttttacgcctctttggattctgtatgaccccggaagagagaatgcttgtgtatccgcacatgccaaatggaagcgtagctgatcgcctgagaggttttcaattaacacacttcttggtttgatattctttcgatatataacgcgaaaagttccttataagattacatgttttagacaattatggagaaaagccgtctctagattggaatcggaggataagcattgcactcggcgcagctcgaggacttgtttacttgcacgagcaatgcaatccaaagattattcacagagacgtcaaagctgcaaatattctacttgatgagagctttgaagcaatagttggcgattttggtctagcaaagcttttagaccagagagattcacatgtcactaccgcagtccgaggaaccattggacacatcgctcccgagtacctttccactggacagtcctcagagaaaaccgatgttttcggattcggagtactaatccttgaactcataacaggtcataagatgattgatcaaggcaatggtcaagttcgaaaaggaatgatattgagctgggtaagtaaaaaaattctatgagtcatttactcaacttagactgaacccataaggacaaaacttaaatctaaaccattggtttttgtaggtaaggacattgaaagcagagaagagatttgcagagatggtggacagagatttgaagggagagtttgatgatttggtgttggaggaagtagtggaattggctttgctttgtacacagccacatccgaatctaagaccgaggatgtctcaagtgttgaaggtactagaaggtttagtggaacagtgtgaaggagggtatgaagctagagctccaagtgtctctaggaactacagtaatggtcatgaagagcagtcctttattattgaagccattgagctctctggaccacgatgatagacttcatagtgtcttaactagtcttcttgattttgttgtcattgtcatggcattaactgtaaaaatttgttttctcaataactcttatttattctgttcttccaaaaataaatgaagatttgcgtttccacagtctcataaaaaattatctatncgtaattttaaaactcatacataaatagagagatttcggcgaatgaaagactatttngccttatgtacctaacaaggccaaatatatgcttaagataatgtttttctatgggctttataatattggcccattaaaccattttaataaatcaaaggggtaatttcgtcattgcgttaattcaagaaaccctaagtaccgacccatataagttctttcactctgcactcgacgcatttttgg

SEQ ID NO: 26318 - DNA, 898 bp, Arabidopsis thaliana landsberg
cgttgagacaatcaaacccgataagcggaaactagtccagctcttagataaacggagcattaggtacttgatttctttataactcttgacatcaagctcttagattcctctgcctctaaagcattttcttcggtttggacgggttttttttttgtagatgggactacttcaagaaacaaatgcaagatatgcttagacacaatgatgcaaagggagtcgaattaaggaaacccgctgcatcactctacacgttccccatgcccgactgcatgtgtaaagaacccgatccggaacctgaaaccgatccagcttaaaccggattcctgctgttcagtgttaattattgtttatgacttcaaccatacatgtaacttatctatatatatgttgtatcatgagtcctgtataagcatttttccccttcaaaagttgggggaatctaagattagtatttttttattgatacgaatttgtgtgtacataacattctttcaacattagtgaccattctcccttctgttccattgtactatactactatgcacattttggtctcttttgataatctatgcaatggctattggacaattgtttcattctaatctgtagtttttttttttttttcagaactcagttacttcatataagatgcaaataatatatatgtttacatattcttattagaaaattcttacagtcagaattattaaagaaattttcatagggtatgggaaactttaggattttagtcttattttggtgttttgactgtatagttgtatttgcacataccccaaaatacaactgttttagcaagaatttgttttgagtattctttttagcaaattacatctttgtttttgttttgtaaaaatggacaagtgttcttaccactttt

SEQ ID NO: 26319 - DNA, 1518 bp, Arabidopsis thaliana landsberg
  unsure (1)..(1518): unsure at all n locations
gataaaaaattgaaaaatttgaactttagaccatagaatagattattccagctagtaatctagaataagaatgatgtgaaaaacttgtatttagtggttgatcatataaccaaaccaaaggatgattacgttttccttaaactctaaaaacatgcagattattgatctgtccatcctagttttaggtacggtattaaatctatatagctgttgaaaaaaaaacaaaaagtgaagatatctaaatctagatatgttagtctatatcctataacaagtcaataaatcgtcaaacattaatacgttgcattatttgtttgtcatcatatctttaaatatttcgaattaaatgatacgttttcgtcacacaactaatgctttttagtagatgaaatatagtaaaatacgattttatgtattttgaacccatgtggcgttatgttttaatttattattggatagtagaannnnnnnnnnnnnnnnnnnntcaaatagtcacattaatattcaatgcgaaaacgtaaaaaaaagtaagatgctaccgttacctaaacaaaagttaatggtgtgattttacagcacctgtttaatatttttaaaattacataaaaaaacaaagagaagtaagaaaaaatgaaaaagagagattggtatataaaaaggaggagtagggggtgaagcccgaagcatcttatagtatttttagcttcattccttcttttgctctgatcaaaggcttcttcttaccttctctctctctttcctcctctgcacatttctgggctcttctcttcttatgctctgttgcttttaacacacagcagaaacagctcacacctgccatttccttaaacaaaagtgaaaagagaagaaacaagtgacagctcaaacggacaaaaaccactcttgggtctttcttgcttctgattctttctcttctctaatagaagaaaacgtaagtcactctctctactctcttttttcacactaaagaagagaaaaaacgtgaacaaagaactgtcaattctctttccctctctgtttcatcttcttgaattctccaagattgagatctctctcagtctcttatgtgctctgttttctcctctctgttttcacttagttactaaacacaatcgattctttcgctctgttttatttctcagatctagaagctaaaaaaatgtcggaaggagtagaagcgatagtagcaaatgacaacggaacagatcaggtaaacggaaaccgtaccgggaaagataacgaagaacacgacggctccaccggttctaacctaagcaatttcctatggcacggtggctctgtctgggacgcttggttcagctgcgcatctaaccaagtaaaccaataaaaccataaactaaagattcaaaatttcggatttctcatagtgaagaaagatctgatttgtagtaattatcgttggtttcaggtggctcaagtgttattgacattaccgtactcgtttagtcaactaggaatgttatcactatagagaac

SEQ ID NO: 26320 - DNA, 1199 bp, Arabidopsis thaliana landsberg
gaacattcccggtggattctcgccggtaggaggagatgtttcaatttttactcaaatcttttttagtttggaccaaaaggatattaaagtaaaaggcaaaaaatcttcaaatttattcttaccaaccaaacaaacaaaaagaatccttaaataaggcaaaaaaatcataaattttaaatattttcccatttaaagagatatgcaagtgagaacttttgagaggcgcaacaacaagatggcgcataatagcaaaagacctaattttgcttctgggtccttggattttcttactcttcctctttattcccctcaaaacctaggagcccaacgagagcacccctttcctcttcttctatatccctttttatctcttcgcagctttctctcctctctcagatctatactctcttctccttcacaatcgttcgttttatcctctccatcggattcgtcagatatcttcgatttctcgtcgtttcatcggttccaggtcaaatccaggtatgtcaattgtaaaatttcgatcagattcgtcgatttcgatcagctttttcgattttggatctattttctatgaaatatcagatctggtgattgttttacatatttttgggttgaattcacaagattttctggaaacgagatcgattaattgagttttctgcgtttatatcttacgcgtagatctcgatttctatgcttctggcttgacgagataagattttcgagaattttttgtgtttgtgtcaaagttcgatctcgatttctatatttttggttgaattcacaagactttctggaaacgagatcgattttgtgagttttctttgtttttaatctcgatttttggattgatttgagaagattttctgaaagcgagatcaatgtttttggggattttctttgttttgttcaataattcggtcactgttttcttatcagaaaattcgttttccatctcaaatcgatgttcttattgatttaattgagttttagcttgcagggattcgatcattggtaagctatctttcagcaaacatgcatggttatgaagatgtaagcacgctcatgaatctttggtttcagggacttcgtcgatttacatttaaggtagatagagttgacattgagcgacactgttttattgcttgacctggttgaggaagctagctatgatgactctcatcaggggagtgagg

SEQ ID NO: 26321 - DNA, 1069 bp, Arabidopsis thaliana landsberg
  unsure (1)..(1069): unsure at all n locations
ttttaattatcgtttttatactattaacctctacgattaaataattagcatcaatctccaatgtttttttgcgaaatgtttgtttcatattaccagtcgccttcactttttggtcttctaagtttcttccacaagatccactattgattgctcagcaatataataatacatagaagtttttctacaaaacgataataaattgaaatgttgtggaaatttgatataagaaatttaaacaccgacaccgagtatgtaaataagcatcgatataaccaggaaatatactataaattttgtttccacgtgggaacacaccccgtaaatgccgattgccgacctgccaatttttcttcgaacacataaaccacataatgagattggaccatagactcttttttaacaaccaaattactctaccaaaccccaacggtaaaatgacacgtgtgtaagtcagtatttaattttttacggaattctcttggatttacaaaaatgcaatcgaagaataagctagaatatgtgcacatgacatgggccatgttcttgattagaataaaatattagtactacatagttaacactaaaaatgatgcattgtcttttaacagaatcaatcatgagggaaacttccatcatcgcaacaaataaaataaaaaaaactgacgtgacagataaaaaacctcactaaaagccatttcccaaaacttaatgcatacataaaaattgaaaaataaacggataccacatataaccatttctttactttttcttccaacatatcctgaaactacattacacaaaggtaccatatagttaaagaaaaaacagtaagatcattacatttttagaaaagcttatagaccagagcttaaatgtaacaataaatatacaaattggtaatggtcttaagtctattagtctatgcacaacggatataaaacgcgcatacatatggcttttacacacaataataatatagatatacacaaccatctctcccacaaacatatttaatctccatcgtccctaatcatgattcccccactgtgcaatttcnacgggccaagtt

SEQ ID NO: 26322 - DNA, 1014 bp, Arabidopsis thaliana landsberg
gttgtgtttcaattctcattgtacacaccttttttaagttttttattctctgcttccttctgtgctctcttctggtcaaactcaacttgcttgcagttttcctcgtgtgatcgcacaaatattctaacaaagttttgcagagtggatacaactgcagattcaaatcaaacaccaagatttggtatatcttaaggtcagggacagaaaggacacaactccaaaaaccaaatggaaataatgtatagaaaataagatgtaagaagagaagaaaccataatagtgagtttgcattaaattgttaccttgctcaaatgggacacgagctggatcttctccgaagtataacgccaaagcatcggcgcttccaccctaagaatgccatgacaaaacacaggtcaatgatagcggaaaagaatccttaccacagtacagtgctttagaaagtaaagccagggagaaggtggagaattaaagattccttaccacagtcgaatagagagaagccaaggaccttacttctccttcagcaacgctaagaaactctttcaagttctgcataatacaagtacaagtgtaagcagatgatgaaacactagcaaccaataacgaaagaagcttcttgaatatctaatttagcttaccattcgaaagtgttttgatatttgaccatcagtttcagatgcagtaaactcttgtacaactttctccaaccctttgctaattgcttgcatctcctctgccaggtattttagttgaatctaccataaaggaatgttttcagagagattatcaccaaaggcacaattcgaattgaggtgtattattaaacaccgagttaaagaaaaataaaagtacctttgtcgcagcctccaagctcaccaagtcttttggaaaattaagtagcttctgaaggttctcggccagcacctgagagtaccagcacgaaaatattattgtgagaagaaactgttaggataacatacaaggataaagactaagcatgtaaaaatatag

SEQ ID NO: 26323 - DNA, 2661 bp, Arabidopsis thaliana landsberg
  unsure (1)..(2661): unsure at all n locations
gcctgcctcatttgtcacagtctgaacctcaacagttgagtctttattggactctcgtatctcttccgcatagtcttgaagcctagcaaactgctcatcatgttctctctcaatccatctcaatgcctttctccttgcagcttgacattgaggcctagatacggtgatcttccatcgtcttttaatgatttcctcaatcttcataggcatgaagtacagaggttcctttctaatactatctaaaaacaacctagcaattaccggaaccttcaacatctcacaatctccatttggattacatgtgtggacatctttgtacacgttaaccctccacctagcacatttcttcgtgattgaacaataaatacgccaaatacagccatccccatcacatttatatcccagcttatccttatcatacctgtattgagcgatattgcatcctgtcttcaaagcatgatcaagaacagcttctttaaaggcaatggcgctgaagaatttttggtgatagtacaaattcccacctccgcctctgatgttgtctcgccttctctcacgaccagcttcgtcgtcttcatcactctcactgtctggatactcatcgtgaaaaactgaaggttcatctctaaactccattaccgccttctcgatttcaaacgcatctcgatctcttgggtcttcatcgtcaggctcattgtcgggtccatcgtctgggatcgagctttcctcttgcggaatagaaccggtggcctcttgatgaacgactaacacgtttctctccaactcaatcgaatccatcgttcgatttcgtggtctcaagaacaatctggatttctaggggttttgtcgatttagggatttctagaattgggggtttttagaatttgggaatgttcgagtcatattcggggttaatgggtcctagttcgggttggtttttgggtaaatccggttttgtttctttgtttatcggttaatggtgtttttggtacagtaaaccaataataaaccactaaattcgaaaatatgcggatcgagttctttaactttctttttaggtggaacgtagtctttaacttttttttatgtggactggagacgtgattcgaaatctgtggagatgtggtcgtatgtgaaacttgctagggggacacaggtcgttctactcgtttcatttgagagagagagtccccataagatcttatttgctaacaatggtatacagtcttgcctaatacttgtatacaacataaaattgataacccccatattgattagaaatcatattaacactttaatttaaagtgtttttctcattaatcttaaagttatgatagaagagagtatttataatactaaagtataggagacttaatactaatatactctatatgttcatacaccccctcaagccgaatcatctgatggattaaaattgcttgaaatcgataaacgactaatgagagagtagaaaagacctggatgaaggggctttgtcaatatgccaccaagttggtttcatgtgtcaatatgtgaaacctttaagaaagtcattcttcacttgatcccttgtgaagaatggcttcttaaaggttttacatattgacaatctatctcaacatgcttcgtcttctcgtgaaagattaggttatttacaatgtgtgtggttaatattttgtcacaaaagagttaggctgaagtattagtcttgatatgaagatttcttaacatctaaataagccaaaggagtttttttttagtcatagccatactcctgtattttgcctcattattactgttacttacaatgtcttgtgacttctatgtgattaatggaattccaagaaaaacacatattccccaagtacatcttcttgagtcaatgcaagtgccccaatctgcaccagtaaaaccattcaagcaaaaatctgttgaagcagagtaaaagaagccttgacctggattgctcttgaggtacttcaagatttaatgagcagcttgaaggtgtacgtacatcagtagggcaaaatagaaattgacttaagcgattgactacaaaagttatattaggcctagtgatgcacaagtataacaatctctcaataatttctctatatggtctagcattctccaaaaatgtgccagtatctttagtcaaaggaaccttaggatccataggcacaaattttggtttacacccaacaaaccagagttagctaatatattgagacagtaattcctttgacgaaccgaaattccctcagaattgctagcaatctcaagacctaagaagaattttgcctctcctagatcttttgttttaaaatgtgctccaagagtatccttaacagacctaacatcatcatcatcatttctcacaatgagaatatcatcaacataaacaaggatagcaatgatagacttactagtgacattgacaaagagagtgttgtcagcttgagaccggataaaaccatcgtcaataaaccttcgttaaagacttgtaccactgacgagaagcctgtgtgagaccatatattgatttaagcagcctgcaaacatgattaaatggtaatgaagcaccatttggcggagcgtattcttctggtaaactcataaagatctctttttccaggtcactattgcanaaagcactagtga

SEQ ID NO: 26324 - DNA, 1205 bp, Arabidopsis thaliana landsberg
ggcaatccatacaattggactttaagagaacctctttgccaccttgtgataaattctttgcatactaacctgttaatcttgactgtaatttgtctttaggaaaaccaaataattccttcttagatccacttaagcattcaggtaaacccaaatacttacccagaccaccttctatatgaatcccaaacctcattttaacccatgccttggtttggtcatcaattctggctccaaatgtcaaagctgatttatccacatttatcacttggcctgacaactccccatactttgataagcaagctaataattcttcacaatcttctggagttgctttacaaaccagtaaagtatcatcagcaaaaagcaagtgattcacagacaccccatccggttgaaacttaaaacccgtaatcttgccttcacttttagccttattcaagatgtgaactagaggtacagtgcataaaacaaataaagatggtgacaaaggatcaccctatcttatgcccctgccaggcacaatacgaccaaacggttgtccattgatcaaaactgagtatgagactgaagatacacaggtcataatccatgaaatccattgcttatcaaatcctagagcacccaaaatatctttcaagaaactccattccactctatcatatgctttagacatatctgtcttgaaagccatgtactccttggaaattctctcatatgaaatgaggttatgcacaatttcatgtgcaatgagaatattgtcagagaccaatctctcagcaaaaaacgcagattgagaaggtgaaacgatagatgggagatgcttctttaatctatcgaacattctctgagggttagtaaattttggaatgaaacagaggtgagtatgattccattcttgaggcagaacccccgtctcaaagaaacccagaatctctatataatctgatccttgacaacattccaatttttctggaagaataagacagtgaaaccatctggaccaggagcactctctgcattaatcgaaaaaacagcagaatgaatttccaattcagtaacaacttgagttaattcttgattcatctcctctgaaactccagttttaaaaccatccaaagccgactgagagatagcaaaataagaagacatgaacagattctcaaagtaaacagaagcaatattgtctttctctctatacaaagtgt

SEQ ID NO: 26325 - DNA, 4227 bp, Arabidopsis thaliana landsberg
taaaggatcttcatcaagagaaaagtttttcaatcgcggccaagttatctcttggttacgggtgatcacttaacaacttggcagccttttctttccctatctttttcctctcaaatttcattgggtcaagtagtgtttatataggggtgacaagggtgagtcagcatatacacgtgtcatttgcaagggcgagttagcagtccacgtgtcatccgcccgtgatgacaggctcgtcgccttaacagatgggcgacatgtggaagcaaaactttggctccacgcaactcaaattcggctctaagcaactttgcttgaaccccaagttagtcggcccacgcgtccatggcacggtcaaagggcggtcaatgcccggcagggaaaacttcgcatgcggcacgcgcatgttgcccaatcttgcccattcttgcccatatttgctcatttttgctcatctttgcccattcttgcccaatcttgcccattctttcccaaatagttatttgttttgccctttgattgtttatcaccttttgggcatatatggtcaatcaaccatgtattcggggcaactttctcccgtttttggctttgccattgatgaccctatttcgaactagactaggcatgttcattttttcttggcccatctctttggcttttgtcccttaactattcttttctcttctggttcttcctcggtcgttcctcgatgtttcccgcttggccgcttacccctttgtgagggtccctacaacggttgtgtctgaatctccaaagaagcagaaagtctctcatagtgaggtgttcaatctggtggaggagatgcacaaaagaagaagaagaagaagaagaagaagaagaagaaagtagctggtgaatctgatgaggacgaggacgaggaggatgttggggaagacgtgtcgtccgtggatatggtgtctaaattaatctctcccttaaactcaaggtttgacaccgttgatacaagcatcaaagaaatgtcctcccgtctggaggtgattggagatcaagtagaagcgaggattgatgcaaagtttatagcaggtttgtatctattgagaatgaggtcaaacagatgaaagagcatcttaaggccattggggtaggccttagtggccaaactggcaaagcggacttagaattattctctagagtgaaaactagagaaatgtttttaacagctaaggagcaagaaatgattcgaccccaaaataaacaaacaccaaaaggtccacggaaacctccaaaaaactactctgttactagtcctctacccgtaagctaactgctgagttatcaatacgctatttacttgcgattgagttataatcatgttatggctgagttatcgttatgttatgaagttaggactgagttataattatgttttccggctgggttgtctttaccttctttacttttggctaagttataactttttatttagttacagttgagttatcgttatgttatacggctgagttgtctttatcttacttacttttgactgagttaacattatcttatttagttacgactgagttatcgttatatatatgactaagttatctgatatatccttatttttaccagttttaactatgttttcggtataggtttaagaatctatttgttatttctagagtcttttctagtccttttcaggtctttacacttttgtgattcatttgaagataatggagcattctggaggataacatagaacttatgctgcagatgaaattcggagactaaaaatggcataggtgtcgaactacaccaccccccgtgtcgagtgacaccaataccagacggcgattcagagacgcaacttattgaagttttgaagattttcaaattatgtccagaactttcccttatttttaaagaatgcccatcacgtttttaggtcatatatatagatttaaaggtcatttttagacctaagcttggagaggctaatctccttttctctgttgttcttgggagaaaaactttgtggaaactccggttagagaagatctttctaaacgctattctcttgttattttcttttaagattttttattaaatcatgttgtttgcttcaatctccatgcttgagtagttctcttgctaggttgagggtttatctttagggatttagatgatatataagatcgccaagctgctatgattatctttagagttcttcgccttgattaatcttaatgatagttctagagtacctaactagaattttatcctaagtaataggtaacctctgaaatggcgcttattgctaaaactatcatagataggcctaagtatttagatgtggatagctctggtttcgatacttaggtgagcagatcaaacctgatattaatgcatgtttagcaattagggatccgcgactagcattgggatctttagtcattaggcataattaattattgtgactagtgttggttaactttacattactgatttgagttctagaacggttcgataacaatcctaatcatagctagatctactagtcatctatctcttgagaatatccttaaacatgatgcttttctccatctgaattacaacatgattttaaatgcttttctagtctttaatttacaatctttttctgtttaaattaattcgaaactgttagtctattgtgtgatcttgagagatctgtcgaattctaccctaagtgctgcaattgacctctttatttgagagagtggtcttaggattaatttgacttacatcattatggtttgggtcgaccaatgctggagttgtaccatttcgacgtgcattgctagatacctggtcgttctgttttgatgttattattctgtctgatgatattattttgttcttatgatttatttatgtattttgtcagcataagttatgatgtactttactttatttaaaattaattgaattgaaactatgtttgttagtaccaacacgtgaacatcactctgtgtgagatcagaccatgttggtatttgtttgttgggtttgtagtctcactgggcgagttttcgctaacataagttatgattccgtgcggagggctttgacgaggagcgttatgtagctgaggttttgaacttgttatttttagagcgagacttgatagattttctaaaattaatttattttgattttgagatttggagtttatacaagatttgaactttatatattttggaaattttgagtaattttattatagtaatgcttcaaaaaaaattttgaattttcaaggcgttacagattccgaaccaccattgtagtcgatatcatctggtttgtcactacaatttgttaaaaaaaacatcgtcatctctctgttatttttcagaaagcaacacaaatctagacaaattctactccaataacaaataatttaagagaaacttacgacatcttttctgggttagcgaatgattcataacccaacgaagctttagattcccgactcttatgcaattcaatcaccaccggagacgacgacacactagcagatacgaagaattaaaagaagaagctatgagacaacgaagaagacaaatcaaaatctagagactctcggtagaaggacagtcatgaccgttgaaacctaatttctaagttttccccaattcaaatttaataggttttgtgtttaaggggatatcaaaacttctttctcagggagaaggtttcaattgaggctataccactgtaattgggtcaactaaattaaatccaatttagatctaatcgtggtacagtgaacgccaaattaggattttgaaacgcaattgactagattaattaaatttggtgaaatgggtagaaatttaaagattaggaggaatgaagaagttgctaatttgtgcaggttgaattgggcagaggacaaaagtataggttgtttttagttgagtgactatagactatagtatagggtgccagctacagggagcccctatatattttcagctacataagtgtctcttagattagttttgagtagtttctaaatctagtaaagaaaatttgttctttaatctcttgtgttgctgaattatgtcctcaaacattcagcttctaagtcagagcatgtcggctttgctttgatgtgaattacaatggtccctcaacggtaggactagtgtttcgtaaaccacatgtgtgtgttgtagtgatcctcatcctttgagttag

SEQ ID NO: 26326 - DNA, 1059 bp, Arabidopsis thaliana landsberg
gaatccattgaatgatgattctaatacacacagttgctgttaaaaggtatggctgacattgtgggtcgacggtttggaacaaagaagcttccttacaacaaaaacaaatcatttgctggtagcattggaatggccaccgccgggtttctagcatctgttgggtatatgtactactttgcttcatttggttacatcgaggatagcgggggaatgattcttcgtttcctcgtcatctctatagcatcagctcttgtggaatcactcccaataagcaccgacattgacgacaatctcaccatttccttaacctctgccttggccggattcttactcttctaataataccctctcgttgttatgtatcatcaaataaagggtcgagcttgattgctgatatggaggtaaaactgcattcattgttcccatcttcttctgtatgtacgtattagtgaaacatctcatattgttgttgtccacaaatcttatttttcagctgcaattgcagttgggtacaatgttgtaatgttctatccattagtgagacatatgatgacgaacagtgacgcttctacaatttgtaacagatactcttttgtaacagatattcaatacatgtttgtttgttatttggcctatggctatgtggaaatggattgtttgcttacaacaggtgagggcttgagtgtcccgctccaggaagcctcttctgacaggtcggactggtgactgtaacggcgtttcagacaaggaagcaacacgaggaacaagaggaagacggcgaagctgatgacaagaactaccgtcaagatctcaccatgcatggcgtagtgtctgtctctagtgaaagtaagtcgttcgccatcttcaggactcgaggcctccaccgtagaagttaccattagagaggtaatctcaaatattctcaaatctcaactcctttgctcatacctacttcatactgtcatgcatcatcttggagggatatgtgtctgtttctttttcctctctgaaatataaatttgacttgtgagaatatgtatcacatgaaaacaatatgtc

SEQ ID NO: 26327 - DNA, 1903 bp, Arabidopsis thaliana landsberg
actctgcttttggcataaagaaagggtgtactctctaataataaagaagtattctacagactaattcaaagatttctttactcttcaccattcagattttactcaaatttacgaacttggttgtctattccttacatcccaatcatcatgctagccagtaggaatcctgtcaattcagaataagctaactaagaaaaaaaggctttattccaaagcatatgcttaagaatatccatagaatattcttgtctggattcatgttcttgtttgtacttgcacaaccttaaacttgtttttgtacatctttaacttccatgaaacgttataggtttttttctttctctcttgcaacccttgaatgtgtttgttgattgatatctacacatgttgatcatccttgtgttgatcgattggtttagatgaccatcaacaaactctttcgtggttttgcatcgcttcttatctcgatcatgtttttagcatctttgtaatacatatttgttctgttttctgtcctcaaagcagctcaagatttacttgcatcacctggcaaattgaaaagcttcttagggatttgattcttagttttaacttctctgacatggttttgttcttctttgcagtcgtcacacagcttaactgatgaaaaggaatctttggtcttgtatttggaacctctgaagctcactggtttggattattaagaatctgttaagccatagatttctaatactcgaagtttattgcacgtctacaattgaaatttgttttttgtagtttatggatattgtcgagaaagattatgatatgtgtaaagaaaatagacaagtcttggtgtgttaaaatgctcataatctctaaagatagttacatacaccaaagttgtggatgtggagaaatgggaccaaaaagtcaacgaaacaagtcttgagttgttctggtttagaattcttctttgatctatatagttgttgacttccatagcatttatttgtacgcggtttttttcatgcatgatttattaaaagatcagattcagaccaaagtttcagccttttcacattaaatcatcaaaattcagtagtgcttattatatcttcagggccattggatttgggactatgactactgaataggtcgattgtccccattatcaccccttagaccggtcgagtgtccccattatcaccccttggaccggtcgagttgtgtatgacttcaacttctacaaatgagaatgtttctactttctatatcactaaaaacaaaaacagtttcatgtttctcttaaatttgcatgatacatagacaataatgcatgctgtacttaagaggatttggtcaaaaataaacaactgcaaagattctcttctttttataagaacgataaaagttagccatcttcaaaagttcagttcattaatcacggtttgattttgttttttggtgaatctttaggtttaatatttttattaattgagtttgaggtgtttagtgggcacaatcagaaataaaataagcttattaatttctgtattaagattaagaaggttttgttatttgttgtttagtaaacgttcttaacgcagtttctaattacaacaccgtgtaatacgttacagcgcatcgtcgtcgactgaattaggtgaagacttttgggaaaaaatagtaaaatatttcgataatggaacttataaagttttctttttatcttttgagccccaaataattgtaacagtcttactaagatcccaaaactttacacatcgatatcgaaatatcacccaaaagtacacacaattgcattttgctcccccaaacaactgctaaactctcgtaatgaaaaatcaacattaacacaaaacaagatgcaaaaaaagaaattattgagctgagatttaag

SEQ ID NO: 26328 - DNA, 1098 bp, Arabidopsis thaliana landsberg
tgttgtgttggtgaggaggtagagggttattgtttatgaatcgatcaattacagaatcaacattgtggatgaccaaaagaaaagacttttcgaccaggtgagaacacaactatggccacttctgcaccacaaagtgtgcaaagctcactagcctttttgaaaagtccagatcttctttttgaaaaagtaacttgaaggttactttcatttttcattttgaccatctctattttttgacgacctttgctttttttcaccatttttagtgatatttgagaagctaaaatataggattggtgtttgtagaatgaaaatgctcatgtatttatagcagaatattacaaaccaaataattaatatttgagttgtctatgagtaaatttcaactttgatttattatatttttatttgaatttgaattttactatttttgtaacatttcataatcttaatattcaatcaatatatggtatgcaatacaaatttatttgactattatcttctcatttcatttgtacaatgtatccaaatctgccagaaagatccacctttaattagtagtgatcttttcatatctaatagtaatattattgaaatatttttttgaaatatagcaacaaaaatggcggcgtaaaaaaaattactaacaagtaacaagcgtaatatgaaggagatcgacccttggatctgctgcggtttcgcatccacttgaccggatcgagagttctttgcttaggaggtttgaaggtgttcggatctggaacggaggggtttgttccccgtgcgttagtttgcttggtcaggatctatcgtcgtagagccggtgagtcggagagtcgagttttttgggaggtttgtggcgggtttggtgagtctgaattttatttcttcacatcgtgtgtaaattctttttggatcagcaagattgttttgtcttttgtccatatgtgccacgtggaccaacgcgtctgtcaccgttagtcactgaatcttttgagccttacaaatcaaattatatgttgttatatagtccaataatttttttcataatttgaaaacttctcttaaaggatttgttttcactagtatctacaagtt

SEQ ID NO: 26329 - DNA, 1289 bp, Arabidopsis thaliana landsberg
aggtttcccggggaaaaccttaaatgctattcgatttccgtttttgctccccgagaaaacctgcaaataccaacgagccttcattttccagttaatggaacatagtctttgttttgtgttgccatttactttgcccctccagttttacaagattcgagccattcattatcagccctttctctttttgctctgatttttggtacaaaaacttttatttgaacatgaaattgaattgtatagttgtgacctttgtagaaaaactactctctgcatttatgttcttttgaaataatccatgttccttcatcttcttcttcctcagtctcaatatatcttgattcagttacagagaagctgatatcgattcaaatccgttatcgatccaaatccagttcattagcttcattattcatgagcactttgaccataaagcaaggaaacaaatgttaatgataagggaagtagttagagaatgtacaagaaagtttcaactatcaatttctttatgttccaaatccaacatcaaatttgtggtttgatgcagcattgagttgatctcatccatttttgggtgtgatgatggatcatctccaacaataaattcatgagaaaccccgtcaacctcgatggagctgcaaccaggaaactttctgattcccaaatctttcattttccttctcacattagttacatcttcccatctattagcagatgcatatacacttgcaagcagagtatgagcactggaatcacttacttccactttctcaagcttttccgctatccgttcagctatttttacattcccatagttccgagcagcactaagcaaagagcagtatacaggaactagagtttcatcggtttcactacacatcttatctaccaattcctctgcttcatctaacaaaccagctctgcatagtaggtcaatcagacagctgcagtgctctgatttaggctgtaccttatgtctttcggtcatcgaatggaaaatcttacgtccttctgctacaaatccaccatgattacaagctgttaaaaccgcgacaaaggttgtagcgtatagtctatcaccaacattttccatttggtactacaagtccagcgctctggctgacatttcgtgcatcgatagaccgtgtatacgtgatgtacacaaagctgtgtctctctgctttatttcatagacaacctatagagctgcctgaatgcatccacagtgtgcatacatgactacatgagcagtgccaactactgtatctgctgaaactctggtctcatttatg

SEQ ID NO: 26330 - DNA, 1476 bp, Arabidopsis thaliana landsberg
ttttcttcttgcttgcaacccattaaaaccagggccactatgttctggcttaatgtcttgggtaagatctttctagttgtacgggccataaaatccagtatcacacgcttttcatggccatgacccatgaggccggtgatcgggttaccttgtgccgtccgtttgactttgattgatgatttcttagtcgaacatatactggccgtgtttaatatattggtatcatatacttcttggcttgaacagtggccgtgaagctcactcactatgggcgctatagagtctgaccatgtaataatcctttttctagggacccgaagcttttgctgtcttgcttatagaacaatttcgtcgagatttatcgcaaccagattgatagacagaaattcaccccaagaaatataggttttaatagactggtttagttatattgcaaatttccaaaaatatgcgatgcataaaattttttgatggatattaaaaaaaaataggtgcctattgatttttgttactttttggttggtataacaaatgtatggtttattggctttatatttgttagttggaccatgtgggcagcatttctctcacgtttaaaaaggaatgtaaccgtttccttttcaagaatttataactcctctcattgtcacaaagaatataaagactttgtctaagtgaggttttcactttcacattatataagattttttttactattccttgctatcactatccacaaactcgcaagttactctctcattcctcatcgtaccctctttactcaggttactatgtctcagtctcgcttctttttttgttttactcgagttttcttgagtattgatcagcgaaaaaacatattttgaatgttttatgttttgtgtttcttctctaactagtgactactgctagatttcaaagaacttataaacaaattattatttatttttttttttttccggttgggtatttttttcttcttaacaatagctttaagctaggcttctttttctcttaataacgtcaaaactgattagtttgttaggaaattgcagaggcaaattaaagtaatgatagtgtaaaccatgaatttgtcaaaatccagaaattttttctgatgatttcctcttgttaagtatgtaaaaataataattatgtcaaagactcaaaagaagacaaagatctgaaaaagtatttcctgaatcatggaacctgagaaataatattcaacaaaaaaagtaattaattatctagggttataacgttttttgcttcacagttgtgataagtaaaaaaaaaacatggtttgcgctgcttcctcttattctgtttttcatatgaggagaccattcggttctttgtttcttagtgtgtttctatgaaaacgtttccatctttcaggtattttctgaagttaaaagatagaaataatgtttgaaaggtgggagcgaagggtgggtacaagggtggagcatt

SEQ ID NO: 26331 - DNA, 1039 bp, Arabidopsis thaliana landsberg
tgaaattgtgagtcttaaaccaagattaggcattctctacttgtacgtaaaacatgttaaagtcctgatgagaagattcctcgttatgacactgttatagttttgtagagatgtatggttataaaatctattgcttggtatgtgcttattattccactcaaattagctgcatttacctagtcttatcatcactggagcttcattttgttgcattttagctttgcttgattgtgttagtaacttcgcctctccttaaattgtgcagagtggacctctcgcagcttattacaagttacctctcaatcgtgtgcttgtggtaatcctattactgtttctggttcaaggcctaaccatccttactatagtgttttgccagaagacgtataattccattgttactctggggtttggtgatgtaggttcatgatgacatgcaattgccatgtggtgttcttcgtcttcaagaaaaaggaggccatggatgtcacaacgggtatgagaatcacatttttctcactgggatgtggtcatttgtaaaacagtgttcatcaattaagctcttaagctttccgtggttctcctaacacaatatttgtcacatgtgtcagaccgtagtatctaccatcattatatgcgaatcatcttaggtttatacttgtttggggtatcattgacattagtatatatggtagttattgttcttgtgttcttcgtaggttaaaaagtgtaatgaaccatttccgaggcaacagggaatttgcaaggctacgaatcggttggtttcgacctctgttcctttgaacactttctgtttctcatgaacatctttaattctaaatggagatattattatcatatccaacaatggcaagggcattggaaagcctccgggacaaatggacccaaaggcgttcttgttgcagaagttcagcatgccagctggtgaacccgtacctctttgagcctatatgattggcaaaaaacaaagtggctttatataaccattaggaattgtatttatggctccctgtgtatggcc

SEQ ID NO: 26332 - DNA, 1501 bp, Arabidopsis thaliana landsberg
caggcatcaattgctgtctattataatcaacaataatctctcgcccatctattagtgaatgatgagcattctgctaaagaaacaccaaaaaaattctcactctgataaacaaactccactagtttccagtaattacacggagatgttaatgaaacaatcacattgcggtgccttagtaagtggttcagacagctttcaacaacaaaaacaagaggtaaaaagaaaatgcaatttagtatcacagcacctcataagcacgaagcatctccttttcagtctcatactccacaaaaccatatcctcgtgaagctcccgtcactaaaaaaaggtaacaagaagaggagactcaatactacacaatgtggaacttagaggaaatatgtaatcacagttctgcttagacaaatatcttggtagaaagtaacaaaccatcagaaatagaaagatgataaatttcctaaagataaagcaaagtgttgatgtcataagtagagcaattgcaaaatcttaccaatgtgtcttaccaagcgcaagttcttaatcctgccatacttactcatcacctacgaagaagaaacttttataatcatattcaaaacatagtctacacgaaaatcaaaaactaagtgaaatttcaatcattaacctctcgaagtgtatcctccgtagtgtgatgagagagacgacccacgaagagagtacagtaaggatctccaacagccttcgaatcaccagaaggatcatctttcaaaacaacccaaatcaatgtatttgaattcagaaaccaaacgataaaagtgaaaagaggagcagagagaacgagagagtatacatacataagccagcgttataacagagaagagctcgacggacgccgttatcatgtggagcaacatcagttccgtcgatacttccggcttgaatcggatgatacgacgtcgcgtagaacactttgttcacgacgttgtttcctccgccgctcatttcttctcccccgactctctctctctcacggcggctccggctgtttaaggaaataaagaataacgtcgtcgtttgaattgattactattaaaaagcccaacatataaattgggcttattacagcccagttaaagatatatgatattctcgtaggtcccacacgaaggcggaaactccaacggtggctgctttgggttaggtgaatcactcactgaagagtgaaaagctctagcacaaaccaaacaccaaatctcatttcttcttcttcttctttttccacattttctgattagcagatcaaatgatgcttgttcgatctgtatttcgatctcagttgcgaccctctgtctcgggtggtctgcaatctgcttcttgctattcttcattatctgctgcttcagcggaggctgagaggactatcagagaaggtcccagaaacgattggagtagagatgacagcaagcctgggtatgattctcctcttcttgacctactctttcatggaggaatttaccct

SEQ ID NO: 26333 - DNA, 1297 bp, Arabidopsis thaliana landsberg
ctgtgatactaaatcagtcacaaagaatatgactctagaataataattcgaaagatgaaaagaataaatgctaatcttggcagaaaatactaataacacttttatgtagtgagaacattaaaagagagaatgtctctttaaaacaaacattagaagagagaaaatagtagtcaaaatatagtagctattcctcaatttaaaatggtgaattcgatatctaaataaaaatcgtgtttcacaactcatatttatttgtagttttatatactgaatatgttgaacacgttatttgttataacaatccacaaattagttagagaccaaaactcgtaaattgatagaaaactagtggaatgaaaaagtgttcctaggcgatttttctaactgtagttacagtccaaattaatactttgattagatgcgaaagtgacaccagcatgacgtaattagtctacacatatattaaaaattttattcattgttacatggtacatacgtttatgaaagtgttcaagagtagaaatgaaaaagacactgccataaatagtaccataaggctacaataaacccaagtcaacagattcggagaggtaatttttcactcttcaagatttcaaattagatcgcaataaatgtttttaaaatgtcggtaaacattttgatttaaggaaccacagccaccaccatagtcggctgcggctgagattgcgtcgccggcgttactttcccgatgtgttccatctcatttgattaagcctctatataggtcgagtcatatctgtgtactcaatttatattattaaatttccaggtcaacaatatgaataagtttacaatgtcaaaagtcaaaaccatccaacaaccaatattaaccgtagagttgacttataaaataattcagaagtataaaaaatggtaatgagaaaagatcatccaatataaataaagtttaagtactatacatgtgaggtttgaaaataagaatccacactaccatggactggctgtgatctagttgacaaatttctaaatatctaatagacaaatttcttatgataataaatctttttcaacaaaatgtgtcttaagaaggtgaagaatcagattatactgtctgatatgttgaaagatggatgatgattcagaaacatgtttagttcaaaggggctccatggtgcactatgttaacatcaaactaatgcggtaactaaaatcatgagtctgcatgataatatctttagaccaagcatgaagcatttgtgattattgtaccttacaggctacaacatttaagagt

SEQ ID NO: 26334 - DNA, 4419 bp, Arabidopsis thaliana landsberg
tgaagaacattttgactattttcgcaaatttgaatcctggcatcagatatgtacaagggatgaatgagatattggcacctattttttacatcttcaaaaatgacccggataaaggaaatgcagtaagtacttgtccttgctaatgtaccatttttttcttattttatttgtacacatattgttctacctcttttagttctttttgggtaacacaccactagttctcctcgtttgcttaacactggcattttaagttatgcaggcatacgctgaatcagatgcatttttctgttttgttgaattgatgagtgggtttcgagataatttctgtcaacaactagataacagtgttgtgggtatacgttacactataacaagactgtcgttgctcttgaagcatcatgatgaagaactttggcgtcatttagaagtcacaaccaaagtaagatatttcacacaaccttggctgatgagacgtcttgctatattcattagttatgtctctgtagaatattttgccagtatgtattgctactggttcagagctatatgttgcatgaatgttgtgctgaaaaattcttaatccaccttaactactagattgataacaaccaaaactgtaccatcgctttcaaaatgtttaagttttcaagtttctgtatttctgtttaaatgtttcagcattttgacatttgagacctgtgtcaattttcagataaacccgcaattctatgcattcagatggatcacactcctattgactcaagaattcaatttcgtggaaagccttcacatctgggacacactcttaagcgacccggaaggtcctcaggtagtattcagcttactactattcagcttccgtaagttgtgaacgagatcaatttcaaatgttgcatttttataagtcattaaacgttcaaatacctctgagcaggtgggttttaggacagtaaaacatatacacgtagagatttgtatatgttatagtcctagagattggttttggtttgcatcttactgtaaaaaaattaaattagcagaattgagttaacgggcgcttgttatcttgcgagatatgaaaaagcttacaagtgtaactgaattttattttgcaggaaacactactgcggatatgctgtgcaatgttaattctagttcgaaggcgtttgcttgctggagattttacgtcgaacctcaaacttcttcagaactatcctcctacaaacatcagtcacatgctctatgtggcagacaaattacgcactaaataaaaatcttcaggttaataatatttcactccctactcctttataaaactctgcaactttcgtctgtacattattgtgtaaggtaattttagctgcatgagaaaatctcagatcaaactttgcttcagtgttaaagactatgatgttttttgtgtgtaacagagttattaatagagagagggttttaggatcggtctttcttatatttttgctttgatctattcacgaaagtttcttggtttgatttggtaaattattgattaaaaataaccgtaaagcttaatcaacaagtagttgctgataaatatttgttcaaagtcaaaactgtttttcattttttcgttccgagaaggagaatttacttgcgaagaaacaaagaaatgagatgtggaacaatttcactagtcttattcttgattatgattcttctttatccatactcttatctcttcttcctcttcgcttcttttctggtttgctttgttcttgctgcttattatcttctttttggagaattctaaaactgcgtccaagactcacaaagggatccgtgccgtgctcaattggtacatgttcattgggcgaattctctgttcgaaaacttgcaatttctcataattttctaatacaatgtgacctctctttgtatttttatttgtatttttttgtattcttctcatcttatattcttatctacgacatagtcaacattataaaactatgtatcaaatattaatttcaaagtaactacaccataatccagttctgttaaacccgtccgatttggtgatataaaacaataatttttttttgtctcgaaccaattcactatataaacatcatatacctcttcaaggggggttaccaaccaaacagcttgacacgaaattgtctcgaaccaatgaacccaaacaaaaattgtcctggaaatccggatttccggtttactcaattgaaacaaaaaccggacaaacctcaccctaaaccctaaccctccgagacaaacagagagacacaaacccactgtcagcgtatataaacagaactcaagacagagacgctcttaaaccctttcttcttcaacccataccgttttctttcttcttctattttgtaacttttttcctcgccgacgaatgcaagggaaccacgacggttcgtggtctctacacccctccaccaacaatggaagcggaagaggcaacggaaacatcaacatcaacaccgttcccggtggaggataccttcctcaggcaaatcctgtctttcccaatttcaatcaacccattagatacccaattcctcagtttccggcgaatttttaccgccctaatttccctgacttctctctcggaaaccctaatttccaaccccatcaaaatctcaacttccttcatcaacaaatccctcaccaatatggctccgctgctaatcacttccttcaaaaccataaccaaaacagcttctctttcacacctcaatctatacctaataatgatatcagtatctgtcagaatcacggagctttcgaaaactcttcattgaaacgaagacgacaagaggaggttgtacaagtgactgatgtggttccaaaatctaattttgcttccggtgagagtgctaataactccttcagtgtatctctaccgatccctatagcaactgatgatagtggtgtgtctcgagtccatggagagaagtcatctggaaaacccaagcgcaaagttgaagtcttgcggattgataaggctgttaacaagacgcgtaaatcatttgttgctgctggagagagtgtttcttcgactagagtgtcgagagctgttttagaagagcttcaagctgattcttggcgttccttgggtgtgcaaatgcaagatgttccttctcttcgtcaacttatggccattgaaggcaaggtaagcgttgaaattatgtctatattctgcagagcttctatgttcactgtcaatagcgtatagatgtatcttttgatgtcttgtagatcaatgcatttattcactgcttcgttggggctagaagaattgtgaccctgcatgatttggaagtggcaatatgccggaacgagtttgttgattctttcgatgatctggaattgggacctttgctgcagcatccactggttttgctgtactttccatcgatatccagttctactggaccagttaagatcactagtgaggagataatatcatttcttgatagctatctgcacacttatatgacagaagatgttaagctcgatgaatttctgaattttgttgcaagtcaaaagtcagttacaagcaaggaaaagcttggtgtgcgtattcagagcttgcggtatgatattgttcttttttggattatctaaacttggttatgagttaagtaattttgatattacagtaaggttggtattaatgttggatctggttgctcttagtatgaactgcattagctgattttatgtgatttcatgcatttttataggatgtatgtatctttcattctagacgcgaagagacaagaaggtgaaacactgaaagtcttactgactgagctgcatcagaagtatcacatcccctcatcaaagaaacaacagcgagataaatctctaactgtctctgagcgtgctgactcatttgctttacatcataaggattattgtggcaagcatataagatttgattcttcaagctcagatgaaaatgataatgtttatgaggttagaaatcttaatagttctgaccatatcaatagttgtccatatccatctgttgcggaagagatgaagcgtcttgggggctccaataagaaaaggaagggtgaaagacgtaatcatgaaaaatctgattcctccaagctgcttagaaaatccccctctaaattacaaggacatgcgaaacaagagatacctaaattggctgatgattctgaagctaagaaggttttcagtgtcgatgaggctgattttacactttctgaaggagatttaagattgttcatttcaacttggaaggacacatgtaaagagctaagcatttcaacggtaagttcatgttgagattgcccgactgttttaatctgagagtgaattatcttaataaggtgtgagggggcttcatgtttgtttagtttctaatactct

SEQ ID NO: 26335 - DNA, 727 bp, Arabidopsis thaliana landsberg
agaaagcgcaacagctgaaggaaacatggtcactttggagttagcatcaggcatctcactagaggtatatcaaaatccacatgcagatatatatatattaaccaaatgcagagttgagaaaaattgagttatatggtttatgtctagatacctgtgggagcaagatttgttgggatccctgatacagaaaacgcagagaatccaagtggagtaatggtggaagtgtactggcaacaagacggctcggggtcgatgtgcatctctggacactcatcagagatgcgggtaccacagaatgttccggtgacacgtccaccatcaccaaatgcattaggacataaaagcctacgacaaggggttcgtggtatcgtgatcgatttatgatttaacgatttatttttagtgttgttagaaaatgagaatcgtgaacaaagttgagtttgtttttggggaaaattgagttgttcctatatagtacaggggttaaagttttagaaaaagtttaaattgagttttgtctttgttgaatgtgataaaagtaagcagactgtatatataggggtacagaaacgtgagggttaagtagatgacatgcatgatggattcacaacctaagaaatagacgaaggatatgaaaactcgttcgaaagcgaatacacttaatacgaacaccattacggtatttaatcataaaacaacactttgtacaaaaataaaacgcaagagt

SEQ ID NO: 26336 - DNA, 1272 bp, Arabidopsis thaliana landsberg
ctctgtgcacctctcgctgaatctcttaaatgggggattaacgctattggcagaattatacccttgatatggaaaccatgcgattgatatctgcagtggctttcattagaaatgtggctaagggagaaatctactatcatcaactagtataaaagaaaaacaaaactaaatcttgtggcatcaatctaatgatcacaagttcaagttattacttgttttggctttgttaattagcaacttcgctgctctgttctctcttacacgtttagctttgtgttctgtcttctgtattgcagacggaagtgaaccggagcgactatgacaacgtgatcggagctctgccctacttgaaagtcaatcgaaaggcgacttaagcagagcaggcttgatccttttcttacctgcaattctcattttgtaatctaaagttgtggtaatatccttttgtattgtgatataatttggtcaatgagttgatttttgtttcatatttgtgtcttctttttcttgtctcgcatgacaactattctaggtgtaacatatacctcatcaacgagtttggtcattgatcaatgatttgggttaagaaatcagagacagatatatcttaaaagacttcaaagtattataatcacaccaatctcacttatgacacttttcaagtctcacaacccaatccattattttttttgttgtcaaaagcattaagataaaatgcggctgtgatagtgactcactagctaatgcattgacaatgggagttcattagataaagaaaaaatacagtacagtgtaatgtttactatattaaatgttcgggtcttccgcccaatagatgtaaatcttttagtcattccaaaaaaaaaatgttcactaactctggaagtagttatatggggagccaaacttggcatagcaacaacaatcatataaatcatagactataaaatataaagcaggagcaaaactcacaactgacgaaccgacaccaaataaaaaaaaccaaagataaaaaatcctaaacataaacaagaaaaacacaaagcaaagtgacacctagatgcaaaattttaaaagattcatcacataatgtcaaaaatgcaaacacaaaaaatatcataagcatcactggaagacatatataaaagtaacaaatgaggatcggactcataggccaacaataaatatgactgacgaaaaccacctaaacctaatcaaactcgcacagaaaaaaaaacatatgctacaataacaaaaagaaagcagagaaca

SEQ ID NO: 26337 - DNA, 929 bp, Arabidopsis thaliana landsberg
  unsure (1)..(929): unsure at all n locations
atttcttgatggtttttgttacaaacgttgaacatgttggtgatgtagcttaaggtgcaggcttcgaacacaggtggttggtttcacatgcattggcattggggacagaaatgggatactaatttgaagctaaccggagagagtttgtcctataatgtcactacaagtgatagcaaatgtttgggctttcatgatgttgctccacctaattggcagttcaaacttcaaacaaccttacgatggcaagattaacttttgattgggaattatttaatatagtccttttttgccaatgtattcgataattttcagcacatggtttggaattgtattattggggaacgaagatagtagagttttgtagttgatgctattttatttttcggccaaagaaaagcaaactaatttagtatttagcacggcagacaacataagtaaatagctcttgattttaaatggtcgttatcagacaataaaaacaaaatttgcttcccaccaaaagtataattaagatttaacatttcggaatatgaagagtatacaacctnnnnnnnnnnnnnnnnnnnnnnnnnnnacttacaacagtctcattccaggatcatgaatcgtttgtgtttctgagtaagaaaagaatcgaattttctcagacatcgtacggaactgagtaaatgtttcattgctccacatttcatgtaagaaaagaaatggtcaaaagatttcggatttcataccttttaagaaattgcgattccggaagaaattcgcaagttagagtctgctcctccgctgactacactctctcctttccaccagtcagcagataaaacctttaaaaccaagttgttttataccatttcagtaacaagaagaactaaaagagtagaagctggaagataacattgtgtttactctaccttgtcattgtgtgt

SEQ ID NO: 26338 - DNA, 1128 bp, Arabidopsis thaliana landsberg
taaagttataaaaaagagggcaggggaaataaaaataatcagatatgagagtgaatgaagatctgatagagaggtatacaatatgacatatgttgtatacatagacatgtttgtatatggaattggatttgtcttcaaacctttacattagtataatagattggtgtgtagagcgagtgtggctttaccacacacaaaaatcaaaagcaacattaacttttgaagtcttattgtacatttcaaaataaggattttgaccgtctgattacaattacgcttacacacaatgatacagttttcaaattcacacccagtggaaaaaaagttttaaagagattttcattttcttatgtggaaagagagagatgaaggacatgactcattttacactcactcattcgtccagctccaaagcttttgttctgctttcaaactgaagaagagataaaaggtttgggtaggttatgcatcaggcaacatgatgcagtcaatggctcgtttgcatattcccgtcattgttgcctctggaccatatacctgcaatcatcaatccttgtaaagttcagtattcgaactaaccacacatgttcttttctgagaaatttttcgacagaatgagttttcaccatttctcctaggtttagattgtgagtaaaaccataagtaattcggttacctctagagggacaccaagttcctctcctaaagctcgcattctagccaaaccagtctggtaatttggtccacctctccttacgtaaatgtgcattcttgatgctttcaatcttgtttcctgctcatggcacacaaaaaaaggtcagcatcgatttcattcttgagcattcctctcatcttcatcaaaatacagtagcaactgtttgttcgttcactaaagtttgtgagaaagagcaccttttctcttagcgctcgaatgataccgttgaaagtagctgccacatcagtgaaattggcaatgctcctccaattagaagagctcgtttacgcccgtcaggatcagtagtggcacactgagaaagccgaacgtttggtccgtgaatctctaaaattttatagatagaaacaattaaggaaaaggccaagttctttgccatgactcacatcaatgac

SEQ ID NO: 26339 - DNA, 1364 bp, Arabidopsis thaliana landsberg
accgtggggcttttttcgagcagtgcgctccatacacggcgaccagttagaataagaatgacacaaactcatagaacttacttcagtcagcacaagaatataattcaccttaagtaaatcaagcttgaggtttggaccggacttggggtactttccatggacatttcctatacacacagccaaagcatctataccagtttccataaattcctgagcctgaaaactcataataataaattgtagtttggtttagcaacataaatttgttgtgtgagagattggatttatcggggcttaaaaccaacaaggacctggttaacgttggtgagctttgcttcatagtcttcaacagtcaagccatcctctgttcctgagagtcggcctagttcatcttccaccataatgtttttggaacgggccaactctgttatggatttcttgtaggataaattttctgtgaaggaaagatgagaaccatctaccatcactgaatctagtccctgcaagaaatcgatttggtatgaattttcaatataagaataagtaaaagatgacacagagattgcacataagtgatagagatctcaaacttactagctcaagagcttctaatagctcatgctttgtagttccatgatcaaagtgtacggatattggaacctgccacattgtgcgtattaatcagggggctcagagtcagacccatgtactgggtatttaggatcagctattaagttttgatttcaatgtctattccgaaaaaccacagatgaaagctagagagcgagttcaaaagtacatgattgcctaaaattttggtatgtatctaatgcagaatcaacgtacagttacaaagccacttaccctggcttgttcagctgcagagatgcaacatgaaaccaaaggaatgcctccttgtttaaaggcacctggatggcacctaaaaaaggtagccaaaaaaagttcagttatcaaatctctttgtgtcggacatctttgaacaactcagaacagaatgttaatctttggttgctattgtatatcagaaatccacttttggtcagaacactaacctgcaatatagcaggactattttcttcctctgcggccgctacaacagcttctattccttccaggttatacacgttaaatgctccaactgcatatccacctttttctgcattctgttttacatagaaagacaacatcaatatgagaagagatatatgaagctagagaacgagaaggatactcaccagaagcagctcttttgtcgaccgtcctgctaccactgaccaagacttcacaacttctgcaagcgctgtgctgttaccaacattaccttgtacatataaggaaaagag

SEQ ID NO: 26340 - DNA, 968 bp, Arabidopsis thaliana landsberg
  unsure (1)..(968): unsure at all n locations
gtattgtagaattgatcatcaacctcaattatgaacagtcacttaaaaaaaaaaaattgttgcaagtatgaaattggtacttatgtctatgaaactgagatacttatgtactgtgaaattggtagatccattctgactctactttgcatatagttatggtttaaaaaaaaaaaaacaatggaattcaaattgatataccttcatcaatataacttcgcctcgtggaatttcatcaaacatatcaccaccaatgtgttcnnnnnnnnnnnnnnnnnnntttaatcatcaaacaagtactagtagctttgtaatctatacgttttagatgatctaggaagcgataaaacggttcgcgatgaaggcacaaccaatttctttgtatactactgactaatccacctaaaatcaactaaacctagtttttagattttaccttctaacgtcgtctaccgatagttttaatattaatcttaagaatcactaaagaaaaagaaaagacaaaaaagtaaatgacaatttaagaataacaaagagacaacaaaataagttaccatgaatttggggagcttctttgactatgtgaggcaagtcgaagttgatgcctttgatatgtgggtacttggagaggatttgggcaagattactgcctaagcttcctcctacatctacaaagtcactcacaccttcaaaaccaacgtaattctctagtattttcttcattactattgatgtatgattcgtcatcgattcattgaaaattttctttaaattctcatttttcttcatgtattcaaagatcaatgcctcattagctcgctcccatgccgatgctccgccttcttgtattgcctccgtaaggtaagaccttttcatgcaaagaaactcgtattagtacaaattaataaacatttatgttacataccaaaacaaaagagaacacctatttggaacatgttgtacatcatcca

SEQ ID NO: 26341 - DNA, 2016 bp, Arabidopsis thaliana landsberg
aaatgtagttcgtaaagcttatcgctttctcttcatctccagaaaattctgcattgggaactttggtggtgatgaaatcgataatggtttccctgatttggattgtggatttgacgaggactccaatatcaatgagctcagaagcatcgatcgagaagtgatctctgttcggagtaggtttttgaagagtgccaatcatagtgcgtctcgtgttctcgtgacattgcagctagatgaatctggattcaattcaaagtcagttttagatgaattgaatgttagagtctcagggcttctagtgagggaggttcttgtagggatcttaaggaacttgagctatgataataaggcaagatgtgcgaaactagattatagattcttcctgtggtctggagaacaagagtgttttaggcacacagtgaattcttatcatttgcttatgaagatatttgcagagtgtggagagtacaaggcaatgtggaggttagttgatgagatggttcaagacggattcccgacaacagcgaggacgtttaatctgttgatttgtagttgtggtgaagcaggtttagcgaaacaagctgttgtgcagttcatgaagtccaagactttcaattaccgacctttcaaacactcttataacgcggttttgaattctttgctaggtgtaaaacagtataaattgattgagtgggtttacaagcagatgttagaagacgggttttcgccagatgttctgacttataacattctcttgtggacaaactataggttagggaaaatggatagattcgacaggctgtttgatgagatggctcgagatgggttctctccggattcttacacatacaacattttgctgcacattttggggaaagggaataaaccgctcgctgctcttactacgttgaaccatatgaaggaagtaggaatcgacccgagtgtcctccactacactactttgatagacggtctgagccgtgcagggaatctggaggcgtgcaagtactttctagatgaaatggtgaaagctgggtgcagaccggatgttgtttgttacacagtgatgataacagggtatgttgtatctggagagctcgacaaggcaaaggagatgtttagagagatgacagtgaaagggcaattaccgaatgtattcacatacaactcaatgattcgcgggttgtgtatggcgggagagttcagagaggcgtgttggttgttaaaggaaatggaatctagagggtgtaacccgaatttcgtagtgtatagtacattggtgagctatttaagaaaggcggggaagctttcagaagctcgcaaggtaataagagagatggtgaagaaaggacattatgttcatttagtttcaaagatgatgaaatataggagatgataatttaggttgtttgttctcttctttacccatttttgtaacttaaattcttgttcatttcctaaaaaaggagaatattagtaggggcttttgatagatgaagaatttttctttgatatcaaaactactcgtatttaaacttttgttctcagatgcagtgtgcgttgttgcgtcttaccgaatcgcaaaaatatataccctctgtttctaattagaagtacactaaaattccaaaataatttcatcttccatcttttattacaatttttgaccaaaattgatttaaattgtaaagtataaatgggaaaaaatgaagtagtggcaaatcttatctaagggaaaagagaatgtctcattctgaaaaaaaaaactcttgaactaaacagagggaatattattttttcaatacacgaatatagtttaactgtagacgattacaaatccttttataaatataatttttgggggatttttcttttttttttaaaatattattttgtatgttatagatacaaattttcctaattactatccattgtcttaaataaaaaaggaaactgtatttcttttttttttacatcgaaaaagaaattatgtgtatatattatctcaaattgacg

SEQ ID NO: 26342 - DNA, 903 bp, Arabidopsis thaliana landsberg
tgttccctttgtctgatttttcccgggcttatatgtccacccacgatgtaaacttcgtgcaatttacatcagaagccattttaattaatatcggatcttgatgaaatttattagaaaaataacagaaggctcttataccttgattattgagaatgagtttttatctgatgagatgattttggctaagctagttaatggtccattggttagtacggtgatcttagacacttcatcaacagatttggtcagattttgccaaacttcaagggccagaggttgtcggagttcaggccgatcagtgtcgctcggagctccatgtgccattgagttctcatacctgcgagggcttcttgggaggtgagcgagcaaggccatagagagtgtcggaatcaagaaaaccgccacaaccttgtggaaccgctttggcgtacttgcagtcaccagcagatggaaaaaccggttcagattggttaatggcgaacatatctcctaaaccgacggaatgtcatcgcgtcccatcatatgcagcagatcgtagaccacatcaattgtcgctgtattagcccaaccggttgggctcacgataaccgcctggagaattcagaatgatgagagagctgaagtgttacttgtgtaaaaagcaataattatgtccatttttattagggttactttttcacctagtaacttatggagcaagaaatggtttgaaccccttcaaaacaataccttcaaatctatgatttccactggaactttaaggagataaaagagagagaggaaatgtccggcgctcatgtccatatcgaaaacaacaggctttccttccagccgtgagttattaagttctgctatgaacaattcttctcttgtatacataaactgagttgaaaaagtaaacct

SEQ ID NO: 26343 - DNA, 1783 bp, Arabidopsis thaliana landsberg
  unsure (1)..(1783): unsure at all n locations
gtcagattctgattttagatctgaaaagctagctctctggggaatagagaaacaaagatcaattaatttatttttatttttttaatttgtatgttgtattttattttttgttgcagtcaacaacaacattaaagaatgacatgcaacgtcagcaactggtcaatatactcttttcaaaattttctcaatcttgtggtcaaaataagcattaactgttgttccactttccacgtacattttatgaggcagattcacaaattttaccaaacagtatgataattgtatgaagtaatttgagaagactattgaccgcaaagagattgtcctttgttggatatcgttttttgagtatcgattacaaaactaaattaccaagtaattaatttataagagaaatagaaaatgagtaaaatttaaaatttattgagagatagaaaatagatccctttaaatttagcttataattcgaaaaatgtgcatgtttttatcttaatcacttaccgtgagaaagtataggagtaaaatgatgttatcgtaaagtgccaaacaacaaatcaaacttgtgcttagcaaannaaaatattttattttttaaactggtatcatttgagaacatgacttaaaacgcagccggttaaataaaaaaagttggtttctctgcatcccatgtctagagtctagaagagtggtctcgctgccgatctcagcagggagaataatttggcttggctcaatcactcttgtggatcaaatgctcttcttcttcttcttttgtgtttcaagtcttgagaagaaatctaatctcaaattattaggattttgcaccatgtttccagcatctcagtttatagatataatcaaataatgaaattatagagatgcattgtgtcattagctactgatatgaattctagcataactgattctattatctttttgttcttgaagatcacagtagtgtgtaataaaaaggggcattgctgcagaaatatagtcatctctcaggttagcagctctctttcacttgttaaaactagattttaccatcaactgtatacttcttccttctgttttgcctgtctatcaactacaacatctgcaaaagtatcagaaattaatagtaatgaagagtttggatatctcgcaattgtatcaggattcaaataagttgtaatgaattggaatatacactcgtaaatcacacacacatacaaatacacactcacatgttctcttatacacaagcaaccctaaaacacatcaaccatgttctgattcttttccttcaaaatagatacacaaagtctgtctccacacgctcattcctcaggccttaccttcagctctcgcaaaggtgagcccaacgcaagcatcaacaaattcattatctatgaaatcagttgagaatatctgcagtttatcagcacatcctctttttacacactctatgatgaataccttggcgtagcaatgtatcctcttagtcaccggttttacacacattattgggttatcgggctgcggcgtcactgtgttctccacccggtaaaagaatttccttgaagtagctggttgctgctggctcaaatgcttgatgttgctctcgaatttggtcgatggaagatctgtatcgatccaattgtctttaaggtaaccagcgctccaaagaggatcaccatgcttaggctgaggcgatttcctcggtttccaaacgcagatcactctcttgggaagcagccaacgactgtcttgagaacacgtgatcgtcctggtgaatcagatg

SEQ ID NO: 26344 - DNA, 1271 bp, Arabidopsis thaliana landsberg
tcgcttaaatggggtaaggacatcttcttatatactttgaaacacattgtttaaatcgcaaacacttttttgaaacttatcgacttaagaatttattttatgtgaatacacaaaacagttggcagatgtgataagagtgatattcatgtcacatacaacggttgcggcaataattgcgatagtgcttgattgcacattgtgttgtgaaagcgatgaaaccaagaaagattgtggattgaaatggtgggacaagtttcgattatacaatcttgacgtgcgaaacgatgagttttacggtctaccttgcggccttaacaaattcttcccttctcattgaaactttcacaaatttctttctattcttttgtctttttgaatgttttctttcttctttatttatgtccatctagaagtttagagtgctaatatattttattacaatttacttatcttgttacatatatgtcttcaaatggttttttaagaaactttcatattttgttcgataatttctaaataagaaagttattaaacgctatttagaagttttagtattgcatggagcttaaattgtttgaattatttaaactgtaattcctaatgttttttcaattttatatatttatatagttaatttaaccaactgtttatatctagagatgcatagactgctatctttgatggtttttgtctttttgataatgtaattactgaaaaattcttaacatatcatatcaagtaaaatcttttttagaaacaaaatcaaattccatttaacaaaatcgctttggagctactaaaaagtcagaatttcatcaacattggtaaaattttcccatagatacacatttttcctagtaaatattatccaagaataaaacagaatagaagataaaacacttgtgtcaagaagactcaggattagaaccagcaccacctaccttcttattagccattgtgttcttaagaatctgcagatataaacaaaaacttgaacatttaacacattcgtaatcataaccgttaaaattacattgtgacagtctcttaaatcacaatgatcttaatctcaaactgaagcaaatcattgatgagtgatttaacaaaagaaatggtgagagagacatatacatgtgacatgtcgaagcatttgattttcattctacaaagttatagtttgttcctgcattttctttttggaaattgtcgactatgatgattagtggctagactgactttttaatatagcttattgatcaatttgatgcttt

SEQ ID NO: 26345 - DNA, 823 bp, Arabidopsis thaliana landsberg
  unsure (1)..(823): unsure at all n locations
ctgcaaaaattcttgctagacccacgcttacttttttaactcatcttcatttgcacccctcagcaaaatctgaagaagaagggacataaaaagcaagaggtaatatcatgaggcaataatataaaatctggtctgtgtattaaattctaatagttgggaatgcttacagtaaagcctaatggctttggacaatgctcaaaatacatcaacgtcttcaccactttctttccaacttgaccagttgaaccatgttcttcaggatacctatccacccgaaaattctcacagtaacccagcttttgagaggagaggtggtctactgaaggaattatttgagcaccagtgcagcgagcaatgcggtctaaaagtggcctcttgatgtttagaacaagagatatgtctttggctagaagatactcttgcgcaaatcgagaaactgatttttcgactagtagaatatttggacgttcagcgtgaatcnnnnnnnnnnnnnnnnnnnnnnnnnnnnnnnnnnnnnnnnnnnnnnnnnnnnaagaggtagaagggtttagacatagataacaaaatccatttctaaccaccaacaggaagaaaaagaaatatgtaagcggcaggcaaatttcacctgttgcaacaaagtatcaaaacttgataactggtttgagaccctttgatactcaagtccaccgcctagaatcaatagtcgagctttctcaatcttcgtactcattctcctattaaccacatttttcttgcaaacaactccctttaccaccatgctgtaaaataacacacgagatggattaataaagaatgaaacttc

SEQ ID NO: 26346 - DNA, 1003 bp, Arabidopsis thaliana landsberg
tgaatccaaaaacccaaattattgattgcaaatcaatctcaagattatatataaaacaccaaagcctgaactttatgaatccaacgatgtgaattaaaccactcttatacgaaattcaaattcaaccaacaacatataaccaaaaaaactcgtaaaacagaggaccctaatccataataagggattcttacaatcccctttgcattggagatggtggagctccgaggagactggcctgttgaagctcaatttcgttgatttgtgcctctcgatccatctcgatgatcaatggaacaacaagtatgagaaaagttgtcccagcgatccacgctgcttttccggtgctccggagcagtttcttcgatacttcgacggcatctcctgctgcgcgtcttccttgggacacgatctcggagtttgaaatcctcgctaatatgtttggatctccgccgccagatttaccggctccgattctcttcgccgccctcgagtggggaaaagtttttttttttttgcttttttgggttaaaactttctgaatcgcttcggagagtgagaggatagtaacgagggtttcttctatcagtaggatgagttttgtttaccatgatttgggccattaaagtccaatatattaatcagctcaatgattgggccataaaagcccaattataatcactgcataatacttatatcaagggctctagatcagaatcagaacttaataaccaatgcaatatgcaaaagatgtctccggaggcaatactataagcgaggaattcaaagcttggtaatggcaatacaacacacatggatacaaggacacaagaaagtgttatttgaaggggataatcgtatagtcttgaagctagtcaagggagaaacacaaaactttaaagtccacaattggatcagagagatcaaatattggaggcaaaaattctccagtgttgaatttgtttggacaagcaggcacaacaacaaagccccagatcgtttggta

SEQ ID NO: 26347 - DNA, 2077 bp, Arabidopsis thaliana landsberg
gacaaaagctgtcaagttgatattatcaaacagaactaatgatttgtacacaacaagatattgaagcactctttcttaaatttcatgttctctaactctcttcctcagatcttgtctcactgttgcataggtgtgacattcttttgaagtaaacagaaataattgacgtggaatgtgattcctgttatcacatagatccatcattagtgaaaagagcaaacaacacagttttgtaagtaagcaaattagagacgtgatacacacgatctagggccttatactttgatgtggcgaatacgagtgttccttccgttttcgtgattcgacaaaatgcctaattgcaacatgaatgcattgacacaaacttctctacaaaagaatacatcctgaaacccattgaatcaaaaactttctaaaacttttttgtggaaattgcaaaaaacaacagatactctcaacgttaagtattttggcatttgaagcatttactcttctcatctcataagcagcttgttattgatgtttcccaaagaaccaatgaaatggaaacctcaaagcaacctgtacggtgtgttattgaaatcggtctaattttggatatattttttcaagttcttcaaaaaaaaaaaatcgaaatagtattgattctcttgaattatgtcacgcattatagataatgtatagatatataattaatagggaaaaaaagaaagtatagggaccaaacacttagatcaaaagcaatggtgtcgcctaccttcctatcacttatcttcaaacccattttcttctttaggtcgcttattttgtgtccctatcagttatgaattataatatgtgatattataatatgtcatatattcatcgagttgccatctctctaatatatgaaatccacttaaattattggtgtaatctatggattgatgaagggtagtaatcatacgtcacaaggatcacgtatagattcacaacaagacattgaaatgatatcactcatgattcaaaccattgtttctattcatttgcaagttaagattcataattcacattccccacattctccaccttcaagcctaagaaagaccctctctctctctctctctaacaaaacaaattggtacaattagaaggttgtcttaccaaaaactcaatgatttgattttacaaaagaggatatttatatgataataccctcatgaaccttaagttttacaaagtttgattattgttgccaaacaaaaagatcctctcaaaaacttgaaaggccaaaaggaaaaaaaaaaacacagagaaaagacacaaaagagactaacttaagagactcctcatctcatgttcataaggacatgaccacatggtaggttatgtcaattagaccccacaacttctcatctcaccttctttgtccccaacctcctccacttttatcaattctgtccctctctcactagatttcgaatctcatgtgtggggtcaatgttgctttctatttaaagctaagaataactatatctaatggattacttttcttccacacatatataacttaactctctctttttctcttttgctttaaccccctcaaagaaaagataagagccttttaaagtttttttgttaccttctcttcatggacttgtctgtacttgataggcttaagtggctgcaacagcaacaaatggtttcacctgagtttcttcagatacttggctcagatgggagagaagagctcaaaagagttgagagttacttgggaaacaacaatgatgagctgcagagtttcagacattttcccgaattcggaccggattatgatactactgatggctgcatttctaggacaagtagcttccatatggagccagtgaagaataatggacacagcagagccattaccttgcagaacaagagaaaaccagaggtttgtagctcaagaaagtattgagtattagagtttagattttgtttgaaacattgtttctgatcgttttaactattggttttagggtaagacagaaaagagagagaagaagatgatcatcgcataggatgaatcatagcccggcatgaaagg

SEQ ID NO: 26348 - DNA, 2628 bp, Arabidopsis thaliana landsberg
actgcagacacaaaggtaagactccaaccgcactgcaaactgcatctaaaaaattcggataaagattaagtggatatgggggagaaatgaatccaaccaaagagacaagaacttaccactgtaccttccaccaacccagtcccaaaatgcaaatgcattgttcgggtcaataccaaacttctctactaactgttaaacaaaacatccatagtttatacactttcctgtactgtctgaatatgaaatatgtagaaggaggtcgaaataaatcataattcctagaacatcgagactaccatagtccattaaatctgttcgataattcagtttctaaaaagactggatcaacatgtcatctgttctacataatcagaacgactcgagtgcatgtgtttcgaagtttaagtttactaagatggataataaggaaacaaagtccccaaaagaaactctagcaaatgcataccgcaagattagtgctgacagcaaccatatgttttgcaacagctgaagccctgttaagttatcacatgttaaatgagtgatgttcatccacgataaccaaaatatggtagaataacgcaaattatattttgaaaaaaataataattgtaaatgtacaagcataaaagctttccgctggcgataattgtaattttctaataaagtaagattaagatgccagaaataccaacccaagagcagctgttatccattccctcaatgttctggcgttaagcattgtttcagctgttgtaaacgttttcgagaccaccccccctggattacaagtatcctcagaattagtcagagtgaaaatccgtcaatggaaactatgaaagtgaatttgttgataggtttgagcatgaacctagagtagtttctggatttagtccactgatatttctagcaacatcaacaggatcaatatttgcaagactgcacaaaaagaaacaaaaattaattccaagcaaggcatccacatgaatggaatccaaaaggaataactagaagctaacaagttcaatacagcctcctcttcctaggttaaatgaaatttagacaaacaaggagtatgcagtgtctatgacaataatggtaaagaaagaattcatggaccttcaggagaaacttcaagcagctcattcattctaccaaagcattgcgaacagaaacacagaaaaagactacataactacaggaatgctgtgcttacaatcgcagctggcgtcctttagcagactctagagcttcaggatctgggaatgaaaatgcatataaaagcaaaaatttgaatcaaaacaagctagaaagaacaccagcaagaggcaaggtaccaagactagatgcagcccacctgtttggagagccgtgtggacaaacagtggacctaagaagctaccaccaataccaatcgcaatgacatctttcagcggtttgccagtggctccaacctgtcaattagttcaaaaaaactcaacacaaggagatgaaaacgtaaagaggtaggttttataatggcatctagaatttacccatgaaccagagcgaattttgtcagaaaattccttgatcttatctagaacgttccacacttctggaaccacattcattccatcagccttgattactgcattctttggagcacggagcgcaacatgaagaactgatctgttctctgaactgttaatctgaggaagccatttaaacaaatcagacgccatagatgatagaaaatgtttctgtctcagtaccgaagaagatggagaataattcgcttacaattcatttgcattctctattctctaatatgtaatactagataaagagtttcataagatcaaatcaaagtaagattaacatgcggatacttacatgctccccattgaacatgcggctgatcttctctgtcaattgagaagcctgcatatagaaacaaattatcaaaattcgagtaaaattcgttgcaattctataaaaatctgtcaataaacatctaccctcacctttgccaagttcaaaagcttgtccattgtctcaacagttgcacgctgtcgagaataatccaacagcaacccatcaaactccctaattaaaacataccaataacattaacaagttcaataccagagcaatagaaactcgtaaatgcacaataactagaaacaaacacaaaatcaaccgagttcaacaacaaacataatgtacatagcacatatgagccaaaatagaaaagaagacatacatcatcatggactggcatctattagcatcactcatcaaatcacgcaaatgagtcttcttaatatcttctacatgtccctgccaaattaccaaaacaatcccaaatcacttctctacacaaaccaccattgacaaactaagaaaagagaaaatccttaaagactactttaccttcaaatccttccacgcttcggtatcacaaatcaaagccgttgatgacgccattactagtaataaatcatcaacaacaacgaaaaagtcaaataataataaaacttcagattcaaaacaatttgattttgaaacgcgagagtcgtcgttcatcgcgatttaacggatcaaaacttgaattggtatcacagttttgattaatcaagagaaggg

SEQ ID NO: 26349 - DNA, 1117 bp, Arabidopsis thaliana landsberg
ccaataaacctaagagcgcttcttaccttagagcgcctcttacctaaattgatgattaaatctttaatttaaattatttattaatctaagaaacagctaataaatatttattaacctaacagatttacacgtctctttcttacgacatatcaacatcaaacaatattatagcaaagataatgtgattatttggttattgtaattgaaattaatccatacaccaattcattttgttttgttatatatatcaagaggttattgtgattttttttttaaaaaatatttaatcatctacccagtaaaactacgccacataaccaccacaataactctaagagcacttcttaccttggaacgtctcttacttaaattaataattaaatctttaatttttatcatttattaacctaagaaacagctaataaatatttattaatctaagagacttacacgtctctctttcttataacatatcaacatcaaacaatatttagttattgaaattgaaattatccacacaccaattcattttgttttgttatatatatcgagaggcctaagacaacacttacacgtctatctttttttcctttgtataccaaaaaatacaaaataaaaaacactatggcggaaaactacgaccgtgccagtgagttaaaagcattcgacgagatgaagattggcgtgaaaggactcgtcgacgccggagtcacaaaagtcccgcgcattttccataacccgcatgttaacgtagcaaaccctaagcctacatcgacggtggtgatgattccaacaatcgatctaggtggcgtgttcgaatccacggtcgtgcgagagagtgtagttgcgaaggttaaagacgcaatggagaagtttggatttttccaggcgattaaccatggggttccacttgatgtgatggagaagatgataaatggtattcgtcggtttcacgaccaagatccagaagtgaggaaaatgttctatacccgagacaaaaccaaaaagcttaaatatcactctaatgctgatctctatgagtctcctgctgcgagttggagggataccttaagttgtgtcatggctcctgatgttccaaaagctgaggacggtcagt

SEQ ID NO: 26350 - DNA, 812 bp, Arabidopsis thaliana landsberg
aggtcaataaacaagtgagaagaaaagctgtcagattttgataactgtgtggtcgcaattcagtaatgatgtttaggcaaaaaaaaatgataatttacctggttgaaatacaaaagcaacattttctcttcatcagcagcaccttttctggtaataaccaactaaacactttcagacaacgaaatgcaattgtaaaatgaactcaatctaaatcgtctactcataccaagagtaatcgaacaggaaacagccgttgattatgaaaggaagcataaaaagtttgaatggaaccaaattatcaagttagtatctatagactagtacaagaactggacctttttaatccctagaaacagaatataagagatggaaatggagatgattgaaaacaaatagattcttcaaggtcacagatagatgaattataaaccgattgcaacaaaagaatcaattcttaagtattataaagtaaacttcaatgaaccaaaacccaaccggaaaacacaagtcacaaacttcgatatatatacctcaacaagtctgaataaactggttcaggccaatttgcacaatcaagcccaagcttttgaaaagctggtactcacaataagaagcaacaacatcagcacaataaaataaaaaaacaatcactgagcacaaaagaatgggtgatttaaaagccgcacctacattgaacgcttggcgattacttgaccatgtatcaatcataaccctgacattaaaacagagccaagcaaacaaaacaaaagttacccatcactgaatcaaaaaccaacaacttgcttcaaaac

SEQ ID NO: 26351 - DNA, 1111 bp, Arabidopsis thaliana landsberg
ttcatatatgtttaaaagaaatggatcaaatatataatcactctatatataaatacctgtggacgtaggcatagccaaggcttgaagcctcactttgcgacgattagctaagattatagcgatgaacacatatgcgacaagaacaaacgcaaccgctgacactacaccgagtataattggcagtttactgctctttccattggttgatccacctgacccgataacaaatgtaattttttttacttgcattatatgcataactaaatgttttttttttcttttcttcataatattcatgttatgatgattactgagagctttttctaattaacaaacccataagataacaagataaaatgaatagaaagatccaaatacaaacctggactcacttcattgctccctccagttcctcctttgctagtcccaccggagcctagcacaaataaaattcaatgtgactctttttttttcactcaaacttcaaaggtgattatataatctaaatatactaaaagcttgtttgttttggtaattcgtcgagagatagagtaattcactaaaaatgcattccaagaaaacaaaccagatccggatccactgcttccagatcctcctcctccgcttccaccggatcctgatcctgaacctgaaccagaaccagttccgtttccgcctgtgctttcgcttgtacccttacttatcacatacagctcggccgcatttatcatgggcggcaaaagcgcactagaagtggaccaaagcgtcagtagggtgcttgagctggccaccacatctctcacgaccacttgcgttgcttttccaaacaaaggcacaacaggacccctaccaacttgcttaccaccaaagaaaatgttgaacgatcgtaaactcgactctagaggctccgagaaatacatagccaagtacactggaacttctgccgaaggaagagtagggtcgactaatgataagccttccccggtccaagagttacggaggacggactcaggcggcttgtttgatgcccagaggtatcaatggatacagcccagacggtattccgtcacaatatgtttactcggatggaagcagaactaccttgaagatc

SEQ ID NO: 26352 - DNA, 1180 bp, Arabidopsis thaliana landsberg
gtcaccattagcattatatctggtggattcttcctttgcacaatctttatccttggccctcacgtcatgctacagcggtcataccttccgcccagtgctggtatatatctcaggacttttatgctgactatagacatatctgtgttttttgtgcgtttgatcaaagcttgttttggttgtgtggcgtgtgaataaatcatcaaaagtttatagttcaaaggatatgtttcttctcttttttttttctttcaaaaagctacgagatatgctggtctctctcagaagcggcatcttgatcatagaattcattcgaagtcctatcagaattatctgtagttgtaataaagcgtgaaaagtatatcattcgaagaaatttcctctaaaataatggagtgatattttattattcggtttagtggataccagtttacttatctctcgaatttatgaaccacattccaaggagatgagtttaacaaaaaaaaaggtaaattgttttttattctcgtcgtgcgttccacatgagtcgtttccaagagcaatatagacgatacttcacaagaattattatttttgttggggtataaaaatttgaagatacgtttggcaacgacaatacgacgttagattgttccaagaggtgcaaaaacttagggaccctctttattcgttcactgtaaccactgaccacaacatgactaggtagactcttctttttgtcaatgttgatgtttatacgattttgatgagactggctctatcaagatatgaatctctgatcatatctccactaatctttcatcttgttattccctcatttacttttgatttccttctctctctctcttttttatgtatacaaatttttctttatttcgcttcactaaaccccaccatgtaattgtgtgagttttggcgaagtggcgcaacaccgtagagcacaccaacactaacccaatccattttatgaccgtaaattttgttgttgattagtgtatttttttcttgtttagttattctgagaagtaaattttttttttacaattagtttttaaacatagtaaaataaatttatgacagattataatattattttaaaaatcaataatatctaacaaattaaataaacaaatcacaaattactatattttaaataaatattgataattttaattagatt

SEQ ID NO: 26353 - DNA, 1595 bp, Arabidopsis thaliana landsberg
attctcctaatgatttgcctaatctcgccgagttctgcaaagtaaaatgaggttttgaaagagtccagcttgccttggtcgattttaccctatttttaataaaaactctattaaaaaaaagataatgttagttagtacttaattatagaattgtaggtaatctttaaatttcaaattatgtaccgtttgagcaagatcactaagaggttctccgataaagtccattacgattcctttaggggtctcggacatcttaattaacttcgtctctaagacacaatcctaaaagcaacatcaatcctccgggcacgagctcttcagctctagcatccatagattcttggtgtcgatagagtattgatcaagacacgcattctttaccgcttggttgaacgcgatgcactgcatgtctttgttccacaagggagagtcgcggtccatgatcgctttgggtattttcgaggtgaagtggaatgtgtaactcatgactcctatgttagaaactttccttaggaagaacacggtcgaagaaggaaccaggaactccagcgctatagtatcttctccccggagggagtgtctggaagagagtgttgaagtcattgattcttaagtcgttgaagaggacttggaactcgatgttatcctccgggttttgtccggtttctctaagatacttctcttccacggcatctattatgttttggactgccacaaaagtgttaggtccacttgcacaaccgaaatccgctacaatgaagcgattcgaaatcaagtctaggtcgaggttggcggagatcgcctcggtcatcttgtcctttgccgcttccaacaaagctctctttatatagaggagactcagttaaatacatacatctttggagttaagaaccttgctagctagttatgaaaatttgcaaatcatataaatgtatgaacctgatacgatgactgttggttgtaactttcagggccatatccaccaatcatgatccaatcttgagtagtagtcattatatatctctctgttttatctcaaacttcttttcttgtttaactttagtttatgatgagagtagtgagtccatagacctctctctatgcttatatatatagtgcttgaaaggcaatatactgagaactaattaaacatgtgcatgggaaactcgtcaaaagaaaacaacagcttatttattataggaacttgaatgcgttcaacataacgttccatatatgacataatcaattagactatgatatgtgttaaatagttatatggaaattgaaacacaaataaggtttagaaattgaagtaagaaatgtttcagtagaattttaacaatttaacaaattcaggattatggtattttagtgatatataaattgtcgaaaacttaatttagaaccaaaagaaatgttttgatttatcgcaattaaataacattagtttgtaaaattatctgtaatcatgtacttctagcagatttgtcaatgtagatcatagccttcaaagaagccatggatggccaattgtttaaaaagaaaaagtccaaatttttataatatttgtttacttctttttttttttctcaaag

SEQ ID NO: 26354 - DNA, 1311 bp, Arabidopsis thaliana landsberg
tcggttatttgacggttggtctacccaggtcagttcatatcgatttaaaaatatggttaatctcgatatctggtgttccgttgaagttgacataaagccatccacttaggaattgtattgctctcttttgatgtttttgttccttaattatatcattagttaattcattatatgattttacaaccagaggaagatgaagaaagctgagaacggagtcttctctttgtctctaaagctatatcctggaaaatatgaggttagatcattctattaacatttttcccccattcacgaggcaaactaaaatcttaaccttgctatattttccttacagataaagtttatagttgatggccaggggaaagttgacccgcttcgacccattgttactagtggtggatatgaaaacaatctgctaatcatctcttgaggtcaaaggcaacaatatttctgaactaatcccaccatcgatgtagcatgagctgaatcagtagggttttagtttttctttaggaatttcactttcatgtagggtaaggtaggcaagtaagcagtagtactaggttttatcttgacaaaacaagaaagtaagaatgatctgtatattgtactatacgaccactgtggtcctctgacaagagtcacaagaggcatgtaaacaattggcttattgcattgtacaattttacacattaagatggctatgacgaggttggtgaaagctcttgttttcgttttactgcataagtaaatccacttccgcaatatactttgatctctttcgttcgcaggtctatacttcctaagctcaccaattcaggactggtttggtcattggtatttccaaggcctagctgaccatgttctccccatccccatgtcttaacttctccattctctgcaagacattcaaaggttgtttgttttatattagctgagtgtaaagaagaaagaaataacagaattgcccctccccttttacctgttacggcagcagaatgctctgctcctgctgctatctgcataactttaactccatcaaaatccggaactttctcaaagagagcttcagaggaatctatttgcagttgttgcttctcaggttgtttattaagagtgctaccaagcttgaacacctcaccatcgactgttcaacaaacccacaggcagatgagaaaggttcagtgagctctggaaggtaatcaatgcatctacgcagaaattaccggtcagtagtaaagcatgattccatcctacaacaacttctctgaaagatagaggtgaaggcaagctctgaggggcatgaacatc

SEQ ID NO: 26355 - DNA, 1405 bp, Arabidopsis thaliana landsberg
  unsure (1)..(1405): unsure at all n locations
atcattaacttctctctatccgttcagatcacagatttcattagcatctcaaacttgttttgagattgtttggtcatgagcttttgcttacctgaatcttacaggggagcgtaccataaatgattaactttttctttgcatccctccgtagaaaaggtaaaaatctctggcttatgattccttttatgtgtgtgcttatctgtaaatgatctacttattctagatttagtgttttacttcatatgggtgacttcaaatctgcatcaacactcttgttcatcacccacactgaatatatagaaatatggcttctttggattacgccaagttgtcctacttagatattccctttgagattaagagagaattgaacctagtagattatgatggcatggcatacattgtgtctggtttcaagggatataatttcgcttgatcgtaaagacaaatcatcaatgtgttttacataacaaaacaactgtaaggaattctgtttacattcaataggcaagttgtacaagctcatgagtattcttggttccctaccctctttgatatctaagtcaaccacatctactcatatgcatatgcctgcacacatagatatatgtattgtatcttcaatgtaacagtatatatatatacacctgnnnnnnnnnnnnnnnnnnnnnnnnnnnnnnacgaaatggtcttgcacaagcatttgctcttcttgcttgtctagtgacctttgcactgctttgtagaactcaatccaagaagatgagtatgaatccatggcgccaaacatgaaagttggattgggacttgcagggcaagcggtgaccatatccaaaacagaagtggcaggtttgagctggtgagggaagttgaaggccaagttatcgaccttatgctcatagattttgccatttcggtcgagtttatagcgagaagtaccctgaaactctccctttgcctcccatgggactctaggtacacctttaagattccacctgatgagaatcatgttctctgatggttgccaaaccctgaagatctcaagtgagatatccctgaagagaatcttgccatgaaatctaagtgcccagaagatcaatttgtagttgtcaatcccagagaacgtgttcattggatccactaatgttatatcatccctgaaagagcacacacaaatgctttcatttacaggtttaaggaaggaatcacctaaaggagaaagaggaaaacacacctgtaaatgtcgtaattgagatctttggtgaagaggagaggcaaatcttcgcgaagggtacgtacagctaaaccgagattgatgtagacctcatccccgctgacgtgctggtacttgtcctgcgaaattggatatggtcttaacctgcgcacctcgaacaggaggaggagc

SEQ ID NO: 26356 - DNA, 12789 bp, Arabidopsis thaliana landsberg
gaagccacagttggtccggcccgtaggtccggcccatggagactagacataggtcggtcatatatttaagtagttatgggcttttgtaacctagcccattagacatataacctcctcaagtatgtatatatatgtgatgtaacctcattatgaatcaataagaaacaagttagttcttcacacgttatcagcacgagcttgctcttaacaaaaccctagcagccgtcgctcaaccctagctcgtccgccgtccgccgtccgctgttccgtcgaccgcctgtcgaccgtttgctgaccgtctgtcaaccgacgatacttccgtcgaccgccgactgtcaaccagcgaccaccgtttgataaccaagggtctttagctcccggttccagtccgtacaaccccaaaggagaaaggtaattcattaaaccctaaaactaaagaaccctaatcgaacatggatctgacaaacggctcccggttgattagtgtttgcaatatgattgcttgtttgctcgattgtttgtcttgttattgcttatcctaaacttgcaaatcgaaaacatcttaacctagaatccgaaaccctaaaagacataaaccctaaatcaaaaacactataatcggatcaaaaccctaattctatttcgtgattgtttgaagttgtctagggtgtttagtttgattgatttcgtggttgcatgcatgaattattaaaatccctcatgttgcataaaccctaaaaccgaaaccctaaggaaaatagaaaatcgctaaaaaggaaaatttaccctaagaccgaaaaaggaaactctcccaagagggaaagaaaaaataatccctagagaaagaggaaattctcctaaagagaaaagggaaattatcctagagaaaagaggaaattgtcccaagggaaagaggaaaagagaaagtcaaatccttgagtaaataggaaaatcgatttatggtcttcatgacatttacgatttgtccattacatgatattgactcaaaagcttcttcattgtagatgtcgaagctcacaaacctcatgtacgctgcactcttggcatctggtgacaattaccttcaatgggcattggacaccaagattgagctgaagtctaaaggactcgccgagtgcattgtggaaggcaatgagaaaacggagaggtcaaagtatcaggcgatttcaatcatacgccatcacatagcagagagtttgaaaaatcagtaccttacggtcgaggatccacttgagctttggcttgagttgaagaatcgatacgaccaccaaaggaccatacaactacccaaagcccaacatgattggcttaacctcaggatccaggattacaaatccgtggaggagtataactccgagctctttaagattgtctctatcctgaggctgtgtggtgagaacgtgactgagaatgacatgctcgagaaaactttctggacctttcacgcgaacaacgtactgcttcagcaacagtaccgtgcgaaagggtttacgacttacacaagtctagcctcctgcttgcttcttgctgagaagaacaatgagctgttactcatgaacagcgcattgagacctcccggatccacagctgtgcccgaagccaatagagccgaaatggccaaagcgcctaatgaacctcaggcgaccaaggaatccaactacgtccataggggtaaccctcacggccgtagccgtggcagaggacgtggtggaagaggtcgtggcaatttctacggccaaggaaaccactatggtggtagaggccgtgggcactatggccgaggtaggggtagaggccgcggtgttaacaaaccgcgaggaaaggctaagtccgtgtgctataggtgtggcatggacgaccattgggcaaagacgtgcagaacctctaagcacctcattgaggcatatcaagagatgataaagcaaaagggacccgaagccaatttggttcatctcgatggtgaaggggatgtcgaccacgagaacgatgacctaatggattatgaaacttaggacatcttgggaaaatatacatctagtttttaaatttgctttgtttgctttgctttgtagtttgaattctattgcttgatgtcttggatttatttattttaatggaattgctttgcttcattattgtttgctttatcgcctaacacatagttcttgtccatatttagaaatggccgaggacaaggacatactcgtagtggacagtggctcaagccacacgatattaagagacaaaagatatttcataaatctaacattgagaaatgccaacattagcactatagcgggtatagcgagtctcattgagggctacggccaagcccatgtactcttaccaaacggcacacatcttgaaataagtgatgccttgtattcacccagctcaaagaggagcttgttaagtttcaaagacatacgtcttaatggtttccacgttgaaacaaagggtgaagggaatagagaattcctacatgtaacagagatcgcccaaggacataagagagtcctagaaactatacccgcattgtccactggtctttaccatactaagatcaacatgatcgaagctaatttggcaatgaacaaagagttcatagaggagttcactttgtggcatgaccggcttggccatccgggtcataacatgatgcgaaagctaatgataagttcaaaggggcacaccctaaaagaaaagagagttatcccaaagaagctcacgtgtgctgcatgtgcacaagggaaactcataataaggccatcaccggcaaaggtcaataaagagaccataaactttctggaaaggatacaaggggacatatgtggaccaatacacccaccatgtgggacgtttcgatacttcatggtcctcattgacgcatcgacaagatggtcacatgtttgtctgttgtcctctaggaaccaagcatttgctaggttactggcccagatcattcgtctgagagcccattttccagattttccgcttaagactatacgtctagataatgccggtgaattcacgtcccaagcgtttaatggctactgtatgtccatgggggtaagtgtggaacatcccgtggcacatgtacatacacagaacggattagcggaatccttcattaaacgaatccaattgatagctcgaccattactgatgaggtcgaggctcccagtagccgcttggggacatgctgtattacatgcatcggaacttattcgtatcaggccatctagtgaacacaaatattcaccatcccaattgttaacgggtcatgagccagacatatcccatctaaggacattcgggtgtgccatatatgtaccaattgctccaccacagagaacaaatatgggacttcagaggaggatgggaatatatgttgaatttgattctcccaccattataaagtatctagagccaataacgggtgatctatttaaggctagatacgcggattgtcacttcagtgaatccgagtttcctgcgttaggtggtgagacgaacaagctgggtaaaaaaataaaagagatagcatggaatcaaacatccttgaattggcaagatcctcggactctgatgtgcgattcagaggtccataaaattatacatttgcaaaagctagctaatgagttgccagatttctttgctgacccaaagagagttgtgaaatcgtaaataccagcttgtaatgcaccagtacgtattgatatccagaagggaatcaatgtaattgctaccgagtctaacccacagaaaaaacatggtagaccagtaggttccaaagataaaaatcctcgaaagactaagaaaggtgcaatgggaaccgaggtaaaggaaaccatagacatggccgcggcaagtcccaaggaaccaccaaatcagattcgggacgccgaagctcatggtcctgaaggaattgataatgatgagatctcaataaactacatcatgtctggaataaaatggaaccgaaaagaagtcgacgtcgacgagaaatttgcatatgagataaatgaggatcatgaacccacgtctataatagagtgcactcaaaggtcagattggctaaagtggaaagaagccattgacgtggagttaggttcattaaagagaagagatgtgtttggtccaatattgaggacaccatctaatataaagccagtaggacacaagtgggtctttgtgaggaagagaaatgagaaaaacgaaatcgtgaggcataaggcacggcttgtagcacaaggattctcacaaagaccgggagtagattatgaagagacatactcccctgtggtggatgcaacgacttttagatatctaataagtctggcaataagagagaaccttgacttgcggttaatggatgttgtaaccgcatatctatatggtccactggataatgagatatatatgagattaccagagggtattgagctcaaaggaaaagataagaatgggtctcgagaccaatactgcataaggctgaacaaatcgctttatggactgaaacaaagtgggcgcatgtggtacaataggttaagtgagtacttagtcaaagaggactataaaaatgaccccatcagtccatgcatcttcatcaagaagtttgctagcaaaggatttgtgataatagcagtatatgtggatgatttgaacatcctgggaacctctggggaaatcgccctaacagtcgaatatctaaagaaagaattcgaaatgaaagacctaggcaagacaaagttctgtttgggattgcagcttgagtacgtagataaaggaatccttgtgcatcaaaaggcatatatagaaacagtactcaagagatttaatatggacaaggcccacccattgaccagcccaatgcaggtgaggagcctaggattggatagtgatccattcggtccaaagaaggacgatgaagatattctcggtcctgaaatgccatatctcagtaccataggagcattgatgtacctgtctagccacactagaccggacatatgttttgccgtgaacctcctctctagattcagttcttgtccaacaaagaggcactgggaaggaatcaagcatttgcttcgatacctacaagggacaattgattttggtttatattatactaaccataacaaagaaggtttagttggttttgctgatgcaggatatctttcagatccgcacaatggaaagtcacaaacaggttatgtgtttatgcatggtgggaccgcgatatcctggagatcaatgaagaagaccatcgcggccacttcctctaaccacgcggagatattggcaatgcacgaggccagccgcgagtgtgtgtggttgaggtcaatgactcaacacataggagccgattgtggaacggtcgaagacaaggaaccgaccatcatgtacgaggacaacgcggcatgcatagctcagctcaaggaagaatacatcaagggagatcggacgaagcacattctgcccaagttcttcttcacgcatgacctacagaaggatggtgaagttaaggtggtgcaagtacgttcaagcgacaattcagccgatctatttaccaaggcattaccagcatcgacattgaggaagctctcgcatcagattgggatgcggaggcttaaggacttatagggatgaccaattcaggggggagtaatgcgtgctgtactctttttcctcactatggttttgtcccaaaagggttttcctagtaaggttttaatgaggcagcatccccctagggcattactgagatcccgttggcatctacacggttatgtcatccaagggggagtgttgtaaaccacttgttggatggactccataactgtggcccatgtccttggaggataggtccgtcagcccattggtgtgaccgcccatcgaccagtcggcccaccagtccatcagtccatcggcccgtcggtctgtcggcccggtcaatgaagagaagctatagtcggtccggcccgtaggtccggcccatggggactagacataggtcggtcatagacttaagtagttatgggcttttgtaacctagcccattagacatgtaacctcctcaagtatgtatatatatgtgatgtaacttcattatgaatcaatgagaaacaagttagttcttcacacgttatcagcacgagcttgctcttaacaaaaccctagcagccgccgctcaaccctagctcgtccgccgtcagccgtccgtcgtccgttcgttgctcgtccgacgactgtcaccgtccgctgactgtccatccgctgtccgtctgacgatcgttccttaccaccgtcagacaccgaacgaccgttccgtcgttccgtcgtccgcctgtcgaccgtttgctgtccgtctgtcaaccaacgatacaaccgtcgaccgccgactgtcaaccagcgaccaccgtttgataaccaaggtctttagctcctagttccagtccgtacaaccccaaaggagaaaggtaattcattaaaccctaaagctaaagaaccctaatcgaacatggatctaacaaacggctaaaaccctaaaaacaaattgttgattagtgtttgcaatatgattgcttgtttgctcgattgtttgtcttgttattacttatcctaaactcgcaaatcaaaaacactataatcggatcaaaaccctaattctatttcgtgattgtttgaagttatctagggtgtttagtttgattgatttcatggttgcatgcatgaattgttaaaatccctcatgttgcataaaccctaaaaccaaaaccctaaggaaaatagaaaatcgctaaaaaggaaaatttaccctaagaccgaaaaaggaaactctcccaaaaggaaaaagaaaaaataatccctagagaaaagaggaaattctcctaaagagaaaagggaaattatcctagagaaaagaggaaattgtcccaagggaaagaggaaaagagaaagtcaaatccttgagtaaatagaaaaatcgatttatggtcttcatgacatttacgatttgtccattacatgatattgactcgtaacttcttcattgtagatgtcgaagctcacaaacctcatgtacgctgcactcttggcatctggtgacaattaccttcaatgggcattggacaccaagattgagctgaagtctaaaggactcgccgagtgcattgtggaaggcaatgagaaaacggagaggtcaaagtatcaggcgatttcaatcatacgccatcacatagcagagagtttgaaaaatcagtaccttacggtcgaggatccacttgagctttggcttgagttgaagaatcgatacgaccaccaaaggaccatacaactacccaaagcccaacatgattggcttaacctcaggatccaggattacaaatccgtggaggagtataactccgagctctttaagattgtctctatcctgaggctgtgtggtgagaaggtgactgagaatgacatgctcgagaaaactttctcgacctttcacgcgaacaacgtactgcttcagcaacagtaccgtgcgaaagggtttacgacttacacaagtctagcctcctgcttgcttcttgctgagaagaacaatgagctgttactcatgaacagcgcattgagacctcccggatccacagctgtgcccgaagccaatagagccgaaacggccaaagcgcctaatgaacctcaggcgaccaaggaatccacctacgtccataggggtaaccctcacggccgtgtccgtggcagaggacgtggtggaagaggtcgtggcaatttctacggccaaggaaaccactatggtggtagaggccgtgggaactatggccgaggtaggggtagaggccgcggtgttaacaaaccgcgtggaaaggctaagtccgtgtgctataggtgtggcatggacgaccattgggcaaagacgtgcaggacctctaagcacctcattgaggcatatcaagagatgataaagcaaaagggactcgaagccaatttggttcatctcgatggtgaaggggattttgaccacgagaacgatgacctaatggattatgagacttcggacatcttgggagaataggcatctagtttttaaatttgctttgtttgctttgctttgtagtttgaattctattgcttgatgtcttggatttatttattttaatggaattgctttgcttcattattgtttgctttatcgcctaacacatagttcttgtccacatttagaaatggccgaggacaaggacatactcgtagtggacagtggctcaagccacacgatattaagagacaaaagatatttcataaatctaacattgagaaatgccaacattagcactatagcgggtatagcgagtctcattgagggctacggccaaacccatgtactcttaccaaacggcacacatcttgaaataagtgatgccttgtattcacccagctcaaagaggagcttgttaagtttcaaagacatacgtcttaatggtttccacgttgaaacaaagggtgaagggaatagagaattctacatataacagagatcgcccaaggacataagagagtcctagaaactatacccgcattgtccactggtctttaccatactaagatcaacatgatcgaagcgaatttggcaatgaacaaagagttcatagagaagttcactttgtggcatgaccggcttggccatccgggtcataacatgatgcgaaagctaatgataagttcaaaggggcacaccctaaaagaaaagagagtaatcccaaagaagctcacgtgtgctgcatgtgcacaagggaaactcatagtaaggccatcaccggcaaaggtcaataaagagaccataaactttctggaaaggatacaaggggacatatgtggaccaatacacccaccatgtgggacgttccgatacttcatggtcctcattgacgcatcgataagatggtcacaagtttgtctgttgtcctctaggaaccaagcatttgctaggttactggcccagatcatacgtctgagagcccactttccagattttccgcttaagactatacgtctagataatgccggtgaattcacgtcccaagcgtttaatgactactgtatgtccatgggggtaagtgtggaacatcccatgggggtaagtgtggaacatcccgtggcacatgtacatacacagaacgaattagcggaatccttcattaaaagaatccaattgatagctcgaccattactaatgaggtcgaggctcccagtagccgcttggggacatgctgtattacatgcatcggaacttattcgtatcaggccatctagtgaacacaaatattcaccatcccaattgttaacgggtcatgagccagacatatcccatctaaggacattcgggtgtgccgtatatgtaccaattgctccaccacagagaacaaagatgggacctcagaggaggatgggaatatatgttggatttgattctcccaccattataaagtatctagagccaacaacgggtgatctatttaaggctagatacgcggattgtcacttcagtgaatccgagttccctacgttaggtggtgagacgaacaagctgggtaaagaaataaaagagatagcatggaatcaaacatccctgaattggcaagatcctcggactctgatgtgcgattcagaggtccataaaattatacatttgcaaaagctagctaatgagttgccagattcctttgctgacccaaagagagttgtgaaatcgtacataccagcttgtaatgcaccagtacgtattgatatccagaagggaatcaatgtaattgctaccaagtctaacccacagaagaaacgaggtagaccagtaggttccaaagataaaaatcctcgaaagactaagaaaggtgcaatgggaaccgaggtaaaggaaaccatagacatggccgcggcaagtcctaaggaaccaccaaatgagattcgggacgccgaagctcatggtcctgaaagaattgataatgatgagatctcaataaactacatcatgtctggaataaaatggaaccgaaaagaagtcgacgtcgacgagaaatttgcatatgaggtagcatatgagataaatgaggatcatgaacccacgtctataatagagtgcactcaaaggtcagattggctaaagtggaaagaagccattgacgtggagttaggttcattaaagagaagagatgtgtttggtccaatattgaggacaccatctaatataaagccagtaggacacaagtgggtctttgtgaggaagagaaatgagaaaaacgaaatcgtgaggcataaggcacggcttgtgacacaaggattctcacaaagaccgggagtagattatgaagagacatactcccctgtggtggatgcaacgacttttagatatctaataagtctggcaataagagagaaccttgacttgcggttaatggatgttgtaaccgcatatctatatggtccactggataatgagatatatatgagattaccagagggtattgagctcaaaagaaaagataagaatgggtctcgagaccaatactgcataaggctgaacagatcgctttatggactgaaacaaagtgggcgtatgtggtacaataggttaagtgagtacttagtcaaagagggctatagaaatgaccccatcagtccatgcatcttcatcaagaagtttgctagcaaaagatttgtgataatagcagtatatgtggatgatttgaacatcctgggaacctctggggaaatcgcccaaacagtcgaatatctaaagaaagaattcgaaatgaaagacctaggtaagacaaagttctgtttgggattgcagcttgagtacgtagataaaggaatctttgtgcatcaaaaggcatatatagaaacagtactcaagagatttaatatggacaaggcccacccattgaccagcccaatgcaggtgaggagcctaggattggatagtgatccattcggtccaaagaaggacgatgaagatattctcggtcctgaaatgccatatctcagtaccataggagcattgatgtacctgtctagccacactagaccggacatatgttttgccgtgaacctcctctctagattcagttcttgtccaacaaagaggcactgggaaggaatcaagcatttgcttcgatacctacaagggacaattgattttggtttatattatactaaccataacaaagaaggtttagttggttttgctgatgcaggatatctttcagatccgcacaatggaaagtcacaaacaggttatgtgtttacgcatggtgggaccgcgatatcctggagatcaatgaagaagaccatcgcggccacttcctctaaccacgcggagatattggcaatgcacgaggccagccgcgagtgtgtgtggttgaggtcaatgactcaacacatacgagccgattgtggaatggtcgaagacaaggaaccgaccatcatgtacgaggacaacgcgacatgcatagctcagctcaaggaaggatacatcaagggagatcggacgaagcacattctgccaaagttcttcttcacgcatgacctacagaaggatggtgaagttaaggtggtgcaagtacgttcaagcgacaattcagcggatctattcaccaaggcattaccagcatcgacattgaggaagctcgcgcatcagattgggatgcggaggcttaaggacttatagggatgaccaattcagggggagtaatgcgtgctgtactctttttcgtcactatggttttgtcccgaaagggttttcctagtaaggttttaatgaggcagcatccccctagcgcattactgagatctcgtaggcatctacacggttatgtcatccaagggggagtgttgtaaaccacttgttggatggactccataaccgtggcccatgtccttggaggataggtccgtcagcccattggtgtgacggcccatcgaccagtcggcccaccagtccaccggtccatcggcccgtcggtctgtcggcccggcccgtggagagaagccacagttggtccggcccgtaggtccggcccatggaaactagacataggtcggtcatatacttaagtagttatgggttcttgggacctagcccattagacatataacctcctcaagtatgaatatatatgggatgtaacctcattatgaatcaatgagaaacaagcttgttcttcacatcgtattagcacgagctagctcttaacaaaactctagcagccgatgttcaagcgtagcttgtacgacgttcggcgtacgctgttccgatgaccgcctgtcgaccgtttgctgtccgtctgtcaaccgacgatacaaccgtcgaccgccgactgtcaaccagcgaccaccattcgataaccgaggtctttagctcccggttccattccgtacaaccccaaaggagaaaggtaattcattaaaccctaaagctaaagaaccctaattgaacatggatctaacaaacggctaaaaccctaaaacgaatggttgattagtgtttgcgatatgattgcttgtttgcccgattgtatgtcttgttattgcttatcctaaactcgcaaatcgaaaacatattaacctagaatccgaaaccctaaacgacataaaccctaaatcgaaaacactctaatcggatcaaaaccctaattctatttcgtgattgtttgaagttgtctagcgtgtttagtttgattgatttcgtggttgcatgca

SEQ ID NO: 26357 - DNA, 750 bp, Arabidopsis thaliana landsberg
gtttggtttcttgaaacgtgactagggtttataaattgatttgatgtgccttgattgttatactgtggttatcatactttgatcaataaagagattatatcctactctatcttgtgtacaaagttgagaaagatctatcggtaggaagtcttctatcagaggcggccaaactaattagtgatgacgcttttgcactgctctgcatctccaattacttcacttgactcatttggcttcatttctcttccaacacacctcttttaaccccagcaggtccacaaatccaaaaacactaaaagatatcgaaaactatatgttctcgatatcaaagactcgataatatacatttaaaagacctatgaaatgtgttaaaactaatcgcttaacattcgtctgtgtatgcttatggttctgcgtttatggtcttcttttcgagttcttttcctttttccactgtcgataatctctgtattcattttaaaaaaatccggttaacttggttatttttggctaaattcgatttttttccaattaatgaaggtaatttggttcggttatgtttgatttgattattggtgaaaatcggtctaaatttggtataatccgtttaataaaaaaacaattactcgagaaaccgatccgtctattgtatgattatcctccatttctaacaacatcaaagtttatctctttgaatttattatctgtggatttcttgcacatttagactgtaattacttctaaaagaag

SEQ ID NO: 26358 - DNA, 1277 bp, Arabidopsis thaliana landsberg
gggctaaagtctgataacatggatatctcgttctccagaagtcgttcagctcgaaaagtctgatgtactcctcaactataacttcatcatacctgttcaacagcttcgtctctctgtgccatgactcaggctcatactcgacgtcaatatcttcatcaatcaattcatatctacttgtcattgctctctttcctttagcaatctcagctctcctctcattgggtcgagctactgagcgttgggtgtcaactctgaagctctcataagcatgttgctctttctcaggtctagttgaccaagactcagcttcatcaacgttgtaatccgcatccatagaggattcgtcactgtagttactcatgatacttcctgaaaacagatgcaactcaaagctaaatatcaataagttagttccaataaacccaaacactaacccagccaagtaaaccggtcaagtatacccgtcgagtaccggccgtgtgaaattgtggcttcgggcttttatttctaggcggattgtggtcgagtgtttccggtctatccgacgaggttgagtagtcttcactggaaaacagcggcggtttgttggcggcagcaaaggagcggtcgagttgttaagaggtcgaagctagagactcggtcgagtggttgagaaggagggaagggattttcttatccttagaaacgcatgggggaacaaaacggagaggtggtgggccacgctctgtctgtttgtcctgaagcgttgttcccttttgactagaaccttctgtaatcctttgtaaacttgataaactcactgtaagtctctgtagcttctgttggtcgagtataaatatcatttcaaaattttgggttttaaaatcatcactaatactcgaccaacctactcgatctcatggtctctgagtgcaacagaactttttcaaattcttgaatttctctacactgacatactcgatcccctgttgctctatagagtaaattttttgaatttttactctacctccacgctgtttctctgttcctgagaatcacaaacataaccataaacaaatcaaaaaaataacaagaaaataaaagttttatttataagaacagtcttggaaattcctcccaagtgagcttgtttaaagtctctagtttactcctcacacttcattaaaaagaaaatgggtgatagaggatctgcatagtcctctctgaactcatcatcatattcagcatcctctcttgagagatgtgaacagaatactcaattcttctttcctcgagat

SEQ ID NO: 26359 - DNA, 1587 bp, Arabidopsis thaliana landsberg
  unsure (1)..(1587): unsure at all n locations
agtacatgttaagtcgatgaccaattcatagctatgttatatactctttaacaccatacttcaaaacatacgtgatttgattcgcgcactaaaaactcgtctatggcttgcctgaaactttcatggaatatgtaatggcaactatatgttttaacgggaaggtagcctcgctgaatcttatgctcaccctgcgctccagcttctaccgttttcagattaagctctatcgctgcttcaattgcctatgaatcccattatcagtttgtgagttttaatcaagtatgtctcggcgaaaactcttgagactttgaaacaacaagaccaacctggtaatagcatgcttcaaaatggagactaggataataggagtcgggacgacatccccatagtctcccaaatnnnnnnnnnnnnnnnnnnnnnntcaatgctcctgcaacaggttcctcgttttcttcagctaaaaccaccaatcccttgtctcccaacttcgatgcaaagtcgagaaagaaatcccttgtgagataaggtgtgccccgctaaaagagccggaaatcgttaagcatgtgaaaggacaaacacaggtaatgcatacacttgacgatgacaggtaattgaatgtaagtatgtttattatgcacaaagacacataatgtgtactaatgataagaaaaacaaaaatgtctcaaagataaagactaaacttgttatcagttgtgttcctgtagaaatcatagaaggaatcccagtgcctagcctgcaaaaacattaggcacaaacgatgaatcaaatttttaagacacatattaatataaaagccccataatgtcctttatagcatgtgccatcagttctaacctctggtagcagattgatatcccatggttgattatttatagccattaaaatgaaaagataccgccaggcataatcaattacaacaaattcgtctcgtggcagttcagttacatacctttatatcatctccttgtagccgtctcattttcaaattctgggtaccaatctactagagaaaaggagtattagaagtcagcagcgtgcttgaaaaacgccacaaggaacggataacgaaataaggccacaattcaaaagttgtatgggaagaaaaaaagagtaaccattccattttactattcacatgagcaaagaaacttaagagacaagaataaattgcacaatgaggatgatatgaaaagaggaaactaaacaaacctttttgcgttcctgtcggatatttttccttttgctttgcttcatgtccatcaagaactcgtcaaaactgaagtattagagataaaaaaaaaatgaacaaaatataatagcaactacttccaatccagtcattgttaagaactaatatactggcaactaacttcaattactttttataatcacgatttttccagtggtactgcattccaatcctttgggagaagcctttctctttcaatttgtcccactcagctccagacggaaatgtaatgtgcaaagatgaaacttgtaactgcccaagcccccagaatacaacttgtctggcagcagtcagcagattgcatatgttggaagccg

SEQ ID NO: 26360 - DNA, 3167 bp, Arabidopsis thaliana landsberg
cgataggtgggcacaataatgacatcggtttatagaggacgattcctattagtttgctaattacaacatctagtattaattttgtgcaatcgtcacatgtccttcttcatttcctgttttatatacaaaaattattcagtatgtttacaccatccgtacacaaattttatttttagttaaatatattttatagtcacaagttgtgtgactcaacaaaatattttcaggtctttttttgtaacttataaattcatgtctattaatattttcaactaataaactaatttttgggagataaactttgaatggttacagcgatccaagcggacaaaaccatctacaaaccggaccactttttatttaccattcacaatctatagttcgtaatgatgcagaaccaaaaaaacaaataaatctgatgcggattgactttaaactaagtttgcaacagtttgttatctgtcctaaaaaatagtatagattggaccgttgacggattagttcgcactaaccacaacatattcgtctcaaaaaatagtatacactgtatcgctgacggattattccgtattaactacaacatccattcaaagcaataagttgatatggggaataattacaatgtaacaaaaagagagaagaaaacaaaattgtatattatactgtatttgaatcataaataataatttaataaaatctttcctccatttttttcaacccttttttaattttcgtccatcttcactctctttataaacatatctctctacccttcaaaagtcagcgctctcttttgtctcctctgcttttttctcttctctcctcagagattcgaagctttttgtctcccctgagtaaccaaattcaatggccgacgattgggatctccacgccgtagtcagaggctgctcagccgtaagctcatcagctactaccaccgtatattcccccggcgtttcatctcacacaaaccctatattcaccgtcggacgacaaagtaatgccgtctccttcggagagattcgagatctctacacaccgttcacacaagaatctgtcgtctcttcgttttcttgtattaactacccagaagaacctagaaagccacagaaccagaaacgtcctctttctctctctgcttcttccggtagcgtcactagcaaacccagtggctccaatacctctagatctaaaagaaggttcgtttcttcacccaattttcgataaagtttcaaccttttgtcaaacccatcaacaagtttacgaaattctgttgaattaatcaaaattccgaattttgctgtatagaaatggttaaaagtctcaatttttgtcgaacccatcaaatttgattgaatcaagaaggctaaaaaagtctctgtttttatttggttgcttgttacagaaagatacagcataagaaagtgtgccatgtagcagcagaagctttaaactccgatgtctgggcatggcgaaagtacggacagaaacccatcaaaggttcaccatatccaaggtaaaaccaaaaaaattaccagaaaaaaaaaagtcatttattgagttataaatgtgtgtattctttcaagacaaaagaaacttgtctgtttttgtgattctgtctgattttggtttgttaaattattatctgcgttacatttttggtaaaggattctaattaattctcattttcatgaaaacagaggatactacagatgtagtacatcaaaaggttgtttagcccgtaaacaagtggagcgaaatagatccgacccgaagatgtttatcgtcacttacacggcggagcataatcatccagctccgacacaccgtaattctctcgccggaagcacacgtcagaaaccatccgatcaacagacgagtaaatctccgacgaccactattgctacttattcatcgtctccggtgacttcagccgacgaatttgttttgcctgttgaggatcatctagcggtgggagatcttgacggagaagaagatctgttatctttgtcggatacggtggttagcgatgatttcttcgatgggttggaggaattcgcagccggagatagcttttccgggaactcggctccggcgagttttgatctctcttgggttgtgaacagtgccgccactaccaccggaggaatatgattagattacgacggcttagaatactcttattaggacagatttataggattaaggaattattctcggagcatatgtaaaaataggataaaagaaaatgttctttgttactttttttcgggttttcttcctattgtttctaaacatcttagaaaaaatttaattgtatattccttaagctcgatacatcttgtttaactcgagtacgatttacttatggagttatggtctttgtctcatcattgcatagaacttgtttcatccttgctcgagtactcactgatttacttgtggtatttatctcattgcgttaaacttgtttcataactttaaacacaatagtctgacgcgactaggcaagtgcacgtctcaagtgggatctaagagatttctcggtaaccaccatagcatatatacataggataatattagaaactaactatagaattaaaaaaaaaaaaactaaccattatcagtttttatgtgaataaataatcatatgactatataaaaatacaaaaatgtctttacaacttaaatcgaaagcaagtttatgagaataacaagatatttatcaaaaaatgatatttttctaatatgttacgagaataaataatgtgttatataaaaaagtagtatgttgacacaaagagattttcagttatcacgtgtaattcaaaaaaataacgtggttaaaaaaaataacatacaatttaaaaagaaaacatgacaacggagattccaaaaaaaatcaaaatcgaacaaaataaaatgaaaaatcttctacaaattaagggagaaataatctatcaatataaataacgtttgggagcctacatttatcgaaaaagagatctggtggttgagatggtggaaagatgctgagcgacaattcctgtaccaaacgtattttttttaggtggaaaattaaattttaataaaaatttaaaaaggctggaaaaacacccacaaaaaatattgggtaaaatataaaaaatattcccaaaccctaaaaa

SEQ ID NO: 26361 - DNA, 1531 bp, Arabidopsis thaliana landsberg
ttagatatgtaggctagtgatttgaattagtgttgtcattgtgtcatgttcaaatccatgtttttgtttatcaaaagatttagtaagttttacaccaaaatacatcattgtaggcatttacatttgaaatttaaagtgagatttgttagtcatctttgaatttttgtttgaactgtgatacttctcgaaaattttggactctctacatcgaaacaattaggtaaactatttaattgtggatctttcgcaccattaaaatcgttttgatgatagcacttttctatacatcaattatgttgtattatgatggttatgttgtattaggtttgaatttgtatagtgaccgaacaactgacacaagaatttaaatacataattttttacttattcataatagcaaaatactaagtttatactctcttgtgtattatctttgtttttcttgttcttgtatatatatcatttacctattgcattttctaacgacttaataagtatatatcatcgttcgctagaacttgatgtcgtattgtcgtacgtagtgccggttccaaacatgtgctagaggtgctcatgcacatggtccacaataaatttatttatatataactacatctgttaaaattagggtccaaaatatgtttgtccgaaaaacatagaaaataaggcctatatatgtttcccagctcagagtacatgatattttgagtcggctctggtcgtatgtaggcgtcggcttagccagtatgtagtatgcattcggacaaagaatgtaaaatttcagaaccattatttatattgaatttcctaaattcgtaaatacataagctatagaggcgattaagcagaagacattggatctatggctatatggctatgattcaaagtgcatcgtagtatcctccaaaagatatttgagctcttgccaccggaagacctttcatcacagagattgcttcatttagctttgttgcatgtttcactacctcgttcatccgctgcaataacgagtttaaaaccaatcacacatcaacgactttgaatcataaatctatatatcaataatggctaactcggtcccaaacatctctaggcggctctagctattattgatatgcaaggaacaatgacgttattatataaacgtgttttggttcaaagtgtgagggtgacgcaagaaaagataaacacaaaacgtacaaagacaaaataagaatcttctctacaattattgattgttcactaagacacgtaataggccacaccgccaaacgcatccttatcactttcgttgtatcaaagacacaaacaactttactattcaatcaatcaaacaggaatatgtataagttgagatctaactttaacaacaattagggaagcaaaccaaacttaatagctaatttgtcttgatttaccctgttagatcaaaatctcaaatgagtgacatgttttcgtgcattaggagccaatttgcttgataaaaaaaaaaaaagggaaccaattttaaaaccaatgctatctgattaag

SEQ ID NO: 26362 - DNA, 1508 bp, Arabidopsis thaliana landsberg
tgtggatcttatagtagaaaaaacagaggtctcttttaagccttttaagtccatctatgccatttcagttttcaggagtcaacacttttaaaaaccaattttatcaaagcattcgtagaaggaggtcaaaacattccaaatgaaatactcgaaattgatccgcccgtacatcactatttccagttcattggattcagtaactcaggagtgatggtgtaacacataagaactcagtatctctatctattcagctaatcagcttctgaacaaaaaccaatattggtgactcctcgcccattgttgcggaaatgaagtaaattcacgtattcatggaaactcatatctgacacgggcaagatacagaccagatgcaggagccatgggttttgctgcactcactgtcttcgcctccaggattcgttcaactgaagcaaattcatagataacccaatggatgttttaaacattgttcaattccaatcaaacccacaactgtaaactctgtaatgacagagacaatgacataccgtctgagaccgtcaattctccagtgcctacgcatttcagtgctcctacaatcagtcgaacctgcacagcataaagagactaatcaacacgccacatagagcatcacaattcgtctcttacactttcaaatcaaattgatatgtttctcattggaagtttcacacacaacaaaataaggacatgtggacaactattactatatgtatcaatcaagagactacagttgttacacatgatcccaccagagatacagacaatgaatagaaatcaaacctggtggtacagaaaaccccgggaacgtgctgtaactacatagcagcggtggcgtctccttctaccaaaagaatcaccctctgtagagccctccacttctccaacattagtagtaacaccagcagtctcagacttgggttgattggaacatgcgagaggatctccattgtttaggttactcaacgtcctttccgtgatagatggaaaatatggagttgatggtacttcagtgatatttagttcatctaaagatctcataggtgactttgcctgcataacaacaagtcaccaaaaggtttatcaggtttccggaagaacatcagtctacacatgaaaaaacttcttcatagatacagacagttatcttcccatttctacaaatcactgagacgaaaggatacatatgcatcttaaagaaccaagattgacttgcacatctattgactacagaaaacaaaacgagaatttacaagattaatttgatatgttgtgactgagaatactacaaatgaacaagctttgccaaaaaataggagcaggattacacaaaattttattctgcaggagacatcaacccgcttgagctaacatacattcatacttggtcacatggtcacaaacacaaacaaatatataaggtctaccaagtaccaatctacaattgagatgcattgatcaaggattctatgaatgggaatggaaaaata

SEQ ID NO: 26363 - DNA, 1123 bp, Arabidopsis thaliana landsberg
  unsure (1)..(1123): unsure at all n locations
tctccataccggtctagtctacatactatcatattcggtgatttatcactgttagagtcaataagcgcattttgaaactatagtcaggtgctcatatataaagatgatacacattctccaatcttagcataaatataataacagatgcttaactactatgtagggatacatatgtatgagtgtatagctatatatatggacagggatacgattgtatgtcagactcaaagtattaatagagcgtgctacatgatatttttgtgatataaatgtaaggttcaagaaaactcaaacccatgtatattgaagatcatattgcggtcaaaccacgagtcggtcttaagcttttgcttcgagttgagcatgcatgcatctctcggtttaccctaaaggtgcaaagagaaagtacgttacgagaggttttgcttttcttccatgcttcactccttttttttttttgttaaaaatccttattactttcgtagaatttgacctaaaaatatatatcaaaatagactatcttcttattttcaatttatttcaaattattttcaatttatattgattagagaaattttattataataaagacataaatgtttacagcataagaaagagttggttttcagaaaaggaaaaacataaactattttaaaattttataaatatttagtttcagatattaggaactagcatattttacaaaaagcactttattctaaagaaaaaagctactattatgtgttatggcatagaatgctaaataaacgaggacaacagataaaacaaattaacctgtgcaattgtgcattagaaagaaaaaaaaggcaaaggaaaagaataaagaaaaaaagaaaaagaaaggagcggtaataaaaagtagagagaaaactcaaaaaacaaaaataaaacattactttttatttctcttttttcttcctttaccaaacaaaaaataacataaaagagataataaaacccatttcgaaaaaagctcatcttctctttcttcttcttcctttctatatatagatcctcacttcaccatttccgttgacaaagcccaacnntcttactctatcttatctctctctctctctctttcttctccatactctctctt

SEQ ID NO: 26364 - DNA, 911 bp, Arabidopsis thaliana landsberg
caaagagtccttcttcatgggctcaacacgtatcggcctcagctattacccaagttgtcccaatccaggactcacggttggagtcggacgccgctctgatgtttcctcactcacaatcctcttacaagacgagatcggtggtctccacgttcgttctctcaccacggggagatgggtgcacgtgcctccaatcaccggatcttgagtcattaacattggagacgctatgcaaatcatgagtaatggtcgtaacaagagtgttgagcatcgtgtgttagcaaccggttcttatgacagaatctctgttcctatctttgtgaacccaaaaccagagtcagttattggtcctctacctgaggtgattgcaaacggagaggaaccgatttacagagacgtcctgtactctgattacgtcaagtatttcttcaggaaggcacacgatggaaagaaaaccgtcgattacgccaagatctgatcataaataacctcaaggagttcgatttctttttttttttttggttttgtttcctgtttgtgttgtgttagtgaataaaagaagagagaagagagacatatgtgatgtcttcttgaaccagtttctctgttcagaattgtgttgtataaattgctatcattgatcaatacagtttctcttttatcagactaaaatgttacagaagcaaggaacttacattgaattgaaaaacctgtctcaggttgataatatcctctgttttggtaagatcctctgtttaactcttatcatgaattgtgatcatcgactttgggatgttctccgttgacattgttgtcaagatcatcgataactatcgttgaattcgaagatcttcgtctttctgaagtagttgatcaagaagtaccaaccgattgctcctatggtcattacaccg

SEQ ID NO: 26365 - DNA, 794 bp, Arabidopsis thaliana landsberg
tctgaatgctgtcaagtgagtgatctgttcgactagcagcaggaccagcagctagaacagccagaaatgcagaaccaagaaccgatatccggccaaggacctgatattgcaatcagagcgagacattttcagatagttgttagatgataaaccaaaatgggaagtttgtaaaaattgatcaaggagagagggagaaaagatcttacggttttgatgaagagagcagtgcttttaccaggtcggactagagggattgatgcaccttggcgttttaattgttcactcacgtcgtccgggtcaagttgcaagaaagtgtagtagtagttgaagaaagctatgagaagtatattggttggaagatagaaagaacctgcaatagtttgtttgtgaagtcatcaacaaaaaacagtttcaaaggacccaatcttcttacttgctgtgtattaggagaacttacctccaggggttaaagcaaaagcaacattcttcaaagcagatatgccggtaaatcgtgctaaagtagcaggaagagcaagagatgatgtggagaatatgataggcattactcccgcactattgaccttgaatggaagataagcagatttctgaagcccaccagctttgctggtgtatcgcgaggcataattgagcggaattttcctctctgcttcctgaaaaactttgcttgttagactatataagcataccaaacttcttagattcattaaaaggaacaaaatttggtatagtacctgaacatatactatcccgagtaccaagaggagaaatgaaac

SEQ ID NO: 26366 - DNA, 3231 bp, Arabidopsis thaliana landsberg
caaaggaaaaaagaacttgtcttcttcaagttctcttcccatttaagactgcaaaactactttttattccaaaccataactttctattgattaacaaagtaatttatgtggaaatgatcaaaagtataattgaaaacgcattgaataagagtgttggtgcatggagattggtttgtggattaatctgaataatgaatgaacgagacttgatggcctgcaaattattactatttaaatgcatagtagtcaacaatatgaattttaaaaaatttcaacattattgggaactttgagatgtctatacaattcacaaaactcacatttttggaagaaactacaaaaagaaagagagaaaaagatctcagctttctttcttcccatctctaaacacagacatttgatacaaacataacttacaatcaaacttataggtaaagaaattgatgtgtacctttggaagcataaactaccatggatgtagcaagagaagcagtattcgtttttctccaaaagtatagtattcacaagaactctatcgatgatgcaacctctttacaaggatctgtcgatatagcgtctttgtccgaaagaatagtaaaatggcgacaagaaacccaaagaacgcaacagatgccattataataaatgacagcctgaagcaatgagagccataacatgtgttcccttccccggaagcagtcttatcgtagatataaccgatcaatcttacagagaagatataggaaccaatgggactagccacggatatggtattgaagatggttcccatgtgccgaatcccgaacagctcagaggtgattgtaggcatcagagaccactgtgaaccataacaaacgccaactataacagaaccaacatagagatttccttgaaaaccagaggctatgattaggtggcctatgctcatcgttccaagtgttgcagccattagcaatggacgtggccatccctttttgtgtagcaatgcatctgaggcataaccagctccaaatctaccgagaaagttccatatactccacaaggagaccaatgaatttatctcaactgatgagtatcgaagagactcacctatttgtcggatgttgtttatcgttgaaagtcctgagcccattccgcaaatcatggcaagaaataacaaccagaagcttagttttttcatagcttgcagaagattcaggttctcactcagtccagcttccactttactgtcaccttcagaactttggttaccggaggttgttgcctttggactgcttatgagaggggaataatcatgtggtactgttttttccatgccgtctcgttgtgctcttctcgcaataagtagaggcaaggcaagcatgacgagtagacatacaagtgtgacaatgttggcccacgatgacaacccaaaagtgttcttcaatatgataatgatcataagataagctgcgatgattagagatacagctgaaagaccatttaaatgctttttatcatcggctacgcttgtctcatagatcctgaccagaggcatgaccaagagtgagagcactgttggtgttactgccagtaagagaatgaagctggccggatctccagcgcacaatgtctcgtacagttgaatcagtatcgctccacttagaccaagaaaaccctgcaaagaaagaattagaggtaagcttggatgcttcactataatcaaaaattccaaagttgaaaccatgaatctcccactattaacatactttggggtttagttgaagtttctcatcttaaaagtggaggttgcatcctcatttgcaaggtttatcagaaaagaacaaatatttactacgcaatatatatcaactagaagatctagatctcgattgatccaaagttcaaatcatcaatctttttccaaatgttaccaaagcctcctcatttagactctaccaggatcatcatcatagccaaatattggtctttaggtcccaaggaaacaaactgagacgtgatccaacaatacagatccattcaatatatcgaaaagcttcatcaaaaactcaccttcataatgccaacggctgtaccaccatagtcagcgaaattctctaaagagctcacaacattggcggtgttaagaaacgttaaagactgagcagctataaacataaatagacacataaccggaaccggaggccgtttaattaaaccggtaacagaagcccacattaggaaataaccggtgaaattcaaaatcgctccgatcaaaataaccacccaaggtcctcctcgacgttcccgtccatcacggcgacggcgattgaaagtggctgcagtgtatacaagtcccgataaaactccgacgttacctccaatgtctttgaagacggagactgtatcaagggttgattgatcgtaagattgagttgactttaagatcgctgagtagattccgaaggtgtatgaacctcctgcgctacactggatccatatactcgccgtcatcgccatccatttcgttctcagaatctccgtcgccatttttccgccggagaagaaaaagacagaattacttcttttttttggacctcttggcgcaaactgacatgcacgaatttgagatttgtttgaacaaatgtggatccattattgggctcattgatgactattggattagggcccatttggttcgccgtttggcacgctacagccacaaatgacacgtgtaggagaggaagacggagttaacggggatggtgacgggatcatccaatgaacgtcagttattttaataactcatttgtatttggccacgtcaaaatatttagcaaaattcaaatattttaacttcttttttttgttgtgggggcaaatttaataattattatttttagtacatgtttgagcgtgtatattaaccaggctagtggtggaggttaaataacattaaaaacaaaatttatcatatacatgttgacaaatttattgatatctttcgttacaatttttaaaaaaatttattatgttttagtggcgaatatatcatattagggacgaataaatctaacttcttgcaacaattagaaacatgaagattttgatatacaattctaaattacattacaaattttgtgataaaaataattatatatgtgacagattcacatggataatcaagagttcaagacaagtattatgtttaatctgcagaatgttagagatcaatggagaaactttacttta

SEQ ID NO: 26367 - DNA, 550 bp, Arabidopsis thaliana landsberg
gattttagcatgggatatcgtctcgtctacatatatatctattttagcagtccatcacatgtcatcccattggacagtaaagtggaccaccaattccgcaacagtggtagagtttcgattctataacgttttatatatctcactcaatctagaaacaaaaatgaacatttttcttaaacacgtgatgtcagagacattttttggaggcccaaataagtctatacataccctatatgtcttcgttatatatcgtgaaatcataaatgtaacattttgattatttgatgaactttatgttcgtgtgttacttttttttttttttttttttgtcgaagatgttcgtgagttactaagatatcagaatgcgttggataggggcataaataaagctttaaataaatcatataaatgcgacactacagtaattacataacgatcacgtgactaacgtggagtgaataaagaggcgcgttttacatgtggatcccaacgattccgtttcccatctccatacacgtatatctattatttattagtattttttttaatg

SEQ ID NO: 26368 - DNA, 2311 bp, Arabidopsis thaliana landsberg
ggcttgtattctccttatatttcttcccacatctcaggtcgtggttgctcatccagcttggaacataccagaagctcacaaattttccctctcaaaaagtataagagatcatgtgcaaattacactactaaagagacaaatactactcctttttaaaagaacttgaatttaagtacttctctgtttttgaacaggggatgtttacgccattcaagaagcttgcaaggctacaaatgaaagtgggaggtctcctattttcactggagtcatggcttttgtaatgggtgtagtcaccatgattagagtgactaaaaacgttccaaggaagctaaccgagtcaaccatatactctagcccggtttactgcgacgaaaactcgatgaacaagagctcgatgcatgggaagaaaatggcaacaacaaccatctcaggggaagatttcatggcggtcatgaaacgaatggctgagcttgagcagaaagtcacaaacttgagtgcacagccagcaactatgcctcctgaaaaggaagagatgcttaatgctgccattagccgagccgatttcttggaacaagaacttgctgcaaccaagaaggtaacataaaacaaaaaactcatattactgatttgttctcatctttcaatctctcccattttaaagagttgttgtatcttcacaggctcttgatgattctcttacccgacaagaggaccttgtggcatacgttgagagaaaaaagaagaagaagaagctggttcgttttcaaatcaatggcttcttaactaatttttgttttggtgtttaaaatgctgttctgttttgctttttatctccatgtgcagttcacttggtaagtgaggaacatgaggaagagaagcctctagtggagttagaggtggccaatgcactcatgtcattaacttaaatcttacagtcacattaaaattaaaagaatcttcaaagaattttttttgttttgtctctgtatatatatatcatccttagatgttaccacttatatccgcatcatatgcgagattatgtttgatttgtacaaatgaaaccatagaatttataagaaatatattttgtgatatagttttgtacaaaaccattagtgtgcaagagttttatcatcaacgtatcaaatccaagtacgctttatataatctgaattactagtgttgaagatgacttggggcttgatgttctggagagacagaatcttcgaagatctatggagaaactcaaagttgattgataatctgcgttcgtcaactgataggtttactcaaccatttgccactcaaattagttatgtcatcatctgatgttaaatccatcagccacacttatcctttttttaatctaatcctcaaacctctccgaaagagacagaaggtcttcaaaccaagagtggttttgtagttgaccactttttgaggcttttaagttaggtttaactacacccagtggaatcttcggctcggacaacaacaagaagttgctcccaatctacgtttgtcacgtgtcactttttcactccacccacgtgcttatccggttacttgatccatttaaatcctcaatttctgtaatcgtgtacgtatattataccaagaaaattctacttaataaatatcttactcaatctttttaattaattacaaaaattcctatgcattaatttttttttctaattaccaaatatagtaataataatcctgatttgtatgcaaaaacaaacaaacatgaagagtccattaaactttagagattttttaattaattaacacaacaattatttaagatagtttgtaactgaaattttgttacacagaaaatatctctaatctaaaaagaatgtcgttttcgtaattagaagactttgtaatttgtttttttcctaaaaaacgaaaagaagtaaccaaagcttcttcatcaaccaacgtattttgcttcctttcttcttcttcttcttcctcttcccctaacattccattccccgtatgggtctcaccacttcctaactcttctctctctcttatctcttcttgttttagctatgaagaagcaatctcaattcagatccagtcacacacttctcttctttcttctctgatcatcaacaacaacgattcgggttctgtaattttactaattgggtatgttcgatctcctgtcgtgagacccgtcatcactgatggagctggtctcaactcccacagttgtgagttttgattatcatcactcttcaagtgagcaggttttcttagggagtagcaggactgacagctaagtaaaggagtg

SEQ ID NO: 26369 - DNA, 1818 bp, Arabidopsis thaliana landsberg
agatggctaagagtagtatacaccgagttcgatgagttcactcaagacgcctagtggctagtaagtcagaagaacgagtcatggttcgattacgtggaaggattcgtgtttgtcaacggtgctgacccggttaacggatggccaacagttcccctccacccggaccacgagtttgacccgacccgactaccacaatcttgcgggtcggttctttattgcctcgaactcggtcttcactacagagactccgattccaactcaaccattgacaaggtaataataactttgagaaactttataacatttttcagaaattcaagaaccgttcatcttttatgatctaacggcggtggaagattctgatgttctagaaactttgtttgaccgaaattgaccttagattgaagtgtgaagttgacccgttttatttcactaactgttatacgacacgtagttcatataggaccgttttcagatttctcgaccttcatgattacacaaacatacaatttaaaaaacagtaaaaagatgatagtaatgatattatatggttagttaaggaaatataatagggtgggaaagggaattatacagtctcttgtctgactgcataatatgaaactgacgagacattgtgtaatgtatcttcgattttggattgtctgacatgaaaaaaatatttatttgcttctctctaatgcccttgtcgtaaccacgttattacgaaaaggacatttgtcttcgtttctttttctttgctttttttttgttgcttgttgtctttctcatgaaacacatattttaagatcactttgcctttttctactcaattatttagattaaaccaacacgtgtgacgtgtccattggtcgtgcggtatgggacgtaaggttgaaatcgtaattgtagcatgtaaacgtttctgtagtaaaacattgatgatatgatttcaaacggtcccggctaaaatctggccatcgttttatatggaatcatctatgaatgtaccgaaataccccctgactgatttttttccatttttttgtgtagagggtggagagattgatcggacggctaagatttaatgaaggattaagattcgaggtagatctgccgtacgttgactttttactacgagtcaaacggtcagaagaaatcgcgaaggagaacggtacgtgggaaacgcctcacccttggctcaacctcttcgtgtcgaagcgagacatcggagatttcaatcggacggtgttcaaagaacttgtcaagaacggagtcaatggtccaatgcttgtgtacccactcttgcgaagcaggtgaatattgctctctcttcctctcttttaactaggacccatctttttattttgggttagacaaggcacctatctaaaagactaaaagaagatcggtctagtttagttttatggcatgtgtttatcacgtgtgatgattagtcgtgcatgcttaaactaaaaaaaggctccacaagtcgcaagtcgtgtgatcaacaaattgtcgccaatgtggcacacgtgtctttcttcagtcccctcgtcattttttttacccgtacggggttttaagtacaataaaagttggaatttagtgtggtcgtttagattttgtaggcgagataaaaaaaagaatactaaactaatacgatgccgtattaggtatttcggttgggtgggtgacggatatgtattgtaaccgtcgttaaggtagcgtcatatagggaaagagatgaaatttttagggacccaattgaactaacgttaattttttatttacatttctaaaaagccttttgaatttttt

SEQ ID NO: 26370 - DNA, 1205 bp, Arabidopsis thaliana landsberg
gtgcttctatagaaaataaacaagagtaaaaaagtttacctttagagctttctttacattgctctccatggtaccgtaaggcttcctttgaggaattctgagaagatatgatatatcttccaacgaagcctaaggaacaacaacacataatagtataacaatcaatgatttccaaaagcaaatacaccacatagaaagtctaagagagtgacgagcctgtattatcttcatgcttggattagcaggtatagcccttcttagagcaagttctccagttcttggaactttagtgtccggagagtaaagaactgcctctgcaggtgaaatgtaagcagagtctagaccaaacaagggcaatggagaccatacttgaacaaatatcaatatcgttgcaaccaatttctcgaggtttttagatccagcttcaaaagtgttcaacttcgaatcaattgaagaattgcaggaatgtataagttcctgcactgctgaaaacaattttatcactaatccataaacccttaaaaaacgatttttttgcctaacgatagatatgcgtaaactaagtaaaaccctaatgtgaaatcagtatagagcattgtacgcattcgcgagaattttaaaacccgaccttagtgccagttttactggatgtagaatgcagacgcatgcggaaatctccggaattggttcgattaaagggtaatttgggttttacgaagaggaatttgcgattgagaggtgaaggatggagaaaaaaaaggcggtgagagacgacggtggaagaagacaaaggagaagccattgatgggaagcttgcaagttacagagacaaggatagggagaataaacgatgagctttcttctttggcgcgcctcatctccgaaacgcttacgtggaggtatttgaatggatacacgtgccctactctgaagttaagagaaacggcgtggtgttctactttgtacagtcgacacgcattgcatcttgcaaaacaactcaacgttttgagaattcgcttgtgcatgctttgccgggtgtttaacagacgaaaatgaagcaagagtagctttaaggcttggcccaaatctggcccaagtatactaaaataataaattaataatatatagggaacagataccacattgacgtgaagtgacaatgacaagtcatttaatgcccaaccatatctactacacagacgaca

SEQ ID NO: 26371 - DNA, 602 bp, Arabidopsis thaliana landsberg
gagtcactactactatcctttcaccttcatcaaccaccaagtagacagaaaccaatacttagaacatatgtgcagtgtagtaaactgtgagaaagaaacacacagagaagaggaagaaacctttatgtttgtcgccgattctctgtaatgcagttgtacatctatcgtaaagtttgtcaagactttctcctccacccttcattcacataaacgaagcaaaagttagttgaatacagaaaccaagcatcattcatataactaagcttcttatcttactggaatatcaacgtctgtgcggttagatgaaaaagccttgtaagcttccgggcgaattttcgaagcttcttgatacacaagcccttgcatatctcctaaatgtctttcccgcaaatcacgatcggtaagcacctagacaaccattattcgtagttaaacttctatgaagtctagaaagtcatatggattcagcttcaaaacttagatccctctactaaaaatcaagcacaaaggtgaagactttagtgggtttgacacatagcattatgtctttagatgtctacctcaagcttgccgcatttagccgcaaatgatcttgagcagtc

SEQ ID NO: 26372 - DNA, 1140 bp, Arabidopsis thaliana landsberg
gttaaactaataatgtagtccaataatatgtgcgtcctttcccttcacactttgaacccctaaatattagggaactttatattagttaatacaacaaaattattaatactgtcaccgtctcttcacgatgtgtaaaatgggtaagctacgttgactcaacacattaaaatataactttcttctaattgaaaaataattttgagcttttgactttttgcattctttttattatccaaattattttggttagatgaaaataatgttcaattttttcccataaacttatcaaaatatttgaagtaatattagacaccatcagaaaaccaagtatactaacactataaaatataaatgtcaattttagtttaacattacgaatcgacttcattatcatctcttaatcattacctttttatgcgggttaaaatgaaaataaataatgtggccatagacttctgaaaacaaggcttaatgatagtatatgctaagacgcggattcaactatctaatgtcaacctctatctgcaacgctgtccatcttcactatatttttctattataatgcataatatatgctctcgttttctatattaagcttccgtttgtcttcttccatcttctcaaaatccaaaattaatttcaacttcactcctaaaatctttcgatttcttgatatatagctagtaaaaaacacaataacaatgggcaactacgtttcatgcgctctatacaaaacgtcatcgtcacctttgacaaaagtgattctccctgacggtggagtgcgtgacatccacgtgccgacgaaagcagccgagctcatgatggagatgccaagctatttcctcgtggacaccaagtccgagaaagtaggccgtaaatttatcccactcgccgtcgacgacgatcttgatcttggagtctgtcatgtgtacgtcgcattcccgatgacacgtgccacttctgcagccaacgcttccgacatggctaggctctacctcaccggaaagaaacgcacgaaaagctgcgataataggagagtgtctccggaaaatgaagataatgatgacgtgaggctgatcggaccgaagctgaatcttgaagacatagaagagttctcggccgcagagtttattcatcgga

SEQ ID NO: 26373 - DNA, 1394 bp, Arabidopsis thaliana landsberg
  unsure (1)..(1394): unsure at all n locations
gggcagcataatttatcaaagcggcaggatggttatggtctttcagtaccaaatcttgaaaacattttgctgaaagctccatatcgccactggaagacttgttcattagagtgaagtatcacgataatagttagaaatagaggggaagaaaactcctcacctttgaagataagcaactccaaggtttgcaaggcaatcataattgtcaggaacaagagccaacaaggatgacaaaactgatatggcactctacaaattaacaaagcaaaactatataacaaaaggaatgacattgataatcaaccaacatggtgaggaaatttaccatcaaacaaccagctttgagaagcattaaaccaagggtattccacacggctgcctgtctaacatctaactttatagaatcctttaattttgaaagaatttcttcaagctcttctccctcaagctctttaacagagtcagtatccccaaaaccatccaaaagaagacactaaaatgttttcaagtgtacaatgttaaaaccttcgagtgaattgtcaataaactaaggagctctcgaatacaagaacttcaaatatgaaatttggttcagacacaaagatcatcacctgtccatggtgaatttgaactaataagagaagttctggccgagcaatttctggctcacaaaccagtaagatctcttcagctntctcatattctggtatcgcctaaaacctcctagcagttaaaatcactaagatgataattattctaagatacatcagagtaccctcagctcaagcgtaccttttgagattggcccaatcgttgaaacataagaccaagtataaaatgggcatgagcatttttgggcatcttccttgcaacatgaatcaaaccctataagcagagaaggaaaatcagaatttatatagagcatcatcatcatgaaaattagaccaataatcaactgcgaagagcattatgaatataagaggaccatcatcattctttctccaaatgtttaacgatgaatgcattcttggcaactttatgaaatcctagccccaatatgaccaagcacactttctacgatactatgagtcaataaactcaccattttgaggttactgattttttcttcccgggatgcagggaccccttgattagccagatcaccatctgcatcaactccacaatcagaggaagactcaatcttacttctggagcggcattttcccaccttgctgatctttttggcttctacttctcctggttccacctccttgcatgttaatatacctccctcttgatgactttcctcgttactcaacctaaaacacacaaaaatgtatttaatttaagaatcatgaagcttctcctatcccccaagcaggtagaatcaaact

SEQ ID NO: 26374 - DNA, 1052 bp, Arabidopsis thaliana landsberg
aaaaaaaaacaatagaaaattaagatatttcttctgtactcgcaaggtttgaattgtttgctaaggatcgagagaccattggtttgccagcaactctatcgatttctttccaagaattacggattgtattataacatctttcacttgcttcctaatggaatatattttggagaaaataaaaaattgtaattagttaaaattagtaaagactaccatgtaacaacaaaaacgaaatagttgaaattaatggactgattgtggggaaaaaaataactcctacatgttgatatgggttctgagtggataattattgttaccttgaaaactttggttacaatataataataaccaaatttaggacgagtatcttcaaagtagagaagaggagctgaagatgctaatgctccgagtgctatgtgtggatattttagcctgaaccatgccgctaacacttttataccatgaaaaaaaattattatttaaaaattcattaatatcatataatgctatttaatattatcattatgagataaagattaactacatcacataaccacataagttacggttatgataattttaacttttgatgtatacacatacactgaacttacttccaccataggatcctccaattacaatgatagggctgtgattggtggagtacttttccttaacgtgcaagagaatcgcggcatagtctgctagggcttgtgctgcgttcaaataccccaacgtacttgcgttctttagtgcttcttctgctgatccaaatggcatcgtctccccataatacctatgctgcattatacaacgtttgaatttatataatagttactacaaaaaattaatctaaccgtatgtattataaaaacacaacacctctatgtagacgaggagcgcatttaggcgaggaccgttgtcacgaagaaaaccgatggcaggcaaatgagagtctaacgacgattcttcttcaagaaatgctaagattgccgcgttggctttagcaccaccccagtgcgtggaatcaatggcgtatcttttgtgaaaag

SEQ ID NO: 26375 - DNA, 1129 bp, Arabidopsis thaliana landsberg
  unsure (1)..(1129): unsure at all n locations
tgaatatatttttattcatatcaaaatacatatatctaatgatgtactaattattattaataatgatatcattagatttgaaagaatcttgagatttgaaattaggtttacagcaacaagcaccggttgttgagcctatgctcatgcttacacaagcccctcctttgtatccatttgatttgcaagctgcattgcattccgatgggtttgtacattcgcccggtaaacatgttatgatttgccctgtttagtttataaacaaacaaattaaacgactctaaaataaaaattgatcaatttcaataaacgactattttcttactacatagtgcaattttcttcttctgattttgaacactatttttaaaaccacgactgtttagttcaaaatcaaatatttgtgttactctaattgcactcgtaatctaaaatttgtgaccttcacaaaaaacctacaaaagtgacattttgtcgtagtggagtagaaatattttcacataaaagtaaatatacaacttaaaaactttatttttttggctatattttttgatagtttatgtttaacacccatgagctaattaaaaccttcaacaaaaaattacgttaggttttgtttttcatagaaacacacggtaactttcatatttaaagtagaattatttatcataacattacaaaccagattgtaatagataatagatgtgttacctgaaatcattggcagcagaatagcagcaaacgccatcaacgaaggcaccaaattagataaaattttatttgttgccattgtttatgttgagaaaaaaaaactagagagaaacaagtttcaaaaataatgttagaagatattattattccataggaacatggatagttagaatatatagataaaactattaggtatgttataatttgaaatcttattttatggtaaaaattgtttgagggacttcttaaagattaagcttcactgtttcatanaaacaattattgattttttgaaaagaagattntcaaccatttttaaatagacaaatatatatagatttataacctttttaacattttcatcaatttataatattaagatacttactcataatgattgggttaatatatatgtctatat

SEQ ID NO: 26376 - DNA, 2254 bp, Arabidopsis thaliana landsberg
  unsure (1)..(2254): unsure at all n locations
attagactatgtttcttgtttcacccaatctacttgctttcaagctttagtgcaaataaaagaactccatggaaaatattgaaaaatgtagcattggattggactagatataatcaaacgatgacccgttcaatgttgctaaacttaaggactgctacttgtggggtgggggtataaaaaacttttactacaactataacctgaatctaaaagtaatacttatataaaatttaaaatattaatgattcaatttactacagaaacggattttgcacaccctttcgaacgttatctttaccttagagttgaagttttgtgtggattttgaaaattaaaaagccatttttttattttttatttttagtttataaaaagccattgttagtgttaggagattttggtttaaggatttttctgataaaagagttaaaatgtattaaaaaacaattattgtttttggttttaaatgaacaaaaaataattattccataattaccttaattagataataaagttagcccaatatcaaaatatataaataaaactaacaatgttttatcttattcgtacattttcatttttggattatattaagtttgatcatttttctggtttanaataaaaataaaaattgaaattattcatcttacgagaaattgctttaacttgttttgtattaaagtaaatacatagaaattaatttatggtaacaaaaatgttacaacaatgaaatataattatatttgaactaattagtattctagacatgaaacatatatatattaaacataaaattggtttttaaaaaaaataatcaaaacgatttagttttaaatcattgcaatatattcatatatggtttccaataatacaaataaaccacatagattataatatttttctttctacacgaaattataatgtttagaatcacacattagattccaaaaaggacttcatttttattttcactgaaatgctaaaataacttcgtcttaaaactatacattgcaatttatccaaaattataggatttttcttttgtctgtaaattacaataatttatctaccgtaaaatttcaatgaaatttacattataacctcttaaatctttttttttttgtacataatatattagcctctcaagtatattgaggaaaataaaatatttaaataagaccattgcagatgccaacatattactcggattgaatattgaaatataagtcatttattgtctttatgacataaaaattcaattagaatgtaaaatccctttaaattcgtaaagggatgcgctaagaaaaagagagttaggtaatagaatcaacggctcaaatcacaccaaaatctccaactcacttgtgattggataagacaactatcaagaagccttcaatttccattggtcctcctctctccttctataatcccaaaaaccatctcacaaactcatcaaacctctttctcatctcatcttcaagccatctccgatcatcatcagacaatggcagcagctatggcaacagcaaccaagtgcatgtctctaaacccatctcctcctaaactccaaaaccaaaccaaatccaaaccattcatctccctaccaaccccaccaaaaccaaacgtctctctcgccgtcacaagcaccgccctagccggagccgtcttctcttccctcagctactctgagccagctttagccatccaacagatcgctcagctcgctgcagcaaacgccagtagcgacaaccgtggcttagctcttctccttcccatcgtcccagccattgcatgggtcctttacaacatcctccagccagctattaaccaggtcaacaagatgcgtgagagtaaaggtatcgttgttggtctaggtattggtggtggtcttgcagcgtcagggcttttgactccacctccggaggcttatgctgcggcagaagcggcggctgctagttcagacagcagaggacagttgttgttgattgttgtgacaccggcactactttgggttctgtacaatatcttgcagccagctttgaaccaaatcaacaagatgaggtctggggattaaaatcttatatatatataatattattataaatcatctttgggattcaaatgtaaaattaatcctttgttttatggacagctttatgtttacatttttggactaatatcgtttctcttatcggcataagtactatactcaatttcaactgtaactaggttagtctgatgatttctagaa

SEQ ID NO: 26377 - DNA, 983 bp, Arabidopsis thaliana landsberg
acatgcacacacgtgtatgtggaatgattgaaataaagtcatgcaagtctcatcatcatcaatacaatctactcaaaaacatgtgtgccatgagtttgtctagaccggttaatggttcaacggttgctatgattatttatttggcatttgtatagctaaaattggtatctaccctatctatatatatatatatatatgacttaagacgcatagataaacaaattgaaaatacatgatagaacagtaaacactaatatatatgccatttggttaaatcgaatcttgaatcataattcataacgtccaaaaattatatcgtgtgagtacccccacactttagagattcgttccctcaaatttatctagttaataattttgaacggttttacatcctttattaaagtaatacattgatctcgaacacatattataaacgacaaattcaatcatgaaatgtgtgctcatttggataaacaaacttattattttgttaaataatatgatttgaaggctacaatgtcttgttgggaaacataggtttgcccgtcaagattcatgaaggacgatttttagacacaacataaggtttcactaatgaagatgtgaaaatggactcatcgttctaagtaaaaatggcaaaggagaagctaggcccttgcgaaaactaacccaaccaggcaaccaatgtcttcatcatccgtataagcgtgttgtcctacacgtaaccatccgttgaagaaacagtcgacaacaagaatcatagacaattgttgttaaacaatcttttgaggttacataatcaattcatgatcctgatccaagcctagctagatgcatgtcgatctttcattcgttatagtgacgttaatactcaaaatcggcataacgtaaacaatattttttttttacctaattgaaagaaaatataatttgaaatacatccgttttgtcatttacatacttcacaagcaccgaatcttatc

SEQ ID NO: 26378 - DNA, 1050 bp, Arabidopsis thaliana landsberg
aatccgagtacagaaccagagtggagaagttctcatcgataagaagtcccaaacatttggtaatgtctgtgagttcaggaacccagttgcatagtttcaaaccaagcttggaggcggctttagggcatggaccagcttgtgggaacatctcatacttcttcatccatttagagaggtatcgaataaagctacccatctcattgccattcaacttactgactgcagatgcaaacatgacttcgtcaacattccgtgaagctaacaagtaatgcaggcaaagctctgaggttgaaaacccgtcatgagcaaccattaacaagatagaagcctcttctgcaactttagacttctttgatagctctgtgttgctcaccttttcaatagccaacatagcctgactctcccattcttctcttaccttagccatagtgctaattgcttcctttgatgggcataaaaaatacttcaagattgaaagtagctcagttgccccaagatctgaagcttctttgatcactacgcaaagcaaatctgacctttgcttctcaacaagattgctaactaaataagagtatgaagaatgatcaccaaggagtttgaaatcaaaatttccactagctcccacatctctagactaatacaacctttcaacactaaaccagatacatctctacccatcaaaaacccatttttctccaccagtatctgtatctcagaaccagcttgatctcccaaaaccatctcagactcagcctctgaaatcccaactttctcaccaattttctcaagaaactgctttaacatcttgacaaactcatctttgacaaacccgttagtatccttaagcttccttttcagcttagatgaaaactttttacccaaatcgatgacttcaacatcactttcagagattccccacccggaaattggattgacaagggtaccaagattagggttttctagctttggtttcagattcgccaagataccatcgtggctaagagggattggataatcggatatacgagtcgaccttgtcctgattcgctc

SEQ ID NO: 26379 - DNA, 3813 bp, Arabidopsis thaliana landsberg
caaggcctgtttcgtgttagtgggcatatctcccaccggttccgttaaatccttgccaagtgagactaaagccactttattgttttcccatgtcgttagcgtgtcgtcccgcgacaacgatctttttcaccttcttcgggagcggcacaattttatcggcgtctgtctttccgttctttagaagcaccattgatttcctcaccgcctctctccctacttctcgatgagcctacaacattgtattattaaagcatatatagttaggtaagtaagacgaaatgctttacttaatttgatggtatcttcatgattttattatttcacacattgtccatattatatagatttttccttttaactctttaagaagttaatttaataaagtttttaaattatgtatatagtacaaaaccttgtgtccttctgaatttacctcagatccaaactcagtagtgggaagtttttcatctgccaatgagttctcaaagagaccgattgagaatttgactctcaagatccttcgaacagcatcgtcgatgcggctcatagggatgtatcctccgttcactagatgtgccaatttctccaagtactctggatacgcccatggaaccataacctacgcaacaagattccacattttaaatatctcgatcaagaatcagtttcttgatcgagagtaaaattagaaaagtaaggaaaggggccaaccatgtcaatgccggcattaatagaagcttcgatggagtaagtgtagtttgatttttctatcggtgtgatcttatcaattccgagccagtcagagataacaaagccttggaatttgagagtgttcttgaggtaatcagtgatcattgcacggtttgcatgcatcttaacaccgttaagactagagtaagaagccatgattgatgcgatccctttcttcactgctatctcaaacggaggcatatggataccaaagagagtagcgttatcagccacagtgttgttctcattgattccatttattgtgcctccgtccccaacaaaatgtttggcgcaaccagccacattaatcctaaccacgttttcacgttagttaactagattaaataaaaatgtagatttcgaaacttcagtattagttcttggtggttacttgggatcagcgaggtaaggagcatttccttgtaatccatcgatgatactttcggtcatcatattcacaactgcagggtcttcactatagctctcgtaacaccttccccatctaggatctctgcaaacctgttcatccattttttttccaatacgaatgagaaaggtttattatacatcgacatctatatttctgttgtagaatttctacataattaccgcaacacaaggtgcaaaagcttgagcgactcctgttgcccttacttcctgcgcggttatagccccaatctttttaacaagttgaggatccctacagcaacacagattgacaaccgtcaaatgccttgaaacagcatttcacataacctatttatatatgattcatttacatatatacctagtggcaccaagtccgacattgtgggggaaaatggttgcatcaataaaagtattgtggccatgaaccgcgtcaacagcgtaaagcagagggattccgagcctcgtcgaaagactcaatttcttcatcgcgttagtctggaatatccgctttgctatgtctttcccggtatcatacggattgctcaaaacacttcctgtaactcgtacgtacaccaattcaattataagctttatcaaaaaaaaaaaagttattcaaaaattcgacatataacaagatgttgcaccacacataccgatcatgtactttgtgaagatttctggcacaacagtggccacaccaccggtaacttgtgagaagttgaaccgatcaatttgacacatttgaccaagtttctccggtaacgtcatacgtatcagcaagtcttctactctttcttcgaccgctactttaggatctttgtacttaatgtatcctctgtcagctgcggtggcttctccataacggccggcgaacagtatcacaatcaccgccgagaagaaaaagctcctgacgccgaacattgccgccgccattaacggagaccctcctccttaaccagggagaattcagaatattgattaaaaagatataatgatctttctaaatcctgaattgaaaaataaacaagaacagatcatatacagtttgtttttttacttacgaaaggccgttaattaatctccaacggtaaaaatatctagcgtctataatcggttggcgcactaaatttacaacagacaaaaacggaaacataactaatttaatccggacagttgtgtgagctccaagccagtcgttttctgtttaacaacttaccgctttctgttaacggaaaacaaaaattacccgtgatttaggccgacattttaattgggcttagattgttatcaaccaaacaaatgggcttagattattaaggcccaatttatatctgaagagtgttttaccactagtgtttttttcactacactgatccgccgcaccaagttttaacgcgtcccagacagacaggcaggcatgttctgtctgacatttccaaaaattcaaatatttttattaaataaatatattttgtttacttgtttaatccaaatttaaatcttcattgaatgctttttctgaagctttatctaataaatctcttcgttgatccttcctttccattaacgaggtagaaattccaaaacgcgtaataatcttgtcgtcattacaaattacaataaaaagaagacatttttatttagatttccctctgatcctctcttttagatttcgaatcgagaccagatctgcgtgaagatgatagagaagtgtataggagcgcatcggtttcggagattacagagattcatgcgtcaagggaaagtgacgattctttgtctcgttctcaccgtcatcgtcttacgtggcacaatcggagccggtaagtttggtacgccggagaaagatatcgaggagatccgtgagcatttcttctacacgcgtaaacgcggcgagcctcaccgtgtcctcgtcgaggtctcttccaaaacgacgtcgtccgaagacggaggacatggtggtaacagctacgagaccttcgatatcaacaagctattcgttgatgaaggagacgaagagaaatctcgagaccggactaataaaccttattctcttggtcccaagatctctgattgggatgagcagagacgtgattggctcaaacaaaaccctagcttccctaatttcgtggcgccaaacaagcctagggttcttcttgtcacaggttcagctcctaaaccgtgtgagaatcctgtaggagaccattacctcttgaaatcgattaagaacaaaatcgattactgtagaatacacggaatcgagatcttctacaacatggcgttgctcgatgctgagatggctggattctgggctaagcttccgttgattaggaagttactcttgtcacatcctgagattgagtttctatggtggatggatagtgatgccatgttcacggacatggtgttcgagcttccatgggagaggtacaaagattacaacttggtgatgcatggttggaacgagatggtttatgaccagaagaattggattggtctcaacacgggaagtttcttgctcaggaactcacagtggtcgcttgatcttcttgacgcttgggctcctatgggcccaaaagggaagatccgagaagaagcgggtaaagtcttgacccgggatagtgttgactccgg

SEQ ID NO: 26380 - DNA, 2922 bp, Arabidopsis thaliana landsberg
  unsure (1)..(2922): unsure at all n locations
gtcttcatccttccacacacgccttccgcagtggagaacattcccaatcctgaccagttcatagtcttcatccactcctccgtcgaaacgacgccgtctcttagatcaagcataccttgatacagcaagacttgagtcctctccaatgcgtactccaccatgaactttacgctcttcatcacgtctgcccgcaacacatcttctacttcatcactacattcctcaaaacgaaccgtttcactcactcccaaaacacgttttgcttctctctggttcaagaggtccaccacgaggtctgttctgtatggaatcgcccgtgccgtgttgtagagcgtcgcgagtcctgtcatgttacttagtagcgtcaacagttcggtcctcgcgtctgctgcttcacgccatttctgggacttcacgagagctacagatatctcctgcgctttttgcagttcaactctctgttttgcgttgaccagacccgagtagtagacgttgaccgcatgggtttgaacctgggtcaccgggtcggtcagcccgtttccaatggctagcccctttagattcactttcccattgggtttctctttaaggatatagtatccaatggctggaacgtacttcccggcgtagtctctccagtgaagtaaaccggtcggttttcgaagcttgggttttgttcaaggaactccacgagagcggcgtaaagatgctcagcgacctgtctctgatttgtgggtatgtcttgttgtgaggctgcgatgctgaatccgactcctattgggttatccacaaaaagtagtccgaatagacggttccatgcgccggggttgcgctcgaggtctgtggcgcgtgaaactacacgccagggaccgagctcgtaaaagttgccaatcattgaagagcagcctggcccaccttggagccaaacgaggagcggagtgtcaggaagaggtgtggttggctcttgggcttcgtagaaggcatagaacatggacgagccgggtgcgggtttaaccgggaggtagccagatttagtggggagagcttcatcgggaaatagcggtggctgaggagactcaacggagacggcgaggaggagagtggaaagcaatatgaagagtgtagtggcttgctccattatttccactaattggtgacgcctttacataaagatccctttgtattatttcatttatttcattatttgactgcaaaacattacgtttatgttttgtcttgtataacatgtgaatttttaaatgtgtaacaataacatttttgtcaagacgtgcttgcttactaacctaattgcattaacatgtgagttttttaatttaaaggtttttgtttgtagatgattttccataatgtatattattttaaatttattgttgccaaaagaaataaaatctaaaagttttattgggccgaaaagagaaaaaggtcagataggcccataaaaagttggacaatacaaggcgtttacaatttgtcaattgcaaatttcgtgagatgcttcttctactcgtcatctctgtttggtaaagtgatcacaaggtgttcgatataatacctgaaagagtttccgaaggtgtgaagatgatgatcttggatgtttgctcagaggttataaagatccagaagctacgacgggctgtctcttacgccggattctactgcttcactgctgccctcacattcttctatacaaacaacacgtaatgtctttcgtccgatctcagtttgcttcttttggttgttctttcttttcaatatcggaattcgcannnnnnnnnnnnnnnnnnnnnnnnntcttggtttctgcttcaggtttaatttgatttaatgttactgattcgaatgttgtgtagaacaagagcaggatattccaggggagatcagatttagcatcttaccctgaaggcaccgaacttattgaccgacacagctaaggtgtgtccttgatgacaattttgggttgtggtttacagtttatatagttgattacttctgtgtggaactgatgattggggtttattggagtaaagctgtacaaagcggcgcttgggaattgctatgaatctgaagattggggtcctgttgaattctgcataatggctaagcattttgatcgccagggaaaatctccatacgtttaccactccgtaagtttcttcaatctctttatgataatctctgtggtgcggatattttagtgttgtaaaggtcagtttccataagtctagaatcttgatggtactgactttgtggtgccattgatagaaatgtttgtcgaatcatgtggggttagaaccaagaattgagctcattttattgtgaatgcagcaatacatggctcaccttctatctcaaggccaactcgatggaagtggctagtggcgccagctctctttgtttcagctttgtgcctaatcttgttatagcaaattcgaatcccggtatcttggaacatttgtatggtgtttgtataagtccggaaccgtaccattggcttacatggattattcagatttgtactctgaaaattaagagcatgtaattcccgcaaaggcacaatgtaataaacatatagcatagcaaagcaacaatccggggaaaaactttggttaacaccttgaaagaaatggggaaaactgacagagcaagaagctttccatcatcagcagagacgtttgataaaagaaaggtcaagatttcattccttgaaaaggtttgcggaagataaacatctcattctggatgtggtatataaaatgggattgtacatggagtttgaaaaacttggcaaagagaatcatggaaggatctaaccatcccagctgcaaggtcatgcagcacttccaagaattaatttagaaaaacacaaatgcgactggttttttttaatgagtgaggggcatt

SEQ ID NO: 26381 - DNA, 1677 bp, Arabidopsis thaliana landsberg
tattttctctttttatatagctgtattggattatggagcttcttagttgtatcgagatttagaactaaacttaaactccacctacttctactgacctaacatatctcagttttgagtacatatggagtgccaaataaaaatatgaagtacatatcatcttcgacttataaaagttaattaccataaagcatgtatcaatgacactaacataaatatcataatctaattagcagaagatttcaacaagttttacagatgaaccacttcacaaccaatatcaacagatttcttcacagcatctaccaccaactgcgtcttcttactaacctccggccaccgacgatcagcctctaagtcgccccgcttgattccttccacaagccgcgtgaactctctcagcatcattgcctcttgcgtctccggagttccgctacagtccactgtaactctctctggcgtcacattccaaccaatgtgcatgtccacaaacttcgcaccacttgtgtattcgaaccaagctttgtcctccttgtagggtatcacatagtcattcatttgaatcgacccttttgagcctgaacattcattttgacatttgatgttagtacaaagctgatcacttatattttacatatacattagtctttaataagggttttggaaatttaaataaaatgtagaactaaatctactatagattgttttatacggttttacattgaatatgaccattttaaccaaactatactacttatttggtttttgaattagtttttaaaattcggttcgattcgggtcagtttgattatagtcccctagactattactatttctatttcaacttatggtataataaagacaatggtaagaacctgagatagctaagtccgttgaaagttgagagaggaaagagcaatgaacgatacgcggttgaggttgcggttgaacctgaactgtgagagaggcagtgcgagacaagatagtgccaaccgagtttgtggagacagaggagggaagtgccctgaccgatataggcatttggtaagacatagcccataaagctgcgcctatagggtaccatccaagctctccgatagctccggctaaacccatagcttctttagtcagtctttccaatacttgctccggtaccggagtggtcatcgtgctatacatctgcaacatgtgtcagagaatgtttcatatatactttaggcgtaatgataagtgaaacattatagattagattcaatccttcaacgtatgctcatgaatagtttaatataacttaaactaagtgacgaaacctatcgttcgttatcattcgaaacaacatcttacacgttgaacacctcaaaaactctaatctagttctagtacaattgaaaggttttatgtgttattctaacttatatgtggggcaataaataaagtcaaagattctatggaccaattttgcaatttgaataaaaaggcagagcgcttacgtggcgaacatctccaagcaatccagaatcaaacatcgtatctctaatcttaaccgtccgttgatgatgcaaccaaatcgtaccgtccataaactgcacaccgttagattcacacgcctcaacaatcttctccagctccgtcgcgtcttgagctggtggtttctcaacaagcagatgcttcttcttctct

SEQ ID NO: 26382 - DNA, 1753 bp, Arabidopsis thaliana landsberg
gatctttcggttttggatttgaattccctgaaaaggagatcacactcaaggagcttggttttattaatttcacagcacagtttatggcgcggtacgggatgaattttgtgcagggtttgaggaagagagtggttgggaaccctcagtttaagtttttggagtcaactaataatagcaggttcagtttttacaatgggcttgttattgcgtattcaagggttttaatgccttccaaaatgctgagcaagagtgatgattgtacggcgaccgttgttgatggttttctcagttgtcttcaattggaaaagcgataggagggagtggatattgatatgattgatttgcttgactattttgctcgtttggaggatgcagactattctggtaacgtcccacaacctcaacacctttcaacacaaatgcaaccaccacatacgcttgaaacgtctcctccactaccactgcctctaaaaaacgagtcatcacctgttcttgctgatcaacatccggtaattgtttaatgttctgattcttagagtcttttgtttctcaacttgacttgtatctaatcatggcagtcatacattttcaggattcctctaccatcgatgatgaatggcaagtcattgacttcacagggcagtcgttaccggacaacgtggcaagtttgaaggataaaacagctggggggatccaaattccagcaaacaaatagaagagaaacagaaggtgcatggtgggagaatgcagggaaatggttttcaaacttctctttaatactaatctttaaattgactttaagtttgttctggattggcagctagttctgaggcaagtttttgtctctctaatcttaaacatctgtttaatatgtgctttagctcttttttttattgaagtttggcttttactttgttacataaaccacaagcttcttcttacacagtatcaggatgagaatagacaatggaaataaagtcttttaactttgttacataaaaaccacattaacttgaaagtcttacgtttgtttcataaacacgttacacacaatacatcatctggaaataaggcagagtttcctacaacacacactagttgaaacatgatgctaggaaatgttattcactagttcagagatcttatgaagatgcgtagaagtagaagaaaacagacgaagataagaacttgatgaagcatgagccaaagatgatttgcctgtttacagccaaacggatggtaaaaggaccaatcttataaaccaaggaaactcaatgtcttttttccaagacacaaggtctctttccgtttggctgaaagataagggacaagacaaaagactggtgaaccaaatcatgtcttgtcccctatctgctgatcatatattaagtttgcagcagccaatatccattgctgctgcattccacttgataggcatgaccatgccaccaggagaataagccgacgaacttagaaagtaatccatacttgtaactgcagaatccgagagatttgactcatttgcttccctcgatgagtttatggtctcattttccggatgaaagacttcagaactctgagaattactcggcttagactgcttagccgcatcagctgtcttggtgttcaagaaacgcccgccagatcctctaggacggcgcatagcatggagatggcgtgagtgatgcatatatggctgaaacatcataacataagggcacatgttttgaatgcataactgaaaaaatgatca

SEQ ID NO: 26383 - DNA, 1668 bp, Arabidopsis thaliana landsberg
gacaaagtgtcaaagaaaaaaagatcagtctcccacttcaaagcctgtctaatgaaaatgcccaagcagacagtgaagaagatgatgacgatgtccagtggcaaacagatacttccagggaggctgctgagaaacgtatgaaagaacagctcagcgcggtaacagctgaaatggtgatgctgtctacagttgaagaaaaaaagccagtagctgaggtgaagaaggcaccagaacaagtgcatgagaatggcaatagcaagatccctgaaaatgctcatgaaaagcttgtgaatgagataaaggagcttctgagcagtggttcatctcctacccaactcaaaacagccctagcttcaaactcagcaaacccccaggagaaaatggacgccttattctctgccctctttggaggcacagaaaagggaatcgcaaaagaggtgatcaagaagaagaaatatctcttggccttgatgatgatgcaagaagaagcaggagctcctgcgcagatgggtgtgcttaatggaattgaatccttttgcatgaaggcaagcgcagaggctgccaaagaagttgctcttgttatcaaaggtctttacgatgaagacattttggatgaggatgtgattgttgaatggtacaataaaggtgtcaaaagctccccggttttgaagaacgtgactccgttcatcgagtggctccagaatgctgagtctgagtccgaggaagagtgatgctgtgtttctttttctttgtgtggttcaaaatttggtctgcgtcttgtgtgtgtctttctgtctggttcagtgtgcgtcttgaataaggtaagaggacactggcaaaggttacttctacttgttaagtaacactagtcactggtctctctgttaatggtttgtttatgttttgtccctttgtatttgtcatgacttagacaacttatgttgtataagttgtatgctttggttttatggttactacttttcttagaactactgtgacgattcctttgtgtttaattcgattaaacatattaggtattgttgagggttactaaaacagatctttgtttcaagttgatccagggttctgtttgaaagtctctaacatatgaggatctggatcgacaatttcacgatcttgtttctttcttcgactacgatctctgatttaaactgtaaattttggctatatctctcgattgatcgccataacttaggcctaaactttaatactacttgttgaagtgtacattacctgtcgatcacaccaaaagaagaacaaacacaaagaaactagacactcgaaaatcgtcgatggtctgtaattccgtaggtgcagctgaggcaggtaccaagaaataacttctttgttttgtttgaataataagtatgtcatggctttattctcagcaagcaatccactagattctttagagttacaactgataattttataagaggttgcaaagtgactcaaaaccaaattcttgatgttttaactgaaaattatatatttagaacaaacataatatatattggattcaaatttataagaaaatgaattgtactagattaactaaaacttctgaaagatttaagtaaaacttactctctaaaacacagcatgaaaaaataatgggtcgtaaatacatcaaatttgctggatgta

SEQ ID NO: 26384 - DNA, 2469 bp, Arabidopsis thaliana landsberg
tatacctctgacactatcatcgccaacacgagccgtggcaacagcttcaagcccaagctcatggaccaaagacttaacccgtgatctcagttcatctgcagggagctttaaacgcagcttagcactgaacagaagggtttcctccacgtaagcaaaggaaacagagtatccttctgagtgacataaccagagattttcttgaaattggctctatccaccggtctcttgttgacataaaccgacccggtttgagggatgagtctagcagctagaatttcaagcaaagacgacttccctgcaccacttgggccaacaatagcaagaatctcccatggtttggctctgcaagtcactccttttagtacatgcttgactttgttaccggtttcatcctctagcttcaatgactcttcctctgtctttaccggctggtcagcttccggccgcggtttccgcctaaagattccaaagggattaacattaatcttccttacaaagatgttgtaatcaatatctaaagcttcgatctcacatccttgcttctccattgatgaagaagctttgttctctctctttctttcttttccaatgctatagtggcgtaagaaaaaggacaagtaatagaacaaaaccaattatatatgtcttgtactaaatgtgttattgttataagaaactttgaattagtattggattggtcataaatggttcaaaagactaagaagtaagaagacagctagatttctgtaacttgtattggatttaagtgaagagagttgaaatttttgagtttggtcacgggccattgttttgttataccaaatatagatggatggagagtgagagaggttcacatgcagttgttcttctcacttctctttaactttcccaagacatgaagagtcacgtgttcctttgtgatattatttatatatttactttcatattttgtaatatacttgtgatttcttcatcaatttataatttttaaaaaattcaattaatattaataaaagttaccgacggctaattctcaaaatcactttttttttcttttcggcaaatcgatttacatgaaatataaaaaacattcaaaaacaacctttgaaacaaataaagaaaattaaacacaatttcgataaaaaataaatagaagtaatcttgctttctatacggaagttttataggcaatagataaaatctgttaaatctcttctttatatcctcttaaaaaactaacatcttatagataaaagttacaaaatatttttctcatcactctcattaaaagaatacattgatatgttgcttgaaatggtttttggatcttgatcacgtatttagaaacaaaatacacattgttgcccgttcatggcaccgacattttctctttcaccgacattttctcgtttctcgatgtagttggtcatcacctttctttcataagaaatttacatgtattgacatttggcactgattgagctatcccctaattatgtgtttttataaccataaatgtggcgttacgtctttaggattctaaacactacaaaagcaatctttgacccaaacaagaaaaacaaaaaaaaaacactacaaaagcaataataaagccacgttttcatctaaaaattcgtcgttaaaatggaaatgatgataaacaattacaaaaaatgggaaaaagcaaaaatgttaagggaaataaactctaaaagatttttaaatgatggagcagattagaattagaaatatttgtggctaatttggaaaacgatagagctacgatacttttgtattaaccagtgtttgtgtggtatacttcatcctcatcaattataaattaacagattttaaatttatttatttttgaacattaaacagcacaaaaaaataaacgaacttgtcatatacagtacataaatttcaggactctagttattttaaaaattactctctttgttttaaaatataagatgtaaaggtttatacaatcaaataacttggtttttaaaattttgaataaagctgaactttttgttgcaagggctataatttaacacacacttatatattaatatttttcaaacttgacaacatcgaaaatagcgaaaaaacttataatgcaatattatttttgatatcatatgattatatcttattttttggaaataaaagataaaattgcaaaaatggataatttataggattttttggtataaaatcttaaaaattatgatagtcatactttatttcttctcttatgttttcaattttgtttggtttatatctgactggagactggtataactaaagtctttactccatgttttgcgctcattgttatttttcttatgctaggaattaaacattttcaattgtataatttgaagacaataggtgactagtttctttccaagaatctatatatgtgttggggaaatttatattttgtacttctgttaaaaaaaa

SEQ ID NO: 26385 - DNA, 1733 bp, Arabidopsis thaliana landsberg
cctggactggtctttgataaatctgttgcctctaaagctgcgatgaggcacttcaagaaaggatatgtcttggttgcgtattttggggattgtacatttgcttggaataatgcatctcagataaagccttttcatcagaatttctctcaaatgcaggagcagagtaactccgctgagtttcgtgatgctattgattgtgctttggatgaggtttcaaggagagtagagtttggtttatcttgctcttgtgtttcagaggaagcctataacaaactcaagactcagaacataatcaatgctggaattcgtgaggactcaagtgttagatacggtggagacaagttatcggatggaatctcttttgaacctgctaaacttgtggattatatgaagcatttagcttgctttccttgctatgatccgactgagaagctgaaatttgtgattaaccgagctcaggtattggcttttcaacaatggaaagactattctcacttcattgactatgaaacatttgtaagatcggtggaatctgctgcgaccctagctaagacagattacaaagataatgctgaacagacaaaggagaagactttgtcagatttgactgtaaagaaacgctgtgggagcagatcaactgagaaattggatggtaagtcgcattctgaaaagaagcgtaaggttgagtcttcggaatctggtatgtctgagaaaaggatcaagaacagtcagcaaaaggaggattcagtgtctaaacactctaatgaggaaagtattttgtcagtgggtgatgctaataaactgcagaagacggctgaaccgtgtcatggaattggagtggaaaatgagatgaattctttaaatcctacacttaagccttgcagtgattctaaatctgaggaagttgagaatgagaagactaagaagccgagacatgaagagcttgctgaaagaaagatttcttctcctgatttgatgctctcaagccttcacgctgccaatacctcaacgggaatacctgattcaatcaacatagacccctcgaattatgaagattttgaaaagttcattaatgaactgttttgcagtaaactcaatggtgactcaaagaaggcaactatcactgagacatcagaaccttgtgataagaaagaatctgcagaagaagagatcttacttgcaaataaagaaatcactggctcaggctcgaaagagcaaactggtctcaaggactgttctgcagattcattaccaccctacgctttagtcctcaactttgcggattcaggttcggttccatctgaagaaaagatgaacgagatatttaaacgttacggtcctctccatgagtctaagactaaggtcacgaagaagggtaagagagccaaagttgtgttcaaaagaggggaagacgcaaagactgccttcagcagcgccgggaaatacagcatctttggaccttctcttctaagttacagactcgagtatgtttgccccaaagcgaaaaagagcaacatgactgattgagtcacggcatctcttaactttcaaagattagggtctgatcagatttcatcatctaggttttatgatgagagtagaatttcgataaattaaagtaacctaggtttatgatgagagtagattttcgtaagtaaaaggtacaaccttgtgatgagactaagattaagagttggaacgattgttgaatcttaacttttggccaacaaaac

SEQ ID NO: 26386 - DNA, 1130 bp, Arabidopsis thaliana landsberg
ggggataaaaaaaggaggctgaaatggatttgactttttttaagcaagagaccccgtggatggactagagggggcgggtcccagtcacggtcacagtcatagtcacaagcccctgagaattttttaaaataattcctattcattttaatattttggcctttgagtttggctatgaaacttcagcgtttatttttttccagtcccagcaagtcaacgagtgggctccacgtggcgtgcgcgcgtgctttcacacttggaccccacttgtttcgcatcagagtcagagcctgaatatgactcttctcttttcttttctttttaaaaaatctttttgtttttcttttcggcatcttttattcttaatgttaattacggtaattttctctcttaacttttgagaagattaattgtatataatctgtgttttattcactggtcgtctccctaatcattttcttttgcctaacgtttgtctcttctcattctccagttctcaacgagctcgaccaaaaaaaaagaagtcatatatattgatattgaattttgctgttaatattcgcattagtgtttgtaatttctatatagtcaaacaatatatcatatacgtactttcttctcttacaaccgcaattttttttttttacagtttgcatgatcctgtttctgtctaaaacattacattcttaatacattagaatcattttttatttttttttgtaatgttaaattcattgaagatacattggaatcattttggagttactgaatccatcttacccgatttataaataaaaccattcgaataattgtttacaaaccaaaataatcgaaaatgtgggtttggtggtgtaatttaccttttagaatggggtgttgaatataatttacaaaatacttttttggagttgaatataagtttacattgattcaagaaaaatgaatgggggtgttgattgttcatttctctaaaataacattacaagcgaagtactaacgattacttacttattgaaagttgattgccattggagacacaatagttccacggcaacattccattgagttggtgatcttataatttgaagaagaagaagaagaataccaccattttttaccgtgcaacatttaca

SEQ ID NO: 26387 - DNA, 1140 bp, Arabidopsis thaliana landsberg
cgaacaatctactttgtctattgaattcaaatttgctgaggattgttgatacttactaatcttctctcactttgtctgtaggttgtgatctggtgggctggtctaatgagaggtgctgtatctatggctcttgcctacaataaggtaaattgaaagtttaatggatagtaaacagcgacatggtgattagtaaaaatctagcagataatttaacttctttatttctctgtgctctctaatgcagtttacaagatcagggcacacagaattgcgcgggaatgcaatcatgattaccagtacaataaccgtctgtctttttagcaccatggtaagatatctccctctcaggtttggactactaaatgtattttctctacagagatgttgtcaatgaggataaaccaatgctgagccgtgagacggatttgcattttctatatccggaaaactgttccctcctatttgatttgttattccaatgttttctggatcgctaacactgaaccctgataccggacatttaacatatgtttttttttttccacggctttcaggtgtttggtatgctaaccaaaccactgattagatacctaatgccacaccaaaaagcgaccaccagtaccacgagtatgttatcggacgatagcactccgaaatcaatccacattccgctcctcgatggtgaacagctagattcatttgagttacctgggagccaccaggacgtgccacgaccaaacagccttcgaggtttcctcatgcgccccacacggactgtccactattactggagacagtttgatgatgccttcatgcgtcctgtgtttggtggtcgcggattcgttccctttgtccctggttctccgactgagagaagcagccatgatcttagtaaaccttgaggagaaagatatatagaaacttaaccaaaaaacttcttcttgctcttccctcttatggtgactagtattggtgatgtaaatgtatttttcgttcttcaaatttacatattcttctgtaaatttgttattattcgatgatgaagaagcttcttacgtttttgagagacgtgtgggggttcatgtgtgttactattagtctttgttttgtttaacaaaaaacccaccaagcctttgacta

SEQ ID NO: 26388 - DNA, 1783 bp, Arabidopsis thaliana landsberg
ctatgaaaccaatcgttgatactaataaaaagaaatcttgatctttcaatgtttttgaggaagacccgggctgggagaacaacaacgggcggagcatagtggtagacgagaaggatttggatgctttaaagggttcaagatttggggtttttatggttaatctaactaaggttaaggcacttgaaactaacaaaatatatatccttggttcttgatctcttgtcttgtcttcatgtgtcttaaaaaatggtgtatcccattttgtagggatcgatgataggaccacattggaaccctagtgcttgcgagatatcgattgtgttagaaggggaaggcatggttcgggtggttaaccaacagtcgttgtcttcttgcaaaaacgataggaagagcgagagcttcatggttgaggaaggagatgtttttgttgtgccgaagtttcatccgatggctcaaatgtctttcgaaacagttcatttgtatttatggggtttagcacatcggcgaagacaaaccaccctcagttcttagtagggcaaagctcagttttaaaagtattggaccgggacgtagttgctgtgtctttcaacttgagtaatgagactatcaagggactcttgaaagctcagaaagaaagtatgatatttgagtgtgcgtcatgtgcggagggggagctttcaaagcttatgagggagattgaagagaggaagagacgtgaggaggaagaaattgagcgaagacggaaagaagaggaggaagcaaggaaaagagaagaagctaagagacgagaggaagaggaagctaagagacgtgaagaggaagaaactgagcgtaaaaagagagaagaagaggaagcaagaaagagagaagaagaaaggaaaagagaggaggaagaagctaagagacgagaggaggaacgaaagaaacgtgaggaggaagccgaacaggcaagaaagagagaagaagaaagggagaaggaagaggaaatggcgaagaaacgattatgaagagaggcagaggaaagaaagagaggaagtggagaggaagagacgtgaggaacaagagaggaagagacgtgaagaagaagcatggaagagagaagaagagagaaagagagaagaagagatggcaaagagacgagagcaagagaggcagaggaaagaaagagaggaagtggagaggaagatacgcgaggaacaagaaagaaagagagaagaagagatggcaaagagacgagagcaagagaggcagaagaaagaaagagaggaaatggaaaggaagaaacgcgaggaagaagctaggaagacagaagaagagatggcgaagatacgggaggaagagaggcagaggaaagagagagaagatgtggagaggaagagacgtgaagaggaagctatgaggagagaagaggagagaaagagagaagaagaagcggctaaaagagcagaggaggaacgaaggaaaaaagaggaagaagaagagaagcggagatggccgccgccagccaaaaccacccgaggaaatatagcggtcgagtcttgaaagcacataactttctcgttttaatattttcgtgagtgttcgttttgttctttagcttttgtaaattgagcatctagctatgtaaagtttgatgtttttgacatatggtcaaatatgagattgtgacatagcataatggatgaggtagctgaggtgtgttgacagatcaagtgaaggcgagaagtgagacgaaagagcaaaaagagtatcaagataattaagttgaatagtgaagtaactg

SEQ ID NO: 26389 - DNA, 1494 bp, Arabidopsis thaliana landsberg
ataccctcatgttgctactggatttgcggatacatctgcttttctccgagagctgactcttaaatcgatgctcgttttagctccgaaggtatctgttcttaacccattcaagccgctttatatgttttccgttagaaaaggtcactgtctgtttcatcccatctgaagactttagctcgtctttattgtcgttcacatttatatttgtcataatctagttgtatctgatataaattgtttttctcttttcttttgttgtctttggctgcagctttctcagcgtacactttcgggatccctgttgaaatacctttccaaactacaggtttgtatcccttacagcaatggctggacctttttctttcccatagttaatgtttctagtaaaatgttaccggcttccctacctctatttatggtaatcctttggttcatttttagctggagttaagaggtcatatatgtggctgctctatttgtcataatctagttgtatctgatataaaatgttacctctattgttaccggcttccctacctctatttatggtaatcctttggttcatttttagctggagttaagaggtcatatatgtggctgctgcacttctttcacagtattgtggtttaaaatttatattattctctcaggtggatgaagagcctgcaatcagaaccaatactactatactactcgggaatatcgccacctacctaaatgaaggggttagtctctagcagctttgtttttttcttttcttttgattccttgttacctttgtggatatattcttttgtttgtccctaatcaataatcatgattatatgatgcagacaaggaaaagagttttgattaatgcttttacagtgcgtgcattgcgtgatacatttccacctgctcgaggtgcaggtatgtgaatataacaggatcatagatattacatattgtgtgggatgtttaggttctatgaacatcatttcgatattcctgttgttatcctctttccaggtgtcatcttatatctcactggattttactcttcgcagggattgttgcattatgtgccaccagtactacttatgatgacactgaaatagctactaggattcttccaaatatcgttgtgctaaccattgatcaagacaggttccttatttaagtgcatttcgatccctttttcgtccagtattttcgcttccgacaaaatctaaagcattttctcttatttttcttatagtgatgttcggtcaaaggcatttcaggccgtagaacagtttcttcagatattgaaacaaaactatgagaaggtaggagtgatgactctgccgaactctagtatttccttgagctacttttatcctttaagtcttatgtcaaagggtatggaagataactaaattattttggggtgttaatagacaaatgctggagaaataggagccagcggaggagcctcagctatacctgaaactgctggtctgatcgggtgagtat

SEQ ID NO: 26390 - DNA, 1615 bp, Arabidopsis thaliana landsberg
tcaaaacttggattctagtatctgtttgctctaaacacttgtaaatcattgaactgagatcaaataaattagagatttctttaatcttctatggtaagtaaattttcggatccctattcaagaaagagaaaaaaaatggaaacaatatttaacgcgttaaaagataaataagaccacaagagttaaaaagagtcgttcttactttcttctctaccttgtccgaaaaacctcagtccccccccaaatcaattaaaacgtttcaagaaaaagaaaaaaaagtgtactccgtcaacttgttttttccggcggcgttccaccttcgtcttcgctgtctcaccgcgtcataaaattttctaccttagtaaaaatttcgaaatcgatcgtagagatcttccttcttgatttgtcgtctcgattctacaaaatttggcaatttctttgttttatatatattttaagatctttgaatatatattttggggataaatcggctaacgtgtattagttagcaggagtgctcaagtatttgctcacgactaagtccttttctcctcttcttcttcctttcactatctcttcttatcaaatgcctcataataatatccagttgggtggcacgacacgaccgcgttgaatacttcagacggatttgttaacaacaaagtctctacttcttcttctgttaattactatataactcaaagatctgagtttcttctctcttcttagcgttcctttcctctgaaggtattgtaagcaatctcgagtttcaaatcttgttttattgttttcttataagttcgtggtgggatcgtctctttttgtctgaaaatgtctaaagcctgtgcttaaagaaagatgtgtgggcttttcgagatattctcggatttgaaagtttgaaactttgaattagtgtattcgtcttgataactttaaaggtggtgcctttttgttgtagtaagcaatgattgttaccttttcttttcatttgtgtgaatgttgatgatgagtttgttgttagatcgatatatatatattgatctgtttctttgttgatgtttttgaatgaatttaagatgtctttgtttcttcttttgctaattttgtctttgacttctttctgcagggatctgccaagttagatcctaactatggcatctaataagcattttgataaaagtccatcaaatctatcaaacaactgtgatattcaggagcctggaaggccacttgctggtcactctgtcaaatttgctcaaagaacttcctcgggtcgctatatcaattactcgagggacgatcttgatagcgagttgggcggtcaagatttcatgagctatacagttcacattcctcccactccagataaccagccaatggacccttccatttctcagaaagttgaggagcaatatgtcgctaactccatgttcactggcggtttcaagagcaacaccagggctcaccttatgcacaaagttattgagacagagcctaaccatcacaaatggctggctctaaggatcgtcttgcgcgatccctgaaatgtgataataaggttatgagcgatgagagaggtcaagaccttcttccttgtgaatgtaactttaaaatt

SEQ ID NO: 26391 - DNA, 3504 bp, Arabidopsis thaliana landsberg
atatcacaaatcagtgaatatgatcccttagaccttttctctggatccaaagatagaatacacaaagcaataaaagccctctactcgactcctcaaaacagtttacaagtgttcttgaatggttctctggtatttggaggcttccgtggtggtatatgcaaaacaacctcaaagcttgaattagcttttgagcatacactcaacgatttcttcaaaaccgaagatgacagcggcctacgtgcaaatgctttcatagagcttgttgcagaaactgtttacgcatctggagctttagatcagcttcttgaggttcaaaagcttgacaaatataacatcgaaggagcgattcacgcgtactatgacttagttgaccagccatgtaaagcgtgccaagagttggaaagtagtaaattatcgaatcagtttggttccatgcattcattgccacaggatgagaaagtaaatattttgaaggattttctaatatcttccactgctatagattgtagtgtcatgataagttttagaccaatagagactgggctctcaagcccctcttcccacggtaatattcaacttgaatcaacaaagcaagaatttgagtataaggtacatgtttttcttatttttagatattaaatctttgcttttgttgaattgtttcattttcggttggtacatttcactgatcttgatatgagacctttggagagaatggaagcctattacgaatcagacaagaagatcatgaaaacgtacctggagatgctgaagaagaaaggggatcgatcaacctagattcttctagaactatgcaacctctaacagtttcctacaattttcacttgtatcaattcataagattccctttacttgatatgtttcctagactaaaataaatataaatgttaattatttatgtacagttaaatgtaaagttctcagtatccctcacttaagaatctagttgttgcattagattaatacatgggatgtggctgcaaaggggtatacagtagaaaaccaagtttcaaagttagcctgatggttaaatatcacttgaaaatcagggatgtggaggatgggaaacatcagagaagggctggtgcaagtttctaaagttgatacagtgagcaatttccaaaatgtatcggagatgctcaagtctaccaagaactgaaaataagtaagcgtgaatccacgaactaaaatctttaactcagaggtggacactcatagagagtttgtctatcggtttcaatatattttgcttacgtaatagtttgcattccaaaagtttctataataactttgtacacctgaatcgatataattcgatttttataatcaacattaataaaaacaaatttcctgaaatacataattttgagtttggagaaattttgataatttttaatgaccgtgtctctatatcacaaccttttctttttacattttcaggagaacaatttcaatgttttattcaaaactagttgacatcttatataatattacatcaatatttatcttggagacatcacagggaatttgaggcttaacaacaacaataataatagtaaactctatgtattatattatcttgatgtaattaaataatacctttttgatttgtcaatactctgtttctccttctagaaactttcctttttactgtttgtgtatattttgttgaccacaaaaactcgaggactactactactcaagactaagtaagataggaaatgggtggatacaaagaagttgtccttttagaaaatccatcactagaagttggaaagtctgacccaaagactttcgtgtgcttatccaaacacgacgagaggagtcccaagaagtctagcggtatcaatcaaatctcttcttgcttgaggagattccgtggaaccatcaagaggttagtccattttcttagcaaatttctttgtttttggtgaaagatatctctatttttctctctaaatctttcgagtagtaacagttaagctttgtccatatcctggatagacctaggtgtgtcaagactcaagagacaaagcttgaatatatttctctaactgattagatatcactattaatgataatgcatgatcatcaatatttcgtagcttgattcatattttcatatatactacttacttaagcaggaagcattatggctggggaacttatttcgtttggtatacaaaacctgtggaacctactgagtcaagaatgcgagctatttcagggagtcgaagatcaagtaactgaactaaaaagggatctaaacttgttaagctcttttctgaaagatgcagatgcaaagaaacataccagtgcggtgagtgaaaaactgtgttgaagagatcaaggaaattatctatgaggagaggatacaatcgaaacatttgttcttgagcaaaagctgggaaacgcaagtggtatcaaaaagagtatcagaagacttgcttgcattattccagatcggaggagatatgcattaggtatcgcaggcttaagtaataggatctccaaggtgatacgagatatgaagagttttggggtacaacaaatcatcaatgatggtgggtatatgcaacctcaaggtgataggcaaagggagatgcgacaaagattttctaaggacgacgatagcgattttgtggggttggaggtaaatgttaagaaactggttggatatttggtggacgaagcaaacgttcaagtggtttccataaccggtatgggtggtctaggtaaaaccacacttgctaaacaggtttttaaccatgaggatgttaaacatcagtttgatggactcgcatgggtgtgtgtttcacaagattttacccgaatgaatgtgtggcaagctatctttaggaatctcagaccaaacgaagaagaaaagaaaatcttggaaatgacagaagctacactcctggataaactctcccggttgttggaaacatccagatcattaattgtgattgatgacatatggaaacaagaagattgggacctaatcaagccaatatttccacccaaaaaaggtggacaccttttgttacatagagtaggcaatgctcataaatgagttttgtttctgaaacgaaaaattattttgcaggttggactgtgctacttacttctagagatgagagtattgcagtacgtggtgatacggcatatatcaactttaaagcagattacctaactattgacgatagttggacactttttcaaaggatagcatttcctaggaaagacacagcaggtaaactgtttttttttgttcttgttttgactacaattagataatttgtaccagtatcaacacaatattaattcttcaccttaaataaaccagcgattatatatatgtttagttctatcacgtccaattgaatcgtaacgtgttttctaacctaaatgaaaaataaatgaacctagtgacgcgttttgcagaatttaaggttgatgtggaaatggaggagatgggtaaga

SEQ ID NO: 26392 - DNA, 6142 bp, Arabidopsis thaliana landsberg
tgttcttgcttacttgttgttgcgttggttctgttttgtacgttggtactgaaaattatgctaggcgcggtgtgttttgtgtttatttatgttctttcgaatcataaagaaataatgataattgatgcacttgtctatgacaaaaacatcatactccacctgtatttgacgcgttgggtttatgtcaaaaagcattaatacttcaactcctctctattcaatggcataaatacattgttggtaactctcattgtctaacactttgtacaactaatcaagttctttgttgttcctacttctcctttatgatttcttcgattgttattcttttatgttgaagcgttaaactggatcacatacctgatgaatttagcaccgagaatcgacacaaagatcgggtagagatcacaaatggaaaccagtcaccgttcaagtgtcaattgtcacaaagttagacattatatctctcttcaatcattcttttatagacaaaggaaaagaaaccataaagagacacaaatgattttggcgtctactgagaaatcacttcctcaaaactaaaccagtttggcatcctgccatatcataagcgcaagccacccataaaccaacataaagtacataataaatttgctcatcgtttcgatttcacaccggttcatctaaatggagaatggtagtggacttgtatttttccaagcacttcactctctttcgtggaatcaaaacttttgcaacaacggcttatgctagtctcacatgatgcgttttacacactctagatagattgacctcgcatgttagatcggaattctagtgatgccctctactaacatataattgatatcaatcaccatccataatcttatttggttttagatctcttgcaacactagctctttcttcctatcacaataggcttttcatttgggcatttgcaacttttttttttatatttttcatgattatgaaaaccttaatagagtagaaaaggtggtaaatagatatttatgcgtgtggattcaaattgcgtattgcattaacgatatcgacaattttattggttaaaccggcgggagtacacttttatttatagtctatttttacgccacgtcatctctaccttgaaaaattgaaattcatcatttttcttcctccttaagacttttttttttcttttctaattaacgacaacacgacgaagatgaatccttctcacggtggcgacgacaagcaacgaccggcgatgtatccccaagcgatcaatccattcctgataatccttttgcttctacaaatccttacgtcgcttcttccccttatctctatccttctctatcctctcacaatctcggacctaatctcttcccagaccacggagatgcatccaacgaccaatcaccatctgctcctcctcaggcgacggaggaggttctcatccgtgttcccggcgctattctcaaccttatcgacaaatcctacagcgttgaactcgcgtgcggtgatttcaccatctttcgaatcatccaggggcaaaatattgtagcggttctagctaatgttgggaatgagattcaatggccgttgacgaagaacgaggttgctgcgaaggttgatggatcacactatttcttttcgattcatccgccaaaggagaaaggtcaaggatctgggtctgattcagatgatgaacaagggcaaaagagtaaatcgaaatcggatgatgagattcttaattacggattgaccattgcttcgaaagggcaagagaatgtattacttgtgcttgatcaggttttacgagactacagttgtttcacagagcagagaatgtctgaaaaagccaaggagactggagaagaggtgctgggaaattcagtggtggcggagacttcgccggaggagcttaagggtgagagaaaggatgttgtggaaggtcaatgtgcggcgtattggacaacacttgcgccgaatgtcgaggattacactcacagtactgctaaaatgatagcttccgggtcaggtaagctgatcagagggatactgtggtgtggggatgtaactgtggagagacttaagaagggaaacgaggttatgaagaataggcttagtcgtgctgagaaggagaaagatgttagccctgagacactgaggagaatcaagaggtatggttatacttaggaatttagcatctttgacttgaaaataactgcttaggaatctagttccttgtttcatgatcactagagaactgagtggtaagggatgattattgtttgcagaggaccaattctgtgagaagtgatgaaatttcttgtttaaaaatgtttgaacattgtgcattctcatggtagtatagcttgaatgaaatcaatttttatgcctttgcttatctccctcacgtggtttctatgtaaagggttaagagagtgacacaaatgacagagaaagttgccactggtgttctttctggtgttgtcaaagtctcgggattcatcactggttcaatggcaaactcaaaagctggaaagaagctttttggtctcttgcctggagagattgttctcgcatccctcgatggatttagtaagtagattacttgtttttggtttctcatatttcctatcccatgcttggagggtcgtaaaagcttcttgattcacgagttgccttgctttctttcatctcacttgaatacatgttttgacatgaccagcattacaattcttgttaaaccaactttccttctgatggccattcccataatttttccatttatttttcgaatatgacatttagcagaagttccttgatatagtgtattagtgcttggatctgcttcttgcattgaacaagttaggctgatggactttggagcattattctttttgtggggtgtttgatttcaaagttaccaaatgttttgtaatcgttggcttcccttacataccgaaccctctttcttttatgttttactaaacaagggcatggttttcgcttctatagtggaaggtgctttaaaagtatcttctttcctctagttctcttgggaactcgtctatcagtcggcgatttacattcaaaacctgctgtttttttgtttgtttaaggcacatggcattagtaaccttcttttcatgtttacttcttgcaggcaagatctgtgatgctgttgaagtggctgggaaaaacgtaatgtcgacttcatcaactgtcacaacagaactagtcaatcacaggtattgattagcaaaggcatatataaacaatcacatatctccgcatgagtgatcttcagcaagagtgatcaaagtttccttagatcttaaagaaacctcatggattctgtttcgaaattacaggtacggcacaaaagcagcagaggctactaacgaagggctagacgcagcgggacatgcatttggaacggcatgggttgctttcaagattcgaaaggcatttaaccccaaaaatgtcataaagccttcatcattggccaagtctgtttcggaactaaaggctaagaaaggctccaagtaaacactaaacagccttcgactgttctgtgttcatctaaacttgcatttaatttttcattttggaaaagtatatgaagattgattgatgtaatctatatttagtttctgtgtatattgtgattctatgtaaactatataaacagtttcttctaatcttctcccatttatgggtttgattagtaacttcttaatgtgtcgagaagcagtgttagtactctttattttcttttgtactgctatttctgaccgctacctctcatctctggtgactaatcctgccttcgtttaccttttttagtgtttgcttggaaacactaaattggacctatgttatgtatttctaccagattaatttgacaaaaaaacatgttaggagtttttagagttttgaagaagtgggccagatgtttggagttttgggccaaagaagctcatattgggcccactagagaaataaatctagtgatgcttgattggctggaaggtgtgtaaacgtgaacctgtccgcaggtgattaaaacagaactgggcatttggcttgtcgcctaagttgggaatcgtttactgtgaaataaagacgaaagaaaggttttgaagaagaagaaagaaggctcacaagatccagaaaaaggtaaaagatggcgagatatgatcgagcaatcactgtattctcccccgatggtcacctcttccaagtagagtatgccctagaagccgtccgaaagggtaacgccgccgtcggagtccgcggcacagatactgtcgtcctcgccgtcgaaaagaaatccacccctaagctccaggattccaggtattgctccgatctctaccgatacaagatgcttaaaccggagttagtccatttacttttgtttctgcactttgattttggttttaagcttcacctggatagctcgcttgatttactcaattgctacttgtatgatcactgtttcaatccttctgaactaaatcctgatgttgggattttgtatcacttcgtaattgcgaatctagtattgttagatcgtagaatctgagctgaaccctagtttaagtctttttctctacgagtgtacaattacagttcctgtatctcagacgtgtttttttgtataagaacacgtgtttggttatactctgcaaattgatcattccctgcgtaaaaatataattttggtgttgaacttgctgaaatctaagcaatatcgtcttcgtatctgttggctaagctcttgctccaatagatctgagtttttttacctattgttatccgtatataggatctggttggtgttccttcccaatcatatgagttttgataatttttttgcttctcagatcagcaaggaagatagtgagccttgataatcacattgcattggcctgtgctggactgaaagcagatgctcgtgtcttgataaacaaggcgaggatagagtgtcaaagccacaggcttacgttggaggacccagttactgttgagtacattactcggtacatagcagggcttcaacagaagtatactcaaagtggtggtgtgagaccttttggtctttccactcttattgttgggtttgatccctacactcgtatacccgcgctttatcagaccgatccatctggtacattctctgcttggaaagctaatgcaactgggagaaactctaactcaattagggagtttctggagaaaaactacaaagaaagcgctggccaagaaactgttaagcttgctatccgtgctctgcttgaggttagtttgctctatcatgttctataactaaaccttgtagttttcttttgagctattgtcggggtgccctgttagtgaatgttctataactaaacctagtagttttagttgacaatgagatctgacctattaattattttgctgcgtgacccggtgattttgtgagcaacatgccaaactttgaacctcattatgattcttcattatttataggtgtggctttaggttaaaagtgaatgttagagaatgttaaagtttttgaaaatgtagaagaccttactaattgagttggattataatgttagatgagcttacttagcaaacgcacaagtagtggtggaacttgtaaagaagctgaaaaggatttgcattttgcaggttgttgagagtgggggaaagaacattgaggttgctgtaatgacacgagaggaaggtgttctgaagcaactagaagaagaagaaattgatatcattgtggctgagatcgaagcagagaaggctgcagctgaagcggccaagaaaggccctgcgaaggaaacatgaaccagatcttaaagtagcggtctcagattatgagttgtaatgctggttcaaagtcagggatattcaagggttgaatagaaaatctagaccgcatgaaatgggtttgttggattactagcctatttgacactgttgctttaaatcttaaatgacattttagcggagtttcgatacttgtcagttggaactatggcatgttcagtattctagatgactttgcccctgccctcaagagttgtagattttgattttggaaaaattgtttcttactaaacatgtctctcttcttagtatctccagtgtg

SEQ ID NO: 26393 - DNA, 1347 bp, Arabidopsis thaliana landsberg
cctcatatgtcatagttaaaactcaaatgtcatctttatatcacagtgcttcatcgggaaggagaacaacttcaagcaaccaggggagagataccggtcctgggattcagacaggtaaacactaaaaactcaaaaaccacattgcaaaatcaacaattacacatgaaccacaaatgtcataattcattctaatggtcttttgttttgtaccaataggcaagaacgattcgtgaagcgttttgttgaagcgctttcggagcctcgtgtcacgcacgaaatccgcagcatttggatctcttactggtctcaggcagacaaatctctgggacagaaactagcaactcgtcttaacgtgaggccaaacttctgaatgatatcatctctaaagactaagtgaaatcctataaactcaatatgctcctcttacggtttggtttctaagtaatctcgtttattgacaatgaaacgcttaaagaagggtactagttcctgtttgtaatcttcttttcaaaatattaacgattattttctaaggcaaataaataaaaagctatgactaatatagcttagtaaacaagtatcactatcatccatttggttctactttaaaaatggatttttatttgtattttaatcttctgcatctatgacgtgagcttatagttggaattttattggggtctaatgtcagacgcacgatcttgataaaaaagttttatgtctgtccatattttgataaattggcatagtcatcactcatcacgtcagaccttttaattggtcaatcgttatgatgctacatcgcattcataatttataatttacatgtaagtgggggtggagtatttgattattccgctgctagtggaaatgcaaaaagaataatgagagcagaccaattttaattatgcttatactttgttgcgcttaacttttaatcagctaatacagtctgattaatctgatgtctctcagccagtagtttcttttcttaaagagaacctcagcgcaaatcagaaattagacacatggagccacatcaaacttaatcaccaataatatccttttctcatgtatttttcagtctcatatttttttttacaacttgttaagtggtagtgtgcgaagattttagatcgaagttacgcatcttaagagattatttatccaatgaaatggtatagtgaactgtgtttgctaatggtccaggattttatacatttaaaattcataactttgcagtttaacgaaaaacaataacaaatttaacgtgttttggttgtcgttaacaagatctcggatccatttaggaaaagtcaatatcttgatgacgaaatcaagaagact

SEQ ID NO: 26394 - DNA, 987 bp, Arabidopsis thaliana landsberg
gcttacgagtgttataaagaagtaagacaacattttcctcacctttcagcagcttctttcttgaacgaatcgatctgtgtctcaagcatggcacaagcagactgaatctccatattcttaacacagagctgtctccattcttgagatagagcattgagctcgtatgatgtggtttgctgataatggccacacaacaaagttttagattaccccgtaaaccaaacagaaaagtgcaaggaagaagatgaagataattcaaaagagttgtcacctgatgatacttcctttcccgatttactttttcaatttcctcattctgctcctgtgctagtctttgcattctgcaaatagggttcaaatagagggttgagatcaatctcactgtggttaagttccaaaagccagagactgggtacagttttataaagaatgacatgttacaagctcacgaagacctttcttatgtttaaaggaaacaaagaaactttcaagcagaaagcacatgaagaataacgaaaggcaaatctcgtgtactacagccaaagaagcatattatgcaagcaagagggacaacatatatatcaataatgcttcagcagatcatctaggatatatacaatccatcaaccaaaaagcttaaacccttttactcattcaaattcaatcaatgctgcagtatatacaaatgtgaacaaacctggtcaaaaatacttcaaggcgatggttgttctgtctccaaagctcggggccaagttttgacatcaattccaaattctcaagcctgtgaatgaaaaaaatccacgttttaaaacaggaaaacccagtatatacagaagagaatcatgtattagaaaaaatcagaaactttgcttactcaatcagcttctgttgcaatgaccgttgattcttctgaagatactgcttccaggcatcatcatcattcctcttattggcaggtggcattttaagtttgtatcgggattcgaa

SEQ ID NO: 26395 - DNA, 1796 bp, Arabidopsis thaliana landsberg
  unsure (1)..(1796): unsure at all n locations
acagctagcagaaaaacggtactcgaaaatagtccagttgtaaacatttaaattcgcagaaacagtattttctgaaaggtcagacacttagagataatattcagcataaatgtgtaaacaactgaaagacttactgaaaaactcgcgagagttattcgcatggcgagctagaaactctgttatgtcagttacagatgactccccttcatatggagtgactttgtttctctcggctggaaataatatcagagaaggatacacttccctctgcaatgttacagattcatagagcaagtgaatactggattcagaaatgagaatacggtgtgtacaatcataagctctaactactcaatagcaaaactgtgatatgcaaatactaaaataaataaaataaaccagacaagctatcatcaaaggtacctgatttattgattttaggatcaagctgcaatcattcaacgtgcaatccattaaatagataagtggagattttagattctcgccattagttggtgtctctgcttcagagcagaaaaaagcaacagaagaagagaaataagaaacttagaaacatatccatttcactttcaattttacaaattgtacactcagatagaaaataggagtaaaaaaactagtcaatctatatcacatacctaattcagatctttgattgttcctggatcctccttgtataatcgctttatattcctttaatgatcggtaaacttcatgcagaactagctccatcctctgacaaaacccacaccaagtattactaaaaaagaccaaaacgtcctggcacagaggacaaggagccttctctgcactggattgatcccatgcatgaaccatgtgggagaaggtactgactgtgacacggggaatagaatccacctcgtgaaaatccagattaacagaaggtggaactgcagctcttttaggcgtctgaatgctagattcagactgtgcataaggagatagacttccattgagatatccatcaagaaagtcgaccagggacgaatagctgaactgatcttgaaggcatagtgcttgtgtaaagcagggtcaataattactgctgatggaatctttacatcaccagtaagggccctaagtaaaggatggtttgcatcagagaagaaaaatgaacccgtgaatttatgcactagatcttccttcggttctgagtgcaacgagaccttgatctctccattaacattgtctttcaaataaacctcagtcttatcggtttctgccactactaattgttcactcctgtttgtagtagcctgctcttcatcactaggggaggaggattcaatttcagaggatttcatttcatcttttgcttcagaactcatactgactctgttctgcacatctgcttctgtagggtgaagtgaaatttcactggaaccttctgcagaagatgaagttgtatcttgaccagacacaacttnnnnnnnnnnnnnnnnnnnnnnnnnnnnnnnnnngtgcacatcatcagataacagacggaaaccaacatccttagcaattgagctcaatttactttcttttcttctgtgaagaagatttttcagtatctcctgcagggaactgccttccatacctggcgctatagtatctagggctacatgtttacccccatccataatcataaaagaaaccttattctcgaacttaattttcttaaacttttggacagttttcggaagtggcacggaccccgattaaaaataaatttgactaacggggttctcatacataatatcattctcccggtt

SEQ ID NO: 26396 - DNA, 1445 bp, Arabidopsis thaliana landsberg
ttttggtaaccgatccaatcaggctgttgtaattcgaaacctaaattactgcgaaaacactgatcgatccgtacagaagcaatttattgataattttgatccacaaattgttcgacaagattggaacagtttaccttatatactattattctgctcatatttaaggaatttttaaaatataccgttataatttagaatcatatcaacagtcagaaacaaatcaattggtactcttatagaaacacattaattaagaaataaatcaatctgcatgattgacgaaaccattaaatttcaacccaaaatttcagccactgatgtaggtttcttatagaagtgtctagagatcgcactggtatataatacgatggaacacaatacgatactatcattctctcaatcataactacttttttttttcttacattgtcaattatcaaaaacaaagaaatggtgtccactatctccggttttagcttaattttgttcatagctgccgtcgctagtagcatttcagccgccccttcagccgctctcgtcggaagaaaagtcttcgatgttcgaagctatggtgctcgtggtgacggcaaaacagacaatactatggtagtgaaatttctagttttgcttttgatccaactaattcaacattaatgttttgaatttgttaattaattctaacacatgtttgatttattgtcttgatttggcgttatatgcgtttacaaaggcgtggaaagacgcgtgccaatggaaaggattacctatagtgtatataccatttggaaccttctacgtcggtgccggagccttcacgggaccatgtaaaagtcggattagtttcatcatcaaaggaactttgttagctccgaaagatcctaacgccatcaaacaagacagctggatcatttttaggtacgttgactatctcacggtctcaggcggcggtattcttgacggacaaggaagctactcttggccagtcaacaattgccgacaaacccataattgccgtgctctaccgatgaacatggggttccagctcgcgagattctttagactcacgcgcatcaaatgggtcaatagcaaaacgggccacgtcaacttcttctcagtccaacactttgatatcacacgcgtcaacattaaggcttccggagacagccctaacactgatggaatcaagataggttcatcaaaccacatgaagatccaccacgttgacatagcaactggcgacgactgcatcgctatcttggcggcaaccttcaatttggatatcaacaaagtcaactgtggaccggtccatggaatcagcgttggaagtcttgggatgtttaaaggtgagaagagcgttctgggattaattgctaggaatttaacctttaatggtacgagtaatggagttctaaacaagacatggccttcgccgggtgaaccgaatt

SEQ ID NO: 26397 - DNA, 1264 bp, Arabidopsis thaliana landsberg
ttttatcttgatggggggggcacgattttgtactcctactcgtgcatggaacagacacacaagcattacatgactgaagggtgacttctttaatgttgcttagtgttttcacagggcataaaccattcccgtttggagacaagcattccccggctttgcgtcctttgcaagcccaaccagagaaaagagtaacgagagcaacatccgatttaggtgctgaggccacaagaaaaagcatgtaattatgcaaaattgtgagtagctaataatttgaaagaaggttaagtttaaggcagtacagtagatagtacctccagcttgcaagttcttcagaaaattcttagcttcatcttctgttaaagatgccgtcaaccatggcaaaactcgttcaattagtctcaatggcattatacacaggctttggtagagaagttcttgttgtcttttgaagctgaagttctttcgtgcaaggggtagcacctgcaaccactacaagttagttgacatcctgaaattggtatcttgaatcttcatagcatatagtatcaaatgatcttatgccaaactttcatagtttcacctgtttacaatatcatacagcacttaaaagcaatagttcacctgaatttcctcgttatggaagtgtctttgaatagtttccattatttgatcagcatgtgagcacagcttagtgtaaaattcggcagcggaagtagaagaggctccagcactcttgatattttcaattaagcatcgaaactcgttaaactgattttcttcttcatcgtgctcttcagaaaatgaaaactctccatctacagctggaaatatgatcttgtcctctgcaagactgcacgagaaaagaacagatcatctcaaaaatagtccaatgacaattcaatctctgtcagaagaaaaaaaaagttgtatgtagatatgaacatttgataaaactctttttagaatgataacactctaatgcagaaacgtgcttaagcatgagaagagtaaaggataaacaacatccatatcacttgaaagtaaaacacatcacagctggcaaacgtgttttagtggccatcaacatcaactttataaaacaaatctagttatttacctcaataaatcaacattgaatagtcccacaaaagatagccaataaacaatagcaaaattgagattattctgttttcattgtaaatgaaaggatacaacaaatacctatggaagatgcacacttcagcaatatattgtaagcgttcat

SEQ ID NO: 26398 - DNA, 6289 bp, Arabidopsis thaliana landsberg
ccgcatcaactcatattccaaggcaaaatatcttattgacattttaatatcttgtatgggactcctgagctacaacttctgctccagtctccgcttgggtctcttttctcccttcctgtcagatactgttctttgtctggtcaacttttgcatcagttattatgtaggcagctgtttactgaggaaatagatgcaacatggtttgtcttcgctggacagccattacgcttttccctcaaagaatttgaggaaatcactagtttgtgttgttctgagtacccatctgctgctgaagtccgtttttctacttcatatgctgatggtgaatctccttactagtacaagctcattgggggccaactaggatcaacaactgttaaatcactcgttgcccgtctcaaatctgattgtggcatgctgtatttgcaaatcccaaagtctctcgacttgaggcccttttctgcacctccactatatttggtacctgctaatgggaagggggcgatgctaccttccccccccccccccaacctaaaccaaagaagcggagactcacagcccaggctggtggaagtgggaaaaaagaaaggagaacctgcgtcaaagtaaacagtcgaccgatggcctatttcgtattttaaaatcctccatattagatgatgtctacagagttcagccggattatgtccaccaagatgtttcttcctctacatctacttcaactaatgaccagcacaccagtcctcttcaggtaactcaaagccctgttcaaactttgttttgaagccatgtatactgtttgacattttccctttgttcctccttctgtttcatatcttactctttctatatagttatgtaaaactaacatatttttttccaaaaattcttctcttatgttggaaaccccacctatatttatacatttatctctctatctttttctttcagggtcagttatcacaacctccgacgccggccttattagaagcttatattcttggtacatcacttgtccacccacaaacacccctctacatggtgactgctatgtgaacaagtgtgaacctctttttcctaacacagaaactgatgacacttttgtaacttcagccgtggtatgtcaatcccaccctataaatgacaattgcgtatgcaattgctgcttaatgaaaaattatcactccatctatttacattatggattatggctccatgttcccccaactatggactcaaatatttttcatggccctttttcagtttcaacttcaacatccacgcaagtctgtgttctcccacccacatgcagctcttctttgcctactaatcctcgaaacccgcatatgatgatcctgcgcaataaaaaaactctccatggtaagtgttactccacgacagaagacaaactgacgcaccccactcgttgccgtgtcactagacaatcagctctggctggcacaccttttccatcttccaagcaaaccaaccctggacgccctattcctcttctctctactgttgctgcctctctcacagctcctgaccagaaaaaagttgccaagttaaaagcacagcttgcaaaagcaaaaactaggtcactttcccttcatttttacttctctcaccatattctgtctttcgtactaatccattttgcattgttttagtgagtacatgattctcggacaaccagttcgtccgtcctttttcactgagattttacaacctcaacaatggctttctactccggtttgtttctccctatacttctttccccccatctcattcttgcttttacagaaaacagctaactcttcccaaatctatgtactgcagcatattgatgtactcttagctttcatttggggaaaacatgagacctttttccggcagcagcggataacaattcttgattcccttttcacctctataattgccagcagctatgccaccttcaacagatgtgctaatcctttggactttgtctggcaccggctgcttattttgtctataacaggttccctaccaggtaggcaacccccacagtgttggcttgaagatgtcgacacagtttacattccaatgaattggggcagaaagcattgggttactctttctctggatcttcgggttgggcacatttccatacttgacccatttcctgactgcaattcagctcgtaaagttctttcttacatgtctcctgttgcgaagactttgcctgacttggtgcgttctgtttttggtaaaagcccatcccagtggccagaatctggtttcacctttgcgagacttgaggggttagcacagaataaacgtggaggcgactgtggtgccatctgtgtcaagttcctggagctgcattcccatgcactacaagaccaactcattgctcttactgatgcagaagttaataatctccgttgtaactacgcgcttgccctatacgaagagtttgttggaaagctttagtctgaatctcattcgtcatgttatctacccatcaaactcaaacttgttttttcatttaacactttacatgaatttataacttactcatgcattgttcatactgcaacattccacacttgttgtcattttaattcccattttaaaaataagtctacatttgtaaactctcttactttttattgaagccatttgagatttactcaactatcttctctctttcaaatacaggaatagataactgcctttatgccccataattgtctccaaccaacttctcttgtttcaccctatataaatcccttctgtcaccaatatacttacaaaaaaaaaacatcatggaaagccttgatttaaacattgctctcgatattgcatctcgtgttggtagtgattcctttgctgatctagctggtatgcttgcaaccttgaggtattatcactttatttcatgccatccagatgtcctcaagagcgtttctctgctacctttccatcaaaatgctgctcgtattaatctcacctctgtctaccggccattcttttcccgttgcttagaagctggcaaccctaccgctatataccttgagagccttcgcctagctaccaccgaaggccggattgacgaaggttttcatatgttacgtctcttccaatggacagacgcctccatttgccccccagaactgttcttcactttgtcactatttcagatcatcatagatcattacgatgatgccatcgcaacctcagatttctttgttgacttagttagctcttatgctgctgccgatgtccttgcaacctctgtcttccgtaatattctacagattggtcctcttaaaatccgttctcactccaacacatggcagtttgatgagttcccggattgtattgctaatggatgtgcaattgatactcgctgtaggacttgttttctctattggtattctgttatgtaccttatactttgctaagcccttgtaatatcgtcttctgtttccgagtaaccttctactcacctatcatttcattctgttcactttagaatgtgtttttctttatgttcttttcttctattacgaatccactaaagttctatttcttttaacaaaccataatgtcttcgcactaaagttctctttctttgaacaaacaataatgggttctccgtaaatcttatttaaatggaacatgtgtacaccctttttagtctgcacttggcaacacctacggacttacaccaagttgccaaattcccatttatggccacaactaccttccctttacttcaagtttacgccacgcctcactgtcacacctcccacatttatttacctcttctttacttaccttttactgtggcaccaactccatttattcacctcactaactcttctccactttcacactctaatactcctaatacgtagatactatatataggttgtgtatcttttgtaatgccctcacctctacaacactctactcatattctgcaaacgaacatggcatacatcccaaaaccaatcctcactgacattgtccgtcgtgttggtcgctctggctttcgctaccttggacctttcatagccgctggtagctttcggcagtccattgttttcagtagtgaagttctgtctgaagtcaatcttgacgactttgttttcaatagccgtcttgctaatcttcagtctcaatatcgccccttcctccttcagtgtttgagcaaagacaaccacacagcacagtatgttgaaggccttcgtcgccttgcacaagaacccccatcccaggactcacttgatatgcttggtactacagggccacacctcctatatgcacgctttgcctttgcgatcttcctgctgtgttgcggttcagtagaccaaggtttcactgttttagaaacctttttacagaaagctggaagctttgacatcgttgaagctcagattcgcaacatgggaaccagagaagttcgcccctacgcaaggtacatgcatttcaataggatcccctactgctgccttgatcactttactgagatcgacgtttgtagccattgctttggcttcacctacgcatgtaacatcgaaaaactttgttgaatgtgttttgctttatttcgctttgtctttgtttcttctttttgtcactagtacttgttgttgttttttagcaatccttttgttgtactctgttctctctagtacttttttgttttgtagcaaacctttcgttgtcagtagtactttgttcaatcttttttgctttgtatgttgtatcatcttttcagtaacctgaacccaatgtatgaaaccgtcttcctgttttaaatggcactttctttccgtgtaacctaagaagccatatttacaagcaagccagttcattaataatgtaacatttaactttagttccttacatccaacatacaaaatgaaagtgaaacataaattatcaaggtttgatggttaatctgatacaaacagagtgatataatagatgaaccgagtgaagtacaactaatacaagcctgcttcttttatcatctattccactgcttccagcctcttatgacaaacaagagttgctggatcccatcgccattctaccgtttcctccgaaagagatcatagtattccatttataacaaggaacaaaaactgtcttcactatgacctaatgctgccaatggatccaaaagaaaaaattatacgcccatcagcttcctagattatcattgtgaagtgcttactccgagatttgcctattcttcacccaaatcataccgtctgctaatatattgatgcatacaaacaccaaaatggctgcaacacatactttcgcttgcttactatgcccaaaaaacagattccacaccttactatatagaaaacaacattggctgttaaaaatgtcaacgctaatatacatattccaatgcagacaataagctattatttcaagttaatttgcataccttttcatccaacagagtcgcaaatggccctgttatgaccactttgagaacacaatgagcacttgtttcggccaagcctctgtcttttagaaccctgagatgaacaaaaactttcttcgcatgaccaatcttattgtttatatgcaaactgtatgtaaataagcagatatgacataacattaccccaaatctcttgcctgatgaagggattcttcttttcctgcggcgcccaggaccaactctcacagaaggtggcacaaactgagtatcttcaacaacagcaggaatatcttcatcagcctggtttggcacagggtaaataaattgctcatactgttttccaaacagctctaccatataaggctcgccaacaagcgttggaatatgcacattgttgatcctagccgcagcaagagcatggcaacagggaattaaaagcttctgaaattgtaaacaactgcagcttttcttctcaagatccacatagtatgacagttcatctgatacatgcacgtggtaagaccaagccaaaacttgactcacagccaaacctgcagagtcgacattgtgctcaaaaattagcttgtttgttgcaggtgtgattgtatcagtcatcttagctgcttttgcacgtcttacacagaaccaacgcatcagctttcctcggattccatcaaccattgtcacaataggcagttccaatatcttagctagagcgccattaagagcttcagcaatgttactactcatcacattatacaattttgcagggcaataggcttgagtccaatgctctttcggaattgcttctaagtactgatgacagttctg

SEQ ID NO: 26399 - DNA, 2317 bp, Arabidopsis thaliana landsberg
  unsure (1)..(2317): unsure at all n locations
cttttattttccaaacacattcatttgcagacattatcttaacaccatgtttcctgcatctgttaggttgctggagtactgtccatcacgtcgaagtttcttccaactgttatgaatcttctaagaaagcttgcggaagaagcgcaaggaaaaacaacacaggaagttccagacttatcagcttcccaaacctatagacagcaatctccatcacactccatctcaagcacaatatctgaatctgtcgcatcaaacatatcatctgctggtgatgatgcagaatactcaagcccaagcccggccctgtttcggagacgaaacaccaacaatgtacaagaatcagaaatctcacaaatgtaaaccaactaaaagtgcaagatctaccgtagaacaagtcatgtcagttctgacaatggtcttcataaaaatcacactgtagttctatatataggtagtgtcttgactcagaaacgaaatcttcttctttttttacaagtcgtattattatatcatcacaggcattacaaacagatacaacagtggagacatccacctcatgacttaaaattctgactgattatatcattttgaataaaaccatagatatataagtagctcaagttattggaatctaggataagctttccaaaaaaaacaaaacatgtttccttcaagctcattggattagtattgagtaaaggtttgttgatgtctgaaaattaaccacaccaattcattacaaagaatcaagttgtacaacacgtagctatagttaatatatatcaagtcgaaaacttcacaagaacttcgagaagtgaacaataactcgacagtatttccagattctgaattttagacaactttcttgaattgtttcttcaagacttgatcttgttcctaagttttgggattgttaggtctgcacctccaaacccatccattacacctttggccgatggaaactcacctcttgccgttaaacttcaagcaaaaagaatggtaaagaaaatgagcaaatgaacaatgctccacagaagcacatttcaggctttagttctgtagaataaggaacaaaaatctgaaaagagacatctgaaaccgaacatcatacttgcttcgcatgactacactcggcatgcctatcatctttgcagcagaaactccaggtttgccaccaccgcttagtacacagttatttacaggtactcttatgtggtccccagcagcacacaaagcccccccaatcttttcctatctgtagaaagtaaaacacaaaatgagaagccatcacttttcttgttgatgtatggaactgaaatttttgtaaagaagaagagaaagtcccacctctcagatgaggttgtgtcaatatcaacagtaagctttagcattgatgcaacttcttatgctatcctctgtttctcagcggacgctagtcagacaaatttaagatgatgagatattcactacagttacaaggaagatgttagatataaaataaggattagcaaattttctccgagctctatacctgctttttttacttccttcactagttgctcctctagacttgaagaaactcctttcccaagaacaagttgtccatacatactctgttctacctcattgtctccgataaccttcacatttggaagtctttcttgcccaagcatctcgacaatggatctgttcaataatcgcatcataaagattatacaatcacaaaaagaaaacaacagtacgattagcataaaaatctaatgtaggattttgtttatggtaatggattgtttagtagggtttcctcataagtactacttttcaccttgcatttttttggtctttctaaatatgtgagattatacaatcacaaaaagaaaacaatagtaggaccttaagtacttacagggctactttgtctccactcttgcagtaggctgttacgatagcaaccggtactttctccgtgtatgcattatcgataaatctacagctcaaaaaggtgaaatcttttgaatttacaacttacaagtacaagaaaaaaatctaaagttctttgctacagtttgaaagagatatctacgtgactcactcttgcactccagatctcagaggtaagcttttcgatatgagaaactcatccattgcatttttctgacaacaaacaagttggatctaatatattgatggagttgcgaaaaccttaacttgaaagagaatatagatagcagaaaataacactatgttcaagtatgcaagcaaccttttcttgcaatacactctctacaaaacgngctntatcactggttggcaacga

SEQ ID NO: 26400 - DNA, 1170 bp, Arabidopsis thaliana landsberg
  unsure (1)..(1170): unsure at all n locations
aatgcactttgactagcgtaatactactactaatagtgctggttcttattcaataatctcacatcgttgaagggcgacctttgaagtcatcgcgaatctctaatatctcgaagaaattcgctgcgggcaactcgaatctgtcgagcaagttaacgacagaagatcattctttggatgcatttcggcctaccaaccctgggaacagtccaggaattggtcactagcatgtgtgttgtggtgacaaactaagataagatgcaatggttatgtacttatgttcttagacattttcttatgacaaagtaagatgttgttgtgggtgcgttcgacgtgtattatctagggtttctgtgtttttcgtaattgtttgtaaccaataagtcttgaactttaattgaatgctttgtttctcgtaattggtttttttttttttcattgtgaacaaaataagcagtagttgtttaattaacaatgattggtcattaagaaaaaataaagtatattaatcttggttttatcaaattcatcacagcgttaatatataatatgcgaaatgctaactcaaccatgatgttttaatcccaaatctttttggaatcgcataaaggttcgaccgataataataagacttgtagttgataaattacgtaagaaacttacacatttcataactgataaaaacttgatcacacacgaacatatccatggacacattcagattcatattttaatgttaaacgaagcatttttttggacatgcaacatcagtttcgtttcaccagccgtaaactttattttgaaaaaaaaaaaattgataatcaaccatgtatatcatgtggaaagggtaaagcggcagctatatatggatcaattagggtttgtctttaataacataaacnnnnnnnnnnnnnnnnnnnnnggtacttctatgatttttttgtataatttcatcgttaattcacacaacattgaattctatatttacttcacagtaacttgcatcaccaattacggtatgctttatttgtaattggtgctaacagatcataatatacggacacaagatgaaattagagtatatgaaaatgagagaatgtgggaaatcacctactaattaagcggtagaaaagaatgtagaagtttatgcatttttttttaatagtgcatttt

SEQ ID NO: 26401 - DNA, 1403 bp, Arabidopsis thaliana landsberg
  unsure (1)..(1403): unsure at all n locations
gctcactatcaatcaaagaatctttgaatctccaccgttggaatcaactccaattcaaatccaccccacttaggataccacgtcagctttaccatatctaattcattggaacatgacaaaatttcatgtcgatcatagataatttcactagtttttttatttatatatattgcaagtcttatcataaaataattgtaaagcttaacgcaaaatttcattggtaccgacataactaatttcagtttcagatgtatatcttcatcttttcaaatgttgtgcctctgtttttttttttttttttgcaagacagacttctgtccaaaaaataagacaaaaaagacttgagagacaattctttttttcttactgtacaaattgccaaaagctttaacaagagttgtgagagttacaacataatacccacataaaaccgagtattcatggtttttttttttacatatactccatggaaccaaaaaacatgaagaaagaaaaaaaaaaaaaaaaaacagagtaaatactcgcacagcttctgcatgcagcatttaaaacctgcaattcgaaaacannnnnnnnnnnnnnnnnnnatgcatcagttaactctgcctttcaccaatatgtacggttaaaaattagtacttagaaagaaaaaaaacagccattatcacaacattgagtcgtctctcaactcctgtgtcagcttctctctctgccatcatcatcactgagctgagagtcgaggaggtccatattcttagattcctcatcaacaacctatgaagaacaagaataccatagctacttaatccgagtaataagtctaaagatcatcgctaactatattatgcagtattaacttccataaggtttagcattaactttcagaccaaagagtaactttacctgttcaacagactctggattgttgggagtgtcgaagataattggacgacaacgcatatcttcattcatcaagcttgagttctgaaaatgggctataagggcagattttccttgtatccgagcatatgccaatgaagctactttctcactgttgaacttctcccacttcttcccattaaaagcctgcaaatattggatgtttgttagttcacctttcgagtgatcttagctaaaagtataagaaagaaagcggagagggaaggaaacctcataaaatggaatgatgagttctggattgagcatgttgatgaatgcatagcccacattgcatttgttctgcaaaaccaaagatttattaaccgctcgttgtatcagttagtgattttggaactttgaancncnaagctattttaccttgaaatcaatgggcaaanagagaaaggtgtaaagtccttggttcttttcatcgattgcagctaacaacatcctcgagggggatc

SEQ ID NO: 26402 - DNA, 792 bp, Arabidopsis thaliana landsberg
agttacacctacttactaggtctttcacatgttaatgggccgagttcagtggagtgaaacccaacaccaatagtcaacccattagttcttaaattaggcatcaaattttctgaacggtggatctaaacaataataaccaaaggatatttctttcctgttacgttcaacagaatttcaattgtgactgaaatcatatatcattccatatacaaatcaaatgcaaattacttccatgtcactctttttttcgttctaggttaccgttggaaatttattatataagtttttgtttcatacagcttctctcttaaaatattatacaatccaatgacgacaaaatcaaaacacattattctcagtttgacctttctcctacttttcttatccaccgtcttctcatctcacgtaacgcagcgttttacatcctccgatgacatcactgagctcgtcgtcaccgcattaaaccaaaccatctcaaatgtcaatctctcttcctccaacttctccgacctcctacaacgtctagggtctaacctaagccatcgcgatctttgcgcattcgatgactgtctcgagctactcgatgacaccgtcttcgatctcaccaccgcgatatccaagctccgatctcattctccggagctccataacgtcaaaatgttactcagcgccgcgatgacaaatacacgaacgtgtctcgatggtttcgcttctagcgacaacgatgagaatttgaataataatgataataaaacatatggagtggatgagagcttgaaggagagtcttttc

SEQ ID NO: 26403 - DNA, 1080 bp, Arabidopsis thaliana landsberg
  unsure (1)..(1080): unsure at all n locations
cccttgtgttggccgaggcatatctgacatctcccacacttcacgggctggccagcaatggaaaagagtatgactaattgtctccctatcatgttgacacagatcacaaccaaggttaatgttcatgccatgagctcgtaaacaatctgaaactgctaatgcaccagataaagctctccataagaacatcttaatctttggagtagttttaacatcccaaatcttagccttaagctctttagtttcttgttctcgttgggatagctgaggaggtgcgtgtttcagctgagatagcagccaattaccgcttttaaccgtgtaacacccatcccgattgtaagcccaaatgtagctgtcccgtgacaaaacgttaggagggtatgacattattctaaccacatccagagggagaaacagctccgatagtagaccatggttccaagagccttggggggtaataaggtttgaaaccatgagatctaaatcaaaaagagactgcttattaaaaggccgacgaggtactttatcaaaaatccacttctcgagccaaacattcgtcgaaaggccatctccaatatttttcataagccctttagccagcaaatcacggccatggatgatactacgccatgcataagatggacgtgatccaataagagcatccaaaaaccccttttggttataataccttgccttgtaaacacgagctagtaatgaggtaggctgtgtaaggagacgccacgcctgttttgctagtaatgcttgattaaagtctccaatatctctgaagcctaaaccaccttcttttcttgttctacacatcttttcccaagatacccaatgcatcttcttgtgttcttcacaagagttccaacaaaaactcgtcatagcactggtaatttgttgacattgatactgcgttaatctaaaacatgacatggcataaactggtaaagccatggccactgattttagaagcacttgcttgcctcccaagtacagagaccacgcatnccnncctgtcnncctagttttctntattttggtgatgtaagctagaatgtcgcgtttaaaaccact

SEQ ID NO: 26404 - DNA, 694 bp, Arabidopsis thaliana landsberg
tctagagatttaggtaaagcaaatggaatttgggcactcggctcagaaacgatcgctcgaaacagggaaatgtgtgaaattgaagcctcgtatatcagattggtgtgaaatttagcgaacaggttactggaggtattgtgaaggtgcctgaaaaatttgggttcaattggagcatttttgactggtttgggcatttcaccgaacatgtgatgtgcggggatttagggtttgcgagagatgaccatttggggctgtgaaacctccctaaggagctcaagacctgcaggaatactcaagggacacatagcaacatctctcaccacacggattcacagaattggataggaaattgagtttggcacttaaggggtggaataggctttagagaactgtgaaacagagagagagaggagagggagagctgctcaccagagaggaggacaggcacaagcactggaggtcgccggtgagggaagatcaccgccggcgagagagatcaccggagaaggagccaaactgccagtgagcagagaggacccagagagaggagaagcagagtgcctctggctcgggcgcgggctggaggcctttttttaaaacgcgatatgggcgcaccggacagtctacagtgcctgtgcggtgcacaccgaacagcgcacaggagaaggagttcttgtgcgcgcgcgcggccggt

SEQ ID NO: 26405 - DNA, 1699 bp, Arabidopsis thaliana landsberg
  unsure (1)..(1699): unsure at all n locations
gccaggtgggtaggggagatgcgcctcagactcagcaccggctgctagcaaaaaagctggaagatccaataggcggtgcactcgcagcgctatctgagcagacagctgagccctgaagaatgactcctgaatccgtgtgctgaaaagaacacctgctgctgggtctctctgagcaggaagccaagactccacgggtatgtaccggaaccgacgtacccgtgctgcagtagcacgctgaagatcaaacagacgaggatccgaaaccagaggacggacctcagtctcatcacgctcccggaagcgaggtggagggacaagaggagctgaagcgggagcgggagcaggagtagcagtggaagctggcgtggcagtgggtatggctgtggaggtggatggagcaataagagtgatgggagcaggcagagtgggtgacggagtggaagcgtaggtgtgagtgcaggagcgaggccgggagacgagacgacgagcacggaatgcaatctggtcggatggaacatgcggctgatctccaagtgcggcctgcgcagcggctgctgcagctgctgctgctgcacgggctgctctgtccgtacgccgcttcttgcggccttccctgctgctccaagtaaactgtcttgcccttgacctgcctgaaggggcgacgaggatcctcatcatcgcctccccctggcgccgacacattcttcgtgcgcggcatcctgaactgatgactgcaaatgagagagaataactaagcacagatcgatagtatccgatagaaatagcaaatgatgagatgactacctggaaagctcacacgagtggtgacgatccaggcaggacaggagacggcacacgggcaatcaaggtcactgaaatgacagaagaggtgagcacgtattagtcacatagtcataagtatatgaaatgtgaataaatacatacacagagaaatatggcacaggaaacacgagatgagacgatcgagaggcaaacgacgtgaaaacgacgtttgaacgataaatagtgccataggaggtttggaattcgaattgaggcacaaaacgacatggaattgagccgaaacttcacgaataggtttatgagggtgaatatgagtgaagtgtgagcttggtttgaatttaggcgaagaaaaagagatttgggcacttggctcggaaacgatcgctcgaaacggggaattgagtgaaattgaagcctggaaactcggattggcgtgaaatttggcaaggatgttgctggaagtgttgtgaaggtgcctgaaaaatttgggttcaattggagcatttttggctggtttgggcatttcaccgagcacgtgacgtgtggagttctagggtttcggtgaaacggctatttgaggtgggaaaaccctcccgaaggagctaagaacctgcaaggacactcaatggccacaagggaacacatttcacaacttggattcactgggattcacaggatttggagaattgcacaaagggaggaaattggggtgctcanctgcagggatagacagagagaaagaaagggaaagagagagcagaggatgctcaccagagagggaaggagagaagcacgtggtcgccgtagagtcggtggtcgccggagaggggaggacgccggcgatggggagggaaccgccagagcacagagaccggggcagagaacagacgaaatg

SEQ ID NO: 26406 - DNA, 938 bp, Arabidopsis thaliana landsberg
aagtctctctctcttctttatgttaaaattgtttcatattcttttgtaaattggttgaattttttcagctaaagaagcagcttccgatgaatttatttacgacgagatgagacatttggaaatggataatgacgctagttcgaatgttctagaatttactaatatgtagaggttatttcagagaaataaccataataaaggttgtgtctgaggtgattcttactaagatctcgtatgaaacgtatgaagccctctatgaagaatctttgatagataaccatctaatagttaaggatctggatgaacgtaagtctctctttcttctttatgttaaattgtttgagattcttttgtaaattgtttgagattctttaatatttttgagctgatgaagagcaagcttatgaaattattaacaaaaatattaattttgtactatttttgtttcaaaaattaacaaattgttaatataaaattgtcaatataattgaaaacaatatatattcatgtacaatttaatgggattccaaaatgagtacataggtttaaatgagcaatcttaatagaccttaaaattaaaattatatgggtttaaatgggatgagttttaaatggaacatgcgtaaatggggtgggcatgcccacataaacattactaatacaaatacattcaccatttatgatgtgacacgtatgagattcaaaccattgtctaaaattccaattttggatctgagtctattggtttttggcaactttgatttacttttcggatatttagacttagatctcccgttgaaaatggccaaaagactcttcgttggaaatggtctgagattctaagaaatatttaatttttctttgagcaaattaaaatatgggaatgccataagtgataccttctctcactttgaatagagctccaggcgtaggaggtc

SEQ ID NO: 26407 - DNA, 977 bp, Arabidopsis thaliana landsberg
tgcctgagtaacattaggttagtgttcgttaggtgacgtccgcatgatgagtattctttgaccgagcacttgcttagattcaaccatcatctaggttgattcatcagcttcagctctgcagatcagcccacgcttggggtagacttgaggactctgctgcatcacgcgattaactcatggtcctgactggtatgcattacgcatatgaatgcatataaagagcgataacacgagttagtagtatacgactacgcacaagaattacgcttctcgaacctaacataaacatcacgaacaataaactatacacacgaaatacaattagcctaatcataacttatcagttaattaatttaattctgaactaatcccttaccttataaattatactacatctttataagtgattaaattatttcatcaacacacatgtctactaaaattctactcgatccactaattcagctaagtgaccggaatagcgaaataattcgctatagctgaatctggctcgataatcgcaagaactgtgaagtcgacgagagtttcgtgactcacgcaatttatcgagcaccttaataagcctcacactaacacattaatttattcaacgatcgaactattctgaataatttatcagcttactgtttccacagctgacacgaatccgcgagatcggtagcgatttttcgatccaagcaatttgtcgagcgcttgggggaatatcgcgatgttaactttgtcttcacctgattcttgggatctcttggggatgcacgaacgacgacgacctttgattgaagtctggagtaagctggtgtggtggggatcgagcaggggatgacgtgtttgacgactcgacggtaaacgacgcgacgacgagctgggcaggatccgagctaataggtacagtatcggacagcgaccacacgacagacgaactaagtcgcggcgaggtcgatgacgagatagggata

SEQ ID NO: 26408 - DNA, 1003 bp, Arabidopsis thaliana landsberg
aggatagtgtccatatgatttattaccaacaacggacacaacttcttggagaggtggtatgtctccaagctccaagggattcatacccttccaaaactcgtcactatcgatctccaagatggccaaatcacattcatgtgaaatcttttgaacttttgctttgtatttgatttgagagccatgtcttttgacgtccacgaatgtgtgatcattcatagccatcaccacatgagcgttcgtaagaattttccttccggcgattgcaaatcctagaacatcaatttcaagccataaaaataacaactttgaagtgagctttgagataagtatagtcacataccagtgcccctggatgatttttggtcaagagtcttccaaggtttggatttgctatactcggtagagttagagaatacctttacaaccgaatccagcaccaattcatcaagaggatgactttcttctattttcttccaccgttctagcttcttctcatcttcatgtattgagtggatatttcttcggcaagttaacgcaaatggaagaaacacacccctctccgctgctgatgtgctgctcctcctgcatatatatccgtatctgggaaactcgccggcccgtgttaccgttggcagtgaattggtcagtacattattgcaacttcggtaaaagaaaagagaagagagtaatccaggatcccgagctctcgagtaccggcccaccgtatgaacacacggccggaaaaacatatcaagcttattggaaaatcgaacccctggttggtgctactgtttaaaataggaagtccttttttctcttccttttctaatcaaattttttccattttttgtcttcaaaagtttccttaacttatcgtagagaattggtttgttttttctccaaggaacctttaaccttttttttttttgaaggttaaacaaatcatcaaaggctttaccagcagattcatttttttaactagcggtagatgtataagaccacc

SEQ ID NO: 26409 - DNA, 1646 bp, Arabidopsis thaliana landsberg
agatggactctgcatggcttccaagcaagattccagcatcttgacaagaactaatttcaaaacttcaatggttcttcctgttcttgttgttcttgttgttggtattctgtctcttgctgtgaagtaagctcatctttctcaccctgccaaactcatacaatatctgacagagcaggtctaagatcctctgctactaatttctgatactcgagagtatctccatttgatttcttcacttccactaaatgaaagtttggcgtcacttgaaatatttctgcatccatcgacagaatcccttttcttccttcttttaatcgttccaatttgaacaaacctgcttctcgctttcttatgctcagtttcaatcgctgtgctacttccatccagcttagatatgatcactgaagcaggtttctgtgatgtgaatctagattctctcttgttatcatctccaaacagtcctgccagatcaaacccagcagacaaggcaattaaatcaaaagcgttcaaatttgtaggttcgtctgtatggttttcctccgtgaccctgtctccgttttcacttggacctgctccattctcacttggacctgctccgttctcatttgtacctgcagtaccagcttccacagagtttatctctttgactcgtttctccatctttttctgtttcatatgtaaaccttttctgaaccaagaactctccctgattcttgcgatggtgattctagtttcagggttagggtctagcatcttacacaacagcctccgtacttctggagcaaaccagcttggtgccttaaaatctgcttttcctatcttcctgtacatctccatcagattggagtcatggaaaggtagatagcctgccaataggacaaacaaaaccacaccacaagaccaaatatctgcttttgtgccatcatagccttttcgattgatcacttctggagcaacatatgcaggtgtaccacaagtagtgtggaggaggccatcttgtctcttgcagtcagcaagggcgcttaacccgaaatcagataccttgagattctcattatcatctagcaataggttctccggctttatgtcacgatgatacacctctcggctgtggcaaaaatcaactgcgttgataagctgataaaagtatttccaagcaacatcatctctcaatttccctttggcaaccttgttgaaaagctctccacctttacaatactccataacaaagtagatcctcgtttttgttgccatgacctcatatagctccacaacgttagggtgtctagcaatcctcataacagagatctctctcttgatctgttcgataagcccaactttcataaccttttccttatcgatcatcttgatagcaacactctggttagtaagaatactccttccataatacaccttggcaaaagtaccttgacccaataacctcccaacatcatatttatcagtcaaaacacttggcttattttccatctaatctacaaacttataacaggctccaaaaaaaaaaaaaactacttgatccagagatagctcagagttggaggtagctcatgagtcataacctcatgagctcgtgcagctaatcccctagtgataggaggacacatcctccaccatttctgagtttc

SEQ ID NO: 26410 - DNA, 3557 bp, Arabidopsis thaliana landsberg
gtacattttacttctttgggtggggtcatcatatgcaagatttaatacgaaggttacaacagatgaaatatgtggcatgtgcgcacgcagagcagtcaatgcgtcattttgctatgagttcatgaaatcatcccctcaagttgcaacattggatacttatgatctcgccaaatttttgatcaattatgattttcaaaacacctttgatctaataaagcatttccagtcactcacaaacagcataaccgatcccagttctaagggttcttatgagctatgtttacatcttttaatcttatcaatcctcttgaaaccgcacttaaagctttggcaaccaatgactatgacactttaaacaggaatgttgatgctatgtctcaattcgcgatggaatgtgaaagcgagctgtcaagtgtcatcaagcctattccaaagctcttgaaaagggtttctatcgtcgaaaatgtatccgacattatttttgtaattgtggaatgttttttaagaaaagaagaaacttcatgtaaggaatcagtatcaaatctacaataataaattaataatcataatgttgtttggtatgatgttgccattaccgatttacaccgataattaattgttttagtgttaagaaaaatcgaaatccaccacaagagcataccaaatcacgaaaaagcttgtttgatagatcggattggaccggctttcgtatttgaaaaagtcatcgttcacctgtgaaaaattacgcaactccggcgaggactattttcaactattggcctagccccaattagtccaattagtaatgagctttaaatggttttctcaagtaccgggccaagtaaaagcataaaaaaagtagtggaccttgagaaaagtcatcaccagctttccttcctatgccacacaaacgtgttcttctgaatatgagtcaaacacagagaagattaggagaacgtggaagaagaagccatggactctatcgtctccagttcgacgattcttatgcgatcatatctcactcctccggttcgttcatgttctccggcaacctccgtttccgtcaaacctctgagctcagtccaggtcacctccgtcgcggctaaccgccacctgctttcgttaagctccggtgctagaagaaccagaaaaagctctagttcggtgataagatgcggcggaatcaaagagattggagagagtgagttttcgagtacggttctcgaatcagcccagccggttttggttgaattcgtcgctacttggtgcggtccctgcaaattgatctatccagctatggaagccttatctcaggtttgatacatttaatctctcttttgtaatcatcagttcttgctggagaatcgtgagagtttgaaattgaatgagatcgtcagagattttcacgcatgatttggtggtacaaacttgggatttgagattttatgtatgagaaactattgttaatcatataccattagctctacaactactaaaaatgtcagttagtgactactgtttagagttgagcttccttttgcaagtgcttagagaataaattcagttctgagtgtttttagttgtcttggttatttaaactcaaaatgtttcctttgtttctcaggaatatggtgacaaattgacgattgtaaagattgatcacgacgctaatccaaagttaatagcggagttcaaggtttatggtttaccgcatttcattctcttcaaggacgggaaggaagttccagggagcagaagggaaggtgctattacaaaggccaagcttaaggagtacattgatggtctcttgaactcaatatctgttgcttaatcgtctctctccccaccggtattcttctgtctcaacactgtttttttaatgtaatcaaatctcttcaattgtgatgatcttcatccccggtttctcatttgatgtgtatatcttgcaacaaattttacgaatagaaaagagttgttctcttatcagggaaatatgtatttaggcttatttgcttatgcttgcaacaaatctagttaggtttttgcatttcttacagataatctcatttgttggtaaaaagaaaagaaaatcaaatgcaactggatgccaagaaacaaattctgcttggattttattggaatgaatcaggttaaagaattcaacatttaagattttttcaacaacttccattcttcttcttcttttcgtctcggctgcagattctcacatcttgctgccttattttcccttgaaaaagcaaccaaaaacccgtgcttaagcaaaaccaatgcctagaactttgaaacatttcactttcttggctcttcaaacctccttgacgtagttttcttcacctcctccaataacagcatcatctggcatgtaacgtttccagaacggatgttgcttccatactcttcccatttcttcaattggaaccccttttgtctccggcaacaagaagtagatgaagacggtcatgactgcaaccattcctccaaagaagtagaagagaccaaacttcatgtggcaaagcatcgtgaggaaaaactgtccaatgaggaaagtgaagaacatgttgacagagacgttgatggcttgtcccgctggtctgatttccaatggacagatctcacttggtactaaccatcctaatggaccccatgaccatgcaaatcctgcaacatacaaacatatgaaagctaggatccaatctgctgttgcaggtgttaaggtccctgatcccgtggttccaaacttcataccaatcaaggtaccaacaacgatctgcaaaatgacccatcaaacaatatatgtaaggtacgcaatcatcatttatatacattatgaactgaaaacgtttcatttttccacatgtatacgcaaactcggaactagcatttttacctgggaaacaatcatttggatgcctccttcaaggaagagaatccttcttccgtacctgtcaaccgcatagatggagacaagggtagagacaacattgaccgcacccgtaataaccgctgagatgagcgaggcatcatccgcaaaaccgagagtcttaaagagaacgggggcgtagaacatgataacattgataccagtaatctgttggaagaaaggaatcgcagaacagaaaacaagagcgggtctgtattttgcctgttggaaaatgttcttccatggattatccactttcttagcagcctcacaagcatcacacagatcttgaaactcctcatctacgttatcagctccacgaatcttttgcaacatctctctcgcttgttcgtacttgcctctctcgagcatcgagtttggtgtatcgggcaagacaaaagatccaataaccataataactgccggtacagcggctaaacccaatgatactctccatccgttcttagccatttgagatgttccgtagttgattaagtttgcaatcaaaatcccgatggttatagccatttgaaacccgatgttaagtgctcctcggatcttcgctggagccatctccgagagataaacaggcgtagactggaaaaacaaagttaaa

SEQ ID NO: 26411 - DNA, 2482 bp, Arabidopsis thaliana landsberg
aacaaagatatacacatgcgcacacacataggattttaaggaaaaaatatacaatataaaatgccaaagtagggactttgaacccaaaaatccaaaaatgttgtaattagctgtataattcgtatcctggaccagtttcgctgtatggtcgagtaataatattatgaaaataatttattttccccgtaacaaaagacaaagaaagatattcaacaccttttaattaatttataatggctgtcaaaaaaaaatgatttctaatgccaagtaggcatataattagaaatatttacggtcccactataattaaaggacacgagcatttcgagttatttctcacccacacaaccccacttttaatttcacatttttaaagtctactgatactatcacatttaattaagggaaccagcacctcaattatttcaattaacccttaaatggaaaagaaaaagaaaattttttaaacttttatcttaaaatttaaattattaagttttgaggatcgtacgtggaaagcaaatgatgagttaattaaaagaatcgtaccggaattgttcagtgtgtggcagcttttgtttacccttcatcgaaccttccgccgcaataatatcatccacatcgtagagataggacggatctgccggcagctcgagcttcctattcctccacgccgccacgataaccgcagcaacctgcgtcatcgggctaccgatcaacttcttgaaacggtagcggtttgttccggccaagaaaacgctgagtgcaagcactatcgcaaacgcgcaaattccatagccccatttgcgtccaacatcatcttgtacgtagacaaggaccgtcacagctaaaagagagccaacgttgatacaaaagaagaaacggttgaagaaatatgtcattttcgatcgttcttttggttcggtctcatcgaattggtccgacccgaaacccgagacactagccttcacgcctcccgttcctagagcggtgaggtataaggctaagtataggaccgtcagttgtattccacttgcttgttcgcagtgagacgacgttgttggattgcatcttggtggtcgaagtcccggtatgattgttgatagagttaagattgaaacaccctgatagcatcatagttcataacacggatattatttttcggaaaactataacaaaaataacgacttatgctgtttactatttcgatttgtttattgactagacaatatttttattttcttcgttttcttgggtataagttttggtaaggagaaagggacttttgaggtccttaccgtggcttggattgcggcgaatatagcaatcgttaggtacctatacaaaacaaaatgaatgaactcaaattaatattttaaaaagaatctgaatgattttagttaagtaaatataaatatatttatagacaaacctgccgagaaaggtatcggcgatgaagccaccgaggagacagagcatgaaagaagttccgaggaaattggtaacggtgttagccgcagttgcattgcctaaatgcatagttcccgtcaaatacgtcaccagattaactccgatacctaacgtcgtcagcctctccacggcctcaataccttcacacaataaaattttgttaatgataaagttggatacatcgagaatacataaaagaataagaatgatagccataagaaacttataacttagtaaatgccattaaaaagtttcaattcttgtcttcagcatgtatattgttggtagcttttctctagaacttttattatgtgattatacttacaaagaatcatggcggcgctggcccagccgccggtttttgagcgatcggcgggacggccttggaagtcccaagcatcaagaaggatatcatcagatttagtttcaggaagagacatcttgaagatggattaatgatctctctcttttttttgcagtttttgggggtgtttgttcttatgtaaaaggctgttttgtttgagagctcttggtttcttttgtggtcttaaatgtgttcgttgatacatctatttatactgggaaactagccaagttaaaaaagtttttattgttttattttgattttttattcataaaactaaaatattgaagaaaaaagtgacacatgtgtgactctgatgagtgttgtttgattggggagagaataattaataataataagtactactgtaactgtagtatatatttgtagaaagagaaaattgagagagagagaaagagaccatacctaaattttaccacttcctctacctttggaactgtgggcttgaacttttaagttgaagtcatcggtcattttgtcagtgattcaatggcattagccattaaaagcaccagttttagccaccacctgttttacatttgttctatttcttggaaaattattttacttccatgaaagataatacagtatgttttttacgtctgtactatatatggaaaataattc

SEQ ID NO: 26412 - DNA, 2025 bp, Arabidopsis thaliana landsberg
tgatttttgtttggttaaacagttatgattctataatgattaacaacatttgcaacgtgaaatttgccaaagctttctttttgaatttcatgttaaattagattcaaaagaaaacgtttttacaacaagtgcaactttaatttagattacaatagcagagaaaagattaaactttgatgagttgagaacttagtgctttgacgcaaaccacttttggagaccactcgcataacgcccatcgcccatcgcccatgagttgccaaagctttcattttcggacaaaataaactgtaataatttgtgggccattataaataataaacatgtattattgcattgactagtgcttgtcctacaatgatttccattatgataataatataatactatatactattagttaattaatcacattttttcagaaactatttatttattttctagagtataataaatcatagttagaacatattttctggaatatattataatttatagtacttttattttggctttaatggttgtggcagatagaccaacaaaattgtttgtagactgaaccatcttttggtttttgtttaccattcacaactggcagtacgtaatggtgtggacgaaaaaaaacataaaagaaaatcattggcgaaccaactaattacttttgatgtgtagtagattattgtccaatatatgatatgatggtttagtccgtttcgttgacaacatccattctcatatcatcactagcaaagttgaccatagtgcgctctactttagattttgggcttcattagatcggcccttaagttacggttatcaaatttttggtccacaaaaaatatgagtctgatacatgtcaaggtttacaataacttcaacttaaaaccacctaataaaataattatagcattggtgtgaagtgtaaacactgaagcgtgtaacaggatgattgagcaacaagtcaggagtctccgactgactcggaggctttaccctagaggccaagattgtcttagctggcttctgctggctccttatgtcaagtgtgttagaataatcatttcttatatttctttcatacgcatacttcgcatattttctgtactaaaaaaaaaacgcttggtctgtaagtcaaggagaataaaactatttaaaaactcgaaacagaccacgtttgcgtctaaaacgcgtggtttttgatgcggctcacgacgcttatgatatcgagccctatcagaagcattattagccattaggcggctccaaaccacacttgactcgttttagtggctccataaagtttgaccttaccctcatgattccttcaccgtcacgttaaccaaaaaggctacttgaggtcaaagcaacatcgcaacactacaacgacgactctctcatctctcttttataatgcttaacattatcacttcttcttttatatatatatgtgtgtatatatatatatatatatatatatatatatatatatatatatatatatatataatccaccattttacaactttcatacaatttccattatctgaaatatttttaataatttaccatatatcaatattttgaatatatcataaaattaacaattttccagtttttccttctaaattgtctattagtagatagattcttgttgaatttatctatactatagaaaagttgaacctgtttgcttcttgccattagttaacgtttcttgccattagattagttgacattttttagatttaataattttatatattttttattattgtaaaatggaaaaaatcaatatatggagacatactaaaggttaaaaaatatcaacactttctaaatatttttcatcaaattccaaagttttatttgtaatactttactaaaattataaatgaaatatttaaaatatggaaaatatcttaaataaaaatatggaaacagaataagaattaaaaaaaatctaaatattaacattcataatataaggataatcaaggaaataattctttataaattttactaaaa

SEQ ID NO: 26413 - DNA, 5172 bp, Arabidopsis thaliana landsberg
  unsure (1)..(5172): unsure at all n locations
caacattaaatttatagattttccaataacttttatatgtttttcctataaaaagcaaaaggatagatagtagaaatagaataatatcttaaatattaatatttgttacaatatacagctaatttaccttttaaaatagggatttacctaaacagtctcaggataatatgcagcgaacgtcctaacatatttacaagtgatccaattcgttttacttagattgtagcggatcaggtccgggccgaatatccaattatccaatatccaatcaaacctcatttacatgtatgtaatccaaatcgttttattagcggattacgtcggggctgggcttagccttaaaacgagaaagaggatttttctgaactgaacaatgaacattcagctttcaccacgaatatttaaattcagcatctgctagttttaagatgttgaatgaagcatttagttaactaagacatcagactgcaaaactggatagaggaacaaaaaaaaaacaagttgaatcaactattgaaatagtttgacagaattcaagatccacaaggcaaaactatgttaaacagagacaaacatcctcaaagacgtaacaagaacataggaaaacaagacagaaagctctgcttgaaggcttcagacacgcggtgcagctgcagctgcagctccaggtccagcaggacgaggtgcctgtcctggttgcccaggcttgggagtatcctcctgatgatctcagaagagtaagtcattcatgcaataaaagatagaacaaaacagtctcactgaaagtagttttgttaggaatgaagtgaaggtactggtttgcttaatccaccaagaaagtctacttattgaagtcgtaaagactatatattgaaacaactattatagttcagaaggtaatcaaacccaaaatttggttccagcgagtgtcaactatacattgtacatgtccaaaaaaaccagtttaacctcaaactatcttcataaaccaaagacaaaatggagcgagcagaagtaacaaaagattgagaaatgaagcttaaaactattaatgatcattgagtcgaaaaagagagagagatattaccttgcgtctggcaaaacggggtggtggggtacgaactctacggttggtgcgggatcggactctcacaacgtgagaatggatagcacacgagacacagtactgcgtcttagcgtaaagctttgggagagtgtaacctaccaatgcaatacaaatacaaaaccaattacactctgaagtctcaaaacaaaattccaaatacacaattaacaatgcataacaagaatctatcaacacataccttcgtagacgctagcttcttgaacatctctaatagcagcctgctcaacaatgttccttacgataaatctcttaatcgccttgtcctatcaacaagagagccaaaaccagatcgatacattttcaatcttaagacaaatctagaaccgggaaatgattatgtaggagaatgaaccttggggcaacactttccacagttggaacacctgattggtttcacatgaccacggttatgcttgttcctgccaccattcctgcgcttgaaagtctgcaataaaaagcaaactcgaattcaatacacaatttcgctttcaaaatcactgtgagcttgattctgtgttctaaactatgaatctaacaaagaaggagaaaacttgccatgtttatgcagagagcttcaaaagcctattgcttcagttctctttgatgcggcgacagggaagaagaagagtgcaggaaccctaatatttgcgaaatattctattatatatgcagactcttctaggttttattaggaatgggttatatttgggcctgagcaagcccagtacattgaaactttgagaaattaattcactaaaactttttaaaaatttgtttacatgttgaaaactaatcgtgtctatgcatatatcatatacgtcactggatgtcgaaactaccgtaattttttatgggacatgtgaatcaggagaaaaatgatggtgctgcggatatgctctcaagacatgcttctacgatgtacccaatatatcaaacttttacattaacaccaagttggttggcgaactatttggaccacccttttacagtctaataaaagtgagatgctaagaagaagaagaaaaataatctactcaattttaagagtactgatttatggaagaaaacaaaaaaaactgctccggaaaatttcatttatataatctcaaatattaaactttaattattatatatttatagatttgttacatcttatatatttacaaatatttcatttagtcaaaccagagcaaaagaaatatagatttatttttatttttacttctaaaacaagaaaaaaaagcttaacaaacgttattttccaaggtacatacatagcatcttaaacttaatattgcatcttcggtactgccgtatttatcaacaagacaagaaacccaaaaaacaaaagctactacagacatataaaactcagttaatatcaagatcacgagtgtgcttctcgaagacgtccgctgcatatttccagttgattacagtccatatgttcttcaagtactccgctcttgcattcttgtactgcattacccgcacccattgatcaatgttaatattcaatcaaacagttcttttactaataaaaccgatattactctacctgatatcaaatcaaggagtattataattgagattagagtacctgtggatagtaggcatgctcccacacgtcaatcccaattagaggaactaggtgtgatcccttagtcaccaatggatcctgtatgttcgaccaatctatcaaatctttttcttttctttttcccaaatccttgcgagatagaccatgttacaaattagcttaatcactacattaatctacctggttggctgtggtttcaacgacaagtctcttaagctctctgtctaatccaaaccactataaaacaaagaaaatataaacattggttttatatacacaaggaaatacaaaagttcctgtttattaacaaaaatgaaattatagatatttctaatactacactatacactaaccaaacttattgtcccgtttagatttttctttttaacaccttttttgaaattaatgtttttcaatttcatttcgaacagagtcctatatacatcacatatccaattcaaattgaaatgaattttgatattctgtcagaaatttttataaactttcatctgaaaaccaataattgtgttcccaacattgttaatgagattctgaaaaaaaacttaccacccatccagatccctgtacagcagcgccttccgcgttcattttttggatcaatccttctagtgatccgaaatgagcatcgatcgccgaagccaaaggatcatgcgggggtttgccacctccttcctatatatcaatttgaccccttacaagagacaattaagctcatcagaaatagacacatggagtgacgacaaaaaaacatttttgtacatgaaccggggctaggtttttccagaagattgcatggttaacgtgccctacaagcaaagcaacagaaaaaaaaaatcaaaatccttacgatcaacaagcacctattggaagaatttaatgagaacttagtcgtttaaagctagggtttgacctccgccgttgaacttgatgaggctttggagtttgacgacggaggagtgatcaccgtcagccatggcagaacgaaggctgttgagggctttgttgtactgagtgacataagtctggtggtgtttctgatggtgtagccgcatgatctcctcactgattgctggctctagcgcatcataagcatacggaagnnnnnnnnnnnnnnnnnnnnnnnnnnnnncgagacacggttccatggttgctcctctggcgtcgtgaagagtcgtagcgaagatggcaacgaagataatgataataacggtggtcgtcatgatctttttatatatgtagacactagaaaatagaaataaagcgagaggtggatttattcagataagtatataaaagtattttcttagcaaacaaaagtatataattttactaagccacgtaaactttgactgatctacttgtcaatctctaaggcttcatggctttaagcgttttgcatagttgctcgatttgtgtcgcaaccttaggttgatgcatatttatgttgtttttgcatgtgcttttgtctttgtgtagtttatggcaggagaaacgtaaaacgcacctaacattccaaacctcagtccaatgatccaatccttatatgcgaaagatcaacgcacataagtataacaatagtttagtggtctgggccataccgaaaaggccgaaacttcctcaaaaataaaaaacgacgggcccaatctattctaaaagacattgtccaccgtggaatctgacgtggcgtatcttatggtctagattataaataacagagatgacacgtgttcaccacaatttaaatccagtaccagcgtgtgcccgcccaagccatgcacacagctaaaccgcgtcgccacgttctccatctcgtaccggcttcacgtaatagcaaccgttagatttacatcgaacggtccatatctgatatctaattagtctatatcgtcaacactttacagggaataatcacctacttaagccacctcagacttttgaggataacgtgaagaataagataaacgcgatttctaccatctctaaatctcaaccgtccgatcaaacaacttacacaacttccgtgctggagaaataaaaaaattaggtatttaataattcatcattgccattggattgtgtgtggctgcgtcagtaaaacgtattcttaaaagcaaccattggtgtgattgactctataagagaattcgtcagcgtgaagcaatctccaatctaatcgcagcatatcttctccgattcctattcgtctctgcaattgaatcttccggtaggcgaagatggcgacgtctgcgaggatttgttgcggaggaggaagtgcatgcgccgttcgttgtgatcgtcgcacgttaaatttgaattctcgatcgtcatgtgttgttccagtgacgaatcgacggaatatgtgtgcgatcgggaagatttcgatgtcgatggaggatttgtcacc

SEQ ID NO: 26414 - DNA, 1599 bp, Arabidopsis thaliana landsberg
gcacacgatacaagtatatgtagggactctggttggtaggaccataatgttccatcacaaaaatctgactcaatataattgatatatacacataaaatcttttgaaatactacttgctacgtctacatgtaaaaggaaatgagtcaaattacggtaattgacacaccgacaaataaatattgaatacacgtatagcaaaacttttgtgttgaaagaaaacaaaacaaattgttttatgactcgagtgttttatgattaatctcgtaacctgtatcttagtaaaagagaaagtattacttttataaagatgctaagtaatatttctatcattacttttgtcaaatgatggacaccgtgatactttgtcatacgaaactatgtctttgtaattctaaatttttcgaagaaatagaaagctgtttacacatgattagttagtcttagtcacaaattaggttaagaacgtgagttatgaattgttggaccattcatgtacaaattttttttataaaacaacattatatattacgcggattttaactcgaacgatgataacacataaacatcgttagcacaaaccaccaaaactattgaggattcttgattgatcttaaccaataaagttttagaagttaactagctaatcctctcaagatcatcgatcaacattttacgttgacttgagggaaaaagtctcccaccccaccccaactacaacaaaatatttaaaagagaaaatgactaataaatttagcaaagaaaaaaaccacaaacgggttaatgcctacgaagctttttagccatgttcttgcatcttaatcagacaaccctaaaaaatgagtttgtttcttgtttttggatttactgatctcggcttcaaattttctttccaataaagaaatcttttcttcaagaataatgatctgtctccgatatcgggctttatctaaacatggagataagggacctgaagaagacttcatcacaaggaatggttagacccatatcatggtcaaacccaaattcttcctcagctagtcggagcaatgtttggaactcggagtgatggagccatgagataggaacgatgtaccgacttcggttcggtcccacgtaaaccggaaaatgaccttttggcacgtcttgaggaagatcatcttcttggttatagtaacaaccatttacgttcttcatctttcttagactcgagcatctctttactatttgcttgatagatgctgcttgagacgacgtcgctttgctcgatctctttattgccattgttcttttttttcttttgtggaattagtttttgcttgaagaatgttatatggaggtaagaggtacaatggagaagtatttatatggacagtttggaaggctaataaattaatagagaaataatcattaatgcagtatatcactatacttttaaattgggggctatagtttttttttcttcatcaaattgggtagtatagttcgttgattataattaaataggtttggctacttatgacgttgaccaaatagtggcaatattttatgaatgttataacatttaaatttgcatggataatatatatatatatatatata

SEQ ID NO: 26415 - DNA, 1573 bp, Arabidopsis thaliana landsberg
tgaaagaaggatctttctcacagagagtttgataactctgttcatcacattaataaacactcaggtcacacgaattcgaaagaaataggaacaagcaaaatgtgagttagtaaacaaaataaatggaagcaagcttgccttcatgtacctcccagcttgcctcataagccaaaccggaggtctatcaacaacttcacctttaacagctctcagaagaagtggctcgctggttgccgagacttttctctcggttacagtagttcctaaacaaagaatttgaatcccattaagcataaagattaagactcgtaagcttttgcacattccatgatcaaactcaattcagggaaaacaaatgaaaccccatagaaacgttccaattctagaattaagcaatatactttacttcgaagaagcacgagaagatcatatagcttctgcagaacaaactcgaaaaatcctaaatttctaccagagagattattggtacaagagaaactgaaagtttcttcatattaccattgtacccatctattgaatccataacagattaaccaaagcaatcaattcaagtactacacgaaacacccaattcgtttcctatttgccaaaaagagagaaactttgtggaaaattcacaactttataactacccagatattaactcaccaaaaacttcatcgaaatgaatcaaaattgagagttagaaataagtaccctcgacggaacatcaaactaaacggcatgacttggtagatgagagagattttctgcgagatatggagagaagagtagaagaagaaagagactaagtagagacttgaaggattgacatttttcagatccccgagacaatctcaaaggcttcttcaacgaggtcaaggtgttgttatactctgttttgagatcttagcatcttctctctttcaacgagatggggttaacgtcttcgaacgaagaagatagaaaaaactttgatgataagagatctgctgacgtggattcaacgttgcctagtcagcaactatctctgccacgtcattgtttggtttattctaatcatcttggttcaatttggttcggtttcattactaagatacagcttttatccagtaatcacatttctgcagttttcattattgttttacaatcactatcaaatttgttgtttactcattagattcaaagcattatgttttatttaaagactaagattgtatatttattttttggaaaatcaacaaatataaaagaccggaaaagcaatcaacaccatatcaaaccaaaatgaaaaccaattacaaacacattaataaggactaaaaatagaaatagtgggaggtgtttgtttttaaaggctggattttttcttgctctgcttctgcagtggaagtgtaatgtgtatgaacccaaactttctcctctgcgtgacgtactgtttctcttcatgtacctcctctttctctccccgtgccgaaaacttcacatcctgctttagttccttcaacatttggctaaaattcacatttcgcctcggtatttgcccttcaaggctctgtctgtgggagcaaca

SEQ ID NO: 26416 - DNA, 1139 bp, Arabidopsis thaliana landsberg
atcttaattagattcttaatcatcctcttaatttaactatacatagttgatagtttaacaatctcccaaagctcctcatgactttgaaacttaactaggtattcgcagtagttggattaaaaaaacagaggatttagatggctaattaaatcccttagattaggctttatgagtcttttgatgttcttggctcttcgggatggagaatctttagccgttacttgatatttctatttaaggaaagttgggtttttgcgagatggtgacttgaatttaattttatatgtaaagatggtcgctttagtttcttgttttggaaagttatttgatctataacagagacccaaacagagaattttgaaagaaataatctaaactccagttcactaaaagctggaatttctaccaaaactgataacattcaagtaatgttttttgcatttattgcagattttatgtagacaatgttccgatcagagaagtcaaaggtacggcgtcgaagggcggtgacttcccggcgacgaatgtctttatattcaaccatatgggatggttccaaatgggcgactgatggaggcaagtacggtgtaaattacaaatatgccccttacgtctctcaattcactgatctgatcctccacggctgcgccgttgaccccaccgagaagtttccgagctgcaaagatgaagcggttcagaatctccggctagcatcggagataacggagtctcagaggaacaagatggagattttccgacagaaacacatgacttattcgtattgttacgatcatatgaggtacaaggtggttttgtcggagtgtgttgtgaatccggctgaggctaagcgtctcagggtctatgatccggtcacgttcggtgggattcctcacggccaccgtcgtgggaagcatcggagcaggagccgattagctcgaactgagtcgatatgaatcggtgtatattgttcggctagagggcatttttggcattttctgtcttgtataggaatactatgaattatggactgaataatggaatgacaccgctatattttgatttcctccattttatgaacattatcgttttaacataataataaaatttcatttttctataagtaaacaaaatcgggatta

SEQ ID NO: 26417 - DNA, 1049 bp, Arabidopsis thaliana landsberg
ttttgttatgacctaggtgtcttggccataaggcctgaccattattggcgagaggctcaagtcaagcatgcgatcgatcaccgaactcgagattcattaattaggtttggcagatcaaggacaattcaggtgatgatgacgtttaattcattcaattcgaagacgggaagcaaaacttgattgctttaacatggattaacttaaaacttcaattaaggcttcttctcattgagaaatgcctaaatctttaagatacaaacctgaagctaccttttgtagtgagtgagagaacaaagacgtgtggtataaatgagaaatgtaatgggtgggtccaaacattttgcagtgaccatctcgtggccggcggcccggcgcatcaatttttccagacaaaacttaaaaaacattttattgacatgcttagctgctgtctgataaatttatcatatgacaacgatataataaaattaaataaaaaagacatttcttttattaagaaaaggccaaagaagagtgtccaaaagagtacaaatcaacaaaggcaatgagagaaaagaatcattcttccaaaattcccaattgcatacaaaaacaaaaattcaaaatcaaatctttctgttttgttccttctcgtataaagcaccaaaacttcatcccactctcaaacccaaaccaacaccgacaccaacagcagacctgtgtatttggggaaccatacccaatgacacatttcactaacaatttcatccttccctcctaatatacacttcctacataaagatagaaattttcattttgttacttcttaaggatggaccgacccatcatcatgggtcccgggagaattagatgaaaaatgcaaaagaagaagaaacacttttgaaacacataaatgcaaactgacgacgctttggggggaaaaccgagcctaacaaaacggtaaaaataaacagagagatcggatgggatggaatttaggaggaaagcatggattggagagcgagctgcctgttcgggttttaagcgttgaccatgtttgaggccaacgc

SEQ ID NO: 26418 - DNA, 1314 bp, Arabidopsis thaliana landsberg
agagaaaaaataattaattactaatttcggattaatcattatattgaaagaaatagagcaaaataatcaaaattcattggattatcttccacgaattttcggtgcatgatgaattgcttatgacatgtgttatttttatcttataaaaactctaaattttaaaggttataaatttaaatcactaattacggaataagtttactttagttattctactatatagttcaacaaacactctgtgaaaaagttttttaatcaaaggttttaagatatatcatatatttaactatttaagcatatcaaatgtgaaaattggtcttaggttatgatgtatatccttatatagtaaaagtatattagtctaaaaatttagatttaaaaagtgaactaaaatttaaaagcaagctgaattacataaatcaagtgacaattgtaatttgttgtgacatttgtaagttcataatggtacgtgtcacgctatgttaattaagtttgaaatatgagatgtaagaaaaaagtgatcaaaaattaagttcttttggagcgttaagtccaaaggtcaattagagcgcaatatcagtccagaaaagtggatgaaaaatgtccatccatccatcgagaaatatgcttaaagtaaacgcttacttttcaagcgaccttcacggtattgccgcagtcaaaaatacgcggcgactgtttggttggtatagtgacgaccccctctcacgcggattcattaatttcctatcacaaataagaaaaaagaaacgtgaaattaatttgttaagtaacaaaaacaaaaggaaaaggaaactgacaagaaacgctaaagtggttccttccttgtactcaaaaaaacgttaatttacagctcagaataagtttttctgtttaccgtaatttcgacccaatatttttacgaataacaatttagtccaaaacctctttgatatattgcaatttaataccctaattaagtcttcttatctagtaatttggttttatttccatgacctacaatataagataatagtcattagtgctagatataaagactgaattagggtatataagatatatggaatgctaagattacaaagagatagagaatcaaaaaaggaaagaattaaggggcaaatatgaaataattaaaaacaagggagccaaaggaacaatgtaagaaaagcaataaaattaaaaacaaaaccctcaaaaagaagaaagcggagactcgttagctttttcctgcctcctataaattgaacgcgacttgcaaaacctttcctcatcgtctccgtctcctctctctctatc

SEQ ID NO: 26419 - DNA, 976 bp, Arabidopsis thaliana landsberg
ccgcttttttttttttatctcatccgcaaaaaggctaaagtaaccctaatatagttaattcttgtttttttcatgagtatattttaaaataggatgaagtcacatattttaaaagcttaagccaacaaaactaagtttttacaaaataaattttatttctattcaccggttctttttcgatattaaaaattgttgtgatctcgatggaaaccaaccacaattcttactaaaaatctctagtcttcacgtctttgtttaatggttgatacttgataggcttctgaaactaaaatataactaatattattttactgataaaattctctatagccacttgaatactataatcatatgtgatgctataaatgtataattttaattttataagttagctttacgtatttatgatagagatggtaacactttccaactttggccttttcgattttgatatatgtatggctcctacgcctttacttacttttccctctcattcattacacttcacgcctcctttatctctctttaataactccaaaaaaaaacaaaacaaaaaagagagagatggaaaaaaaactgaaacggcgtgaatcaatgtcaaccaccgccgcagaatcaccgccggcgaaacgaagaagaacagtcaccggaaatgaaaactccgctttaatcgaaggacttcccgatcacataacggagatctgtctgtctctcgttcaccgtccgtcgttactctccgccgtgtgtacacggtggcgccgtcttctttactcgccggaatttccttcgtttccgtcactctacgctcttttcgtcgattcaacatcggatccgggtcgggtcaacccgtcagtccggtttatgtgtttcaacccggtttcttcaaaatggtatccgcttcctcctccaccacctgacccgcctcttcaccggattctttaccgtcatccgtcgtttatctcctttaatttaccga

SEQ ID NO: 26420 - DNA, 895 bp, Arabidopsis thaliana landsberg
  unsure (1)..(895): unsure at all n locations
actaccagtcaataatcagacgaattccgacatctgatgatgtcttgcaccattttcgcaaatgaaacttcataacttctgttaattttgaagatttacatcacatatgagcgttaagaatgcaacaatacatcacaccaaataacagaatgtttacccggatttgttgtaaatatggcaacaggaacagcacgttcgcttaccggtgtaccctaatcatgaaaagttgttaagtcgtaacagtaaaaagttactaataagcagtgtgatggagacactatactagactagctgagaaagatgcttaacggacagtaactactttttagatgtgagcaacattcttaactaagggaacatgtacatatcagcagtgttcctaactaagaacttcaacagtaaagattgttagtacaacatccacttatgtgttacttgtactaataaatatatcagtaaggatgaaagaagatatgtgaatcagacatgagacctaactctttggttttccctgctatgttcgggttggagatacctttcaaagtaaccaacttctagtactccttgagcagatgtcaaaggaggaaaaaacacaaaagtgtcgagaaatttcaagtttaaaagaaatgtacctttggttcacaagcaacaatgtactggcaacgtagtcctttatctttgaccattgtaacaccaagaaattcagccaggcgttttgctgtggtcactgcacatgannnnnnnnnnnnnnnnnnnnnnnacgatttgctcattgtgcttgattctgatatataatctagcagttcactatcggcaatatcttttccttgattctggagaaaatgtgaaagaaaacctatgagataaatgacccaactgcaaataagagaattta

SEQ ID NO: 26421 - DNA, 935 bp, Arabidopsis thaliana landsberg
  unsure (1)..(935): unsure at all n locations
actttgcttatattcttatgttacttcacctcatgccatagaatattataatttatggcttctgtcatttactttaagttactttacattgattttatctcatgcatgcctcagaaaatagcatcaagagtgaagtgaacaaaagggtgtgaagttaagattctttgctctcttttgggtaaaactaaagaatttcttaagctcaatgatatatcttggataaggctaaaaaaagcaataaaagagtaaccaaggatatatttatctaaagacaatcacttttctaaaaataagattgttatgctttgggtttattctatgcatgtttttttttttttctattaactttagcataacgtttataggtaggattaaatttgttgtttctatacgcaacaaattttaatatctcatcattagaaatacgtataagagcttcttcgaaatcgaatccgatatatgcaatatttaaaaagtatttgatggattggaagatttaacttttacattaactacaggctaggaaccgctgatttgtcgtttaaagttgtattccccctttgtaatacagcagtcannnncatggtttattttttcaataatgtagactaacacttttaactttctattagatatattacgatatgtgatttggactcaaaagactgttcatcttttgattgattgatccatccttttactttgcctatattttactagcattaagtaatttcatttcaaaaggctaaatgtcaaaagatattactgtcacattaaaaaaatatcacggtcacttgtgttacttgtgtattagttcactagtgatctaggagcttaaggatcaagaaatcaacaaagaagcaatgttcaatcagttcattgttctagaagcttccgataaataaacctttattatttcgaaatctcaaacacac

SEQ ID NO: 26422 - DNA, 1836 bp, Arabidopsis thaliana landsberg
gatccgataatgccctcaaaaggagattaaacgtttctactacattccgaatattgtttctataatactaaactaaataatactttagcacattattaaaaaactattgtaccgtgactgaccaaattctgttaaacttatgcattagccattagggctgaagttttatgaaacgtatgatgcattaggaattttaccaatatacgaaggtttatcttatttgaattttagattttagaatccccatgaatttggtttggactctaaaaaggagaagagaagttacaaaagataacaagataagagacacataaatacataattaagacttttagcaaaaatacataattaagatctaccataacaacgaaactgaaaacacgtaaagatataaattagaacttagaaaactggatttgagatggacagcttcctctaggcaaaactggacattcgataaactcagttaatgacgtatcaacacaaatatagatctgatgaagctgggcatgacgctccggatctttgttacattctattcctggcgtaaatgcaattccatcttttatcgcgttggtgatcttatccagattgtagaatccatcatccggattaattcctacatttacgaaaagaaaatggtcactggtgagtttaaaatgtacacatgaatagtacatttatatagtgatttattagtgtatataccggagtttttgaggatttggaggagatttgctttttgtttgagtttaagagcattttcaaagtactcatgttggtccattacggattcggagcatgtaccgtgtttctcccattcgtgttcccaaaagttgaacccttcgttgcttggacatgatagtgttggccaattctttttcaaactacttacgagatccgatatctatacattcatatacatgatagctaataatcgttgtttaagaattagaaggaaaaattacactatcaattatatatacctgagatctatcaaattggctatcgggatcacaatttgatggccatgaaccaccgttataattaggccatagaccgtggataccaaaatctgcagcgggtttaccggatgttggatagcaacaagcacgcgatgtatcgcaataggctccaggccactgcagcaaattcataaaatttcacattcagtttatatatgtactttgtcaaaaagaatgaataaaatgattactggatcttagtttaaaccagaatatatatacctgaagaacgaagtagaagaaatcaaagtcttcttgaggacgtgaaacgaaaagaccttgaaacactagaagcttgaggagaacgttaacacaaccctttgctcccatctttcttctcttcttttctgcgattgcatgattaagacgtttcggtttcaaaatttatagacagataaaaatgccatttcccttgtaataccatttttaattagttattcatctacgtgattagttaagagattggcatattctcttaagtaattcatttcatatttccgaccttattgaaaagtcatttttgtacgttttacaagtagacagtaaactcaatctcagaatttagtaaactgattgttagaagtttttttattttatttggtagcccttcattacgcgcaattgtcactatatatgtcacaatttttaattaaaaaaaaatagttaaacatgtagactagtttttgagaaactttatgattacaagattgttaatttacactatgttagaggacttttatatcccataccgcaattgcatggtatccaaaggatcgcagacccaactatcaactaaactaaaaaattttta

SEQ ID NO: 26423 - DNA, 826 bp, Arabidopsis thaliana landsberg
  unsure (1)..(826): unsure at all n locations
agggacgcgtgtacgacgttgattaatgtggaccacgaatacttaattagaaatttcacgaaacatgaagaagaaggattctccggaaacttgtatgtattattatttttaacagttcagcaactgctcctacttataccaaccaaacgttactttttaataaaacagttcaccatatccctcaaatctcaatggaacccacttttattttcccaaactatacacgtttcatctacacacaagaaatatggtctagagataagtatagcagtttgggagggtgtcattacactttttaagaattccggagacaaagtaaatccagcaactgtgtagaaatatcattcataaagttttaagcgtggacgtgtgtacgacgttgattaatgtggaccacgaatacttaattagaaatttcacgaaacatgaagaagaaggattctccggaaacttgtatgtattattatttttaacagttcagcaactgctcctacttataccaaccaaacgttactttttaataaaacagttcaccatatccctcaaatctcaatggaacccacttttattttcccaaactatacacgtttcatctacacacaagaaatatggtctagagataagtatagcagtttgggagggtgtcattacactttttaagaattccggagacaaagtaaatccagcaactgtgtagaaatatcattcataaagttttaagcgtggacgtgtgtacgacgttgattaatgtggaccacgaatnnnnnnttagaaatttcacgaaacatgaagaagaaggattctccggaaacttgtatgtattatt

SEQ ID NO: 26424 - DNA, 1751 bp, Arabidopsis thaliana landsberg
tttagttatttttttgtaagatgttaaatatgttatgtaatatataatcttatttatacattaaaagaaaaggatgttatgtgcatgcagggaatatacagaacatgctctctgttcacttccatgcatgccttccttctctgtctccttctcccatgtgccttcacatgccctttaaccaaaccagttttcggttcaattccctggttctcatatttcaaatgaggttttgctggctcacatgcaacacctctctacgaagcacattttaatacgctacttatgtcacttttgtgtaccaaaatgcccttccgtcatccattatttactaacatattttactggtcaataacatatgttagtaaataatggattacggataaagttcttgaggggcaaaatttggaaaataaaatgatattgctcgaacatatgatcatgtgccgtcacagaaggctcaggcttttgctgtcatatggcaaatgcgcactcttcatccacttctcttttggctacttaatcggttgaatgattttcataactctcaatatacaattcgattaatgaaacaatagctaaagattaaacaatgtgtaaaatttatttctgaaaaaaaatattatggttgatttttatatttatattttgcaattgaagaactattttaggatattcctctgagagatatttgacgagcacgtgatattaagatattatcgagatattttatttgacttgaaataccccaaacaagtccacaagggaccaagaaaaaagtacaaaacgacaatcaaaggaatgaaaccaccaccagtggtactatcgtaataaacaataacttaagggttattaacgaataaccaatcgtacataaaccccgatcctttttcttttcctcttcaaacaaagaatctaaatcctatgttcttgttcttcacgatgagaatcttgaaaactcaaagatccagaggaggaagaagaacaagcaagaaatttggaaacagaagaacaagtggaggagaaaagttctcggagaagcttcaggcgcttaagagtcttcttcctccgccgtcgaagatgacggagcagagtcgtcaagatgcttacgtggaagaagattccagtgttggagagacggaacagttgtttcaagaaactgcggattacattgtcagacttaggacacaagtcgtggtgttgcaaaagttaatcgagatttatggatcatctgatcagaaggaagataattttgtttcataatgttcatattaaattatgataatgtttttcattaagcttttttcaatgtgttacgtattttgaacctaatatggtttttaggtagtcacgatgtataatgtttgattttgacgaacgaaaagaatgaaatcggtcaccatcagttacaaagcttacctgattttgcgacaacaaatgaacatgaaaaatttgtaaaaagaaaaagagtctttcaaaaaaattaaattcgaattatcattttaaattataaaatgtaaaattgtatatttgtattagagtatgtcaaaaaaagaaaatcggattagaaaatgtcttatatatggatgatgtgttatgggtttcctcaaaacaaattaaggattcttgttatttttaggtgcttttagtgattgatagcttaatcagttctgaattttaaaccatatgatatagtctagaattagagtctagaccagatccttttatgtcttttttgaatgaatttagtcttt

SEQ ID NO: 26425 - DNA, 1535 bp, Arabidopsis thaliana landsberg
cgacgatttgagacatgagtagccatgacactctcgttgcacagagaagatagataaaacaggaaatgaagaatcctatagaaacagtctcttgtacaaggaaagataagtaaaacaaaaatctagaatcctaaagaaaccaccaaaccaagagtgggaaacgaagagtgtcgctatccgaaaaggatgagttagcaaaactagtgacagaggaagcccatctttgcttttgctttaatctttggagaaaactaagtttagagactcaagagacatgttaacacacaatagagatataatatatgctttggatccatgacttagtgtccattaatctgagtaagaaagtcaagttcttttggctcctctttatttcctctacattgtttgaaaaagatgcttcactcaccaaaatgcaaccccaccaaaatcattcaagttggaggattctgacttggtcttaaacgaatttaaatagcttacctttttcaccttaccctaccttttggtaagccaatcatctatagcacaacaagagatgataataggtaaaagtttaaaatggtgtaagataagacactcaactttcatcactgttagtggtttataacaagcgctcttactatggataacaaaacttgttggacgattccagaaaacatcaattgttaccagctagttacaactaacaaccaaagagcatcaattttatttgttggtcccctttggaatgctgcacaaaacaaaaccctatgggcacatggacatggacatacttaacttacgtgccattaagataatcaagtgtcctcaacttcgagtatcaaattatgcagaagctattcataacattcaacaagtaagaaaggtacgtatcatatagacaatgaagttgagatcaaggtaacaagataattttatttaatgttacataggttacatgaaaagaaagatcccaccagaccaaaaagaaaacgaatcatctctatgctaaagagagtaaaatgataacttaattctaagagaaaaacactgattaagcctaaaacactagcgaggtaatgttattattacctacttctactgcatccaaaattttgctgattgaattaaagcactatgccctactgtcacaacataagtacacaaacgaatttggatgccattacgagctaatcctataatccatcccaagaaagcttgcgagttaccagtaatcttaaaacccaaaatcgcattgagcagatgcccatcagggtaatatgtacctcacaagaagaaaagtaactaggtccaagctgatgatcatctcgacattaatagacctgtcaaatgctgtccatctgaagagccaaaagtatcttccatgaacttacagttctcacaatccaaagatctttcactagagaaaccatcattcaagctaggatcgtgtggacagcaactgacaactcgattccgcttcctcgatgattttttccactttaagtcagaagttgactaggacatcttttagaagatctgggattggtcgc

SEQ ID NO: 26426 - DNA, 689 bp, Arabidopsis thaliana landsberg
aatgatccaatccgattctggacctgtatgtctttttggcactgaatttcaaaagaaagtatgttgggagattctggttgctggttctgagcaaggaattgaggctggccaagttgggcttaggttgataacaaaaggtgagaggcagacaaccgttgctagagagtggtatattggtgcaaccagcataactgatggaaggtctaactctttttcccctcagtttccatattgcaaaatttacttcgaggacttttatgatccatatttctcatgatctggtttggcaaaagtttccgatgttatcatggatttctgtcatatttatatattagctgtttcaatcacaggtggcatacagtgacaatcacaattgatgctgatgcgggggaagctacttgttacatagatggtgggtttgatggctaccagaatgggttacctctaagtattggcagtgccatttgggaacaaggagctgaagtttggttgggtgttaggccacctatagatgttgatgcattcgggagatcagatagtgatggcgtcgaatcaaagatgcatattatggatgttttcctttgggggaaatgcttaagtgaagaagaggccgcttctttgcatgcagccattggcatggcagacttagacatgattgatttgtctgatgacaattggcaatggacgga

SEQ ID NO: 26427 - DNA, 1717 bp, Arabidopsis thaliana landsberg
tacgttgtgcattgttgattagtctccttcttgcatctaattagtatcttattgaatcaaatttgaaccatacatttactttggcacaattgaatataatatttaaatgtactgtggaaatttcggctttcatcgcaattcgtagataatagagggtttaggagcagcaaaagacagaagggtactggttcggttccgacataatctgatagtcaagaggagatttatatcataaaaatactattttatagtaaacgcatgaaactgtaggaaacaaaacaatctcctaatgtgtaataatgtgtccgtacgtgaaactgcaagctagtccaaattttattatcttttcttaattgtcagaaatcctagattttaatgttttgctaacaccattttcgtaactctatgtgatcattaagaacaagtactatattccacattaagtaaagttacagaaataaacaaaatatcacgatttcgatagcgacaacaaaactatagaaatagtgaaatacatcaccaaaatccttatcccgtcgtgtcgctagcgttcccattaatattatattgattacttaacgtcttgggagactgaacaagataactccacacaaggtctcacgtggtcccctcacactctctcaacacacgtgtcgtacatttaatgggtttcttcgacacgtgtcgtagtcggagtgacgaggatgcacaactagctgaaaagtccgacctattgaaaagtctataatgcccccattcggtcgctgcctaagccggtaggggccggtctaagattacgtggcagagccacggtccttggtcgcaatactctctcttgtatacatgtattgctgttggcaaggactaaaatagcaaaggttttatcccaaagtataagattagaaataatgcgatttcttgtttcctttacttcatttctgttcaaagatttagacagaaatgcaacaaatatatgttgtggtggccttcacaacttacaagtgagactccgatattattttgagatattgtttctattcttttttcggtaactactaacttaggacaagcacacattcacagtcgtttatcataaattctttgtgtaactacttattctagaaaaccaaactacagtgaaaaaactatatatactgaaaatatgtgattaccgccttatataaattatttttgatgttaacattttcgtaaaataaaatttgtagtgatcctaaacaagataatttgaaattctagttttcgactccgagaaattatgacccaagctcggaacttttttggtaaaagtaaaaagttgtgatgctctaagtgtgaaaacctagtgaaaagaagaaaacgtaaatttgtgggatacctaaaaagctacagaaaacgatttttgtgtttacgaaatggcataattaaaacattattataactaatgaaattttataagcaataacagtttgccaattattcgattccgtggattagtagagagtttaaaatatgatgttgaataattttgagcgatcagaaaaagtaatgaacacccgtctcttaacggtgagagagaatcgcagcctttcggattccacacggctcttattttcctctatccacttgctcactttttaaaccgcataataatattctttagcgtatactattataatattcttcttgattacgtcaaactacaacaaatcaatcaata

SEQ ID NO: 26428 - DNA, 1326 bp, Arabidopsis thaliana landsberg
tcttgtggtccatcgacatagcaataatccatcgcaatgaataacattaaaagtgacagaatcaaactcggctggtactggtagacataagatatctagggttaccggattaatgattttaatcttatcaagataaattcgcatcaatcgttcctcggagagatccaagtgattgtaaatgaatctcttgtcgttgcagagagcgtacaattgtttgcaggttggtttgcatagtaccaacgattcaataggagtcttgaaaaggaattcttctactacatcagaaggcagcgataaaaaagccatggaaactgaaatgtgctgtcttgcccaatagtatttttgagcatgtgcattgcttgagagacttaatatactcaccaatttaatattataatttttggtgtatttattgttagatttttttttccagattttttacttccattggtgtcaccaaatctctcattactataataatatattttttaaaaacaaataagtataatttaatatttataatatgatttaacttgaatacttaaatttaatcttaaattagaatatatctaaatgataaattttaaattatatcaagttatattttaaatatatttaatttcattaattaattatatctgtttatatagtctataatagtaacatgaataaaagtgtcaatgattaaaaaaaaagaaaagaataaaagtgtcaatattgtgaatacagttaagcataatacatatcataaactcattagaaataataacatatgaaaccatgatcaaagatataattaacttgactctaatcttaccaaaaatttgccatatatgatcaaccaaaaaagaaatgtcaatgtgtgtaaataaataaagagaaagagtctctctctctatgaataaggaataatatattataacatataattttacaaatattataatatattataaaattttaaaatctaagatatgtttagtaattaatctctattttcaaataagtgtattaactaaaataatattaatatataatttaaattcatgcataatggaacttgttaaatagataattttattatgatttataattttttttaacataatctatttaattaactataccaaatcaccatcctcatcattacgacgatcatataaattgctgggatttgagtccttgatttaacatggagaaagcgtcagtgagaagaagaagaagctagcgaagaacggaagaaggaagaagaagatgtagctgaagaaactttcgtgagtcgtgatgtcaacgacaaagaagagacaagtcaacaaaagagatttt

SEQ ID NO: 26429 - DNA, 1991 bp, Arabidopsis thaliana landsberg
ctgtaaactttcgagtgtgcataaacatttacacatttatgttatcgtttgaaacttctttggaaactgtgtttagatcgcaacatagctttcattttggtgcacaaaagagtgacgacatttgtgtatgaaatgggaacaagtgcttattgctctgattcaacaatggctacacagcattctgttttctctctcaatcattacaaaaaaatctagacacaaatcttcccatagaccaaaaaaaaatgaacttagcactatcttacatttttattgaacgtagtatatatattgctcctgtctcatctcatcgtgtaagatcgataacggcttcctctactagctcttgcaacaatctcttttcaatttcaatcccaaagtcatctatttcaacttgcaagctatgagtccatgtcctcccgactatctcatctttcactagactctctgcagccaaactgttggcgtccatgtcttctcctgagtcacgcttgctaggctcatctgaaacccagtcctttaactgagcccacacatgctccaccaggtcgaaatgcagagaaccattacccgtgcgtgtagtcgttgtttctgaaacgatggagttgatgcggtcgaaaatgagcttacgagttgatcgttgttgtctacgtttgccttcgtggatgaactccttgatgttgttgttatccgggttggtgtatttgtctctgagtgaagggtctaagggactgtttggcatgtgccatcgtgacatgatggggtcatgagagactatgcaaccactgctgaaacctgcagctgtcaagatcatttctatgaagagatgccagtcttcctcctcatggactcccattgcgggtttagctagtgtctgtgtatgactcatcatcccatgcgagaatccgagcgattgttccgataggaggtgatttgtcaatcagattagatttcagagacatttcttctcctgtgggatgtgacagtaccaaagtcttacaattggtaaaactcttagcatgtttaacaccagagagataaaactaaccttgagtggtctttggctttactgaccccgaacattcctcttcgaaagccggctgtaaaaccgaaactggactcggctggtcctggttttcattttccacatcaccctgcaaacaaatcaatggccaaagattaaaccaagaacggtttccgagcatcttctgaaattcacaactagttttggattgtgatttacctcgcttgtaaaaatacgttgttcttggaatgcatcacggtgtatagccaattgagacggtgcaaatgtcttgtccttgtttgattttttattccggaagaagaacaagcttgaaactttccatgatgactttaagcttcttgactcagtaagctcttcgggagcttgcgcttttgaagttccaccattgagcctaatctcagggactgatcttgacctttcaaggatattcagagaatcacttgtgctttctacttgatctagaccactgcctatgcatgagattgatcgtctcgtttcttgtttcactttgttggtctcttcactggatccggtaggtactttcgtctctgaaagtgcaagtacttcgcctaaggccgttgaaaccttggggaagttttttggttgctgtgtgtctccgtttagtgacatcattgcccatctctcagaaagccgtttctttgcctctctgtagacagatgagtctggagaaaacgagactcggctcaacgaagacgaagaaaaaggactctcaaacttgtttgcacagtcccatgaatgcctagaggatggtgacatgatctcagagttggtaatatttcccactagatattcgtaatttgacctgtttaacgaacaatcatcacccatatagccattggacaagacggaagaagaagaagaagaaagggtctcgttcctgcaatgaccctccacagtttcacgtatttgacgtgtaatttccttt

SEQ ID NO: 26430 - DNA, 794 bp, Arabidopsis thaliana landsberg
cttctccatgtttgcaggtttgtaaatatttagtgctctctgtgtacattagttgcgagtctatgacactgttttttaacttgtgcagcattggctattatgctggacttctttctgcaaatcaccgcttttgttgcgctaatagtttttgactgcaaaagatctgcggataataggattgattgtttcccttgcataaaagttccttcatcatctcgagaatctgttgaaggttactactgactacaggaaatgtttagaattagcgtcttttttactgtatcattttcttcagctacttaggcagggttttgtgcgtttataggtggaagggaacctgggtttcttgagagatacatgaaggtgttatgattttctcaaaactgggacaacctctctttcttattaatacacatatgatatgtgcaatacagtcacagacacacaaacatgtaattacagtccgcaatcttgttgatttttagtcttggtgttccacaggaggttcatgcacccgttcttggactttggggtgtaaaaatggttgttgtcgctgtattcttcgcttttgcactggcaagcattgtaagttctgacttcgttttgctcattattttcttttcactgtatataaagttatatactatttgtttttccgctttaacacttctttagcactacaatataactatatcatcaaaaaaagttcagaatgtggaagaactatatcaattgtttttggtattacgagttgggtattttatttggctgcttaaattctgtgttttattcat

SEQ ID NO: 26431 - DNA, 1255 bp, Arabidopsis thaliana landsberg
tgcgaatagtggtatcccaaatatgttagacgatggcgaacgtgtgtaacgtgtttataagcgtatcacgtatgtatgatcgtataaatgattggtagagaatcaaagccataacaaaaatcatggaccaaacccaagcagttacgacttacgagatatgtgaagcacactgcttttgaaaaagttgtatcatcagacatctcacgtggtgtaaacgaagaatacatataataaaatatatataacactaatatcagaattcagatccactatatttttttaggctagaaaataaatttatttcacaacagtaatgtcgttttctcttatttaatacaggatatctagatttcaccaaattatcttgataaaggagcacatttttttggcaaaatatttcctgcaaactcatcaaatgaacctgaaccgaaaatgtggacaataaatttgaaatcaaggatgtattgaatttcttaagttgagaccatcaccatgaattaaatgatactgttttcttgtcaccgttttcaagtagttatgtagaaattcattactggtatagtgatatctaaattcaactatcttcactttatcttctctgtttgaaaaaaggttgatatagaaaattaaaatgtgtgcccaacttgccacaaggaaaccaaaattggtgtgaaagagaattgtcaaacatatctgccaactagtccaaactttaatcaattaccctttaaaaaaaatgactgtatcagtctactatctaccatttgttgggggcaatttatccaatcttaaaaacaactttatagctcaaaatgcacattatactattataaaccacgttacaaaacaaaaagaaactaccaaaatcgaaaaaaatatatcacatcaaactcttagcaagacattacatttatctatatatatatatatatattttacaggacaaaatatagttttaaattagtaagttttagcaaaggcattaatcaaggacaaagcgttgctggtttcatgtaccacgttcatgattctagcccgaaccgagttcttgatcctcccatccataacccggcccgagaacccatcggagcaagtgttctcgtcagtcaaagccgcactagtccaagtctgagcattactcgtgtggtacgcaaactggtcttgatctttggcactcccacacaacttcagttattgaacagatttggtcaaacggtcaacggtttcgatcatctcctcgacgcaatctttgatg

SEQ ID NO: 26432 - DNA, 1878 bp, Arabidopsis thaliana landsberg
  unsure (1)..(1878): unsure at all n locations
catcaatcaagctttcgatttcttccctttggtatcagcaactacgggcttggccttgaaaggcataaacgtnnnnnnnnnnnnnnnnnnnnnnngaacctcaggaatgtcgacaccatcctctcgctggtagttctcgagaatgcagcaaatggtcctctctgttgcagtaagtgtcgaattcagcatatgcacatactgctttgtctgctcattgctctttttctgaccgtatctgatctcaagcctgcgagcctggtagtctgtacagttggaacaagacacaagctctctgaatgtctcggacgaaggaaaccaagcttccaaatcgtactttttcgcagnnnnnnnnnnnnnnnnnncagagacgatcgagacgatttggtatggaagttttagctgcagagaaaccacacagttgactatttagaaactattaaaatgtataaggtttcttaacttaaggtatcgagattaccnnnnnnnnnnnnnnnnnnnnnnncttcatcatctcatcgagcatttcccacgaggcattctcgttagggccggtgatgcaaaactgttcaattttctcaaactggntgaacacnggaaataccaagggtgtctcttccatgtgaaccggcttcttttctaaagcaggatgagtaaccagcatatctggaccaaaaaaatacataatgttggcggattttcccaatacattaaagaaacaattgtcttaaagctgcgagtaggtgttactatgtttgtttataccttaggggaagctcagtcggatgaatccattcatcaatatggtacgcacaaagaggctgctcagcagttgcaatgaggtatttgtcatctccttcaccagtcacctggacaaaaaaaaaacacaatcttctatgaataaaactactctaacaagacaagtacacagatgttttgtaacaattaaataccttgtaaagctcttcatcgaactgtgccaattgtgcgcacttggccataacatccttcctcatgaaaaaaggaggttgcaatcctgtgaatcctctctttttcaagaaagttaacccaaagttgataagagcttggttaagcatcaaaccatctcctttcaagaaaaagcctcttgctccagcgatttcagcacctgaggccaaaatagcattacaattgaaaccctatagcacaaaaaccctttaacacagagcaaggaggtcggcaaagtgcaagtcaatactacctcttttggtatctgcaataccgagaagctcaccaagatccacatggtttttnnnnnnnnnnnnnnnnnnnnnnnnccgcttttcaccccacagtttaatcacaagattattagcctgcatacattaaaacaccataaatatatctctctctcaccaccacatgaatcaagtttctaactttgaaggaaagaaatggcactaacctcgtccttatcaactggaacagaatcatggaccaaattaccaacttgctccaacttggctttcaaagcagcataagcttcacgaacttcagcctcctttgcagtagaatcttgtttgtttttctcagtttgttgaataatctcactcgcatcttcttttttctattccaaagaaaccaaaaacaaaaccctactattactaactcccatcaatgttgcagctcaaacgaactaaatcattcaccaactatggcattcacactaataagtaaatcctcaaattccagatcctaaaagcaaccactacggatctaacagaagattactataaaatttgagattaaactaacaattttgagctgcgccacttgcttattgagcatgttgaactcctttctgaagctatcaacttcaaattgacctgaaacacaacaaat

SEQ ID NO: 26433 - DNA, 1185 bp, Arabidopsis thaliana landsberg
tattcaggtaatataaaataaataaaactgaatatgagtaggataaataaccttttctaacaggtgttgtttgagccgctttagttcttgccgtgccttatccttttctcttcgtgcttcctccaactccttttccagcctctgcaaagatttttccatatcttctttcccagggaaggttcccgccttctcctatttatacatgagaaatagcagaaggtacagtaaataaatgcttgccccatacttcaatttcgcatataaacaatgtttcttttggttaaagggctaactgaattaaaagtttgcattaaagaacctcgtccaaactactaaggtgtctactaagatcctctgtgctctttgggaagagtttcctacttgttgacttctggcttgcttccaaagcagcctctaattcactttgtttcaactacacaacataacgaaatgtagatcagtttcagagtccgcagctcagaggaaaaccaaaaatgaaaaattccttgccaagaaaattaaaagtttgtatgaccttaagctcattattttccttctccagagctttgttaacctcttttagattttctctggaaattccaacagcatgctgctccccaccattcaacttcatctgcaattgtctgatttcagccaattttgcttccaattcacgatttactttgttactctccatgagtgtgggcatggggttggaataaatatcttctcattaatcagatgacaatactgtagtgtgaaattggtgatgcctaagtaacaaaaaaaaataaagttcttaaagattaaatacttactttttccttatctaacctcagagactggagttcctccttgaaagtctcattttgtttccgctcctctgattaaagcaaggttaatgagagagaataacagataagatagataaaaagaatcagccaagctaattgtgttactctataccctgtagtaaaatctgcagatttgctgatttttctcgctctttctcaagttctctagcctgagcagatgccattgatctggttctctcttcaaacatctctgcaaactcctaaaaggcattcagattgtcgcttagagtcccgcgttcagtatatagcacacaccagagtaatttattacactctcattacagagaataaagtcatttacctagtaccg

SEQ ID NO: 26434 - DNA, 1436 bp, Arabidopsis thaliana landsberg
cagcgaccctattgatgttctcgtcattatgcacgggacatatgttctcatacacccttgagaacctgtttaattcattacgtagtgcttcttgttatatatagataagtgcatcggataagctttgaagaagatcaagcgctcacctcttagctatagactctactgtataactgtgtagcttacgaatgaatgtatcagatgagaaatgtagccacccagttatcgagcagttagtggctgctcggcttattaaggtgtctcaacatatagcttagagtgtggattttctagtgcttactctggaatttaaaacctcttattaatcagtcaagtctataagcatcagcagcatctcagtctgtcttatttgactggtggaaaacacatctcatgtgaatcttgaagaatttcttctacaggaaccggtgatcccaggatgctttcttctggccaaagctattggtctgatgccaatgattgatcaggttagatattcaacgtacttgtcatattagtacttataaaagtaacagagattgaaactagaagctctttctgcttgaatagggtgagaaagacgacaagatcattgctgtctgcgctgacgatccagagtatcgccattacaacgacatcagtgagcttccgcctcatcgtatggctgagatccgccgtttctttgaagactgtgagtgttcttttcttacaaacttttggttggttaaggatgatatgaggctcatactcttgtaatcttgttgcagataagaaaaacgagaacaaggaagtagccgttaacgacttccttccgcaactgcagcctacgacgcaggtcagcattccatgtaagcagccttcatgaaacttactgttatttacttcatatattatgacattgtaaatagctgcaatttgtttatatcaaagaataactaactaatcaaattgggacaactcttttgtgtcatgtagggatctctatgcagactacgtcgtggagaacctaagacgttgaatcaccacctcaagcaatggaatgaaagctcacaactgcattattcacaattataaatataaatataaatgtcaggcttctcaaaggatatttttgttgtgtatgtcctctgatgaatccggtagatgatgccgatcattcttttttttttgtgacgggtgaaaccgagaattaaagactgacacagggataagattaatacgaggttctatactatttaaatgtgggcgccgtaaaaaagaattattccaggcatgaaaagacctgactaatattgtgaactgttttttaaagcaatggatttgggaatcgaccaaccctcactagtctcattgggaactaaatcgcgagatcaaaacagcattgaaagcctatagcaaggtaaacaagttaacaaaaagccttgaaagaacatgca

SEQ ID NO: 26435 - DNA, 1120 bp, Arabidopsis thaliana landsberg
catcatattcttcaatagatttataagttttaggagaatgtcgacattatcctagttcgaaaattggttgtggagaatagtctaattggtctttggtccgaatacgatacgtggtgtcaaaacatattccctctcataatataacaaaagaaaagaagcaatctcattattctgccagtgattaataaatgaagtgatatgttatcaactagacaccttttgttataaatttgaccaaaacaaaaaaaatgaaagaaaaatagatgaagacattagaaagtaaaactaactaataaaataattagaatgcgaagggaggcacagaccaaaacaaacatgaacgcacgtccattacttacttgttcatactcttctttcatagtgtttctcacgttgaaaccaattttttcgcctttcatttcagggaaacttttttaagccattgtattcattatatatatgagatcttatgcaatagtaagacttggctttacagagagatagtaagagtaggcgccctcaagaaaacagagtaaaaatggatcaaactttgtatcgcaagtgcctggttactttatcgatgatggcaatgatcggcacatcaatggctacatatgccgggaccccatggcgtacagcctcagccactttttacggtgacgacaccggcagcgcaactatgggtaaagtccatatacttctacattctattgtatgtagaagtagaacacaaactatatatgactcgattccatattatttgaaacgagtgtttgtttgcatttctatgttttaatgtactaatcatatatcataacataaaaatgcaaacacgatgaaacaattatggcttatttataaatacatgaatctttaatttcgaagaccatgtatatcgatcaggtggggcttgtggctatggtaacatgtatgacagcggctacggggtagcacgactgcgctgagacagccctgttcaacgagggttatgcatgcggtcaatgtttccagttaaagtgtgtgtcgtcgcctaactgctactacgggtcacagccaccgtggtgactgcgaccacatatgtcaccaaactatggccagcatctacaatggtggatggtgt

SEQ ID NO: 26436 - DNA, 1120 bp, Arabidopsis thaliana landsberg
ccctttaagggactcacacagttcattaggagcgaatttacttgcaaagacaagacctttgattcacaccaaaaaaaaaaaaaaaagtcaagacccttgattttgttttgattctcaaatattttgggttttgagctttgcgtaaatattgtcaagcttgggaatttgggcaatacagtaacagaagaatggaataacttggagatcaagtagtttttcttacatatcctccaaaccagaatgattcttccaaattgaatcattctgtagaggtcgacgaaataaagaatataatcataaattaaatcattgattgctatttctttctttattgacttttaaaacaacataagagacaaatttagaagaagagaggaactaataaaaagtgtacacaaaaagcctgtgaaactggttcaggacacacacaagacaaatgcctcaaagacaatatgagcttagagctttcctttaaccagcagagctcaaaggaaagcatccttctcaagcagattcaccacctccagctggctgttgagcttcgctacatcaattggcggcttggggtctaggttttgcctagcgctgcaaccacacacatcaaccaaagcatatataattaaagtcctgaaacagagtttaatggagttggttcattatgagtactgtgttgtgagacttacactgcagcaccattctacaggagatggcttacacactctttcctcccgtaaccagcagcataatgcagaggtgtgttcttgtttttgtcaaccgcattaacacttgctccagcatcgataagaacttgagcacatttcaactgttgatagggctcaacagggttaaactcagttcaatccatattcataagcaaaatctttagtatgcaagtaatcgccagttccatctcattgctctttcaccaaatatttgaactagctataagtaattgtgtcatgaaactcgtaggcgtaagtagactggttacttttctaccaattgaatgattataaagattcttaacttcacagctactgaaaaaaagagaaccatctaaatccgaatatttaattgccgtgaattgataagagaattgcatacctcgccgtatccacaa

SEQ ID NO: 26437 - DNA, 516 bp, Arabidopsis thaliana landsberg
ctggtcgccgacgcgacgtcctaccggagcctgaccggcacgctccagtacctcaccttctcaaggcccgacatcgatacgccgtccagcaggtgtgcctgcatatgcacactccgcggagccccatctcaccgtgctcaagcggattctgcgctacctccgcggctccctcgactacggcctccttctccgaccatccacgacgtcggagctcgtggtctacaccgatgctgactgggctggctgtcccgacacgcgccggtccactccggttacgctgtgttcctgggcgccaacctcgtctcttggaccgccaagcgtcagcccgtcgtctcacgctccagcgctgaggctgagtaccgtgccgtggccaacggcgtggcagaggccatctcgtgcgccagctcctccacgagctccacagtcccctccagcgcgccaccctcgtctactgcgacaatgtcagcgcggtctacctctccaccaaccccgtgcaacatcagcgcacgaagcatg

SEQ ID NO: 26438 - DNA, 1199 bp, Arabidopsis thaliana landsberg
gtgggaaaaaagcatgatcgacggtcttcttgtggcaaagatgatgatgagcgatcgttgtggggtaagaaggatgatggagaatcgtcgtggggtaagaaggatgatggagaatcgtcgtggggtaagaaggatgatggaggatcgtcgtggggtaagaaggatgagggagggtactcagaacaaacatttgataggggaggacgtgggtttggtgggagaagaggaggaggtcgtcgaggtggcagggatcagtttgggaggggaagctccttcggtaattctgaggttagtttgagaaaaaactttcttattttatttttgtaggctgttgaagtctcatattgtaattttccaatgactgtaggatccggctccatggagtaaaccaagtggcggatctagctggggcaagcaagatggcgatgggggcggttcaagctggggtaaagagaatgatgctggtggtggatctagctggggaaagcaagacaatggtgttggttcaagctggggtaaacagaacgatggtagtggtggtggatctagctggggcaagcagagtgatgctggtgggggatctagctggggcaagcaagacggtggtgggggtggttcaagctggggtaaacaagatggtggtggaggcagtggttctgcctggggtaagcagaacgagactagcaatggatcgagctggaggaagcagaatgattctggtagaggatcaagctggggaaagcaagatggtggtgggggtggttcaagctggggtaaacagaacgatggtggtggtgggtcgagctggggcaagcagggtgatggtggttctaaaccttggaatgaacatagtggtggtggtcgtgggtttggtgaaagaaggggaggagggggattccgtggaggtagaaaccaatcaggcagaggaggaaggtcgtttgatggtggtcgatcatctagctggaaaacagacaatcaagaaaacacttggaagagcgaccaaagtggtggatcagactggaaaaaaggttggggagaggattcaaacaatagcaaaccatccggttcgtctgctggtggttgtgctggaaactggcctagctgggatactaactcaaagaaagaaaccaatgacaaaccgggagacgatagcaaatcagcttggggaaccagtaacgatcaggtgaataccgataaca

SEQ ID NO: 26439 - DNA, 4870 bp, Arabidopsis thaliana landsberg
aagttacaggagcttgctgcatcaagttgaatctggtatggtttatctattcctttgtggaagatgttgatgagttggctctcttggaaaccatgttggagacattcacattgataagtcctgaattggagccaagatgctctaagggattctgccggagcttgggtgaacgaagaaatttgcaaacgaattgcctctgtcacggactcatcgaagaaatgattcatgaatgcattctttgtatctatccaattggttagggaacctggttccagttgacgcaaccatgatgttcctctgctcgcgagagagtgggggaagagtttgcaaagaaggtaatcagctggtacaccttctgctttaatagaggaaacaatgtcttcgaagacttctaaatgatccaatggttattcatcgggagctcctctaaactttcctctagatacaagatcatagtaggcaaggtgtatagcaaagtcatctctttcagaaggaggtagcttgaatgttgatcggtttgtgtagaagagatcaattatgttaaaatcgcctattgtagccgtctggttctgcagagggtgtcgatcgacacagagttgtgtcggtcgacaccgtcgtgaaaatctgccatgaaaacgtgagtctcaatctgaaggtacctgaaacacaagagaccaatacacaaagaaacacgggaataggtggtagaaaagttgtatttaggcttaaaaggacacctagtctaatggtaaactaaaagagaacttcggcaacggcgccaaatttgatatagctcaaattgccttaagcttactccctcaattaagagatcgtcgttagcacttaagggtcgaattccactgagctctcgatgttcaaacaatagacttatgatgttgttcaataagctaaatgaggtaattgaataataaagacaaataggcaagtaaatgagttgtagattcaagtgattaaagcgtcatatctaaggaattgtctcgggagatagataaattgtacatctagctaatattaggattgttatcgtaccgttctcgaactcaaactatgattttagagtaatcgctggtgttacgcgaaactctctatacttagagctaagataaccagagaagccgagaaatcctatactaaagcatgtattattataaagttttattagttcacatagtatctaaaccagagcccttctatgagcctacatgttctttcttaaatgcctaggctcatctatgatagttcaaataacaagtacctatggtgggcatacctattatctaatatcaagttctaggtgatcaatctaaaactagcaataagaataatcaagatgaagaactctaagagtaatctcaagttgttttcgatctataaatccatctaaatccctattgagagtccctaaacccaacaaggtgattactcaaacatgataacagaaacacaaatcataatctgaatagtttgcattgatgcattagacatagagtaaaagggaggtcagaatcctctctgcagggattagattcttctttgcaaaagtgtatctctcaataaaaataagcttaggtctaaacaatgaccataaaattatgtatataggttacttaaaaacgtacagggtctattttgcaaataaggaaaatttctggggcttctcaaacacttagtgaatcatgaaaattccctttgccaaatatgggtgtcgatcgagatagatgtggtgtcgatcgacaccaccgcgtgaaaacgtctcggataatcttcattgctgaaaaagcttccaaagttccttattatgcttcatagctctcaaatgcataattgcacctgtaatgactcaaaacacaagaaaaagattggaaagacactattctgaaactatgttagaaatcagtaaaaaacatgatatatcagtcaccatcagtcctaaagacattgttcccgagtgccttgacaattgtaatgaaagagacaaacaagaggacactaagatccccaccacaaatcaaaaagaatgtatccaagcccatttgattgtcaatgtagacatgagagcgtttactttctatcatcatagacatcttttccgacatccagtaagtaattatgggattgcattcggtgtacttcaaactgaaaacttcgaataatgtatgcacaaattccgtgtatgtcatgttttccttaacacgtacatagcgaccaaacatgccttcatctggttcaaatttccattctccttctttgcatttccactcacccaccatagtaaatacgggaatatccataacccacctgcataataaattcaggagacacacattaaatgcaactgaaaaatactatacatataaaaaacaaatggaatgtcgatactacacacttataaacctaaataccaattatcatttgactattttaaacaaacaaatatagaatttgcaaatattctgataaaaaaatggagttcgaacacaatcaagatcctaatatgacataacaaaaaacttcttaaaagaacttcattacttacacgagcaatgcttgttttggctccaaacttggtacaaaaacaagatcaacacttcttcagcagcaatgtacgttctcaataattctttgttcctgggttcatcttctttatctcaacaatttttttattaattattatcaataatttttttaatattatttgatgtaatgatgattttgcattaattgtgacaatagtcacatctaaactttttgagggcattaaatgttgatgtcacttcggaataatggaaataatctcacttgtaacggaaccgaatcgcgtcaacgtgaaacaaaaaatcttcaactgaaccggaacagtgtacttaactaaacctgctaaactaaaccgtacatttcaacagttactaagagagaagcgcaagggcagaagcgtcattttgcaggcaaaaagacaaatggtgaaaaccacatttgactttgacaatccatgaaaataaaacatggtcaacgggtgtggcccgcaatttaccctaaaaacaagccatcactctagtaataccccaagcaagaagcaagagaaactgactttcggtgaggtttatactctttcaaactcctattatgttctaagttacacaatagagggcggtgaagggaaatcaaatgatgaacttgagggaaatatagaacagacgctaggaaaggagaaagaagaaaacaccagagttgtggtgaatgatgacggcaaacaagagtcttttcaaggaaaaactggcttgccaaaaaattctcgggcacacaaggtgggtttgccattgcggtagtacatccctcgggactctaagactgctcacaaattagtttcgaccctttctactcaaatctcgcgggatcagagtaaaaggccccccgaacactaatttatgtcgagctttttctggaatgttcgtggtttcaacaaaatgtctaaacattccatagtaagaaaatgggtttctcaagaagatttgcagcttgggtgtattttggagacgagggtacaagaaaaatttgcagtttgaattgtaggatcagtctttccggaatgggggttcatatcaaactatgcttttaatcgcttgggacggatctgggaagtctggagtccacgagttagattgacgccatgttttacaagtggtcaaatgattacttgttcagttcttatggaaaatatggaggaataattttttgtttcttttgtttatgcttcgaacttcataaaggacagaaaagagttatgggaggatttgcaaaatcaccaagattcaccaatgttcagaaataagccgtgtatgatatatggagattttaatgaaattttgaagggtgaggagcattctctatatgaggtaaaccctgttattcccgcaggaatgagagatttccaggaagtggtgcgatattgttctctcagtgatattcagagtcatggtccattatttacttggtgtaacaaaagagatgacgaggagctaatatgtaagaaactagacggggtgttagtgaatgatgcttggttagcagagtttcggcaatcatatggagtttttgaagcagggggatgttctgatcatctccgatgtcgcataaatataggagctgctaaacaacacagacgcaagccttttaaattcacgaatgctttggctactaatgcagggttcttaccaatgattcaagacttctgagacagcactgaaacgcttttccattcaacttccgcaatgtttcatttttcaaagaagttaaaagcactgaaaccaagaattaaatcgatgagtaaagccaagttgggtgatctagcgaggaaaacgaaggaaatttttgaaactctttgtcgatgtcagatggaaacgttaatgaatccaacaacatcggcaatgcgaatagaatctgcagcttatagtagatgggtgcacctctcgggcttggaggaaaaatatttgaaacaaaaatccaagctccattggcttaaggttggagatggcaaaaataaagtgtttcacaaagcgacaaaggttagagaagtacgcaatgccatcaatgagatcaaatgccctgatggtactacagtggacacacaagaggagataaaaaaaaaagaggctgaaagtttttttcatgatttcttagctcacaggccagctcactataagggtatttcagaggaggagctgaggaagctagtgcagtaccggtgtcagaagcagatggaatgcagttggaaagagaactctctactgaggaaataagagaagtgttattctcgatgccaagtgataaaagcccgggttcagatggatac

SEQ ID NO: 26440 - DNA, 1784 bp, Arabidopsis thaliana landsberg
atgatattatcttcgactaattgttttccaattgttttaaactgctcaaaacatagtatttttagtgtacttataaatttacatattgacgtaaatgtggttaggaaatgttattgttgtggtatttttcttttttcttttgtgtttgtttagccaattcaaatatgtagcattcgtgaaaatactgatataaaaatatttaaatactcatttatatgtgttaaagcgtttacaaaattatcatcaatggccggccatgaatcataactagccaatatagaattaggtttttggtttgaaatgtaaatttacaaaagaaaatctgtcataaaagttcatctcgtactttatcataagaaagtattcacatttgttggtcttttttataaggtttagtaaatttttgggtttctagaatttgttttttagtatgaatgttttctagagatttttagtttataagaaaagaaaagaacaaagcaaaagcagagagcaaagcctagttaaagactcttattagcatctctccgggatatagactagaactagattttcttttccttccagttaagttgttttgcgttctgaaatctaaaatttgatcattctttctgtggtatacgtacacatatacatgttactaagaaaattatcagtatgttatcttttctttaattttatctatgtggtctcttgaactttagtacaaaatggtctctatattaggagacgtatatgataagggacatacatattaatggcgcatgaccaaaccatactttaatatcatgcatctatcatgtcccactaatcgcctaagctatccatttgggagcgtgtgattcaatctttctcataagaagaacaattactggtattttatgcaagtgtagtcctccacacataagatgcttctgttgtatgaaggcaaagagcggatgcaataactttttcaaaattcggtaaaaacctgaactgtgaatctgtgattgcaatttttttacaatggtgttgttgttcaaatggtgacagcaaaacattaattaatagactgaaacgattttttttcatcttaccacaaaacaattatacactattatacatcacataataaacgttataattataaaaaaaaacatgagtgatactattttttaaactctactcttcaattgatagttatttttgcttgattttttttagcaaaacaatgatttaataaaataaaaaaattgtgatatgcctaaaattggtaagaaagaaaaaatatccgacttttcaatgtccttaaaaatacaaatttttatgatttgactacttccaattttctttaaatgagttcaaattcaaatatttaattgttcgtaagaaacaatatacatatagaacaagaaacatcttttatggacggccaaatcatgttgttgtttgctctacaaatgaaaatcatatactattactaattcaattatatgctgtcttatagcttcggaatctttctaaacatgattcaccccttttcattacaggaccccactataattaaggtttcttctaaagtgggatccatctgatcgaaccatctcatctcactctcagtttatgaaatcgtgatcttttggaagaagaaatcaacgcaaatggctgaccaaactagagaagcctttctctctcgaaaagcttgctcagatttcggattcaatgattcaaacatcatcgatgaccgtcgttccaagttcccgtgtttccgattttgctccgacgggatcactgcttcctggaaa

SEQ ID NO: 26441 - DNA, 1265 bp, Arabidopsis thaliana landsberg
acttcaagaatggcgatccgcagttgaggtcgagtctcaacgtaccggaataaggcctttgcttttgacggctgcggtttactacacctcagattacaattcggtttcctacccggtccaagcgatcaacagaagcttagattgggttaatcttatcgcttatgagttttatggtttgaccactgaaatcggtccacctgccgggttgtatgatccttccaaaaaaggtataaacataactaaatataatccctacgtagaaaaagtgagtagcttttgattggtcaagggtttaactgaaatagaatttggtaacttggttggtaggtccatgcggcgataccggtttgaaacattggcttaaggccggacttccggagaagaaagcagtctttggatttccatacgttggctggtcctggactctcgacgacgacaaggaccacggtgatgatgttgcggtcacccaccgagttgccgtgactgctaacggttcgatcaactatgatcagatagttaaattcataacggaatacaaagctagaacggtttatgactcggaagtggtcggatattactgtatcgctgggacaactttgattgggtacgatgatatccagagcgtcgttactaaagtgatatacactaagcacaaaggtctgcttggttactacgcttggaacgttggagctgacgatgtgtctcgtctctctcgtgcaggttcgtcttttgtacattccacaagggaaaccatattgtagatgctattcgtttcctttctatttatgaaaatgtacttaacctctcgtatttggattttggtattttacagcatcacaagcatgggggaatactgaggcaagtggtggagaataaataccccaggggttctcatgaggacgagtaaagctgaaacaaattatgacgattgacgagtgaagaataaaacatgtttgcttatgttattgtaagatagaaataaaaaaacttctggctacgtatcttgttttctgtaataaaaataaaccatgcttgcttgtaattgtaaaccaaaaaataaacaataaaaaaaaggtttggtttctgtgaaaaatgcatcagtagaaacaacaagcagttaactaagaaatgactattatctattattcgattaaaacaaaaacaaaatatgtatattaacgtgcaaatgtatgcctgcatgcatttgaacaacggaacttgccttgagatacataaactggtatcaaaaactgaaaagcatttct

SEQ ID NO: 26442 - DNA, 1350 bp, Arabidopsis thaliana landsberg
atatctcaaactcagagatccactttattcttcttctttggtatttattactttttcttagtttactggttctttgggaatcggtaataaataatattcagtcaagcctcgaaatatgaagtacataagatgaatctcaaaacaatactcacagaatacaatgattaacatttaatcatgcatatagtacataagattatattattttctatatatagtatgttacagagagtatttccgaaccaatcataattacaaggtttatctgaactggtcactctaatacactaatagctctggtgagtcaatgcttgatacttcctctatataccgtcaagaactccatcaatcgcctggaagacctgagagactacattctcatcgcctgttataatagcagtacccatctctgagaactctatcaggccactgttaggattttctatatggattatactcttgtcttctgatccattatcacctgtactctgttcgatggatccttttattcccattttcagtaatgcgtctaaaagtaattccggagccactgagccccaatgcctcaatggccgagcctttcctgaactttcttcctgctccaacccggaaactaatctgtgtttcccatcttccatcagaagccaacctttcaatcttgcaataccgaagctttcacgttgcctcacttttctccagctcaatttggaggcaaagtctgtcgtaatctctacgcttggattgtctacaattcttggtacatgtagcgtcttgttctcaaagtaattcaggattgagatggtctttatcgcagccaaactgatcctctgattgacagcatcagggacctattcataatatggtattagatagaagaatatagacagatgcaggatgtaaatatttcttcaccagagtggaagagaatacttaccaagaaaatctttggctgcaaaacggatacaagtgttgggagcttctgcaacctgcaaaagaaactacagcattgagcaatggtagacaagccaatttagatcacacatttggccgctggactacatgatgacaagcttaacttgtgagctgccatgatatttggaaactaatattttgggatatagtgagatattactggtcattaaatagcaacaatgcatatgtggtgagtcaaatctatactatcagtcaaggtatgcccttgcacaagaacccaggttaattcctattttgtgcagacacaactcagattccttgatccaagacgacagaaaaaaacaactacgaagcaccagaataaaatgtagtattaatcataaagccaagcaaaccttaccttattccagaaataaa

SEQ ID NO: 26443 - DNA, 2616 bp, Arabidopsis thaliana landsberg
tccccttcttctctggagatctttaaatacattcacgaatctgattctaaatctctgaaagtctccaactttattacaaaatttggacaacagatacatgaaacatatgacggtttctgtgcacttctcctcctcgtttgacgacgtcgtttatggccaaagccaacaactttaatttcattgtgtccccttcaatccattacagtctatgatccaatacaaattacgaaccatttgcttgttatcaacaacattgtatcatattctcaataaaatgtttgttgatggatcttgtattaaaatatataaaacgaactgtttagataagtctatgtggccagtttatattggatacacaattagagacatttcagtttgtagagacctccaccttcaagatcttatgaacatggaattttggtttttttacaaaccacagttaatcgaatcttctgttattatggacatggtatatagaatggatatggatcagtaaaaaggtttctgaatggatatatcttaatggacttgttattatggatacaaaactattgtttgttgatttttctttcagtttgcagagacctccacctccaagaccttatggacaagaaaatttggtatctttacaaaccacagttaatcgcatctcttttattatgtacattgtataatgaataaatatgtatcagtaaaaaggtttcttaatggatatacttaaatggactcgtttttatggatatatttaaatagactcgttatcttctttttgtcttcatgggatttaatcggacgactattgtttaattttagccctagatctcggctgaatgatatttccgacggtacgaaggctatgaaaaccagatcttcaggtaacatttcgatcatcatcttcccgaagaaaccgagttcgtcggagatgtcgtctccgagtttgcagagatggttaccagcggcgagaggtgtttccggtaatttaagaaaggagaagatgagtatagttaaggaagaagcagtgatgagaagaaataggaaaaacattggattcttcaaaaaatgaggtttcttcatcgtttctattgcgttgatttcatggatagatgtctgcttaaggagaaagaagaaggaagaagatctgagagagaggaagacctttttcatcagatataagattaaaaaaaaagcaaattccatttctttttaaagaaaatattacgtgattagacagttatttggaaaggatataattgtcctttttacctccaaaaacaaagaaaagtgcctcatccctgaaaagtgcctcaaaaagaataagattttgtaaaagtgtgtaaacgtgtcacattccctttattataatatagatgtgttgacactcatcattgtgtatagcaaagtacattgtagcaaatagtggaatatagatttttagttagagcatggagtaattgttttatatgcatctatttattggaagaaattttatatatgtattgagcatagtattatatattataatctatgtttgtcaagtgttagagaaattttgtttattacattttgttattttattagtaatgaggataaggtaaattttattatgaataattataagaatgaaagtgaattattttcatatgtattatatattttaattaagaattttataagttgaaaacaaaatcacaaaacaaaataaaaaaaatatgtgatttctaaattattcataaatattttattctgtaaatgtttcaaactcatctatacttaattaaagacaacaaaaacaacaaacaacctatttttatgacatttttactaaccaatagaaaaaagagtgttataattgtcaacaaaacatgctattcgataaaacacgagaatggatcttaagttcatttttttgacattgagctttcttcaattcgattgcagaattcgattcgatttactgggttttcggatatcaacaaatctgatcaacttctttctttcatgaatcacacaaattcatcagatcttatcgaattcgattgaaattttgatcaatggagaaggcgaagtgtaatggtctttcaaagtcaaaatctggtgattggagtttagtctattggcgttgtccgatttcttattcatcttccgctgatcacatttcgttatgttaaatgtgatattgagaaggtaaacaaatttgaatgggattgtgaatcttgattgttctgttttacttgatatatttatgcaattcgccaaaatctcattttgtgaattgctcttgagaactgcagtacggatgattggaagtttggagctgagcagttcgtcaaaaagatgccagacaaagtctttgttcactgtaagttgtcttgcgctttgattaatgatgatttacaaagttccaaaattgaaattagtttcctttttcagaattaaacttagttagtggaccctttatctaatcattcagctattaattaggttctgtttttcatttcttgctactattgggtccgtgtcactggcaattattctttaattctaagactctatgacgccagggttattgctccaagaatcttatgatcttaccttttttaagcaggtagtgaaaag

SEQ ID NO: 26444 - DNA, 987 bp, Arabidopsis thaliana landsberg
ttccatcaacccgagttctcgctgaaaacgaagataacaaacaaaccgtaaataaaggtgttgttccaaaacccgccacaagagaatcttggtttgaacttaccagtttgtgaaccaggctctgagattgaaatagaagatctagtatcatcaaacatgcctctagtggtagcgaacgatacagaatggcgtcgaggagagataggtctcgaagttgttttcggtgtaccagaagcagataagattggtggagaaccaggaggagtaagccgtggcgtagtagtttgtgatactaacggaagactagctgataaacttggtttaggagctacgatataacacaaaacaaactaacgcattaaacacacacacaaacacaaaaggttagtggcttaagcgttgagagcaagcaagtactataccatcgttttcgttgtcagttgcagctggttcaatggcttcagaagcttgttgagattggattgatgaatgtcttgaaggttgaaatggagtatcatcatctgaaaatgacaataaaccacaataagaaccatccattttggtatatgaacacaagttttcactaaaatcttcacaagaactataccgtttggtgtcggcttagcgatgatttgcgttgttcctgcctgttacaaaaccaaacacaatcaattcaagatcatgaatttgttacttcaaagcaaattagagaacatgaagagtataagtttcatacattttggtcatcatcttgaagagacatcataagcgtcttcctaaaaccctcaagctgcacacaaatttagaaacaaaaaccctaaaatctcagctacttccaaatttagaaacaaagagacctgacgtcaaatttgaaacagagtcaaaattacctttgagacatctctctgaagtctccccacagtattagacatagaagcattttcaattatcagattctcctggaagaagataattagatcacaatca

SEQ ID NO: 26445 - DNA, 528 bp, Arabidopsis thaliana landsberg
ttcaaatctgcatcaatgtagatacacatcaaacaattagtaaagagtacaaaaatatgagaaaaatattgaatcaataacatcaagattctactcagaaaatataatgagactaaagttgataaagagatttgagataatgaaaccaacttgattcgtgcaaaaaaggcaactaaaatccagaatccaatccgatttacaaatgatatttgcagatttgggacaaacagaagcaagcacagaaaagttgaccaaaacaagataaagcttacgtttttatttagccttcttaatagtgtttatctccagagtacaggaagatcaaagatttatctcaagtcagcaattgaagcacaaataaattccaacaaagattttaaaccactctagatcaaaagtttgccacaaaaaggaaaagagatctaaaaagatcaattgacagctcaacaaaatcagcattagaattgtgtgtagaagaaatactaaatggatcaatcatacgatcaccacccacaatattttatatga

SEQ ID NO: 26446 - DNA, 1469 bp, Arabidopsis thaliana landsberg
  unsure (1)..(1469): unsure at all n locations
tgtctcataatccagtttttaataaacagggtaaatgcatgtcaaagtgacaaaaaatcagttgatagcaattttatctgttgattttgaaaaacatgattatgaatgatatatatactaccaccatatatctatataatcgcgtataataacaaactcaacatagagtaattcaaatacacctttaagatgaaggatgggaataaaaaataagagtattcctgcaatcacaaacacaggagcttgttcttcggctttatgttgaattttttcagcgttcatgttcaacaacactaaccccacaagtcctatcaatattagcataatccatcccttgcttatagttatagtactattactttgttctatttcactattaggttcagacgaagtttcgccactaaaagtgcctattaacttccataatccagctccacccacaataacaccgaacacgaattttaccattttctctttgtgtagttttttaaaagatattgattgattttttaaaaagttttttttgatactaaatgagagacatttgcttttatagttttttttgggtctatatatcatagattcacatatatattttggttttctgaattaagtaagattgaaaaacaaaattatggtcactcaaatgttgttaggttttctatttaataatctatgatttcattatttgaataacctaaatgtttttacaaggattctgatgcataagttgaaataaatagaaatatgtaactaaattactgtaagaggaaaaggctataatgtgatacattataagtttataacccatagtaaatgtttcttcttttgtatattttcagtcaaaaatatgaatttcagtatatcaagtttattcggttcgatcgcatcaaatttgagagtacaatttggttaattcggtattagaattctatcgngtcaggttcttataaaacttggttcgtttcggtttaatttaaacatcaaacttgattcttgtgcccccaagtccaattacaatacttatatgattatattctggtccgataaatccattgggcttattaatgggctttaactctctaaaacacatcttggcgcgtgtaacatggcagcacagaaagggtatgtgcgtgttcctcacatgaattcacacgttaaccgcatacgtacgcgtacccgccaagagtttacggatttaacaaaatgtcttttatacccttatagcttacccggcaaatttatcgcatgtagccgacaaactttatcacttaccttgcttacaaggctaaatctgagcggatattgacgataatacccttcatgtttctcaacaagcttttaattttggataaagattcccgtacaagcttatttgaaccaaacaaattacaaccatttttaatggttacctactttacttttgcctgttcacgttaaaaattcaaaaaccccaaaacgctataatc

SEQ ID NO: 26447 - DNA, 1028 bp, Arabidopsis thaliana landsberg
  unsure (1)..(1028): unsure at all n locations
gcagcttaatttcttctattgatagagaatagtgaacgtccaacaaaaaaaaaaacattcaagttcaagatgaatattgttttgcattttcaactaatgatttgacatatggagaaagtgtccaaaaagtaaaaggtaaagactgttatatcaattatgtaagagactgataataaccatagaattcccaaaaacaattttttgtagattttttttttatagttgttattttgttaatttaatatatttttaaacatgtgtatcatatatatcagaatcatttcttaaaaactaaaacaatgatttttttttcttaatgaatattgcattatttgcggataattgaaaataataaaattatgttatcaaaatgttgaaaacgtgaacaaatggctattgatcacactataaattttccgtcaaataaatgaatagttaggtatcacatgtgatctaagatttagatgagggtgtccaaagtgaagaccaaatacatttaacagtaaagctacagtttagagaaattttgatcataaacataaataaacagctggttagggaagtggtagttgtacctaacagcaaggcagtactcacatgatcgatcaagccaatcnnnctggctgtggattacatttacaagtcttacattattatatccgtacttgtcacacattgtacataatttctttacctgtcaacttagttagctcttgacttttttgagtgaataatttttcaaatgtcaaattttttacatacaagcctataatatgtagataggcaagagctccattgagtaaaaattaaataccttctttcggacgtagaaacgtgtacacaaccctaacacttgcaatttaaacaatttctacaaaatgtaacactaaccatttaatcaatttcatcatactacgacatagaacaataattactttgtttaactcaattcgagtgtgtacacgatacttggatttagaggtttttaaaacgtcttttgtgttgaaaatttagtcaaccagacttta

SEQ ID NO: 26448 - DNA, 1254 bp, Arabidopsis thaliana landsberg
ttgagcaaatcaaatcctgatcacgatgaaggctgtcttctcaaatcaaagaaagaaaccaacaaaagacaggagaactaaggaagagtaatgagaaagtaaatgctatgtaccaacaatagaaactggatcttcttgttgtaccaatccagtcctcatatttgcttgatatatctgttgttaactgttgttctgttacacaagcgtctgcttctaccggtgtgaccatgatcatttggttttatcattcggtaacaaattcagctcctgcatttgtgtttccacttgtactaagcctgtctgagcaagaaacctacagaagaataggcattgtaagcaactaagcatctagtgaaggttaatacttaatatactcttcaagatgcataagtaaaaccctattagaatcttagaaaccttagagaacagacaggtaacagtaagataacacaaagatgtgatattttctaaggaaatacaaaactatgagaactgagaacccttatctgatatctaactcaatagcacaaagatcatgatgaagaataactcattaaaacaatgcaacaggaacaccttcagcttcaagataacagcaatgtagagaaatatgttcgaatccttaaattgaacaactcaaggattgatcaacaacacaataagacactggagaaagtttagtaccagatctaattacttattcgtctaaaaccctagaaagtaacgaaaagtttcaacaggaatcaacacagaaaaagctcaaacaaaattgagataagagaagcaaaaattgacataccaattgaggaggataaagagagtagatgcgataacaatgagaaagccaacatgaacaagcaacattgattggccactggtgaaagctacagagagcatgaaagctagacatagacccagtagcagaaacgcgaatctcaatgtgttccatgttggaccctggacaaaatcacgatccaaattagggttttaaccaaacatccacaaagaggtaacaagaattcgaagagaaattagtacagacattaacgcctggagctagagctccaaggaaaacagcttccgttgacgaaatctgagatttcttctccatctttcttcttcttcttcttcacagagagttcttctgggacgaatctgttcccgaagaaaatatcaattaaaaccgataagtaaaccggtatattccggtttcggtaattgcaagtgattactattatcagaattttggtttga

SEQ ID NO: 26449 - DNA, 5172 bp, Arabidopsis thaliana landsberg
  unsure (1)..(5172): unsure at all n locations
cgtttgtgacgaggaggagaaagaaggaagcttttggggattgggtagtaggaagtagtggaggcagccatcgatggggtctgcatctcagccttctttataataaatattgttgttttacttttattgaccctaaaatgtagttgtaagttgtttatcgagaatttccagatttcttggagctgttttagaaaaatatgatgactctttttcttccacacgctttgatttccaaaaatataaacggacactagtcaaattaaccttaacaaattgacaagtcaaattgtatgttttgctcatgtgtccctcttgtcttaaaatggtcacctttcaacacattcatttcatggcatctccatccactatgcgtgttgcagattttgaagtatctgaatccaaaaacggtcccttgatatgctcttccaagaagcaattttaaaacggttctaatgtaaagttagtactcgtggacttaggataaagaactatactggccaagcaattctgtttgaatcatgtttctcttaaaatccagtaaatagaagacaagaagaagtgatgacgaacggttccgaaatgcattttgtggcatattataaggtgaagtttttatctgttcccattcacaaaaccatgctagccaaactaccaacaaacataacaaactcaaatccaaacccaaagaaatttgtggcaaacctgtgtaaatccattcctgaaatcaatcttaagacagagtagaagtgataaagaacagttaccaaatgctgatctcatcaacaaaagtatgatagccaacaaccaacaaacattaacaaactgaaatccaaaccccaaacaaatttgtagccaacctatataattccatcccagatatcaatcttaagaacttggtcatcagttattctttctctaacatattcatcaaaatcaccttagcttagaatagcagacgaaaaaggtcgctgcacccaaaccagcagctccaactgatccagcaacaaccactggccactgatactcagcttccaaggaacccttttggtcaccaccatgtnggtttttgactccattactaggcttcatggttctctcattcaaagcaaaaaccgtcttgttaccttcctcaaccttcttcagtaactcgtccttcttcaactccagctccttctctcgtttttgagtttcactcaaagcttcctccgtgagcttcttctcagacttccatttcttcaattcttctacattcttcaccaattccagattcaaaacaatgactgtcttctgcaattcctcaatctctctctttttctcatcatctatctccctcatttcctcttctgatctaagtttcttactcttctcctccatttccctcacttccaaaaccccaatcttcctttccaaatccctaaccctcttctcaacctcagctctatctttccttaaaccctcagcttccttctcacacccctccagcttctccactatctccgccaacgctttcttcagctccgccacttcttccgccgtcttatccactccgttcaaggaagtgatcagatcgtcatgaagattcgacacctcagtttcaagctccacagctctagtagaaatagcttccaaagccttcttctcttcctcgtactcctcgatctctttctccatctctccgaatctctgattcatctccgcttctacgtctttcatctcttcaatttctcccgtaagcctctctaacctctccttcaattcacgattctctctcgtgagctcctgattcttgttctccatatcctcaatcttcctttccagttccgtcgtctttacaccaccttgatcgtagtcagagatccccttcgccgcacgatcttcaacatccgccatttacgcttctactagagaaaattcaacacagaattaagactcaataacacgaataactcaacaaaatgtaaagtttgatgctttagagaagaatcagtcactctgactttttcccagcaatctcacacatcaatcatcatgatgatgataatgacatttcgttaatcggaaaaatctggtatgacgaataacaaaaaaatagtaagagaattctattgaggtttaccttccgattttccggtggagggatcggctaatcggttaaaagattcgatttttagggtttatactttacagagtgagtgacaacaaatggcgttgagaaattgggcggtcctgaatacccacgtgtttaaagcaagtccacttggctgcatcattttcagtgatctctgttatatgggccttaaggtccattagtagttaagctccatcaggcccaaatcgttgcttgcagagttattattattcttgttcggtgagttctattttgtcttccttgtttcatgagttttatatatgttttttttgaaccttattggtaatgagctctatcagacccaagtctgctattatcgcttgcagagttattattgttcgtttattctttgttcgatgagttctttttttggcttccttgtttcatgagtttatatgttttttctgacaatattattggtgactaaatataaagataaagaaaaaaataattatttttcacttctttatttgatgtaaattaaatgttaaattttataccattttcattttcattttttggtgtaaatgtcaattattttcattttattggcatgtgttttatcaaatctaatggctggagcaccgaaagttatatacttatattacttatatgaatttgagatatcaaaggagaaattgtggagataaaattttcatttctcgtaatattttggaataaaaacacataagattgttttttttttaagaactaaattatgaacccgaactaaacagcaatatatataaaaaaaaaatataaggtgaaaataaatgaaaaaacagagagaattccaaattgttttttttttcttctgattttcagaattctaaattgtttgttcaatcttcaacctccaaacttcatatcttttttctcacaacgctcaagaaacctagtaagaactttaatggcattgatctgacattgcagagccaaaatgtaactagctgtctcttcgaacagcgcgtcgacaccaagttccgttcctccgggaactattgtctgaagcgcctcgatcttctcctccactccttcttcatcttcatcttcatcttctacgtcggtctcgcttacactcgccgttgcatcggacaatctctgtctggttctgcggttgaaaccagtggagcttgtgttcacggcggaggatggagacggaggagaagagcgtttggtatgggaagtggctagggttttctccattgacggagggagagaagatgtgttggaagaaaaggagtaaagagacctgtgtgtatttatatgagtgatgtgaattagtagattgaagtaggaccggttaaagtcattccggttcgttttactttggtttactcttgtttgcctttaatgatttgattatgagctgaatcttagtgcgtttggttaagactttagtttagtactatgttttggttgtgcgatttaggtttggggtttggctataattttggaaattgggtaatgccggtatgccatcaaagctgggtccagttgtgattttcttttctttttttgttcttgagtgtttcgaattatgtgttggagtgtttgttttgttggtttatttattaagagagattttggatcgtgattgtcacgcgctatgttgtgtggtttagtggagacgtcactatactcaagtggatctccctgaggtcctgacagatagatagattgtatctttatttgtcttttaaaacactatacatcacaaaagtttaatacataattgaaaatatgcgtgtcattaacaaatttgtaacatgcttagtttagtaataatagagttatcgacatgtgtttaaaacttaacccagactttgacttgtgggtctttgttttgtattcttttcggaaacattaatgatgtgtttgaatcaatatttcaccataaagataagctagttatttgtatcttacaacttaattatgcatgcatacgacaaatgcaatacatgctcttcatccagatttcaaaccaaaaatgaatgaaaatatgtattagagttagcttgaccattctcttatataatccatattttttttggatcaggcgatttttttaaaaatgtgttgaagatataagatgatgcatggaccttagaatgtgagattaagaaaacaatcaatcttaacttgtaacttatatattgatttgattatcatattaggttacataattaacatttcaagtttcaaacttgagctcagcttgacttaaatctagttaagaatggtatattactaatcacaaattaaagagctaatcccacatactctctctctctcgcacgttagaagaagggaggagaggaatcacctgcgacaggtgcatgggagcagaggagatgggagccacaaaagctccgtaaaaaaggaaaagagaaaaggaaagcacatgtgctcacatgagtttctccatctatcttaatattagctcgcatgtgcctctctttcttacttccacacacattatgatacactctctctctctctctctctctttataatagggagaggaatgaattaatagagagatacagttgtagatagtgaagtggtggtggtactggtaccatgatgatctacttaactagttgcagttgcacagaagaagatccacatgattttccatctcgcatgggagccacgtgacatcttttatggaacctaccttttcatttcctactattctatccctaaatcttttgtcaactccctttttttcactatttccaagaatttccaggaagtgtttattatagagaaaccatttaaaacaaaaaaaaaggagaatagagaaaaggtcgtcctcatgtcggcattaatctttgcacaattcactcgagttcatcctcttttttatttttttcaacacaaggctatattttaatttttaagttaactacttattttgttattcttattctatggatatagtaacactccgttattactaaatagttatactagattactagttacttaagaagttccctcaccatcataaatctaat

SEQ ID NO: 26450 - DNA, 1522 bp, Arabidopsis thaliana landsberg
caatttctcaagtttcgttcgtcagctcaacaacttacgtacgtttataataatcatttcttcttcgattccttctatttccattgttcttgatttaatcaatcctcttttttattcacagggattcaaaaaagttgtaccggatcgatgggagttttcaaacgatttctttaagagaggagaaaaacgtcttctccgtgagatccaacgtcggaaaataacaacgacgcatcaaacagttgttgctccttcgtcggaacaacgaaaccagacgatggttgtatcaccgtcaaattccggggaagataataataataatcaggtgatgtcttcgtctccgtcgtcgtgtattgtcatcaaacgaagacgactgggaatggtggtttatcagtggagttattggaagagaacgagaagcttcggagtcaaaacattcagctaaaccgtgagcttactcagatgaaatctatctgcgataatatctatagtctcatgtcgaattacgtcggatctcagcccactgatcggagttattctcccggaggtagtagtagtcaaccgatggagtttttaccggcgaagcggttttcggagatggagattgaagaagaagaagaagcgagtccgaggttgtttggtgttccgattgggttaaaacggacgagaagtgaaggtgttcaggtgaagacgacggcggtggttggggaaaattccgatgaggagacgccgtggttgagacattataatcgaaccaatcagagagtttgtaattaaaaacgaacggtttagatttgtggtgtagatatgtgcgcgaagtagacgattacagctttttaagacaagcagagcacgtgtcccatctgtttcaagaagtttctgcaatcttgacttcttcttttaacactttgtgttttttattatttaattaataacaataaatgttctttttcagttttgttttcttcaaaaatagttcggctgtttctagactttccttttttgacctttttttattcttcacatctttttgtgtgttttacaaatataataaacgagaaatgaggtagggatttcttattataaggataagaaattaaaatttgtaatgtaatgaagcatctggaatctcccgtttggtgggcgcgattcagggaacgtgttgtggacccagtttcgtcgactatcacaagtacatttttagattttcaacgacattatgtagaagattggtttcgattacttatttcagttggttagattgaatgtgttgggatttagatagagaaggttacgtgaaaatttgctcactcatattattcgttgaggtttagcaatcacttgcaatgggaaaccaaaaaccaaatgcataacttgcaagaaaaatgagacatcaacatctaactgatttttcttcaattagatggcatattatttacaaaaagaaaactaattttatcaaatatattatcttgaaaagctagacactaatcgattgtgagtttatgaattataagggtcctaa

SEQ ID NO: 26451 - DNA, 820 bp, Arabidopsis thaliana landsberg
tgccgtaatagcggtgacgtatacctgcaagaattccgacggatttgacgtaccgtcgtacttctctggcaggtgtggccggaacttggatggccaagtcgtcgcacggagatgatccgccagtgcggcgcagcctacgccggccaacgggacactcgcctgaatttgggcacccttggagtttgcggcgcaaccgtggagaagtctaggtcgaggttgcgaccctcgacgttctgtcggcgctcacgcgcctctccagagagacacgggcatcctcgcccgcacgcctgcggttgagttctgcccataggtcatcaggcctctccagagagactggagcgtcctctcccgcacgcctgcggttgagctccgcccgtaggtcctcagtcggtgcggccttcaccgagggtgagcgcactaacgtcgacgcctcatgttgacgccgggatgaccgaggcctgggcctggcttaccagaatgcgccatgccgagcaggcggtcgatatcgtcacaccactgcttcatggcccctggttaggccgtgcagcttgggggtggcgcagcaactccctggccgcagacaacgcccccgaagctgcccttgacggagtccgggatgtctgcacagttgtatgctgctgcacagggtgcacagcagcagtgtccggcactgggcggttgggaacctatggtgtggaagaagaagctttttcctccaccaggaaatccaccaaaatttgggcgcggtgctcaatgatttgcaccatcatgttgagcaagaaaacaagcaaaaacctaaagcctaagcccgctacctggc

SEQ ID NO: 26452 - DNA, 1573 bp, Arabidopsis thaliana landsberg
acccctcttggtgtcaaggctaaagaagctatggaaaatttcagcttcttttgtctttctttgagagagattctgttatgggttcctttctgttattagattttttattctttgtgattgtttttttatttcagggagagctcgtctctgatgatttggttgttggtataattgatgaagccatgaacaagccaaaatgtcaaaaaggatttatccttgatgggttccccaggactgttactcaggcagagaaggtgatgctcaatagaaaaactcactgttgattcggtctccttttggttcttttggttttgattgtaattaacttctaaccatggtggtctgtcttttgtttgcagctcgatgagatgcttaagaggcgaggaactgaaattgacaaagttctcaactttgctattgatgacgcaatcttggaggaaagaataaccgggcgatggatccacccatcgagtggcaggagttaccacaccaaatttgctcctcccaaaacccctggagttgatgatgtaagacttacagtaactattaatatatttcgtctgtttatttcaaatgccctcccataaatctgagactctacattatttggtattgaagattactggagagcctctgatccaacgtaaagatgataacgctgatgttctaaagtcgaggcttgcagctttccacagtcaaactcaaccggtattgattccagtttcatatatctccaggcttattaaaatgaaaatctgtatcttttgcaaacatgttgatgttctccccctttccacaggtgattgattactacgcaaagaaggccgttctcacaaacatccaggccgagaaggctccccaagaagttacatcagaggttaaaaaagcattgtcatgatcaaagactcctcaagcaaatcatctcctctggttagaatccattcttttccttactacaagagagagacacatctatataatccactcatctgcggaatgacagttttttcttttagtccttgcgcttttccttcttcgactaatattcaaaatatggagaagagtttttactcctgaatattatctactgtcgcagtctctttaccaaataagtaacttgtctcatcgtttttttactcggaaactgataataataagagggtaatttaacaaggtttaaacagaagataggagatgagtgtagtctctttctttatacagagctaagctaatgaacatacgaaccgggcaagccttaaccgaaacgacaactggttcgcaacataaagtcacaatttgtaaacgtgatgttaaatgtaactcttttattctaaacatctaatcaccgattcggggctaaacttataataaaattaaattacggtccttattcataagaagatataaaaccagggggcaatttgaagtttctcggttcgttagtacttcgtacttggcttcttattttcccgggaaaacaagaatatcagaagtctctgtaactgaatctcacatatctctctctttacacagagaaccaactgagaaactttcttcaacgatcgaaagaagc

SEQ ID NO: 26453 - DNA, 1175 bp, Arabidopsis thaliana landsberg
tatttgcaaactgcaattgatgatatatgagtcctttcaggagttttttaaagactatgattgtatcagttcttctaggattgctttcagtgcccccttttattggtatacttgcatctctttgcgtgtttgttacacataatgtattttccataatttcttgctgagcatagaaccaatagcaaataagaaatttgtagataaaatactacagcatctaacacatctcttacctatactgatcatagtgaccgactaactttctgatatgacgtgtttaatggatgaagtgatcacattacttttcaaaatgaatattctgagacaaatttgatatctcatgccaacttctttatattggttaaaggaaaaataattgaagttttgactctttggcaggtgcaccaatcgcaggatcagcggtggagcaagtagagcaagtggtgggatatgtgaagttgggatacccatttggcctaatggcctcgattctctttgggcgacaccacaaggacattctctcatcccctaaacccaaactcttcgtaatgggaacacaagacgggttcactagcgttacgcagctaaagaagaagctgaaatctgcagtcggacgcactgaaacacacctcattgaaggcgttagtcatttccagatggaaggacctgaatatgattctcaggtgaccgatattatatgtaaatttatttcatccctgtaaaataccacatgaaaagatagaccttaggggattattacatcctcgtcgaactacgttggtgtatgtccggaaattacttggataaatctttactagcacgataggagtttgatgtccctgtacactacgcactaaaagacttgttttcatatgttgagttattatcactctatcggacatttcttcaagctttgcaattgcatcgagaagagtttgctcacgatcatgtgacatcctaaggagacaaatcaggttcatactaggatgaagaataaaaatcctaatcttggttctattaataattttaactgggagtttggtaaaatgagcatcatctacatgaaaagcattcatacgcgacatctctctccatgcacaaaccactcacaaaacagtgagttacataagatgatataaattatcaaaatagacaagcatcatctagatgaatgt

SEQ ID NO: 26454 - DNA, 1193 bp, Arabidopsis thaliana landsberg
aagatcaacttcatgtccatgacacacgtaaaaaaatgtgatgagcagattccaaacttggaatttcgtttcaacttcatccctatctctgatatccaagctcggactgacaatgataatgttttcattggtatagtttcttcttcctaaatttgttttttaatttttcacttgcaactttatctttcaaattaatgtttgcttatattttcagacgtaattggtgagatcattggaatgcaagaacttaaagaggttaatgtttcagggcgacaaacaaagttattaaatttacagcttagagatcttgggttagttatctatcatcctaaatatttcattatttgtataatgtagctgcatctttactgacacaaacatgccaataattgtatcagagaatcagtcatcgatgttactttgtgggaaaaatgggcagaagatctgtactcttatgttaagggctacaaagatggttcaattgttttagttggaagcttgatgaagataaagacatataacggtgtagtcattgatctttttaaaacgtatatctcactttcactataagggattcattgatttggttcttaatatttagcaggcaagatctctgtccaaaatcatcattttcgaccaagctctttatcaattcctcaattgccgagataactgagtttaaagaaaggtaaacgagtcttcttaacttttgtctactaacaacatatcaagatgagtatataacatttcaatatatgtgtctacagtttggccaaatctgattgtttagctttaacaacgatttcaacaaatacgtcttcaagctcaagcaagcgtttaaaagcatcattctctttggcagatcaaaaaacaatagcagatttttattcggtattatccaattttatatgttttggataagtgtttaattttctccttagatctgtaaatcatatactgtacataatgcttttgttacatgattcagttacgaacccaatccacaagaatccaaagtgttcttaattttcaatcaatccttcaactatttttcagcaagagttcggttcataactgatgaagagagagttcagaaaactgttggtctattggagagtcttcttgttcgacgcagagttccaaaaacactattccatttttcttatatcttggtgatttataccacaatcggt

SEQ ID NO: 26455 - DNA, 3313 bp, Arabidopsis thaliana landsberg
taaaaaaaaaaaatctattaacttccctggcttgatataaactcatgttgttttgtgatttcctaacattatataatgccaaatgtttataactgaattagacatttgaaagttgcaaaaattaagatggccggcgtatatgcaagaacaaaagtaaactcatatgttttgggatttcataacgtacgttatttaatgtcaaacgtgtaaaattgaactagaacttagtaagttgcaaaactaatgatggcatatagacaagaagcaaacaagcccgatgtcagtgattggaaggatttgatccacaagaatatgcaaaaggagaggctaatcgaacgcatgtggtggttggtctcgtccatgaacaagacgtcctttattattgtttccaatgcgtcttcttatatatgtaacgccaataataatatgtcccccaacaaatccgtgattgtaattcgttggagccaaaagaatatctcacatcgacgatatcaaatcacaaaatttacgttagcatttttggacttccagaaatacaacgcaccgacaactattcctgtggacaacaaaaaaatacacatcaaatatttttcctagcacactgctataccaaaacaagcttgtataatatttggaattttggataccaaaaataaacactccaaattatcaaaaaaaaaaaaaagttaatatatgtttgttttatggtcagttcaaacttatgggaaccattggtaactgagtttactcgagtgatttagcatagtaaccaatcctcttaactgaagaaagctttcctattccaaaacaagaatacaaacatagaaactatcagaaaacgttatctgctataacagacgtatccaaaacaaaaggcccaaaaaacaacagagatattcatccagaacaaaaggcccaaaaaacattgtcatttttctagtattctcacagctttcccttatctttccgagcatcatcatccatccgtccaacgtcgttgaatgtttgaccggtcatttgatccgacgccttcagtgaagtcgccaccttacccggctttgaatcctcgaccttgacttcaaccacagtcctacccgtccctccatgctcacgtgccgcgcgtgtttcctccacaatgtctgatggcattgtcagtttgctctttattgcttccgttacattccctaatgcaccaaaaatagtccctttcgcttcatttcccctgcatgatttaatcacatcaaaaaacaaaacaaagagtttcacagtcacctttaaacttgaagaacatgacaagatataactggcatttcatcatttacctcacggcagcagaatctttggtctcttcggctttttgagctcccgactcagtactctccctagtcttttgagatgcctcttgggcttttgctccagcttcttctttgagctctttaccttccaatctcatttcctccatcttttgtcttgttacttctccagctttctccatgttttcctatgttatcaaaacatcacattatatcaaaccatttgacatatgtaatcttcatttacatggaaacaaagttccaagaaattataccttggcagtatctttggtctccacagctttttctttggcctcctttgtcttccccgcccagaaacccatagctcttttcgttgtctcaacggcactatctttcagctctcctagcttactcaccgtaacatctttcccctccgtcgccttctccaccgtatagtccttatactctccagtcttctcagctgtcttatcctttgcttcaatagccttctccgctgtgtaatccctagcttccacggccttgtccaccgtgtaatccttatactcaccaaccttctcagccgtcttgtccttagcctctttagccttatccgccgtataattcgcagtctccttcgccttctccgctgtcttatctttagcttctactgccttatccaccgcatagtctttgtactcaccaatcttctccgccgtcttatcctttgcttccaccgccttatccgcagtataattagcagtctccttcgccttctctgcagttgtgtccttagcctctttagctttatcaaccgtatagtctttatactcacccaccttctccgccgtataatcagcggtttccttagctttctcgacggttgcgtcctttgctccaaccgctttctctgaagctatctgagctccttctttggtagactcagccgcttcgtgggtttttccaactacagcgtctctcgcatgctcatacgttccttggacagccctgaacactgatcctatcacaccgggcctatcttgctccggtggatgttcagttgttctctccgtcaccttatacattgtgacatcagcaccaccggatttgttaatgtcatgcaagtcctcagccgctagcctcgccgcaacctcggctctctccgccttttgtttgtctgacgccattgcttttttctcgattgcttgaaaattgatgaaaaaccgctttagaactttacgattttagaattctttaacttgtgctatcagttgagctgcttttgttacttcttatagtaatgctctgtttctgttgagacgctacgtggtagatagagggacgcaacagctgccacgtacaatttacttagctttatcttctacggacgtggtatgacacgtggacttttcatgcatggatcatgattcttgagtgttcatggcatgacttaagagctaagacataagcaagcaagcatcgatggtcggtcgtatcaaatcttttgatatcataatttgtgttggtcgaggaaaatgttaggtgaagatcacattcgccatttcaaacttactgaggcacataacttggaaacaagcaatttagagatatgaaagattacttagttattgccacacagtttattggaagttattgcctcaacatcaaaaacttggaaacaagcattttagaaaaataaggacgcaagttaatcattggatagagccgtttattgatcaagtcggttatcaatataattttgagtttttgacggttcttgggagggtatacaaaaaagttcattgcaatagtttggatttatttccaaattttctctaatttgccagctaattcaggttagcacatgagtctattgtcttaaccgaatagacaactctcttttttgttaaacatctctattagtcaccttaactttttttttttgtcaaaaataaataaatcacgttaatcatgttcttacatagattacttttatacttaattaggtacgttcttttttt

SEQ ID NO: 26456 - DNA, 1452 bp, Arabidopsis thaliana landsberg
tgttgtagctgatgccgttgcacatgggtgtactggaaaaggaaatgaccaggcaagtacttggattgtcttgctaatgcgtcacattggaaaacacgcattgattcttacattacttttttgtactgattgattgaccaggttcggtttgagctcaccttcttttcattaaaccctgaacttaaagttgtggcaccatggagagaatgggaaatccaaggccgagaagatgctattgagtatgcaaagaagcataatgttcccgtcccagtgacaaagaagtccatttacagccgggacagaaacctgtggcaccttagtcatgaggtaaagtaaaagacaagtgttggttcgcatttttcttttggatacaaattgatccagtttgtcacattgctcagttcctaataatgtgtctcatgctctgatatcaaacttatgtgttttgttgaaagggtgatctattggaagatccagcaaacgagccaaagaaagatatgtacatgatgagtgtggatcctgaagatgctcctgatcagcctgagtaagtcggaatttctttgagcccttgtgtttaactatgcactgtaattaccccaaggtggtttgtagtggattatagctgtgttgatagtttgaaaactaaagttgagtcagttagctacagagctgaggtttaggcagaatgagttggtgtgttcaggatttgtttatggtttgggattgggaatcagatctagaatagagagttctcgttaataaagtctctcaaaggagttaactggtttagctgctatgctatcaaatttagataccaagagtaggattttgcaatttgcatcctaacttttgatacttacacacttatacagatacatcgagatcgggatagaatctggacttccagtggcgctgaacgggaaggctctgagtccagccacacttctggccgagctaaacacaataggaggaaagcacgggattgggcggattgacatggttgagaaccgtctggttgggatgaaatcacgaggtgtctatgaaactcctggaggcactatcctctttgcagctgtacaggaactagaatccctcactctagacagagagagtattcaggtaaaagacacattagcactgaaatacgcagagatggtctacgcgggaagatggtttgatccgcttagggagtccatggacgctttcatggagaagataactgagacaaccacgggatctgtgacactgaagctgtacaaaggatctgtgtcggttacagggcgtcagagtcctaacagtctgtatagacaggacatatcttcgtttgaagggagtgagatctacaaccaagcggatgcagccgggtttattcgtctttacgggcttccaatgaaaattagagctatgcttaagaaaatagctagaaatggttttcattcatgtcttacttgg

SEQ ID NO: 26457 - DNA, 2282 bp, Arabidopsis thaliana landsberg
cactctagaggatccctcgcagacgagtgaagtttgaatataacggtttttgcacggaggaagaaagagtgaggaagaacagactcgctctgcttagtaacattgccaatcttcccaaaggagtcattgacctctcatttttgcccggattttgatctttacttgtttcataatcccactccggaatcatcaattcattgacctctcattttttctttgtttcataacctcatatagttatgtgttcactgagcaaaaattcaaactaaaacttgtgcaatggaatactataaaaacagtttcattacctcaataaaaagatttcaaagatttttagatacttctgattgagatgtgttctatttcaaaattatttttttttttctcacaagtgatagaatttattaagctttcacaatatcatacataggctttaacaaaagcccaaacagcaggtttacagaaatagccaacaaaggcccaatagataaccgacttctgcagaagaatttcaatctaaactccatccatggaaacgtgtcgacaaccggttaaaccacgtcgcacgcctgatgagtaatcacaagtttttccggcaacaacctccaccgttgagcgaagactcttatgttttgcaccgaattgaaagcatcgaagctccaattaaagtaacagcttaagggaccatgataagcgacacaagaaaatcttctttccttcaacaaaagagtgaaatctctttgaaatcattctgtaaatccagagtacaaaagaaaaggatccgaaatttatcttgaagagataagaaactaattcggatcggagtaaaactcaaaggacagagacaaagaagaaccaccgtggatatggcagatcaacatccctaatcgtagatccgatgagattattagcaaattaaaaacataattgaaaaattaaagcaaaaacagaatccggccatggcgctaggttagccggtcgatgccgggcaaaagctagccaccgctacttaggaagccagtcggtgctagacgaaagccggccatcaccgttgagaaaaacggaagacgccggacatgtagccggataaccacggacggcgagaagaagagcgtattctctctctaaaatattcagagagcgagaagagagagaaacactgacgaaatttttgattttatgggctaacaaaattcaaatgaaaacattggattataagatggttaacaaaaatggttgagaaaaaaccatcgagagaaccaaagggagagaaacggagctaagttatggaggaagaaaaagcggcagcttactacgacgagctcacgcgtaaaggagaaggagctgctcgcttcaagcaaggtctcggcttctccaccggagccaacgctgttccggagagaggatcggcgatcgcatcgtcgtcttcgtttctcaaccaattcgtcaaggcttctaaccatactaaatccactgataacaaggattccgagatccggtccatcagagataaattgaagaagaaacctgaagatcctagggtgccggagaggagctatagagagtcgagtgaacggcgtcgttatcggagtagagagagggatgagagagataaaagccatagaaggagaagcaggagttcagagagacgtagtagttatgtggatagagagagacggagaagcaggagcaggagtgcagagaggcgtaataggtacggggatagagagagccggaggaggagtaaccgaagcagaagtttgtcgccgaggagagagcggaggagcagagaagatgttaaggagaagaagcctgattactcgcggttaatcaaaggctacgatgagatggtaatactcatttctctcatcattcttcagcctgtatggttatcatacttcgaggaacttttgtttaccagaatcagcttcgtaatgttataatccctctagagttaggacttaggagtgtaataagaacttagcaattacctttacatattgcaacataggaattgccttcatgtgcccacattcaatagatgttttgagattataaacccttgatctctaatttggtttacccattcttgtggagctccttctttgtttatggatgatagtcatagattctgtaattttgttgctggtgttttgtgtgtgtctgtgtgtgattgtcatttccgtggtattataaggttggtttccgtgttgctttcttgaacagtcagctactgacacagtgcaagccaagatcaagcttcagcttcatgaacgggtatg

SEQ ID NO: 26458 - DNA, 1204 bp, Arabidopsis thaliana landsberg
atggacaaggatcgagttctcaagctgctggttctgaaatttctttttctcaaactgcaaacgttgaatcgggtgaggatagagaagaaattgcacatgtgcaatatgatattcgagtgcttcacccctctcgaagaaatggagctaaatggtattgttctttcttttatgtttcattcattatttaatgtaacaaaagtaactgtaaatataatttaaattcatatgcatcaggttcaaaaacaacaccgaagtatcaacgcgtgttagaaaaatcattgaagggtgtttccagggaccttggtatagctggagaaaagtgccgcaattttatagagatgcatggtttacaacgtttaagttgtgtgttagtcatatataaactatttttcagaaataattctttatttaatacatgtctgatatagatatattttagacaaggtttgagtgggatgcctcgattgagcatctagttaaagccaactttgatgccctttctgctgctcgcatcaaaggaatggttagtcttgcaaagtccaaatgaaaacaacctgactggattctggctgaatatttgagagtaatggtagcttattggaagactccaaaagcaaaagaaaaaagtgaaaaagctcgttcttcacgactatttagtcgtgatggtttagaccaacattgtcacagagcgggttcacgttcgtatgctaaagttcaagatgtcttggtaatatattttatttttcattttggtaacaattatgttttatttaaaaacctttcataagacttatttactttcttttttgttttgtttttaggaagcgaataacgaagactcttccttcattgctgtgatgagagctacacaccaaaaatctgatggaacatatgttgttgaaagagcaagactaattgttgaacaatatgatgaatgtcttcttgaacgcttgacacaagcgaattcctccaatggagaggttttgacaatggattgccttaccatagaagagaaaaatgaaatctatgtcaagataactttcacttgctttcacttaaatctactttgctttcttggatctttgaagaagtttgtgttttaaaatttgtcaatattcatgaactaatgttttttttctagattgttggaataccaaaacaaggtcgtgtatttggatttggatcacttcagagtggggtttcc

SEQ ID NO: 26459 - DNA, 3065 bp, Arabidopsis thaliana landsberg
atcatttattgagcatgtcaatcacctgtaaactgaggaaacgaaactacacaattaccccatcctcgagaattctttatctgattgaatttattgcttaatctactattgtttactgcatcttgccatatgttgcttagtcactacaatcctttcttggtactcgacctgatactcgaccaccctgttgtctgacaacagactgtgcactcgaatatctttgtttcatttactatctgttactcgaccagtcactcgaccttattcagtgcttgatatgtttataatttgcatgttttcagtgtccattcatcatcgttttgagtccagtttcgtatcattcatcactgttttatatcatttctcatcattcttgcatactttgcatgattaggatagctttgcatacatattgcatttctgagttgttttcaggtgatttggagctgtttgcgagcaaattggaagaaacgagccagaaccagaagacatactcgaccaccaggtcgtgtgcatccagcaccatactcgaccaccaagtcgagtgactttggagccattcttcccatctactggaccccctggccgagtatcctcagctcaggctactcgatgacgccactcgaccccctggtcgagtatcactttgccataccacctgaccacactcggccattcactctaccaagttactcgaccccctggtcgagtatcatcactcaccaccatcaccatcactcgaccggacactcgatcacatcttcacagtttactcaaatccgcactcaaccagacaagctgagcacaaggaagagaagaggagaagacaaagtgtttggaagcggcctggacctccatcagatcacgaagcccatctcggcccattatcactctatgggccgggcgattaggttattggcccatctagtatcattttatttcgttttgtgtaaatagatgtcttagggttttgtcctgagacatctagtcgacattgagtttttgcttcagttttattttctgttttactctactgcgctgcttttgcttgtgcaacctgtaattcgagatttttccaagttattcagattccgcaattgatttcatctgtcatcttgtttctctactccttatctctttacttatgcaatattatcatttacctgcgttttatgtctttgagcatgttgtctgagtagtgacttagaattcttagggatgggatagagtagttgtggaatccgtagtctgtagaatggttaagttttagaattgattgaatcccttcaggactagttgtgtttactgcttatttctttctaatcaactggaattcgatcccaagcattctcgcacccagaaggtgttcgatggaatgcttgatccactagttcctgagatatttgtctctatcccaagggattggccgtttagagcgtttattgactttatcagtcaatttttattgcctgtatagttagattccgttaatgggaattagtctgggctagctttgcttgaggatttctatcatgggagtgaattgatctgttgtcgaacctgttgtctagggatagcttgattgcgcttgttaaccattcggataggctaggataccactctattcgattaccccatccttaggaatttctcgtctatttgatttctctgttttatcgttatcgcttaatcgttctcattgcttgtttcttagtttttgcaatactcgaccaacttactcgaccacacccagtgtctggcaacagactgtgcagtcgagtacagttgtctcatttcctgtctgttactcgaccagtatactcgaccacacccagtgtctggcaacagactgtgcagtcgagtaagattgtcttgttttctgtctgttactcgaccagtatactcgaccacacccagtgtctggcaacagactgtgcagtcgagtatagctgtttcatgtcctgtctgttactctacctgttactcggccacatcctgcttctgggatcagccagttgtggtcaagtgattttagtaattctgttaaaatttctgtattatgtatgttcgcttaggactgttagaaacctcaaaaccgttatttcttggcttgacttagtgacttttgatcacatatcatctatttgcattacacctgattggattgacacctaaaatactacaacgacatgattagtgtttttggattaattgactaaaaccctattatcactatgaaaacctatctaaagaagcgtgacaagagtaggcgaagccacagtgaccaaagagggtgaaggaaaatcaaggcatcaagacgagaaagcttcaccatagtccccgaagataactccttacgccagaagctccggccaacaaagataacctacacggcggggacaaaggaaacaacttttggaacaccgccgtcctcaaacgatgaatccgtttaaaagcagcccaaaaccgttggtgatagtagatcgagtggtggatcctccagccaaagacatggaaggacaagatcaaagcacacataggagcttccaccaagagagaagcgcaaatgtgaaatcaactcctccacttcaccgcgtttcagagcaaaacacaatcaaatgatcgcttcaagctccggagaacaaaacaagtgaactaaatcttggggagccctctcacggcgccagaattaactggacaccggagaggcaagagagacgactgatatggggaaactttcgcgaagagattgggggagaaaagaaaatgcgcgtgagttagaccaatagtaacaaaagttgttttactatatctcaactagattttaaataatgattttttataatttgtttacaccaaaactatagatctacaatttggaaaaaaaaaaaattgtaaactagaatttaggaaaaaaaactcttaaaccaaattgtttatttaaatttgagtataatggtttgttttattttaaatcgattatattaatagtaggtgttaatttacgttttacaaaaagatgagggttgaaacacccataaaaaaaggtgaggtttttttcatgt

SEQ ID NO: 26460 - DNA, 1549 bp, Arabidopsis thaliana landsberg
tttttatgtggagtgtttctttttgtttgtttttttggggaaaaaatgttgagaataatacggatttagataattaaaagtttatgtgaattttcaagaatttgtttgtttgggagagatctacgggttgtttttttttgttttttggaatattgagaataatatggattcagaaaaatttgtttaaattttcaaaaaaaaaaatttgggaaagatatacgggatctccaacaacaaaattgttataatcgagttctccatcgagattaatatcatttggaatttgtaagaaagaaaatctattaaaagattattttcaataagaaaaacaaaccttatctacgactaaacagttttttttgttttttttcttttgtgtttaccaagtcagctaggattttttttaagtgaaaaaataaatggataaataaccccacaataatagagataatgagcaatttttttttctttttcgtcagaaaaaaatactatgatttcgattttgaagtggaaatgttgttgaagttggggagtgaaaggtatcgcagaagcatatgacgtaaaatatatttttttcttcaaaatcctatcaatatctaaacaattaaaatttacaaaatcatatttcaacaaaatctcaaataatcttttacgtcaagattttttccaatgtctatatataccattgttctcttatttcttttccattcaagaaaaagaaaattttacataacaacaatggtttctctaagttttattttgtgttgtgttttagtaagtagttgtgcatacgccacaatcgtctctcatgatggtcgtgccatcactattgatggtcatcgtcgagttcttctctctggttctatccattatcctagaagcaccactgaggtaacttacatctacgttaatagttaatctattatatatgtttagcataataagattgttaattaactgcgtttattttgttgttactttgtcacatttagatgtggccggatcttataaagaagggcaaagaaggaggtcttgatgcaatcgagacttatgttttttggaatgcacatgaacctactagtcgtcaatatgatttttctggaaatctggatcttattcttttcttcaaaaccattcaaaatgaaggaatatgtatggagttctacgcattggaccatatgtttgcgcatagtagaattacgggtaataaactaaacttgcttcattttacttattaatatcatcaatgcattcttagtgcaaagtgctggtggttataacttaatatatacgatcaagtttatatatatgttggtctttctccatttgcttatagtgatattagtttttttctttttttcttttcactaattttgatattttaattatgtaatcattttcaattgaggtttttcagtgtgggtgcataatatgcccataatagaattcagaactactaatactgcgtttatggtaatcattattaaattttacatgtaatatttttgttttaaataatagcatattgatgattttatggagaatgaga

SEQ ID NO: 26461 - DNA, 1289 bp, Arabidopsis thaliana landsberg
  unsure (1)..(1289): unsure at all n locations
atatacatatatgtcaccaggccatagtcgagcaaataatgattggacagtatatagagctaattttccttagtgattgtgcggaaatggaagttccacctgctttttggtttagtccatatatttaatcattgtgaagctatgacgataactgatgattaatttatcccttatgatcggccaaatgatatgccaattttcttgtttgtttttccctttcagagctaagtacaaactaattacgagttatcgtaagaaagaaataagagttatcctaagatgttaactcgactaaatcaacacaccccttatctatatatatatctgcataagtcacaagaagtttcataaaatagtaattcccttaataaaaatagtatatataaaacataaagaaaaaaatatgagcacacttcttggttgtcttgtcctcatattctctatggtcgcacaggcctcatccgccagtcttacggtgaactggtcccttggcaccgactacactccgctcaccactggaaagaccttctctgtcggcgataccataggtgattaatctcttaactcccccaagacttacataatttgactcatagttacctcttctatacacaaatttattcattaggttgagatgaaaaaaatagaagccaagagaaaccccaattcagaaaataatctcatttcatggacataataatatgattatgatgacattacggttatgtttgcatagaatgattatgtaaaccgataaaacaaatcaagctaacaaacatatacggcttcatatgaatatatgggttacaattgtaccagtttaatattgttacacttgtgttactcagtgttcaattatggtgcgggtcacacggtggatgaagtgagcgagaacgactacaagagttgcactctagggaacgcaattacgtccgacagtagtggaaccacaagtatagctctcaagacacctggtcctcactacttcatctgcggtatccccggccactgcactggcgggatgaagctctctgtcattgttcnnnnnnnnnnnnnnnnnnnnagtactggagacggtaccactgacaaaaataccacccgtccaagccggaaaaactaccccctcagaaggtaaaaaggctagtccttctgcttcggccacggccgtgttgaagccgttggatgctttggttgtgacttgtgtagttgcattgctgtacactttggctctcccttaattagttgagtttcttttgttttcctgtggtttgactcgtttgaaggaccag

SEQ ID NO: 26462 - DNA, 1233 bp, Arabidopsis thaliana landsberg
tttctatttcatcattgaatggtagctaaattatttaaaaaatcgatggaaacacccaaactcaaaaccaaaggcaaacattcgcctccgcttccatcaccagcagtgaaatctcctccacagaacatttgattaggttcaagacggtggaagattgatcccttgtagtggagtggcttaccaagcttccccatccctttctccctgtgtacatagggcccggaagttctccgccgctcacggtgtcgtgtctgcaaagagctccatcacaatccgaccacactctgctgtccacgctcaaataataaaaaaactttaggattagcttttactacttgttcaaagcgagcaagcgtccacatccggaggaagcgcattaccgtgtaatcgccaccacctctatcagcgggtgctacgagtcgtgcaacaggtgtcaacgttgattgtaaaccacattagccggaacgttaattgaacaggtgcattggcttcattaaagctcaaacttacatagtagggtttaccggagatttaccgtagatttttacgtatttctctaatatataatggattatcctaacgatatctaaattattaaatctaatgatatctaagtcacaacattacactatttttttttttaaaacgaaccgttatcacaattcacattacaatgagattcaattaagtattcacacttgcatttcacacttgcatctattaaactcgaacagaataattaaggaacggtattaaccgtcaataactcccatcctaaatctaaactgccattgcatcacaaaattcaaaaactatccgactcttttgagtttttgacatctcttgtcgcttcagacataaactacagtctgaacttcataaactaatcgtcgtcgattcaacaatgacgaaagataagaagaaaaaggacaatgtcagagtaagatcttacttaacattctcctttttgttgttaatcctctgttttcaatacgttacttcatttgttttctcaattttcttcgatatgttgtagtatatggatgtcgaattcaatgtatcgatgcattgcaacgactgcgagagaaaaatcgctagagttatttccaaattcaaaggtataaatcaaagtaacgtttccttcaaaggtatatacatgtttttttatagtttctaatttgaatgatctatgaattttcataggagttgaaacgtttgtgacggatatgatta

SEQ ID NO: 26463 - DNA, 2048 bp, Arabidopsis thaliana landsberg
ctacgcttccgagttgcgatggattatcccaattacctctgttgtccttgtgacaggggcactgccaccactttttatgctccgagcatcttctttgcaattctgagccagtttggtcccgtccctcctcatgtaagttcctacttctttttttattcacttaacatcaccttaagaggcagctgtgttgggagattgatatgtgtatatatgtaatggctcccattaacagatagagcagaaacacaagtatgctgcttggaaggctgctgacataaggaaagccattaaagaaggaaggaagcccactccaggtgatcctgtggatgatgatactgatttatccatcccatcaagcggtcctagtggctcctatgtaagtttctcttcttgaatatttatggattggaaatatcttgatattggcttagcgtgtattctgtccaataatatcgaaaagtgtttaggagcgtaaatgtttatagaattcgcatagcgctgatcaaaatcatctagctagagacacacacattcacacccacctgtgtacttttaggtttttgttttctcaattgtcaaaacactatgataaaacgtctgcatcaacttaatcgattcattgtttgtgcatgttaattatctacaggatcacagtgcaagtgataccaacacaacaagtcatcatagaacagagcttgatccaccccatgactcgaatgatgactccagccaccatcaattccctgaagtgccacaacaccctctacctcccaggttttatgacaatccgaccaacgattatcccgcagatgtcccacctccaccaccgtcttcttacccttccaacgatcatcttccccctcccacaggaccatcagactccccttacccgcatccttacagtcatcaaccataccaccaagacccgccaaaacacatgccgccaccgcaaaactactcatctcatgagccttctccaaattctctccctaatttccaatcttatcctagctttagtgagagcagcctcccatccacttctccccactacccttctcactaccaaaacccagaaccttactattcttctccgcactctgcacctgctccttcttccacaagcttctcctctgctcctcctcctccaccttactcatcaaacgggcgtatcaatattgctcccgtgctagatcctgcaccgagttcagctcagaagtaccattacgatagcagctaccagccagggcctgagaaggttgcagaggcactcaaggctgctagattcgctgtgggagctttggcttttgatgaagtctcgactgctgtagaacatctcaagaagtcacttgagttgctaacaaatccatcggccggtgccggtcactgaattttatatctaatctatgacacttggggttgatgttagtgcgtgtgtgtgttctcaccacatttgtgggtttgtttattaacttttcaggctcagacttcgtttacaaagaaaatttgtgtgaattattcttattatcataaaattttccttgcaacttcgtgtacattcatacatacataggcaatggagttcctcttcagtcttcacgtaaagagcgagtgtgggacacgcactcatgtagcgggtggtgttagtactcgaggttgggcctatataaaagcccatagaggcccgaattactgaatttagcagacaagaatagaaagagtgatgaaacatggaagaaaacgtgtctctagagtcatgtcaagtgtaagacagaggaagagagaagagatgtgcgtcaaagacaaggaaagagagatgtcaatcgctgctttcgtcggagcgtgcatgtccgccacgcacatcaatcaaatcgattcttattattattacctcattatactctttactctaagacaaacacatacatttgcactcagtctagagacaaagagagagagagatggggtcaaagacggagatgatggagagagacgcaatggctacggtggctccctatgcgccggtcacttaccatcgccgtgctcgtgtt

SEQ ID NO: 26464 - DNA, 1074 bp, Arabidopsis thaliana landsberg
  unsure (1)..(1074): unsure at all n locations
taagcaaaggtagtagaactaatttacaatttgttgaatgttaattgatatatatattttttttaataatgatacattggcaaaacttacaatgtatataaactatagatgcttattttttttctcccctgaaatacagataggttctgctttctgagctcgtagattctgtaatctctgcgacaggaaacttaaaccttacccacgttgatgatgaatcatcacttgcttttcttttaccaccactggatagacagaaccagaaccagaaccattcctctgacatcattgtcagcttcaacctcctgagataggacaatctctgtgttaaaaactttatcagcttagcgcgatgacatatcagcttcttcgatactagaaattgcagattcgccatcagtttcatcccaatcactctcattatcctccacatcatctttctcttcttcttcatcatcatcatcatcctcatcgttctcccattctgattcactgtatgacgggtttttcgaagtctgcaaaaaaccaccaggtagtgagtcacagcaaaatacgcatgctttacaaaagcaaatagagcttaacagtgtcaaaaagattaattttcttggactattagcatccccagttgaggaaaagacaacttacgagttggctttgcatttgctctattgttctctccagttcagaaatatgctgactaagtgcctgcaattattctcaaaagaagtgtcataaaagaaccctgtgatcatcatgtgaatataaatgtgatttgtgtagaatacttcaggaatttcgaacctcnnnnnnnnnnnnnnnnnnnnnnnnnnnnnnnnnnnnnncttttgtcagaagattccttggtctcaagctaatgggtctcctgtaattcttcccacggtaataaataagcgcaaatcctttaggaaccttttctattgccacaagaactccaccactctcgtattctagtaaccgggctgtctcctcaacacatgcttggttcttctgttttgatataagcttcaccaattctctgtgtttccaatgcagatgcatgttctcaatgac

SEQ ID NO: 26465 - DNA, 891 bp, Arabidopsis thaliana landsberg
tttaagtttaagcaaatagctaagcagattggggaataaaggccataatgggatttcatgtttggtttaaagtttcctcgcattctacaaatggagttttttcatgtatatttcacgttctgagctttttcaccataaactagtagtagaaactctataaaaaaatagaatatcgaataatattattgaaccatagttagtaccttgatcatgagttaattagtctttagctagaggtttgagacttttgagtacttcaactcttcaagtcttcaacaaagaaaaaagacaaatcttttcctgtcgtaaatttctcgtgcaagacgcaaaaccccaagtttccacgtggaaaccacaagcttcgtcgaccaaaccggtgcttcaccacgcgcctaacaacgacaaaaactgtattaacactttaaattaactaaatctccacggcaaattggctcacggaaaatgacgtaagcatgctggcgtattttcactgacgtcatgtgccttcgaccttgaggttgtgaagtaactagcaataagatacacttacaacatgcaataagatattaatagttcatgtagcaaccattacgtctcgctattggttgctcaaatttttaaatctaaagtttctattatcaattttatatgttggtaacaaaaggtgctttttcctacatagttacagaaagtcgcactttacatgaatcacaatgatggcttttcatcggcatattccagaattctttagttaaaagatgatataattaaccactggcaaaaaaatataagaaaatcattagtgatggtaacaatttccccatctgagaattgctttggagaaaattagtccagttgctttttaaaaaatgcattttacctaaagccgtg

SEQ ID NO: 26466 - DNA, 798 bp, Arabidopsis thaliana landsberg
ctatacggattggaatccctccctgaaatctttgctttttaattaagtaatctcctccgatgaaagatatgtgcgagcgcttcttggcaattgccctcgttcttgaaaaattggtcatggaactagatgaatatgatactatgggagctgtccacatcattgtaccgtctttgaagagtttatcattagatatagattgtcatcgttcttccgatgtagttgaaattgtccctccttctttggagtacatcaaactaaatgatcacagcgacaataaattcttgatagatatgcctaagattgaagaggcatacattgatgctaatatctttgaatacgagaaattccttggagctttcacatctgttaagcgtctaaacttgtgcttaatgctccaaagatccgaggtaatattttttttttaatctttatatatgaaattcaaatcttattacttatcattataatctaaattgtatttatgctatgagcaggctaagaatgttgccgcaatttgcttcaatcaacttgaaagtttaaagatatgtacttgtaaaccatattggtcaataatacttctccggttgctcaaaggatctcctaaactaaaagtccttgagctccacggcgacagtgtatgtttcattaatctattactatgagtagggtcttaattgtctctattgttttgttaactctcattttcgttctcagacaccattatgtttgaaggctcgactggtttgctgggatcaagtgacacctgtgcctgaatgtttgctgactagtctagagact

SEQ ID NO: 26467 - DNA, 3122 bp, Arabidopsis thaliana landsberg
tctcgacataagttagatcgaatttctgttacgtgaagaaaacaaaatttgcttacataatctctgaactgaaaaatccttggaacaaaataaacagtttgtgaagggtggcccaagcccaattaataaatagcgaaagctaaatgaaagcccaatagatattagctcattatagtattttccatacgcttcacaacatctagcgaagaccaatttaccgcagcctgtcaacaacgctagctaccataaaatcatatacacgaatgctcatatttagatcatagctatgtgagctatctatattttctgccgcaagttacacaaactatgaaatttcgtgttaaaaaaatagggaaactatagacggtaagaactaagaaggatcaacacaaacattatgtaatcactctgttttatcgaatcctccctatcagaaacgatattatcactctctgtctctgtcaataacatatcagagtcatagtgttcggacttaggagtgaggacgtcaatcacaccaacaaaaacaaatgacaaactctaaagagactttaaaatcagacaatcagaacccgaaataaaaacccaacttaagaaccctagaaaacttgactggaagtctggaaaaagatttagtagaatcttgtcaaggtatacaacaagtagctcgcgttttgttgaacgtagaaaccaagctataaccatgtcatttaccgaaacattggtatttttctcttttaggcccaaaaaaaatacataggacatatagttatattcgattcaaattaaaatctgatgtacgcttattgctaaaaaaaaaaatcaataaactaaaattatttgctttttaattaatgtttggttgccaaaaaaaacattaaaattatttgaaacaagtcttcaaaataataaatataaaaaaattcgattacaattctactagaatatacaatatagacacatcgttcccatttcctaagacccaattatggtcaactcactctttaataaaatccctctcaccgatcattaaccaaaattaagtggacttcttattttttccatagaaaaaagaactctttatatcctatctatattacttctccaaaaaaaccttaatcatccaggctctttcgaaatgcatcccgggaatgtatggggtgggtcgctagacgccgtagacagcgaccgtatcggggcagaggaggaagaacggctgaggaacacgacggagtgggacagaggagctattcactcacagagaagtgaattagacgaaacgcaacaaggctggttgcttgcaccgcaagataattggagaaagaagaagaagaaatatgtaaacctaggttgtgtttccgtgagccgcacggttttcttgtggaccgttggatctattgccgtcttgtttctcgtcgttgctcttccgatcattatcgtcaagtcgttgcctcgtcataagtctgcacctcctccgcctgataattacactcttgcccttcacaaagcacttcaatttttcgatgctcaaaaatgtaagtcttccttattattctttattttttgccgactattttttcttatttatatatttacattgtgcatagtataatgatgatagttaaattttaaaatatttaactagaaacttaaaaagatgacaagaaaaaaaaagacgactagattttctgagttatcaaattttcatttcttacttttatggagtccaattttcatccaatttctatagaaaaaaaaaatttaaaaatatctacaccctttaaattagaagacttaactataaaagttgatgacttaatagagagttttttagaaattttgtggaaaatgtgattatttgtaaatataaggaaacagactcttaaaagattaacgaaaaagtggaacaattgctgatgtagttttctaatgaagtgattaaaaagtcattttattgtgacttgtgaggcaaatttgaataattccgcgttagcaagcgcaataacttattagtattagaaaacgtttaataattcaaaaataaacattctttaggtagtagacttcaagaataacacgcaagtgttgacattctaataaaataccaaaatcaatttcaagcacgtatatccgactaactttcaacctcgcattttctcattttgttcttgtgagctggcttctggtaatgctcacaaattcatttggctttccaaggactaacgcggtttcgatatttgagcagtataatttcgtaataaaccaaaatatataaacttaaattttgtatgaatatctaagtgctagcttgtttggaattatgtttttttctacactaaatacattttttcaaatattcttctctatatcaagattagaaaataaatttaaaatcaaaattttctttttatatatccaatatatgcattttgtattattttaagttgagaaggacaaattaattcttgatagtattagtttagattttcttaattaattaataaatagaagaaatatggaatcggttcaagacactcatacaaatgaaatcgagttaaaccaaaacactaaactaacaccaatatgtcgagccacattttcatatttgacctaagaaattattcaagaattctatcgtgtatcattcatgtctataaaaatattagaatctaaatggtaagcattagaggaattaaaactgagtgaaaaatattgatgatatggaaaaaaagatgaatgatgaataatgaaaatgtgatattgtagctggtaagctgccgaagaagaataaggtttcatggagaggtgattcagggacgaaggatgggctgccggacgtggtaggaggattggtcgggggatactacgacggaggaagcaacgtcaagtttcattttccgatggcattctcaatgacaatgctaagttggagtctcattgagtatagccacaaatacaaagccatcgatgagtatgatcacatgagagatgttctcaaatggggcactgattatcttcttctcactttcaacaattctgctactcgcaatgatcatatctacactcaggtaatgtattattagttgttacttctatgagagaatgttcgaagaattgctatg

SEQ ID NO: 26468 - DNA, 1322 bp, Arabidopsis thaliana landsberg
cctcatatcataaagttgaaggagattgtgagagaacataatgagctgttttttatcttcgagtgcatggtaaaggcgatctccgcttttttatcctcattttagtatgatgttaaagaatatattctcatttgatcttggataatgatttgactaggatcataatctgtaccatataatgaaagaaagggaacgacctttttctgaaggagaaataagaagttttatgtctcagatgctgcaagggctcgcacacatgcataaaaacggttatttccatcgagacctgaaacctggtatgttttagtactttgtatagtagtaattgaaatggttttcgctctttgaatgtcttataaacaagttttgttctgttcctgaagagaatttgctggtgaccaacaatatcttgaaaattgctgactttgggttggctagagaagttgcatctatgcctccttacactgaatatgtgtccacacgttggtaagtgatttctctttgatacggactttgcattcatgcatgaatgtatgtggtataagatgatatagatcctgccatttacgtacaactggctctgcttgcaacaggtatcgagctccagaagttttgctacagtcttcattatacactcctgcagttggtatgtttgcgaaatcctttttagcttcatcacatttgattagtatcatgtcaaaagtctagctaaaccatggctaatacttcgtggcgttgaatagtttaagacattttttctttctattttgtcatctattgtatcgctttgcaaatctctatagactaacatttaaaagaactgcagatatgtgggcagtgggggcgatactagctgagctttacgctttaactccgttatttcctggtgaaaggtgaattcttttccctttggctttgaccaaacttaaattttttgtcactgtgtagtttgttgctacttaatgttctaacctgaagtgatgctatcagaacaatgagttctagttttgaatttcacattgtaatgtcaaatctgtgtgcacatttaagataagaccattcagtgaaatctgatataatgatttccttatgagtagtgagatagatcaactatataagatctgctgtgttcttggcaagccggactggaccacgttccctgaagcgaaaagcatatctcgaattatgagtattagtcacacagaagtaagagttcttaatggaagataagttgcttattataattaactgtgcgtaattattaactttgttcttcaaatataaaatgcacagcttccgcatactcgaattccggatctact

SEQ ID NO: 26469 - DNA, 1067 bp, Arabidopsis thaliana landsberg
tgctatagagagaagggcagtcttacctgctgagccaacacaagacacccttcgcatttaccgaaagctgttgagagaagaggaaatgtgtaatttcgtatttgaacagcgagagttccagtgtttaaccgaagattgcttccataaagccgcgaaaaaggtatgtctttttcttcagctacaggatcaagcttcttaacaatttctatcatcccagcttcacctccaccaatagctgtcaaacttagatccaaatcagtaacagagacagaaagtagagatgtcctagaagtgctcatcttaaaaccagcctgaaaaccttctttacaggcacctgaaccatctgaaagtcttaaactttgacaagacttgtaatatgaactgaacgactgtttatataatttttcattcatcatctggataatggcaggatcttgtgggtcaatttcttctccctcgaaagaaattttcttctcaccgtctgactcatctcccccagttttaggaacctggtttccactggacattaattcatcaaggaatttcgaccttatggctaactcataagcttctttcctcataagatggtaatgttcatcaagccaaccctggaggggttcttcctcaatatcaaatattaacttgcgaatgccgaatcttatacgcccaacttttttcgacccaggttttttaggtgttgagctttccttttttattggaaaaatgagtttggttttggcgttggttacaagcttcaaagccctcagcatttcttcagcagcatcatcaatagcacggagctgtagcctgaagggcatgcatatatgtatatcaactccttgaactatccaatcccatggagtcccacctgttgctggggtcacactggataaagtggaaggcatgctgggtattcgtgatatctgtccccgccaacttttggctattttactatccggaaaaaccaagaatatttccttccagacccactgaaagacccccattctctgagaagagtgaaagaatctgcaccatagcctgccccacatcctcagcctccgcggttt

SEQ ID NO: 26470 - DNA, 1062 bp, Arabidopsis thaliana landsberg
  unsure (1)..(1062): unsure at all n locations
aagacccttggcggatttgagatcgtcatcgaggtcatggactcttttgttttgacggctgaagatattaatgttcgggtgggggtcccatgtcacctccatctcagatccactcttactcccctgcaacatcatcatcaaccatccattatcatcaattgaagaagatgctaacaaaataaattactcctattcgagatgaccttcttacttgctgctgcattttcgtcgcactctggggattcaggccaaacttcaatataacgttgctgcgtgagagagagttgtgagtttctttcccgaccgatttttattataggctatgcccaaccgagttattctggtacttcccggtataatggttttgataccaaattatgattgacttttggtcttttcggtcgagcttgtcccacttggcttggaattggttattttgctcatttcgntattgattcgtaaattttgtaacatactaacatgtttaattaactaaatgatacttgtactagtttagtggttataccatcttgttagttgcaagtgttagtaatatgtttcgaccaacaacaacaccaaaaatttctagaacaaaacctatatcaagtaagagttagttattccaacaaaaaccaccaaggtttgtttttggattctgtctccataatcaatcaagctccagaatctccccagggaattaacagagagatccctttaaaaatggcaaatggaaattctacaaaccctacttttaaacaacaccaaatgtgtggtagaagaaactcattgtttctgtgttttgtaatatcacaccattaaagttcaccagaaaacatatctccttctgtacattaataaaataaaccaaacagaaaaaacttcttaccccttttcttcttccgggatgaacattttttaaagggaatcagagttctgggattttcactaatctattcaagttcttctgtttttcctcgcttacatgagctaacttgtacaacaaggcacatcatcacaaaaaatatttcctggcccccttgtttggataaattcattaaaaac

SEQ ID NO: 26471 - DNA, 1225 bp, Arabidopsis thaliana landsberg
tacagaggatcatgtgggagcagctatgttactgggtcacgatattgttgacaagttttctgactatcatgctgtttgaaaaacggcatgataggtcgaaaaaagtgaggcgtgacgaacatgttaaggaaagctcaagaaagaaagaagacgccacttctggttctacggaagaaaaatcaatgaaagaggatcatgcgggagcagctcagttactgggtcacgatattgttgagaaggtttctgactatcatgcgtctgaaaaagggcatgatagatcgacgaaagtgaggcgtgaagaacgtgttaaggacagctcaagaaagaaagaagatgccacttctggttctagggaagaaagagtagataattcaacgaaagaggaccctgttggagcagctcagttactaggtaacgattttgttgagaaggtttctgactatcatacgtctgaaagagggcatgaaagatccaggaaagtgaggcgtgaagaacgtgttaaggccagttcaagaaagaaggaagaggctatttctagttctagagaagaaaacctagataaacaaaaaaatgacgagtctacttcaaatagaaaaaggaaagcagaaggagagtgttctacagctgaaacagaatcaattgaagaacatagtaaggatagacgaggaaagaaaaaagaaactaattctaattgtagggaggaaagacgagataagaagatgaagaaggaagaccttgcttcaaacagaaaaattgaaggagaaatccctacaactgaaacaaaaacaatgacagatagagatgggctttgtagtaagaagcgtcttagaagtctagttgtggcagacgtacctcgagatgaaagtagtataaaacctgacaatggagacaagagaaagaatcaaaatggaaatcataagaagaatagggagataaatatgtcaaagaggcatgatccaggaaaagtgcacagtgttgaagtttcagagcgatgggagagaagggaacaaccaaaatcacgtcaacgcgacttgagagagaaaagaaggagatcaagaagtcgagatcatgggcaggacagacagaaaaggtcatcccccttaccaagggctgaaaaggctacatcgcgtcataagagaaaccatgaggagcgatcggaaaattttgtcaaagataggtcgggaaaacatcattgtaatgataatgaagacaaagtgacaagcac

SEQ ID NO: 26472 - DNA, 1512 bp, Arabidopsis thaliana landsberg
agttggccacacacacacctgagtcatcctcccaaagagagtggcagaagatgagcgacggcgctgtggagccattcctgctgctccactagctttaagcgtgcgttggaggagtaaaagcaatgtcgaggcattggataaccaatatgctagtatattgttgttatcttgcgtctgaatgagaaaaaaaatgcaatcactaccagtccgaaatccataactttcattttcgtatctcaaaatagtatagtagcacaaacaaacctcaatagcttgtcctattgtctgaatgatcctatcaaagacactagttctttcaacttcaaatgaccgccattgcaataagcatttgtatatgatacatgctgtaacaggtcgtttcccttggaaacccaaatgttgaacgatgcagcgaataagcagctcttggttttcttgctgcttctcgtttagtgatttctgtggcttatcgtccacttcagagagatcccttcggttaattgaatggctatgcaaatcctgattcaaattaaatgaaacccaaatagtagaatagcacgattaagagaactccacaaaacatgcaagacaatatttgttagacatatcgaggtacttaccaaacttggccttgcatcaactgatagatgaccactttctgaacctctctgttttgtttttatgcacatatggaagtcattaacttcagatagaaaaacaaaacaaatggaggccaacagttttcttggtatattatctgtacctgtaaaatcgacctggaccggccagagagaaacttatttggtgcaatggacacagcttgttgtcgtaacaccttattctctgattctaaattgttgcatttttcttccagcctgaccatcatgattacaaatttcagcgcaacagtgtcacgaatttccattaatacatgtgaccaagatctataccattatttacttcctactattaagaaattaatgatttgatattgacttaccttgtcacggactcttggagctgctgagcttttttctctgtgtcttccaactttttctttctggtcctcgctagactcttgaccttcatcaaatttccttgtagcatcatcggccctgtgtttctcttgttcaagattagcctgttgttacacaaatgattactaatgctccatacattattctgcaacaatacactaagagtcgaattcaggcattttaatatccaacaaaaaacctagcgaaaggataaaccaatctgatcgccaatgaatacgagatttaagtttggacaaggagggagtacctttagaccctccacttcttctgtcaatgcttcaatcttctgggtatcttcaactaaaacttgcgtttctgttacaacaggaggcgcttcttcaatggccttcttagcagcttcacgttccttaacaagaagcccataagtttaaaccactttcttccgcatttcctctaatgaactctgcagtttttttatctcctaattcttttc

SEQ ID NO: 26473 - DNA, 1239 bp, Arabidopsis thaliana landsberg
agatagaatggatatgcaaattaattctccatcagggatgaaagtaacaaggatcaaagcttattcaaagtgttctttacataagctcttacttcagcattttggccagatataacctatagattatcttacaaatataacactgccttcaaaattgaaaagcaacttgaggaaaagaaaatctagtgactataataatacttgtctcctccaaaccaaagtaaagcaagacagacagagataaggagagaataaatataggattctaagagattatacattgaaagcacgataagatataattagtgttcattccaatagtacaaattcaattggacttacctgccatggcagaatgattgggcccatagccagcctcatttccaagtgaccaagaaattatgcatgtatggtttttgtctctttcaaccatggcaactactcgatccagcatagcagctgcccagcttggctcttttgcagggtgcttcagatgcccagagagatcaaaaccatgtgtctctatattggcttcatcgatcatgtacatgccgaacaaatcacataattcataccagcggggatgttgaggataatgactgtttcgcaccgcattgatattatattctttcatcataattaaatcctgaggaacagtacaaggggtaaatcaaaatcccaatagagtacacaagttaaatagtggtgtcctaagtaaaccatggaagggagaaagtagagctggacaagagaaaaaaaaaaaacatgttaccttgaccatgcatgcctctatattcgtcttcccaacacgtggatggtgctcatgcctgtttacaccttttatcacgactgggtgcccattaacaagaagctgtttaaaggcctttgatacttgccgaatgcccacaatgcttgattcagaatcaaggactttcccagatgtatcttttagagttaaaacgaggatgtaaacatttggctgggcacaaaaaagaaagcatataaatatatgagctagtaacgtaaattataacgaacttacatcagaacacaacacttcaaagacacatatcatttcaaacttctcactacatctttgttaatatcatttcaaagttccgggctaccaagataaaagtacttgattaagatcaagtacgataaccctacacagttttgggtaaagagtattggaaatagataacacttagaacgatacccagcccaaattcaatgaac

SEQ ID NO: 26474 - DNA, 2047 bp, Arabidopsis thaliana landsberg
tatatgtttaataatatctgtctttggtataaatttctttaatttttcatactctagcattgtttacattgttctatagaactaatcgcgaaggtaagaccttcatgatactttgcttatggtcttcgtccgaagttcattatatcctgagggagataatgcttcagcggacgaagggcattaatgtttaacatttttgtgttgccttgttcttaattcatagcatttgagaacaagttcccaacattggcgcccacctccggtgaactcacttccacttatttgagctgatggcttcgttcaacaaccaagctggagctgcttcggctccaaagctggtgctcccaataacaggcggttcatgtttagagccagctaacaagaagcagaagaaggaggcacagagaagggtacaacatgtcggggtgcagggacccttcatcaagtcaagatggtctcacatcccaattaccttctcccaagaggaccttcagctcaaggattaccctcacaatgatgctatggttatttcttgtgttatcaaaggatttctggtccacaatgttctggtcgatacatgcagtgcagcggatattatatttgctaaggccttcagacagatgcaagagccagaggataagattcatgatgctacacaccccctgttgtggcttcggaggaaggcagattgtagtgctcggcaagatcacgatgtcagtgaccttcggatttgtcaacaatacaaggactgagcaagttgtctttgatattgtcgacatggagtacccctacaatgcaatcattggtcgtgggactctcaatgcttttgaagcaattcttcatccaacatatctatgcatgaagatacttcggaccaaggacccattgctattcatggaagtcaggaaagctgccagaagggccgaaggaaactggacagactcaaaagcaatccataacatagatggagctgaagcttgtgagcaatacaagtttagaagggagaaagctgcttctgtcgatcagtcgaagcccatgctcttatgcgaggacatagcagagcagaaggtgctattgggatcccaactgtccgaagaacaggagaaaaccttgataaggtttctgttcaacaacaaagatgtttttgcatggtcagctaatgatctttgcggagtcaacagggatgttattgaacactcgctcaatgttgatccatccttcagacccagaaagcagaggcttcagaagatgtctgatgacaaggccgaaggtgctcggaatgaagtgacacgatgatgaagacatccacactactgatgcatctataccaatacaagtaccaatttctggtcccattactcgtgctcgtgctcgtcaactcaaccatcaggtgattacactcttgagttcatgtccatcatatttagaccatggagacccttgcactcttgttttgcttaggaatcagggagaagaccgaaatggaaaaggatttgaacatgctggattcggactgcagaagaacaccaacttgtgacggtcaccacggtcagatgcgggctcggattggaatgttcaagcacaacatggaaagcttatcaagtctactttcatatggatccggaattatagtcatatctgttctgaggccgccgtaatcattgttttcttaccgagacatttcctgccttttctgcccatggtgctgcgtcaccctattttggcccaatgggtcgtgtatcaagttaggtccattagggacgcatcctagggttgcagcacgaccccaatacccttgtggtcgtcctcccatgtttataaaccccctagccgccaccaagaacagcgggttttgtttagatcaagtttagctctcgctacttgcttgcaagcgcgcgtgctagttcagccgcccgtcttcttgtcttcggaaccccaccatattggagtttgattgactcttttgtattctatgggcttctaaaattatatatgggcttagaagagtggcccattgactttactgtataagcagagtttctttgta

SEQ ID NO: 26475 - DNA, 1324 bp, Arabidopsis thaliana landsberg
acagcacgagcttcctgagttgttgggagtcttgggacagtttgggctcaacattgttttggattaatttggattttgtactcaagtccaaactagagaaaaacatgaactatgaacaccttaactcttaattatcattgctttacatatagaacgttccttattcccctctcaccaaacttaacaagtcacgatgttcaaatttattgattcattaactctcttcattaatatttaggtgcactgtcttaataaatttgcagatttacgagaagagtttgcagcccatcgcattgctttatttacaattcattctctataaattagcctcaatagttctacttttttacttcattcacataatagcctctcactttttgtctacctttcttgaaatatatcgatcataatttttgaaaaaatatcttggttacatttctctacgtcattcgctatggagttgagattgctactattgtgaaatcaataatagcgttatttttttcttaggagctcaacagtatataagtcacgacattgttatgttgtcgatacatatatactgtagtaaaatcagtagttacagttttttaatcgttaggatatcgacgaggtgtaaatcatgtacctcttttttttttttgggatgaaaaatcatgtacttcttctattattagatataagaatgatttcttgtaatgtaatgtggctttctataagttttttataatttctgttgaatacaaaaggatgcaattcttgttttattattgtttatatctttttgtttacttctacaaactcttcggctttcaatggatgacatgagaaaacagactaattcgttaatcgactaaaccactctatttttgaatcggacaataaaccaccacggactaactttaagtaaaaccggtctgtagttcaacttgttctatctttttcaacctacactagcatggcttatagtttatgaaaggtacacaaaaatggtttaaatcgcaaatgaatttgtccgccctaaccgcctcaactattcgaccatttcgtatatttttgtttggcaagattgccacaaattcattgtttgaaaaacacccagtaaaaatgatattattctaaaaataccctgaaactttcaatacttcaacaattaaaacccatcaacaacgtctaagcaaaaacacaaacctctctatgtacacataaaagtacatacatacacgaactatattcatacttaaatcgtatgcagatgcttttactgaattgaaaccgttaaactagacttctttaccgttaataacggccaaagatggagacg

SEQ ID NO: 26476 - DNA, 1612 bp, Arabidopsis thaliana landsberg
  unsure (1)..(1612): unsure at all n locations
cggatgagtagaggataaataaaggagggatattccggtgagatcacagttccggtaaagagtagagggcgatacaggaggaagacgaatcgctcaaagattcctatctgtctctctctctctctcacttttactgcttttatgcaaaacgatacatttatgttacgtcgtcgtttgggccgaaaggtaaaaggttttttttgccataattgtgaaagttttttttaatactaagggcattgacggatattttcttcttttttgaacatacgtaaattcaattcctcttttctttccactctaatcaccaattagagtttgatttgaagattcgtttttttttggatattactagtagtagtagtcaaactaaaattgaatctgttggcaacaaaaaaagaaagatagtaaaaatgtaaaatactatgaataagttagttaggatgactttcagtttcagttcaaatatagatacatgtcacatgaaatttatctaacaacaaaaatcaattaatctttttaccctaattgattcctgcgccatagaaacatctctttaaagtgttataatgttaactgtctggtacggaagcagaggtgtggttcaacgccatcctttacttttgtccaaaatccacaaagaatgattctaaaattagcaatcaacattacagagcaacaacaactaatctcacgttgttcttgtcctaatcctcgccatcatcaatgcgtgttcggaagaggtagtcttcgccttcaagttcatcttgatatagggatattgatggatcattacatttctcatcttctttctcatcattacatctctttccctgaccaaacatgtcgagttttcaatactctcagaatatcatcactagttaaaatatatgagaaggttcactttcagaaaatatggaggcttaaatcgttcacagactgcaacctctatagaaatgcctaactttgaatatagcaggatcagatttcagatcttaagattcatttttcatacatgtggttgtgattctcaccaaaccgctactagtattccataaaccaagatcaaaaagtttaggcaataagcaatacttgttactaagaacttgtggggatttgctgaagagctactataaggtaattgaaacagagacgaaatgttaatccttaagcaaagattctagaaacattgctgacctttcttaagatatagaagaaataannnnnnnnnnnnnnnnnngtgttgtactccatggaccaagtaaacttaggatccttaaacagaggacgcctgaaatgcggctgcattgacaaaagaagagtttttttttagagctattaattgagaaaatgcaagaacatgagatcagatattttgtttgaagacctggccaaaagtaatggaaatgaaaatgccatctggtttcaaaacccggtgaactccatcaagggttgccatgactttgctaacagtttctggacggggattccaaggatcaccagcatccacaaacagtacatcctacaacacgagattaattacacaaaggcacaaatcatgagctatctctccttatcaagaaaatatatactttagaacctcactgaaaaa

SEQ ID NO: 26477 - DNA, 1527 bp, Arabidopsis thaliana landsberg
tcctcgatattgtacatgagaacaaaacaatagtgaattcctttttttatctttttacaagtcgtaaacttgtaatggtgtgaagctccttaggtttgtgatcctgatgatcttattcgttttaggttgtgttaggaacctgaaatggaatgcttacttcttgcattaaccttgttgtgttttgcatgccaccctaaattcttctgttcctttcctttgattcctctatatagatagccgagtatgtaacttgcatcctaattgaacattagaacaaattccctttttaaaccgtttacatgtcttactattcaaagctccttaagcatgtgtgatcctgacgattttttccggtcttcagttttgtgttaggaacctctagcttaatgtataacgcaagctttgttgcgtgatctagctttgctgatagaacattagtattgtacagctgaaaccatatgtatctcagtgccctttagatgtcaacaagacaaacgagtcaactgaagcttccaagcgaagaagtcaaaagaaacaggtttttaactttgaagtcttcattaacttttagttaaggactgtgttattcgatcatccttatacattttgttactcaacgactccaaggaaattatatcgagattgagttaataaaataaaagctttgaattgaatccaatgaatcctagattccaatatttctccacttcctcaattccctttctcttgttgtgtttggtaactgctactgaatgtgtgtaccgtttctattgtaaccaacaggtaaaacggtaaattaaagcgggacaatgaataaaaatcctcaaaatcccaaaacaaaactcatactaattttctttggaaattaatacccaatatttttggattggaatcaaaatacctcatctaatatttgtggtcataaaatatctcatatattaattattggtagaatcaaacccgcagcttaacgggcgtaacagaactctttaacagtattaaatttcattctcatacatatcaattgatatatacattccgattttacaaactgacaataattatgttgtggtttgttggtaacgctagacttcagttagcgagtgaaccctagttcgaaaccaaacaaactcatgttttttttcccgtttctctaactctagccgccgtagatgatactccccgcaagaaacatgtgcgttataatgtgatcgcgttagttcccagctttgtctcgccaccaagaatcatcgtctacgccgcctgtcgtcgtagctatagggaggagctgagagtgaaggtcaaggggaagaatgaaaatctctgaagttggaatggatattttactgggattagtgggattcaaacctgtgttttcaatatctgggattgggtgttgaagttgcgcattaccaacaagccacggtagcattcaattagttagtaaaagcgaattgtatatactgattaaaatgtatgaaatttaaattaaccccgtaaatagttttgtagcgtcctttaagttga

SEQ ID NO: 26478 - DNA, 1189 bp, Arabidopsis thaliana landsberg
tgtaagttctgagcccccacagcccctttggactcgcccggaacataaggcaaatactgcgcagggggttgaccataaacagcttcataaggtgacatgttagctgaagaatgacagcttgtattgtaccaaaactcagcgagaggcaaccatctgctccacaaacccggtctgtcactagtcatacatcgtaaatatgtctccaaacacctattcaccacctctgtctgtccatcactttgagggtgatatgcgcttgagtaattgagagccacaccctgtaatgtgaacaattctctccaaaactcacttaaaaacactgaatccctgtcactgccaatagaattaggcaacccatgaagcttgaatatattatccatgaatgcttgtgctactgtcaaggcagaataaggatgactcaatgcaatgaaatgagcagctttagttaaacgatcaaccaccaccaagatcacagatttcccaaaagaaataggcagaccatcaataaaatccatagatatgttagaccaaatcgcattaggaataggtaatggctgaagcaaacccggagatactgtagtatcatacttacactgctggcacacagaacagctccggatgtaagcttgaatatctttagacatccccttccaataaaacagactcttcacacgctgatgggtagcatcacgacctgagtggccccccacacctgaacaatgtaaccatcccaaaatagaatctttcaaagctacaacatttggtacaaccagcttgttcttacggtgcaacaacccttgtgaccaactcatcttctttatcgaatctgcacttctctgaagagcttcaatctgtttctgaaccacagcatcagaagcatacccatctttgagcctctgaagcagatcacactccaatactgacaatgccatatgcaaaatctcagaaccttcaactggtgacaacgcgtcggccaccaaattctccttaccctcctcgtagcggatctcatagtcaaattccaaaagttttggatgccactactgctgaatggctgtattaggacgctgctccagtaaatacttcaaacttctatgatctgttatgatcacaatacatggtcatgtaacaacatagtgcctcctatttctgaacgtcaaagaccactgccaaaagctccttctcagat

SEQ ID NO: 26479 - DNA, 4258 bp, Arabidopsis thaliana landsberg
  unsure (1)..(4258): unsure at all n locations
aagagaaggctaaatagtcataggagaatactcagaaatacgacgacagaacataaaagtccatttggaagattcattggaaaatacattacgggtagaaaaaagggtaggccacgaaaatgattaagatttggaaatcgtgggtaccattcaaatatatgagcaagtaaattattatgcgaattatgtattgcatagttttcttttaacttattatatgtgaaataagtggtggtgtcattgttggtgttgtttgctccttctttaaaaagcatagtgtttagaaaatcaggaatctcttgcaagtaaagtagagatgannnnnnnnnnnnnnnnnnnnnnnnnnnnnnnnnntggctttttccactccgtcacacctacgatgcaatgatctcattaaacccattttattccaatattatcacattcattcatttattcataccaagaaagaaaaacttttttatattaacatatgttagtgggtacataggactaatgctaatagtgtttaattttttcgtaaaatgaaaagcaggtagagataagatgcagagggcaagaactggagccagtgttgacactacaacacgtgagagatgctatatggagaggaagcagagacacttcttctctttcacaaaacattactttgcttccaaactcatctacctctgatcatctcatggtcctccattatggtaggactatttcttaactattttatactctattttatttattatttttatataacaccatattctcaataaaaataactgcccaccatttcttcttctaccttttttaaagaaactcaacatcccaccttcttcaattgtttttcccagcttctttttttttttttggtgggtggtctcgattatttattttcacttaaggcttttccttggtgcgatttgtccaatgagcaagaacgaaagagtatctaattctgtaggagtgcataccccgattgatgtcttttattcttgtatcttctggggttgcgagtaatgttaacgcatgaaaacacatgtattaagtattcatattcattatttttcatgctacatactactattactatttctaggtgactttctttggacataatgctactttaggtaggttcagaatgtttcatgttgtatcgcagaaaatgggcctgatttcggctcaccaaaccaactcaatgaatgtaactgaatttgatctgcgcgctcatattagaagcccattaatatttttcttttgagatcaatgagcccattaaaatatatgtattgatattgatacatttggtaaaataatttataactcgacctagaaaatatgttttactataaaatttgacaacaacaaatacacttttggagtttttttttttttttttttttttttacatttttggagatttatagagacgaaaggataattggaagagataccacacaagtaaaatgaaactccaattagataaaaacgagtagatgaaaattaaatttggtgaattcgttgtagatggagaaattgtcggcaaacaatgatacacatacataaatcataatggattggatcgttgattgagagcacaacaaatgaaaaatactttagatatgtatagttgaaaaatatattttgtaaactaataaaaaattgttctatacgattttatttggtcttaccctcttggtaaagtaactaaagtagactaactcaactctcttctagtcttcttgttcgaactctttttttaagaccaaaaaaaaacacacacaaagagatgtcttttgtctgactccataatcacaccatcaccaagaagaagaagatctaggttttgcatctctcgtcattacaatggagcgagcacgaaccgaaagccctagctacttccgtcaatggagcggcgattcaggtaccaccaatgccgccgccgtagctccttcttctccggcgcgtcatcaccacgctcgatcttcttccgtcactaatatgtctaacgtcaaacgagctcaaaacgttgctgctaaagccgctgctcagagacttgctaaagtcatggcttctcagaccaacaatgatgacgacgatgacgatgatgatgatgaagtcggtggtgatgatttaggtttccgatatggtgctcctcctcctctttccttcactagaaatccttcttccacaattgctaaacctaaacctgttgcttcttctgctgttgttcctcctcctaagatctctagatcttcctccctgcggtaaatttcagtccttttttgctttagtagaaaccaaatccacccaattcactacatttgtttacttttcagtcatagagatttggtttctagtttctaattttggaaatgttggattttgattgaaaaatatggtaatgtagtagttatggaaactagtctgaatgtttataatcagagaattgatggtggtgattgtgaaataccatttatctcagaactctccagctgtgtctgttcgggcatcgcaaccgcctgttccaccgagtaaactgaggaatcaaactaccaatcctttaccagttgcaactcctaagactgaaaagaggtgaagataactcccaaagatatcttcatattaaagaagctagttgagtttgttattcattacttcttggagattgtttgtcattgcagggttttagctgatattggtcattttaatggaaaagattcgaaagatcagcatgaagcatctgcacttcgtgacgaagtatgctaattcgtttttttttccgtatctatttatatcttaatggataatgtcatagatggaaactgagagttgttttacatcacagcttgatatgctgcaagaggagaatgatagtatacttgaaaaggtagaaagtcttcttttttggttttcatttatccccagagtaagttttttatacgtttgagctttgttaacagcttaggcttgaggatgagaaatgcaaggaagcagaagctagggtgagagagcttgaaaaacaggtaactggacaaatacctgtatgcataattttttttttgcttttttttgtaatattgttctcacctttgagacaaaatctaggtaacttctctgggagaaggtgtatcattggaagctaaacttctgagccggtagtcaatatcaatacaatttgttgccagttttcgttttttttctgttggattgaaatgcttacatgaatgtactttgtttcatgttgcagaaaagaagcagctttgcgtcaaagagaggtattgctacgtctgaggctcctcaatatttacttttatgtggtggttttgtttccaaagatggaacttttgttctggcttttagattcacctacactcactctatgacaggcggccctcaaagatgcaaggcagaatagagatgggactaatagagagactactgctcttcggtctcaagtagaggtaggccctttttttctgtccatgtgtcacatctataatgaggtgataattaatggaaatggagaaagcttatattttctataattcactcttaatcagactgcaaaactggagaccgctgctatagtagcacaacttcaaggagcagaatctgaagtcaatggtctacggacaatgacgcatagaatgatattgacccaaaaggagatggtttgtgttcatgtttttgcgcaatccacacataagcttatggtagggattaagtaacacagccttgcaaaattttcaggaggaagttgttcttaagcggcgctggctagctcggtattggggtctagcttccagatatggtaaggagtaacaaacatctgcttaacgacataactagaactttcatgccatcgtgtatctttgcttcttgacatatgtgcatatttgcatttcaggaatatgttcggatatagctacgtccaagtacgaatactggtcatctctggctcctcttccttttgaaattgtgctgtcagctggacagaaggctaaagaagaaagttgggaaaaaggcaagcaatcactcaatcatatttctaagattctgttgtgataacattctataactccgagtatcacttctcgttactgtatatttatctgttggctatgaaaacatctgaccagaatctgaggagaacgagaagaggagccagctcgttcaagatataaatgatctaacaggagaaggaaatattgaaagtatgctctctgtggaaatgggtctaaaggagcaaacttcttta

SEQ ID NO: 26480 - DNA, 1006 bp, Arabidopsis thaliana landsberg
accaattaaatggctgagtcttttcacaaaatcttagttaacagttcggacacaaatctatcttcggtatttttagtttgccaaaaaaaaaaagtttcctatatcattaacaatccgttaaaaattgtcgattgataattttaacatttctagctaaactagtcaattcgtattttgtagtaaaccaatctccagatcattgctactcacatcatcatcgtcttgtacttcagcatggacggtttcgtcttccgaatggcttttgtcggctgcagcggaggtaagttcctctgcccgcttcacttgatgagaccagtccgtacggattaacgtataaagcatcattaccaaacacgtcatctgcgcagataacagtccaaaccatagcccacgaaacccaaccttaaacccaaacgtggtcgtaactgccacaggcaagcccacaatgtagaatgcgcataggttaacgcgtgctccatctttaggcctagccgtcccagtcaagactccgcacagcagccgtctgtggcgagtttccaatctcgcaaagccccaagatcggaagcgcagccgaaataagcccgagaatctccggttcgtccgtgaacatctttccccaaaccgacctaagggccgtcacaaaaacagcagctgctaaaccgtacgctaccgcgagtatcaagccaatcacggtcgtacattgtgcccgtgttggttggccgcctccaagagcgtgacctacacgggttgcaatggcgctgctaatagcaaacgggactacgtatagtatcccggtggtctgaatcaatattcccatggcggccacgcttgctttagggttcccaagaagcccacaaagaaaaagcatgatctcataccaccaatactccaaacacaccgagatagcgcttggtgcggctagagaaagcagcggccaccagccgggaaaagtgaccgcaaagcgagccctttccacggtttgattagagaatccgagaagaacgta

SEQ ID NO: 26481 - DNA, 802 bp, Arabidopsis thaliana landsberg
aaaaaactaaccataaaataaacttgtattaacgtgaagatgatgaatgaactaacaagtgaaagaaattaaagtagttgatggaaaggtaaagagcatgtctaacaagaagacacattaaaggttttataacaacaagatcgtcaagagacagtaaacctaaaatggcgaactcagacaaaagattattcgagaaggtagctataataaccggaggagcaagagggataggagcggccacggcgagattgttcacagagaatggcgcgtatgtgatagtcgcggatatccttgagaatgaaggcatccttgtggcggaatcgatcggtgggtgttacgttcattgtgacgtatcgaaggaggctgatgttgaggcggcagtggagctagcaatgagacgtaaaggtagactagatgtgatgttcaacaatgccgggatgtcgcttaacgaaggtagtatcatggggatggacgtggacatggttaacaaacttgtctcggttaatgtcaatggtgttttgcatggtatcaaacatgccgctaaggccatgatcaaaggtatatatgtattattactacctcagatagtgtttaattccgaagctccaactttaattataagacaactaagtttagttatgatgtaactaaaaccgagaagggggacgaggaggctcgataatatgcacatcgagctcatcagggctaatgggaggacttgaaggacatgcgtatacgctctccaaaggagccatcaacggggtggtgaggacaacggcgtgcgagcttgggtctctcggca

SEQ ID NO: 26482 - DNA, 961 bp, Arabidopsis thaliana landsberg
aaatatctgagtctagatatattcgtcgtacgtttattaatatacaatacttacgcaatttctaatgaaatgcaatttgaatatagctccttcgattaatactttccataagctatatatatgcggccaccttcatttgtatcattctaagttaatccttaccaaaaaaagaaatcattctaagttaataaatactcaacgggtcctctcaagtttcggtcatatccaatttttttggggtttccttcgggattgaacaatggaggcttcatgtaccatgtcattgaaatgcatggtaagttatctttcttccgtatacataaggttgactaggtagttaatgcatatcttttggttatttcatttgccttctcatttattcttttaaccattggatatacgatactaatagatccatgcagatgaaaaagtacgatgaatgcatcttttagggttagcctaattaattaattagaatgggttaagagacaatagcttttaagggtttgattgattcttcctctgctcacccgcaaaagttgtatttgcggttgctagcgtttaaaattaatcataaacaaacgttttaagcctttctaaaccgctcaataccactgaattcaaaagctcatttccacaagtatttgcggttgtttgcggttgcgaacggtaacaccgtagcgtaagcaatttataaaataatcaatcctatatatattttaaaaatacattatcaccaaaataaaagttaaaatatattatcaaactatatatatatatatatatattaacattaattctcaaaaccctaattttctctctttatcaaaatcatgccgtcaatctaaactcaaggataaataaatacatgcttagtattataataaaaatattaaatccgaggatataagaattcaaatatatatttttagtttgcatatttttattataattatatata

SEQ ID NO: 26483 - DNA, 1277 bp, Arabidopsis thaliana landsberg
cattgaatacttaatactgatgattctctgtgtattttaacagctattatgcaagtacgaaccgaagtccgtcttgaaatttctggaaacctttgacagctacagggtggaacactgtcttcgcctctgccaggaatatggaattgtcgatgcagcagcatttctcttggaaagggtgggtgatgcaggaagtgctttgtcccttacactctctggactcaatgaaaaatatgtcgagcttgaaattgcagtggaatgcctaatgtcagaaatgaaattgggtgctagcgaaggagccagcttggaacacttcagtagtcccttaaagttgaaagaggtccgtccttatttatgacattaagaaaaggggctctccatggctctttcaatgctgttggggatccttcaggtacatgacatacaaggtgttttgcaagcctgtataggattgtgtcagcgcaacactcctcgtcttaatccggaggagtcagagatactctggtttcgcttccttgacacgtaagcctgatcatacacctgatcgctacttaccgatttcttatcatccttataacacactcgtcatagttactcttaaacatatgcaattaatatcatgttggaataaacaagcctgagcgagcgctcgtagctattaaggcaatgatgatcatagttgtctattcgtgctttatgcagtttctgtgaacctttgatggaatcataccgggaaccgaagaacaccgatggaataaacaaaggttctttaggtgttaaatcattggaacgtcatgtcaatgaatcagatgttgcaattaagtggaggattccaagatctgatacggcagcgacacacatcctgagaaagctcatatctcaatttatcaaagagattgttgaaggaatgataggatatgttcgtcttccaacaatcatgacaaaactcctttctgacaatggtactcaagagtttggtgattttaaacttacaatactgggaatgcttggaacatatggcttcgaacggagaatactagtatgttcctgcgtggctgcttctctctaatcatgtacttttgtgcatcggttgactgatctctcttcaaatgttctaaaacctttttttcccctggacaggatactgcaaagtctttaatcgaagatgatacattctactccatgaacttacttaagaaaggtgcttctcacgggtatgcacccagaagtttgctttggtgtatatgcaggtgccctcttaccaagacattttctggtct

SEQ ID NO: 26484 - DNA, 1782 bp, Arabidopsis thaliana landsberg
caaaaaagattttgtgaaacgtcatctttgtattttggacaattatctgttttgatttagatggatgtatttatagagaaaataaatggatttgtgagaaaaataatcaagattggtgatttgtcaatcaaagaccttttcttcggcagtgtcacattatctaagttttgtacaaatgcgacttggtatttttttttccatattttattgtcggtaaggaaacaaaacaaatttgaaatgaagagtatagttttctactaagactaagatcggtcttgcttttattttgtcataaaaaactacaatgtgtgtgttactaacttactattcttttaggaaatttttagtttgttagtttatcatttttttaagtcgaagaggagtgattcgactatagttgtagactgtactgaaagtttttagtcgtagattatgttagttaattataaagtagaatagggcaattgtatgttagaagaattacttacaactgtatctctaatttaatttatcatttattcatgtgatattagaaaaaataaaaattgattaatacaaacttttctcctccgatcgatcctaataaaggagtttcataacatgcatcggtgttctgttcttctaaagacatattgacgttaatttggcttaccttacacctcacatattaattacatataaaatatttgtggatgtcggaatccacttcgtggtcgtgtttcgaagatcttaagacttgttaaacgaacaaagatcaatcggaaaagtgtttgtttatttctgtacagtttcagtgtcaaatcattcgtccttctacaattgcaatcggactacatttatacaaatattttcgaatcaaatgaattaatcactacgctgattctacgccgggaatctcgcttcgtttacttcggacgttacgaactctccagctcgagcaattaatgagcgtctttaattcgagatccttctgttactcgaattaaagctaaatctgacttttgaaccgatgggcttcttaaacaggcttacttctctcgatgggccctttgctgggctcagaccgcgtattgggccggatacgaaatccaacatccacaatttgccccctaagtcctcgaagtgaacacttcggggacttaagttcaactcgtggcgccattctcggagatctcagaacgccatttcgggaaaacaagaatctcccgaggtaaaaaaggaaactgaatcgcgtgattttcgaggatttcctttgaaagagtgtgacgcttcgtaatcctagggttttggatttcccgcccattcaatcctctatataaactgacgaacccttcaccttctgactgacctcttataagctaccggactcattcctcgcctcaggtaacaaccccgactactcctttctataattcgttttcgttcagtctttgttccgaatttcgcctgaatcaataaatagccggaatcttagacctagaatcgcagtaggtttaggccggtagtatttggagtagattccttatcgatttcttagattttcagtttagaaattcgaagaaaactcaacgtcatcgccgttcttcacctctttccggtcaaattccgtcgtcaaattcttagattcaccgtctcaccggttcgccgatcgattaaatacggcgaagacctttctctgctcatgggttcttgaagaagatcttcgagtgttcttcagctgcttaagagagcttttcagaaaataaacggaccattgagctccaaaggggggggcgggggggg

SEQ ID NO: 26485 - DNA, 663 bp, Arabidopsis thaliana landsberg
tctggcaaacaaaccggtacaacgatccctatctcaccatttctcttctcaaatgaaacgtagaagctagcccccggaaggtcttcaactccggctgtaccaattcctccgtaaactggtttcccccaaattccgaaatcaatatctgcgaaaattcttacatccgaaaccaagtaagctccgtccgacgagaagcttggtcttccctttatcaccatcagatccgcaagtgatcgcatgtactcctccgtcacgctcgatttcgcctcttttattagtctcagagcaaactctaacggtttcttagttagttcattagctgttgcgattgcgactgggaacgcaaaggcatttccgtagtatcctcgaggtagtggtggatttttaagcttagaacgtgcgttgacaattaatatgagccgcatctccttgtcctggtctggtcgtagagcgatggtgcgataacgccataagaaagacgttagcatttccatattggtgctgctgttgacaagatttggtgggaggagcctgcgtattgcggacatctcgcagggaccgaagaagagtgacggcctaccagattgtctcttctactgccgagttctgtacctattgccggcatttcgtcgtactctcggtgtgcgtgtgtcaccgagcagg

SEQ ID NO: 26486 - DNA, 2165 bp, Arabidopsis thaliana landsberg
  unsure (1)..(2165): unsure at all n locations
aagttattttatcaggtattatgttccgtcccataatctccttctccaaggcaacagcttcttcagccattccacctataccatacgcctttatcagcgtgttatagctacacaagtcaggaccaagtcccgattctttcaattctttcagaacatcagcgacttcatcgatccatccttgctctccatatatattgatcatgatgttgtatgtataatgatccggtccactagtcgacttcttcattcttttcaagatgcttctgaatttctccatctgtttatctttcccatatgcatccaacaaagtattataagcttcaagtgacacagaaaacccgtcaaattgcatattcttaatcgctgatgacatgtttgtatagtccttgttctttccataggcagctataatggtgttgtaggatataacatccacaactccgtgtcttttcgccaacaagaaaagctcgttaacctttttgaagagcttggctttaccatatacatcaaggaggacattgaatgtgacagtattaggagtgaatccatatcgaatcatttcctcaaaggttcctgagagttcatcaagcggaagagcacgtgcgcagcagtttataacacaattgtacatctcctgattccaatggatcccactctttcgaatcctgtagtacagatgctggagtttatcctgaaggtcacacttctgatatatccgaagcatatcgcggaacaagtacacatccggaacaatgtctttctgctcatccatgatttctaggacagaacaggcttcttccaaggatccggctttcacatacatccgcaccacaatactgaatccaatcctgtccaacacaactccagaagatttcaaatttaaataaagcttctccgcttcactaaactcacccatcacagtataaatgtcaatcattgtagacgtaatgtgcagatttatctcttcatcagattccattttatggttgtatattttcacagcatcagtaagttgaccagattctttgcaagagcaaatcaacagatgatacaagtgggactcaaatgctgagtctctccactttttttctcgcaacaaccccaagcaatcatcaaccataccatgtttgacatatgccatcactagactcgagaaagaagtctggtttaaacggatatgcttatgaaaagaacctttgagaacgcaaggcaccacgtcagatcttccccaccttctcataagcctgcagaatgatgccaagaatcgaggaatattggcacccgataccagtcatatcttcgattgtcttaatagcaccatctctgtctccatatttagcctgtaaattgattaaagtaaaaagattgaatgaattgggtttataaccacaccgcttcagctcttgatagtaatgttttgcctcctcgtaattgtcagcgcggccccaaccttcaatcattgacctgtaacttgtctcatctggttccagcccaatattacagaggcggtggaacaaaccctgtgcagcctccatcttaaaaatcttaccataaccagttatcagagtattgtatgcaatgatattcggagaaaaccccgcagcttccatagaaaccaatatagattcagctagctccatttttccttgttgactataagcattaagcatcactaaccaattctctaacttcagcctcactctatcttgtttcatcaagtctataacttcctctgctttatcatataatctcaaacgcgtgtaaatcgttatcatcgaggagtaagcagattcacacacaatcccgaattttctcatatgagaaaatgcaaattccgcttcttcaacattccagttcttctggtaaagacccatgagcatacctattgtagccacatttggtctaacaccaaactccaacatcatgtgaaaccactttgaagctaatttcacattcccctttttagtacatgcatatataanccgtgttgaagacctgataactcttctgaaactcatgaaatccacacagctccttgatcagatcctcggctcggtcccattcttctctccttcctaaaactctgagaatcaaactataagcaacaaagntacctaccaatttaccattacatctcatccaatcaagaatttgatggcattcgt

SEQ ID NO: 26487 - DNA, 1835 bp, Arabidopsis thaliana landsberg
acagccagaaacaactgtgaatgaatccagacacataagcttggctttttcttttttcgatcatataaatggaaaatctttgaactcttatcttatagatttgttgccacatcgccacgacttatcttcgaagatcgatagtgtttggttcacacttaagtggcctcgtcactatcaaattattcctatgttttggtttgatatacttctacaccgggttagttcagttttggtttctagcttctctagcccctaaatggtattctattttcaataatcaaagaaactttattatatatatatatatatatatatctatatatatataacaaaatatatataaaatctcattgatgtccaagtgctcattcttcccgaggctcaagttattgataaatcaaagacgctcaagaacctcactaaatgtgtaaacaaaacacactattgagaagtcttgaatctttcaacttttcaagggttgtgtacaagaacctgtacagcctctaaaatactctgtaacatctcggctgcttgattgccaacattctttgactttcccccatacgattatgcatgtattgctccattgtttcctacatagtcccatccgcgatgtccacttctggagtgaatcaaaaacttcaatacatttagctcattaaagcgaccactataatttcttaccaccaccgttttaagtgtcttaggaagagacttataggtaaggttcttttgccaacatgttcgtggactgatgccacaatatgacttataatataaacgatgagccttcacattctgggatccgtcttatgggatcttcacattctgggatagccttcaaaaagaaaaatacacatattccgctcaagattaatgtctaacggtcttaaatatacaccaaatttaacgtaatcgattgaaggtattagataaggaaactacattaaaccattcacttttaatcactagactactgaaaagtttcatacctagtactattttcttcagttctcaaagatatgttaataatgtaaaatgtattgtaaatatgttaagacttaaatatacctgaaggagataagggcagacacttaagaaaatattactaggtatgaaactgttaaggaagccagaaagaacttttccgtctaatttggttatttgattcggttcatcgtaatcgccctctgcgcagaagtccaagtagacttgttttagtttcctattcattctcttgacatggaaggagagaattgagcctgatcgtacttaaagatctctacattaggcaggtcaaaggaacaaggctttttagggaagaagtcgcagttatcgaatacgaattctttcatatctcctgcaaagttcttgatatcaatactccagcagtaactaagacttatactcttgagcgtatgagagtttgataacaaagactcggcctctgtgagcttgatccaaccaatagagagctttctaggcaatcccgagtttttgaacttggagggatcaaacccacacgcgtaaatctttagtgattcgagatttgtgtttaaaatccgaattaaaacctaatcaaattaaaactaaaccaaaccaaatacaatccaaaattaaactaattttggttgagtttggttatagttttactaaatccaaattaacagaacataaccaaacccgaagatttttagagtctttagaattttaaggtgattttagataaaagagattaagcacaaatctcgaaaactaaagaaagagtttttgaaattttttaagtgttttcatgtaaagtggatttctctgtggtttctgcattctgcggatta

SEQ ID NO: 26488 - DNA, 3375 bp, Arabidopsis thaliana landsberg
tacggatgctctaaaggatcggctggtcgatttgcacctattggagtacttatagctttgcttctgattatggtgggtggaactcttggtgctaccggcagctttagaggctcgggcacaggtgctcatggactaaattttgtcatgggagatgtcttagcaccaattgggtttttctcaattccaacagatgcttttaataccgaagttcatgttaatcgatgcaccatggattattatgacagtggataagtgagtcttttgttttgcttccctgttctctcattttgtcttcatgattgcaatgtcttgtgattaaatagagttctggttgatttatctcggttagattaggtggaggcctcacagattcactctgatctttcactacgtggccttaatgggaaagaggttttgagaaaaacaattagcgttaatgatcccttgagatatggtggggtcaccggataccagacagatcggagtgtctcagccttgcaggtgacaaaagatggtgattgaccattcaacttggctatggcaccaattaagatcaatggagacaagaaattatatgggaccttcttacctgttggtgatactaatgctcccaatgtcaaaggaatgtaagaaccctcttacctttgacgaacctttctttttgattaagccaaaggagcgtataacagatgaaacagtttcttagattcttggcatagagatacattttggtgtcttgtattggccttaacgttgctccagttgagtttttttcagatctatgctagctcgggatctacaatccattgttgtgtacgatttggacggaaaattcgctggaataaggagaccaagctcgaagcttcccattgagatcaatggtatgaagattgttattgaagatgcaattggaagcactggccttgagttaaaggtaaaaagactttataaaatgtcacacggcacaagaaaaggaagagttatcctagtttgtaatattatatgacatctttgttcttggccttgtttctcagactgacccaggagtaccagtggtctatgctggttttggtgctctaatgctcacaacctgtatcagttacttatctcattcacaggtaaaagtaactctcaaaatcgatatccgatcaaaaagtcttgttttataccaatgtgtcccattggcattttgctctactagatttttgtctttcatcatctaactcttttcttttgtttgatattcaatctcttatgttctgtatgaagatatgggcactacaaaacggaacaacattggtcgtagggggaaaaacaaacagagccaagaaccaattccctgatgacatgaatcgtttgctcgatcaagttccggagttaatcaagaagaatacttcagttgtctctgagcaatcttgattagctcttcgactctgatacatttcaaaccaatatagttgtacagaattatggaacaggtatagttttggagaacacatacacactctacatgttgctgatcatatgggaagagagagtcagagaggagctataaaaactgaaacttcaaattgatttgtatggaagttttgtttgaagagtcttagcttccttgtttgtcaagttatttgatctgtatctgtaacttcagtttcctatgtttttagtcgtagttcaaaatttagaagaaaaaataataataatttgccgacaaaattaataaaataatgccaaaccgacgacaaaatcaagattcttgtctggtgacccaaattgctcatcaaattcaagatcctgtaaaatcagtagcaacaatggagaaaccaaagttgaagacagtccaagaggtggtcgcagctggcgaaaaactaccggaaagatacctctacacacccaccggcgactgcgaaggtgatcaacctttcaatggtttgttgccagagatggaaatttcgatcatcgatcttaatctccttttctcttcttctgacgacggtcgagaagagttgagtaaacttcactcggcgatctctacatggggcgttgttcaggtttaagtttttgaccctcttagtgatgatcatatagtcttaaaaaatcatcgaagaaaatttatatctcgtaggtgatgaatcatggaatttcagaagccttgctcgacaagattcacgagctaacgaagcagttctttgtacttccgaccaaagagaaacagaagtacgcaagagagattagtagttttcaaggatttggaaacgacatgattctgtctgatgatcaagttcttgattgggtcgaccgcttgtacctcattacgtaccctgaagatcaacgacagcttaaattctggcctgaaaatccaagcggatttaggtaaaatccataggatcatccatgcatagatttcagtttcctttagactgtaaatctgtgaattttaaaatcgtttctttagggaaactttacatgaatacacaatgaagcaacagttagtggttgagaaattcttcaaggcattagctagatcgttggagttggaagataattgctttctagagatgcatgggaaaaatgctacgttggagacaagattcaacatctaccctccatgtccgaggccggacaaggttcttgggcttaaaccgcattctgatggctcagcctttactcttatcctacccgacaaaaatgtagaaggacttcagttcctcaaagatgggaagtggtataaagcttcaattctccctcatacaattctgatcaatgtaggagatactatggaggtaatcagtcatgttatcatgtactatatgtacctatgacatttgaaattgatgggtgaagatgtgatagaatctctcatgcatgtttagattatgagcaatggaatatacaagagcccagtccatagagcggtgcttaacggagaaaaggaaaggatatctgtggcaacgttttgtaatgctgatgaagacaaagagattcaacctttaaatgggcttgtgtctgaggctagaccaaggttgtacaaagcagttaagaagtctgagaaaaacttcttcgattactatcaacaaggtcgaagaccgatcgaagatgcaatgatctgaagttaaaaaacattgatcagtctgcttttaatattcaaaatacacatgtctctttagttacttgatccttgaaataagatcccgtttgctttctttgttggaacgtgatatttcatttgtcttgtgttgccaataatatcaaaccctcatttgggtatgtttaagtgttgttagacgctctatctaaaagattttgaaccaaatagtgaaaatagaaggttaaacgaacaacctgccttgagtgtttgtttttggctttattctt

SEQ ID NO: 26489 - DNA, 1444 bp, Arabidopsis thaliana landsberg
  unsure (1)..(1444): unsure at all n locations
gactaggttaatattcattattctaaattttagaacccttgcccaaattggcttaattcgactaatagcttactcacaaaccataatcacatcattttaaattcaagttgtatcattacacattgaaggtgttgctgttttcaaataacgttgggatttctcatttctaaatatggtctataagaggtaaaatagccattgaataaaaatcgaactttaaatgcgaaaacttgctgtccaagttttctctttaaacgggggacgaacaaatcaccacaccgtcactctctctatctctctttctctcaccttttataactgcaaatccctaaaaccgccattgaaaacaaacctttctccactttctcttttctcaagaaactctctttcttcctttctaatggcggcacaagtcgacatcgaagatcaagaatcagtcaccaatttagacaacggcgaaatcatcaacccgatctccgacaacgcacctaacttctccggcgacgcaacgattcttctccgtgaagccaccttcgaacacaacctcctcaaaaactgnnnnnnnnnnnnnnnnnnnncattcgccaccgaaacaacaatcgtcaccgtacgaaaaatcttaacgcagagattaatcacaacgaaagctaaattcgctgtgttcaagcttttcacagaagctatgacaaggaagaacaacggttacgcgaatattaggtacggttggtactctggttctaaagaagagatcgatcgtgttattacgtatgggtttagtaatagagagatcaagaaagtcgaaaacgacgtcggatctcacggtgttggaattcatcttgttcatcatcgttactctctcgctgcgtaagtgttatgttttttctcagttgtctaagttcttagtttgtgattttgatgatgaaaaagtgaaaattgatgatggtttcagggctttagttggtgaaggtgatgaagaagggatcaagaatattctcttatgccgtgtgattcttggtaaaccggaacaaattgtgaccggttctaaacaatcttacccaagttcaaaccaatttgattctggtgttgataatcttgagaatccgagaaaatatgtgatttggagttgtaacatgaattcttacattcttccaacttatatcgccagtttcaaatctcatcttctcagaggtaacaacaatatacaacttcttcaagattctgattagagagtgcaattgatatttgtgtgtttttgcttctcaggtctaatcggaagagcaaggtcaccatgtgttagcttctctgttcttatgtcaattctttcaaagtcacttgacgctacaagaatgaacttgattatgactagttatgatgattgtagggtatggagttacttctattcaaatccattagtaaatgagtatggctgtctctgactgaattc

SEQ ID NO: 26490 - DNA, 1286 bp, Arabidopsis thaliana landsberg
tgaggcggctgcgacgagggataacgagacgggatccagactatgcgtttcaagttccttggagatagaatgcattgtcgggcgatgggatctaggatacaaaaatctactactaataaaagaggtgcattgaggcttgtccatgggctcacatcatccctattaaaacactctctccatacgccacgtcatcttgagattacattaacttatttatacgtgatccgcttaattaatattaagatactattaattaaaaagttaaattactattttttggcaaaaggccgacacagcccacatatctaagaaaatatcacatacattcaatgtatcatatcaccccatattgatagaacccttctttttttttggcaaaggaaactctttcattaaagcctctaaggcattacagccaatttttacagagaatgaatggcaatgatatataactcttgattctcagatcttggaataaaattaaaggaaattttactaaatttaaagatagaattaggatatcatgaagaatcccatggagttccatcgatggaatctccgaattgatggtctcgataacctgtttggcatctgagacgattgcaagatccgtgatccctaatcgaaggctctgcttcaatgccagttgaatgatgattgcctcagcaacaaccagggatctgatatgggaatccgatgctgatcctttgctgcgaaaaccagatcgacgggatttgatgatccaaccgaaacctgcagatttggagctttcagaccacggagcatctgtgaaacagaggtgagattctgtttcctgacctcttcgagttttccggatgctcttcttctttgtgggatccaattggccctgtgctttttgccattccctagccagggtaattgcatgagatagagtgtccatctgagaatagcttttgttgttaaaaatcttttggtttctggctatccagatcgcccaaactatccaaggcagcagaggccctgcgtttaagcccattggaggaagacaaatcaagagtttggaggcttcgattcctgctctcagagatggaatacgatcgccggataaagaatttttgaaaggagcgaggtcccagacttgcttggcaaagggacacttgaagaataagcgcagggctgattcctcgtttccacataaggtacacaaagttgagtcatttatgtgtctagttcttaggtgctcacctaaagggagagccccctttcatcagctttcagaggaagaaacttggttttcgggggaa

SEQ ID NO: 26491 - DNA, 1541 bp, Arabidopsis thaliana landsberg
gagtaagttatctagaaaaggcttacaacatattggacctggcattatctctccagttttgcagacactcttattccttctactaattagatcaattcaccaaatataataacaattgagttagtggttctaatgatgttaaattttttttataaaaaagttgtcacaaaagataagttagtggttttgacttagttctagaataaatttacaagattggtatataatatattctatcttttcatattaaatcatatctaaagtttttcacataaattaagaaataataaaaaaaatattttgtttattttatatatataaattgttaaaataaaactaattcaactagtaaaaaacatattctattatataaatggttacaatcaaatatatttaaactcttgaaaacatcacttgaaataagataaacaaaattctctggatcatcatttaaaaccaaacagagaaagtattcgatgaaattaaaacagtataaccaacagctcaataattattatacttttataattttttatttttttttttgaaaaagggttttatatatggtgaattaatctgattatactacatataactaaattggaaagggataagaataaaaaaaagaagtagacgtctcaaaacaaagttaagcctccatgacgcacatgtaaagctttcatcaatcattttaaattttgttttagttaagaagtagcatgtcattgaaccttattaatatcgcgtgtaaatacggtattttgttttgttttctgtatttgcatattgtctatacgtagtacagttttgaaaattccatatacttacatgctcaggtaaacaagttatacatccacaaaaataatttctgcaaaaaagtatatttactcataatttattagtcaacatgttaacgtctcaaaagagtttccaaaaacacaaaaaaatgatattcttttgaatcgggtactaattttcatttaagataatcaagaacccccatggtgttcattgtttgttattacttattagagtgttcttcaacttcagctaattcatctttatcgttaacttttctacttctacaatttcttctgcacttgtactcacagtgatagatattagatataccatgatacaattctttcatttatttggtgtttttcacaaagaaatgtatatataccaataataattacgatggatacagtaatcaattatcacatcgagtgtagtatttaaagattttagattttaaacaaacgtgttaaagagaatgttacaaatagaaaggttgaagatagattttgcgtgcgacgttttattattaagtaacccctcctcgttatacaacagtaaatctcatctcttgtgtaacagatactaaaaaatcaggttcatcaataatcaaaagaatgttgttcttacctcacattgacacaactgatgataactagggttgttaatacatccgggtaccataagaggagaccttgaactgatttcttttgctccgattctcgtaaccgtacagatatgaa

SEQ ID NO: 26492 - DNA, 1084 bp, Arabidopsis thaliana landsberg
agtaagctaaagatgagattattgaagtggtcaagtgggattctcagaagaagaaaatgaaagagacacgtacaagtaaatgtatcggaagagttgtctcaagactgctcacttcaagaatgtacaggtgttgtgtatatagcttgatggacaatttatgtcaaagctagtgtcaaactggactggaattggtcttgagtggaagctgagaactgtcaatgaaattctttcgaagatcatatcttcaagaagagaggagaaagaaagccacaagcttttgaaacggagaaatgataagtttataagagatgtggtttttagtctagtgttagcaggaagagataccacaaattgatcagctctcacttggttcttttggcttctttctaagcatccacatgttatgtccaagatcagccatgagatcaacacaaatctagtgtcagaagatgaggaggagtcctccaaaggatgaaaaaatgcagagaaatcaagctgcatttagaaagacaataactcaggaacatcatgagtagactacatacataagaagaagaagaagtcattgttctatgtgtctgttcttgtaatgatcgagagagaaacaaagctctatttctgatatcacatttgtctgcagctccactttattctccagcttgtcaactctagtcatcagacacaagctcagtatctttgacacacacctggatatatctcttgatccacgttttcttcagatgaatattgaatgtataattttacccatatcttattaagatggaatgaatattaaatttatgtcataaatataggcttcaccaaaatcaaaagccttctaattttattttatttggagttttcattgttgaagcttaaaaaatactttttttgttcaacaaaagtgacaattttataaacttatttcaaaaattaattatgaattattatttagtatgataacatatagatttctctaaggaaaaatgaatgttgcattattgcattttattttaatttatttctgaaacatgcattatttcattacagtcgtattgcagattagaaagattaaaggcggatt

SEQ ID NO: 26493 - DNA, 1881 bp, Arabidopsis thaliana landsberg
tcggctggcttagggtcaatctatgtggaaaaacagttacacgtttgtacgttgaagttaggagttgttgataatacctttgtctcgtgtgaattgattgatatgtatagcaagtgtggggatattgaagatgctcgatgtgcttttgagagtatgcccgagaaaactactgttgcttggaacaacgttattgcgggttatgcgcttcatggttatagtgagaaagctctgtgtttgttgtatgacatgcgagactcaggtgtgtctattgatcagttcacactttcgataatgataagaatttctacaaagcttgcaaagcttgagcttactaagcaggcacacgctagtttaattcgaaacggttttgaatcggaaatcgttgcaaacacagctcttgtggacttttatagcaaatggggtagagtagatactgctagatatgtttttgataaattgccgagaaaaaatataatctcatggaacgctttgatgggtggatatgcaaatcatggtagaggaactgatgctgttaagttgtttgagaaaatgattgcagcaaacgtcgctccaaaccatgtcacatttcttgcagttctatcagcttgtgcctattcaggtttatctgagcaaggttgggagatttttctatcgatgagtgaggttcatgggatcaaaccaagggcgatgcattatgcctgcatgattgagctgttgggtagagacggtttattagatgaagccattgcgtttatccgaagagctcctttgaaaaccacggtgaacatgtgggcagcactcttgaatgcctgtaggatgcaggaaaacttagagcttggaagagtggttgctgaaaaactctatggaatgggacccgagaagctcggaaactacgttgtgatgtataatatgtacaacagtatgggaaaaactgcagaagctgcaggggttttggagacattggagagcaaaggattaagcatgatgccggcttgtacttgggttgaggttggagatcagactcacagctttctttcaggagataggtttgattcttacaatgagacggtgaaaaggtaaattatctgacaatactaaaatctttctctgtcttcatttcataatctcataaccttacgatgtgtgaatctaaatgaaacaggcagatataccaaaaagtggatgaactaatggaagagatttccgagtatgggtactcagaggaggagcaacaccttcttccagacgtagatgaaaaggaagaagagcgagtagggcgatatcacagcgagaaactagccatagcttacggattggtgaatacgccggaatggaatccattgcagattactcagaaccataggatatgcaaagattgccacaaggtggttgagttcatatctttggttacaggccgagagatggtagtgagagacgcgagccggttccattattttaaagaagggaagtgttcttgtggaggttattggtgaattatcacaagtacaagtagattccatgttcttttattgcaatgggttcttgattctttatgctaaagttatatatatgtatcacacacggaaaatgacgtgattcatgtaacgggtttggatgattcttttagcattgctatcaataaaggtaaaagtttttttattattcactgcttttaacatgaaaaaaaaagcgcagaattgtgttgggtattaccgggtaaatttaatatagggtgaactacgcgaataaccattctagcttgagttattaaatatataccatcataataacgtcaatgaagaaagtaactcatatagatgatcgaaagacgaaaatctctttttcaacttgtaaaggatgcaaacccaccgtgtgaaagga

SEQ ID NO: 26494 - DNA, 824 bp, Arabidopsis thaliana landsberg
  unsure (1)..(824): unsure at all n locations
gtcctccgtaaaccgtgtcctccggtacgttgctcataaaccggacggtggtgatggctctcgaagcacgagagcaacaactcctgacgagcgaagcagccattgttgttgctgatgaaagcgattttggaattagttataaatttaaagacttttggataaatatttttcttttaagaataaaaacgatgttggcgactcacgcgctggtgactccgattccaaagttgactgctttcgtactctctctatctactactccatcaagattgtctggttctgttccgggtttgattgatttctaccgtcgccggagattttgtcgtgtaatcacctccatggctgaagcgggatcggtttacgtcgatgtagctggggaatcgaagtcggagcatgttactgggaagtggttttcggtgccggagctccgactgcgtgaccaccggttcatagttcctcttgattattccaaaagttctcccaaaattaccgtctttgctcgagagatcgttgcgggtaacttgaaatttggagctttttgattcagagctctttctgtgattacgaagctaaaagtttgtgtcttttgttttttgtagttgggaaagaggagcaagcaatgccgtatttattgtatttgcaaggtggtccaggatttgaaggtccaaggcctagtgaagctagtggatggattcaaagagcttgtgaagagtttcgagtggtcttactcgatcaagtatgatgctttcatagttttatactcttctctggacagtttttttagtctttgtgttgtctaattttgtttgtntgcagcgaggaca

SEQ ID NO: 26495 - DNA, 1299 bp, Arabidopsis thaliana landsberg
agaatacatgtgaattatgacgagtatgaaaattcatcgtttcgaaaatacccttttcccaccccggacacgggaaatataaataaaatacaaagataaatcttttatttttgggttataactatccctctcctacaacgagtttagctctagcatcacctttattgatctgaaactgatctcctaatccgaagtgagccatcaacaaccaaacaaagttaagtagctcaccacctctgctaagttgcgccacatgctccgtcgctttacaatgacttgctgcgtaacataacaactcaacccacactttgctcaacactctccatttcccatcttcattactactctctttcaaattctgaagctctttcgccaacatactcgcatcgaaaagaaccgacttgcttcgatctcccttcacaagtatcggctcaatatcgttactaaccaataaaaccgtctcactcgctcttttcatatctctcaagtccttgatttgccgtcctttgaaaaacctctcagcttcagctttagtatctctaaaccgtatagtcccgattcccgccacttccgacattagcttcggtcgcattatcaacaaatacatcatgtagtccgatataatcttgctgaattctcggtcatcataaccttctctgctcagcttctccatcttcccaccttcttctttttgaaaacagagctcagtagcaatatgccaaaggagaagactttgatcataatcaactttctctatgtaacgcatcaacgtatcaacttccatcaatttcgaatctcgtaaagcccattctcctctcgcccaagacactttctttgcaacttcaggcgtttccgcaaaccccgacttatccttgacctcattgaatataaactcccattgattcttcgtcaaaggctctctcgaaatgaacctaatcccgtctagataagatgtaacactaaagattcgatcaatgtatttccaaagaactctgaaaacttcaggaataccggcaaagaacacgaggtataacgggtaaactgtgcaacgaatcatcggattcttcttagaccattgccggagcacgcttcttattgatctattaacattcttgatccatccaatcatcatttggattcttcttatcactagatcgaatagcgaaaccacgtaatcccacactaataggttacagtttctcttctggtggattcttgaaactttggctttaagacaaaacccgatgaagttaaatccgtagatcgtgcctgaccatctacgtgtaaaaaaacccgtcg

SEQ ID NO: 26496 - DNA, 9998 bp, Arabidopsis thaliana landsberg
gcactgcgtaagtaaatcagaagggtttctcggttggtttcttcttgaagatggcttcccaagccaaagacggaaatggagcccttttatccatgaactccttgacagccttaacattaacggcaaatcctttttggtttaaggtatcaatagcggactgggcttgttcaaccccctttactctgcacaaggcatcaaccaattcaacgaaagtggggacgttaggagagtgaccagactcaagcatctcactacagaaagcaacagcatcgtcaagcatgttgcaattatacaatccctgaaccaacacaccgtagctgaaggcattaggggcaatcccattgttctgcattttcctgaaaatcctcttagcgtcttcaattttatgagccttgcaaaaggcctcaacgacagcagtgtagataacgacctcagggattgtacccttgtcacgcatcaatccgaaaagcttcatggcctcctgtacaagcccatctttgcagaggccgtcaagcatggcgacggcgttagggatgagacctccttccttcatcttcttgaagatctcatcggaatcctcaggcggcggtaagggctcctgcgggtattgttccggtttgggggtttcccgtgaatcctgattgactccaagcttgaactgttcgaggaagccatcgtcagacagagtagtatcactctttccaaggttgtgggcttgtctagcgggtggttctctgtgagagttggaagatctctcccctcgcaagggtctgttgggtaagggctctggagggttctgctgctcttctacttgaccattgtcgcccgttgagagaaagcgtgttgcggacatcgacggcgtcgtaacacgaatctgcttcgccatctgcctcgcaaaaatgacggctttggaggaaggcaccatcgttatctgccgctgattcgaaaagttagggttttgcagattttgacggagagagaagaaggggagggttttagtcacgcgagaaggattgagggatataacagtcatttacaggggtataagaaagaaagaaggtcctcactcctccgtgtggataagcttctcactttcagttcaattggatagccggaaaggctctcctccaaggtaaattcctctctacttccttgttcaagctcgaatcatttctaagttaagcaaaattgtgtgtgttgtagtggcgtttatatggaggtgacaaatacgagcagcatcatgtggttcttcagggacaaaggtttcgatgatccgagtatcgacaagatgttgagaaaatgcaaacagttggaaaaggctcaaagcgatgtggcatcagaaaactgggactacctgagtaacattgttggtatccaagagagaaaactcccttacatcgtctcccgatgccccaaaatcctgactttacgcctcgatgagagactcatccccatggtcgagtgcctctccagtcttggaaggaatcctcgtgaagttgcttccgccattaccaaatttcctccaatactctctcatagcgtggaggagaaactctgtccccttcttgctttctttcaagcgttgggtgtgcctgagactcaacttggcaaaatgatactttttaacccaaggcttatcagctacagcatcgacaccaagctgacagtgatcgtcagctttcttgctagccttggccttgatcaagatgggatgattggcaaagttctggtgaagaacccatttcttatggggtacagtgttgataaaaggttacggcctaccactgaattcttgaaatcatccgttggcctgagtgaggatggcattaagtcggtggtcatgaatttcccacaacttttgtgcagagacgttaacaagattctcaaaccaaattatgattatttgaaggagtgtgggtttggagattcccagatagcaaccatggtcactggttatccccaaatcttgattaagagtgttaagaattcactacagcctaggatcagattcctcgtccaggtgatgggaagaggcatggatgaagtggcttcttatcctgaattctttcaccatggattgaagaagaaggtcgaatcgaggtttaaacttgtcaaaaagaacaacattgactgcagccttagagaaatgctggactgtaacacaaagaaattccatgagaagtttggcttttcggaggtaactgcaagctcctagcttttatatctctctctagttttttccttcatcaggctctctctgtaagctgttttcagcttgtgcaccaatttctagcacgagctttaccttgagtgattgtgatatcaatagagtgttttcttccagatatcatcgattattcactatgcattcgtttatcatggattctacacttccttttgaaaattacctaattatgatagaaccaccaccatggcccgatcaagtgcatatccatagagtggttcctgtgttttcaggtattcaactgcaatcaaaatgggatgtatatgttgttggataagtcagtgtcattattggcttgtgattattgcagcaaccgacaagcaaaagaagtgtctgcttagcctaactgcagaacagaatatgcagcaatgcagtctagctgcttgtcggaagtatgggtgggtaaaaagcccctagtcattccacaaatatggaggcccctagtcaaaggtcacatttgatgacaaagagatggttgatcgttctctgcctatatagtatgtacctgtcatataaaaatgaaaccccctctgctctctcttttggatgagatcaaccgtattttaaaccggccaaacttgaaagtttttttttgcttcaaatgctctttcaagtagagtcccttttgttattcacgttttgtagctattctattctctctccttggactggtgtttttgttcttcggtttttccgatcaaagttgaatcaagaagaagttcgatatgtccgtcttctctgtttcttgtggttgcttgttgggcttctgtgcctttttgattttttctattttgggcctgtgtgccatgttttcggcatttctgctttgttgggcctacgtgccttttcgagccttgtagttttctttgtttaaagcactcaataattgtttgttgacggaccaaaaaactcaaataggcccgacttaatttattattttaagggcccaaaattaaggactaggcctgcctaccagtcccaactcgcaacattggttatggtaaactaacagcttgccgttttatgttataaacacggcaggagagtgtaggcttagatagacaaacccgttaccgagttcggttggatccaacagcaaaccttaaagcgtactccgtccggtcgcggaagccattgattcagttacagttacaagtttagggttttaaagccatatcttgcgaatggctataatcgcaggtaatcatctctaaaattctctctgcagtttgtctttcccgaattgataagtcagtcgcttctgcaactgtgttccttctgatacccaaaactttccatttgggatagtggcagaattagtggaagaagtaagcatgagcagggtcgagcatgtattgaactatctgaaacgtaggcagctcgagaatcctggtttcttatatgcaattgaggacgattgtgggaatgttttctgggcggatccaacttgcaggttgaattacacctactttggtgataccctagtctttgacaccacctataggaggggtaagaggtatcaagtgccatttgctgccttcaccgggttcaaccatcatgggcagcctgttctttttggttgtgctctcatactcaacgagtctgagtcctcctttgcgtggcttttccaaacttggcttcaagcaatgtctgctccccctcctccttctattacagttgaaccagatcgcctgatacaggttgctgtttctcgagttttcagtcaaacccgccttcgtttcagccagcccctcatcttcgaggaaactgaggagaaacttgctcacgtctttcaggctcatcctacctttgaatccgaatttataaattgcgttactgagacagaaacggctgccgagtttgaggcatcttgggactctatcgtcaggagatattatatggaggataacgactggctccagtccatttataatgctagacaacagtgggtccgtgttttcatccgagacaccttttatggagagctgtctacaaatgaaggaagcagcattttgaactcattcttccaagggtttgtggatgcatcaactacaatgcaaatgctcataaaacagtatgagaaagcaattgatagttggcgtgagaaagaactgaaagcagattacgaagcaactaactatactccagttatgaagacgccctctcccatggaaaagcaagctgctagcctctatacaagggcagcattcatcaagtttcaggaggagtttgttgagacccttgcaattcctgcaaatataattagtgattcaggaactcacactacttatcgtgtcgctaagttcggagaagttcacaaaggtcatactgtcagttttgactctcttgaggtgaaagctaattgcagctgtcaaatgtttgagtattcagggattatatgtagacacatattggcggtgttcagtgccaaaaatgttcttgctcttccatctcggtatctactgaggcgatggaccaaagaagcaaagattagaggcactgaggaacaacctgagttttcaaatggctgtcaagaatctttaaatctctgcttcgacagtctacgccaagaagcaaccaagtatgtcgaggaaggtgccaaatctattcagatctataaagttgcgatggatgctttggatgaagctgccaagaaggttgctgctgcaagtaacagaacacctggaactaggcttcccaatggggaagcttacccgtccgaggaagctcgagaaacagcaaatgcaacgaatcatccaggggtaagcgaatactggtatttgataattctttaacattgatgtcctctgttccttgggaataagtacttacttcaatgccagggtgaaaaagagaggacgatacttgaactgacagctgagttggagaggacaggccagcgatgtgaagtttatcgagcaaacctgctgtctattttgagagatatggaagaacagaagtttcagctatccctcaaggtacaaaatgctagactaagtttgaaagagtgagtgcaatctgctggatacataacatcacaattcaactcacgtactgtggttggtaacttggtatgcaaacatttatgggaatcaacttcatgctcttactcagtaaggaaatgattgggagtacaatctattacaaaggctacctactgtaagaacagggaaatcctgaaaattgggtccctctttcaaaaaccctataagagatatagtacatgagcaatatgttatagatgagaatagcagtcggaatttgttgcttgtttcacagattatccttcaagctaattttgatgttctgcactttgatggacacttgtaacttttggtcttccatttctttcaaaactgaaagtaggttagtcctgtaagcttcgcatttcctgtttgctaattccagctcgtttctgagctgattaatcttcttgtccatttcgtcctgcgaaagtagaggaaatacggtcatgcaattagtcagcagtaaaagcacatagcaaaattgaggaccttgcagattgtacggaacaaaggctcacaatggcaaaatgaagaccatactcttaacatgcatatgtgaatcacgagctcattagttaaacgttaacagagcaatcagcattatggtaccgtcaaggagacaaagcaatgattgtattgtatggggcaaacccgcacaaacgatacttcaaacgtatataactattttttagagcaacaaatttgattgctattatatcaaaaagaaaacaagtatcgaaaagaaaatgatcctcacctcgggctcaggttgcgccagcacttcttgctgatgttttccaccagttccagaactcgctttaaaatgcctgttcgccatagttcttctaacttccttattcattgccagggacacagtcttggcagcttcttgcagagcaacaactgcgacatcacaagtatacagagattttccagcttcttgcacaaaattagaagctttgtgacgtaaggtgttgtatcggacggtatgagactccaggtaattagcatacgcatgcaaattataatcatcaaatataaccctgcttttggcatttctggtccatctttttaggatgtagtaaggtggaagtgtaaggagattggtgacccggaagactgccaatatatgtctgcaaatgatgccagagaactcaaacatctggcaactgcaatttgctctcatctccaaaacgttgaacttaacgaaatgagccttgtgagcctctccatatttcgcaacctggtaggtaacaagatccccatcatcgtcagctttggatgccatgaaagtcagggttccaactagttcttcctgaaatctcataaacaacttccttgtgtaaagttcagacgcctgcttctccattggagatggagtcttcagaacaggaggtgagttcattgtgtcataatctgctttaacttctttctcgagacgactctccaaagctttttcatacagcttaaagaactggcttagattggttgaagcgtttatataaccatcaaaatatgaattgatactatcactacgatgagttaaggacatgtcggcaaaaaaggtatcacggagatatactgggacccactgccggcgatcggagtatattgcttgtagccactcatgatctcttagctcatacttgtcaagaagtgaaaaccagcatgtctcaaaatcctcaaccgactctgtcagattgacacatttgtggaaatctgactcaaacgaaggatgcttgaggaagacatgcgacagcttctcctgacatttctttaaaatatgccatttgcaaaagcgatggcgggcaccaggaaaaacgtgcatgatggctgcacgtataacagcatcatgatcggtggtgattgagacaggagggtgggcggacattgcggctagccacgtattgaaaagccatacaaatgaagcctcagtttcattgatgataaaggcacagccgaaaagaatgggttggccatggtgatttacaccagtgaagggtgcgaaaggcaaacggtacctgttggacctgtaggttgtatcaaatgtaacggtgtctccaaagtgagtgaaatccattatagctttaggatcagcccagaagacattaccaacagactgatcttcgcttccctgaacagaataaaagaagtttgggttgtcagcattcatctgcctcaagtagtcaagaagaagctgaatctctccttctatgctcttctggcggttgttcctcatataattcctacagtccacttcggtgaaaccaaccttgctgatgccaccatactctttgatgagggcggacatgattctgcggggacccattcctgcagcttgaagtgtgtcaatcaaagtcttggcagggccagagatttgcctgtgggaacgcagacagtgaacttggtcgggaggaacaagctcatggttgtggtctttgacaaagccagagacaagccatttaccggaatcctgcatcttaacagagagggaggctttgcaaccgactcgagtgatggtcctgggacgcttgatctccctgtccttggtgcgcttttcattcatatttctgaaaccttctttggcacagacaaattgcctctggatgatagctccatcacggcgggatcggcggcaggaactgacacgggtactaaagccaatgcgacgggcatacgagttgtagaatgccttggcagcttcttcggactcgaattcaagaccatcatagggctcgagatccaggagatcacaagcctcctcctcctggttgggaaagtaatttccagaattgccaacaagaccattaccgcaaggcataattgggctgtcgagcatatcatcgtcgtcgagagcatggtgctcaatatcaatagcgtcgtcatcaacatctccgccactactaactcctacaccaatatcgaagtcgagcacttcattatccatcatatcctccttgtcttcagggatgaattctatctatctattgtccgcaggacaaaaatgctgtttcaacattggtagcttcaagagcagaggtttccatgaaaaacaagttttctctttgtgcaaactcttgtgcgtcttctgttggcactgctcttaggcttccaagatcacatttgttcccaattagcataatcactatgttcttgtccgcatgtcctcgtaactcttccagccatttagccatgtgatcgaatgattgacgtttggtcatgtcgtagaccaacattgccccaactgctccacggtagtatgcacttgtcaccgccctatatctgccaaagaaacactttgataaacgtaagagccttaaacaaagtgatgatcaaacatcacatattcatgttgcccatttgcccatcaaagatcccaacccattgttcatacatatctacttatattggaacatgtgttgcctaattcaatgacatctctagctgctaagacataaatcaatcaaatggatgaattgtgaacgttctctgatatataccaaatgatattcatggtgtcattacttctaatgaatgaagaagaaaaaagcaaaacctttcttggccagcagtatcccaaatctgagctttgacggttttgttatcaatgacgagcgttttagtctggaattcaacaccaatggtggctttagaatcgacgctaaactcattcctagcgaaccgagcaagaagctgagttttgccaacggcagaatcaccgatcaacacgactttgaagacgtaatcgatcttttggttataatctccatacaaattagacatctctcttcttcttcttattattattatttaaaaacacaacaacaaaggagaatgaatatacacaaatctccagatcacgaatacgaaaggcgaagagtctcggattcgtattgcacgcgtgaaacagtcgaatctaccatcagacgaacacagaaactcagatcacaatgaatggtggttaggcagagaaagcgaaaaattattcagagattgagagaaagagaggattaacggccgatgcgggaccctttactctaggaattattctactgtgccatagatcacccttaacccaattcatcctggccgtttactttattcgtaccttattcaccgttcaatttcctaatggcacggtacgtaaacataaccggcgcaatttgaacgaattaattcaaaatcgatatcataccaaatcaagttcggtttaactactataccagattaggttataaccttgttaaaataggcggcaatggaaatttattggcgccataaattttctgagaagcaaaattttaactccattacttatctctggtgtgtactttctcggcgaaggagttacacgagaacgttgaaaatggagaatgatggaagatccaatgagaaaaatctgtacgaggtatctcaacattctctttatccgatggttccaattagggtttccgtttctggatttgggacttgttccagttatgcttcgaaatttaagattgttttgtcgattttcatgtgctgattcgtctgatgatgtttttgtgataatctgaatatcattgtttattgttgggattgtaagaggctaagagactttacttggttaagatccatggtttgatcaatttgtaccgtagctgttgcaattcttagttggtttcttggtggttagtgaaacgaactaatgaatgcgtctttgctgaaggttcttggtgttgaagcac

SEQ ID NO: 26497 - DNA, 951 bp, Arabidopsis thaliana landsberg
tttgttcattcttatgttgtttcggttccgtatattttgcacttgtttagcttattatggtagatggaagttttatgtaatatacatgtcatatcaatataagaacatgcttattattatctcttgctatcaaagtgacccacatctaatttagttttgatggagagacagctaaatataccaaaaataaacactcaacacatgatttatgaaaatgaattgaatgaatacagaatacctaatttgctattatgtaaatgtggacaactcttttaatattgggttgtcaaccattttgaataattctttttggttcacaaaaaccactatgacttttttttttggcttgcaaacattgacagctttaagagtaaagcatttaatgctaaaggtataaataggtgagaatgggtggaactgcaacagtactaaggctgctataattttatgactcttttagagaggtcccaaaggtacacatgatagagagggaccataaagagatattggtttcaagagagaagacgacattaagatagtgatgattctattttatgtgcgttgtctctttacctacatttacggttgatgcggctgctaattgccaatacaaacgcaaaccgcaatcgctaactatacatcagtttagcaacattggtgtatgtcccattaatatgataggtttaaaactttggttggaaaaggtatcactcgttgagaatctaatgaaaatatgtgacagagacaaattgtcaatatatataataaataatgcactttcactcagtatacttggacaacatttcacaacccttctatgaaggtggaacgcaaaagcctaagagaccatgtcccatatatgctgaaccacaaatccaaacatatatcaaaccgcaaaacaccaattaccgcatttgcagatgcgtttatgcgtccaaataaatgtttttt

SEQ ID NO: 26498 - DNA, 1081 bp, Arabidopsis thaliana landsberg
agactgcgacgttactgcgatctggatttatgtacttctcataagtgaccctcaggtttcctgttttagcagctttgtgaaaccttaagatcatgtcagaacagtccctgtgataagaaaattgtgtaagattagttaaagaatgtaactagtctaagtgatctacaaggaggagttattaatgagattttaacttacttcatctgggagacattgtagtgggtatggttgtttaggagcgaggtccaaactggagtcatatgcaaagtgcatctggcaacataaatggctgatgcacatagcagtgatggcttatacttcaaagcttcgtactcaaccaaacacaactcgataaggtagaaggcgagttgttcaagctgataatagaaataatactattcaatgtctacctattcaaacagaagaattttataggttattaaagcatacaatgcaggtttttcgcgtaccttcttattggattgagcagcttttaggaacctcaacatgaaaacatagggggtgggtgcattcaaacggaactttaactgtttaagcatacttctctcctgaaaatgaaaattaggataagttacaaggggaaatacgcaaatgacccgtattttttataaagaatagagaagtttgactataaacagagttcattatataccattcccaagatttgttctctggtgtatgattctgcggatatgctgatcaagtctttgatctgcacatggacaaagaaaatagattgtaaatgtctattttcaggagaggtattagctttcaggataaatgtctcttaccctaggatgccagtagtcctcatatttagatgccaataagagtgcagtaagacctatcaattgcatctcatttttatgtattggaacttgggagaggtaacggtctaataagtccattgtcaggtaaagagtctcatgcattagatcaaatttgaaatgaacctgcaaacaataagtaaaacctaagtttccacaagaagaagtagggataatatcaagttgaaatggaaccaaaaatatactgcactcacttcgataagccagttgat

SEQ ID NO: 26499 - DNA, 903 bp, Arabidopsis thaliana landsberg
gccccgattagctgacttacgacgggtttgtgtctctcatcgcttcctcattttctcttattttatattgatggtccctcactttctcttctctttaccctttttccccattcttaaagcccatcgtttaacaggcccctttttaaacatccaggcccattagtgtaagaataccgacgtcgttttgagtggagtttcaattttagttttttgacccttcttctttgctctctcgctttgctttctcgcggcaatggcggcggcgacgggaaatgacgacaacggctgcttcgataaaccagaatctgaaccggcaccggttaacgtttcgcctcccctgtcgaagaatgctcagaagaagcagctgaagcagcaaagatacgaagcgaagaaagctgagaagaaggcacaggagaaggagcataagagaaaagaaggagagagaaagcttaaggaatgggaagaaaccctagcgaacgcgacggaggaagagaggctgaagcttattgagtcgaggaagagtctgcggaaggagagaatggagaagagatcggaggagaaggagaagaagatagagaggctgaatcaagctaaagaaataggtcaaaagatcgtagtagatgttgattttgctcatctcatgtctgagtctgagatctcaagcctcgttcagcagattatgtattgctatgcggtgaatgggagaagcacttcaccttgtcatctatggcttacaggagtccaagggaagatgagtactgagcttgacaagcttcctggttttgagaaatggttcattgaaaaccaaagtaggtgttacattgaagccataaaagatcagaaagataatttggtgtatcttacggctgattcctcccaagtagttttggtatgtaacccctt

SEQ ID NO: 26500 - DNA, 983 bp, Arabidopsis thaliana landsberg
atcattgttcctaaatactgaagaagcaaaattaaggagttaagagactacaggcttttatgaggaatacctgctccattatgcctcgatacatcaccatcaaggattttttaccaaagttactatcataattatacgcactcaaagaaggcccggagggcccagccctgcagtacaccacaccaaattttgagacaaaacacatggcaaggttttaagcaataacaagccaaaagactaattaagaaatagttaagaaagggactttcctgcggtctccctgtgttaaagcaccaagtgtttctagtctctttgcaacaatagaggcaaagcggcgttccccaccgagattagtgaagagtagtctgacaggaccaaaacaaaagaactatcaacttcaacagcatacttttgctattggacggatacaaaattaaacacaagcgttgtcattcaacctatattcaggtgcagatgtctgatttgaccggtgagttcttccaaattgctgaattgcacgatcagcactccagggaagctctaaagtcaagtgaacccttcttttctgcagacatatataaaaaattccaaatcaactaatacccccaaagcggacatgtgaagtcctctgaggtcatctctgacaattaacttagatctacagaacaataagaatacgcaaaaaaaaagacaattttatttagtaggagaatttataaactcgacacacctgatttactgcccttctatctgcttgcaacgaaacaccagctgacccagcttcagaaataatggcaaccaactttttaccatccataaatagttgcttctcgtgcatgttgaccatttccatggtaatatcctttctagagccaagaagcacaaggatgaaaagcagattactagtgctgaataagttaaagtactgagaatgaaagcttacgtgtttcttgcttgatatgtaacacctttcccattcgatg

SEQ ID NO: 26501 - DNA, 1288 bp, Arabidopsis thaliana landsberg
ttcatcttcgtcttaaatcgaacaacttgggataatgttttggttttgtccttgcaggagagaggtgtgcttagatgtcaggagcgaacttcattgcttcatcactggaagcttacaaaggagcagatagaattggttgaaaaagctggttttggttggtttaggctaataggatcaattagtttgaacaattctcttatctctgctcttgttgagagatggcgtagagaaaccaacacttttcacttgccctgtggcgaaatgacaattactctcgatgaggtatcgttgattctcggtcttgctgatgatgggaaacctgtggttggtgttaaagaaaaagatgaagacccttctcaagtatgtttgaaacttttggggaagctaccaaaaggagaattaagcggtaatcgagtgactgctaaatggttgaaggagagttttgcagagtgtccaaaaggagctaccatgaaagagattgagtatcacactcgtgcttatcttatatacattgttgggagcacgaattttgcaactacagatcccagtaagatctctgttgattaccttatcctctttgaggattttgagaaagctggagaatatgcttggggtgctgctgcgctagctttcttgtatagacaaattggtaatgcctctcaacggtctcagagtatcattggtggttgcttgacactcttacaggtttgttttcatatatctggagctctgtatatctttaagagcatcatcttctctgttgtttcttttgcccaagaagttcttaaccagttgtgttaccatcttcagtgctggagttacttccacctcaatattgaccggccaaagagaaccactcgtcagtttccactggcacttttgtggaaaggaaggcaacagagtcgatcaaagaatgacttgtttaagtatcgcatggcacttgacgatttagatccatcaaatgtaagaattaaatcattgttttcttatacatttctttgttttgaatccattatgatattttgttactcttttaggttagttggtgtccctttgaaggagaccttgacattgtgccacaaagtttcaaagataatctactacttggaaggtccagaacaaaactgattggtccaaaagtagtagaatggcacttcccagatcgatgcatgaagcagtttgggctgtgccaagttatccccggagaagttcctcccaggaaaaacgagaaaaaccatgatgaagacttactggaagacatgaacacagcatatgaggaatggatgag

SEQ ID NO: 26502 - DNA, 1296 bp, Arabidopsis thaliana landsberg
aacagtatccaaaacaactaataataaacactataataaaatgaaatagttgatcaaatatttccttattatagggatcaactttatttgactatataaaaagtaacatttctgtaaagcaataaaacaataaaattatggaagattaagttttagaaacgtaataaaaagcatgatgacctaaaagcaaagccaaaaaagaaaaaccctagaagataaaaaaaagggaggcgatacacgaaatagagaagagatccaaaaccgaaacaagggcgttataaaagggaagaaagttccaaaagaagaaaacagccactcacaccaagcaaagcaaattagcaaagccaccaaatatggaaaattgctacttatagtaactcccatctttttatataataccctaattttggtcctaattttccttccttagcccctttcccaatatttgatcaatttctaaagaaaaccccttcctctactagtcctcctcctatatatacaaaatcttaagaaatctctctacttgtttcctctgttatcataatctcttctctctatatctcttctcttcttcttttaccctgttttttttttcattccacagagaccaggtttattaagattgtgttttattcatctggggaaacaacatttatttgtggtgaaattttgtaatatcaactgccatcaatgcacttataacccaaagatattttaaaagaacacctctttgggatattactcacataaggttggtttatatacaaaataaaagaaagttcaatattttttttttcccattaaccagacacttctgtaacatgctaaaaaagagaatgagccacttgtcgtaattacatgcaaatctgcaatttgtttccattttacttttcttcgtgcagacttctagatcaattttaatcatatttgtttatgaaaaaaacaatgaaatttgatgataattataacaagctactctatacagtataaattgaaaatatatcgaatatattcttatcaaatagaaacggaaaaaatcttaacaaatagattactaagcaaaatctttttttgtaaaacacacaaaattgtaaaaaagacgtatggaggaggtatcatgaaagattagcatgtttgggactttgggcctataaagcaaataatatttgggcccttagacccagttgaatgtggtatgaacctcagcggaaaaagtgtgaaaaaaactcaagttagttggtattctccggttagtgatttctatacagaacaaaagcttgtaaatttgcgtcatta

SEQ ID NO: 26503 - DNA, 1048 bp, Arabidopsis thaliana landsberg
ccaacgagatagagctatataaaaagaaaagattttttggcgggacccacgttttgtttgctgtcaatagtttatttagttacaactttatttaaatttatatatttgaactaaatgagacctaattatataaaaaaaaatgaggcctaagcctaacagaaaaaatgtgttaaacaaaaggatgcgtaattaatggggaaaggatttaccatatttatccttgacgagtgacgacatgttcgttttggattttcagttttttcgtattttattgttattattatatgtgatatagtgatgttaccatatacagagtattactcgttgtaaacaacatttgactcatatcattaattgctttttatataaaaatggtatttgtatacttttcaaaatctgaaaaccctcaagaacactccatctagaataaacttttttaataaatactcttttaaagactttgtaatttcctttttaaaatatctaatttatttacaaaaactaacacgtttcgatatttaattggtagcatcaccattcaccaacattacgataagtcgataaccactaaaatgtgattattaaaatgatcttggtttaaattgcttcattatttttcatttaaagatgacacatcatcatagttttttttttttttccccttctagatttgccaaaaatatagtaattatataatctcttaaaagcattaaaaagcaagaaagaaagatgaagagaacctagaagatacccatttccacatttcaccaattatttacttctactgctcaatgtagtagattattttttttcaaatggaatgaaaactaaaaactaaaaaggtaacataaaatatttaaataaatataacaaattaagcataaaataaaatttatctttaaaaatcatttaatccctaaaaaatagttttaagaattttatgagtcaaactaattgataaatcctgtttttttttcctataataatatgtacttaataataaaaatggaagaatattagtttagttattacaagatggtaaaaaaaa

SEQ ID NO: 26504 - DNA, 1470 bp, Arabidopsis thaliana landsberg
cttcagcttcatctcaagatttaggctctctaatggaccagagggcataatagcgtcgcaaatggaagagaaagcttggaggtcagattttgagaatccatggctgaagctttcttgtttcacactccatctcaacaaagggcttcctctcttccctaatcttcttcctcctaccatctctctcagcttttaggtcctttctctctttcttaattcctctttacgcttagttcttttttacacaaacatatatatagacatgcgaagagcttctagggtttgagcatttttcttttcgattttctctgcaaaacttgttgtgggaaagtgtaaggcggttccttaagtgttgggtaatcagaaagaaggactaaaacaaacttgaaagagattgtttcttttttgagttttgagatgattatgtttgtttgtttgcgtctggaaaaagagaccacagattacgtatcacgtgtgatgtatacgaatacgtatatgtgtcttgagtcaggtgtgggatacatcaggagtacacgtgacaaacgcagcatcgtactgttgtattacaatatgttacatgtgtatattttcgacatcaccgataaaataaagctctcagatattccaccaccaacatataaagtctctctctctatatatataaatcatttgtttttagctgtatataatataattatgacagccttttctttttcaggtgtcaataattgttttttttctggtatgtgtagcagccatgtagaaataacaacatttctgtgaaatcagataatatacataggcttcaattacatattttttttgttttttccagctatatacatcatcctcaaaattttattaatagttatagtacgtttgtgaatatactacttatgtgtgtaacacaggtttactagcgtcacaggttttttttttttttgagatgccagcaagagtatctatctcccgatggagatgctctaatggttattgcctacggttcatggttcttgggcctcttgggctctcttgctggcgaatcttgggcttctccctctgtttgggcatgtttcccctttatgggttttggccttctttgttttgttttatcttatcattctgtatgggtctggcccaatatgttgtttccatcttatcctcctaaaaagtcaataaacatgaaaaccctttgacaaaaaaattagtggccaataattgatttgtttttactaacaactgctgattttctttacagttttaccacattaagattgcaatagagaacaaacaatacaattagcctcatcgatttttttaaaaaaatctactttaaactaattgtcggtcacttaatttagtttttgttttcccttcatcacattgttaattaggtccctatctggcactggaaacagaaaaacttgatatattagctctccatgcacaatcttccttttcctatttcttttg

SEQ ID NO: 26505 - DNA, 1447 bp, Arabidopsis thaliana landsberg
acttagattttgtattgttggggtaccaccttcaagcacccgttgccatcagtggagtcgatcgagtttatcagatctctgcaacaattctgggaatcgtcacctcagattagacctccagtaagaagtgagaaagcatggacggtgaagaattgagctaatgagctgaaccggatccggtgaaattgcagaaccggatcggagaagaagaattttgcatttgtgcatctttatttttaattgttacgtttcagccccaataatcatagatattgtagtgaagaccaaatttcatggtggatcaatcaaattgtattttcaaattttcgtagtgtaataacggaaaaaggaataaaaaggtcactgagtaaaattaatgtatcagtggggatggtgttcgtccgagacttgaagattatcgatgcctttaactactgattcgtagtgtcttcttgtggatttcccagcctccccaggagagtttctcgggatcacgccgcggctgacgtcacctgtacggcttctctgcaacaactcctcgctgcctggaaaattgtcccggctgccacttactgcagttactctcctcgatgatcctgctgattgtgcaaacaacgaggagctcgggatctgcatccaaaagaaattgaacaaagttttgatacttttagccactaaatcacatatgacccaaactcatgtttgcaggtgagagagatagcaaatgcagagagattcataccatggagtctctagcacttgaggatgtcggttggttcgaaatattccctgagttatcaagagcccctgaaactctccgtcgagatgattccatatgtggtcgcccttcttcctccccttggattcaacaatgaacaacaaacaatgtgaataataacttctttgcagagaaataagaattactttgtaagtgatcagggaaatttacctgtgtatctatcgatgttggaaatgcccggaggcaatgcggcactagttcccacagcaggattctgaagcaggagagactccatcagaaaatgtcaaaccaaaaaagatagtttaaccaagaactcaagttttacttacgagggcacgagatgggggagcggttagttgtgattgttgatatttcaagattgtccagtcaaacacgtaatcaaactgaaaccctgcaacaggcaaatgaaatcttgttagaaaatatattaggcttaaaaattgagagggaaggaaatatcaaaccttcacggataaagagatctcgaaatattcttttcagataagcgtaatctggtttatcatcaaaccgaagcgaccgacagtagtggaaataggatgcaaattcggatgggtaaccacgacataaagcccgcaggtgtaaggcgatcatatacgaatcagaatgagaaaaacaaaaatctgagtaaaaatgtagcatacttgt

SEQ ID NO: 26506 - DNA, 1463 bp, Arabidopsis thaliana landsberg
cacttaccgatttaaacgctaaaggtagagtctttgcggagttttgcaaacacctaaaaagaaaatccaaaacttcagacgagaattacagaatttcaaagacaaaacgctcaagaccaaactcatatcaaagtgtgaaataaggggataagtcctcaaaacaatgacagagattcttatgttcttcatgcatttatccatataagatataataagccaagctttctatttctgaatctaaatactttatcaattactaaaacaacaactccataactaacctcattggagttcaccaaattcaatccccattcagagtgaatctacgcattcatgattgcaaacagaggcaaaatcgacagaaacaaattcagcattcatattgtttttttacaaaaaaaaaaactgagattccaaaaccctaaccttgagacgaaatcaaacgtagcgtcttggccgctcggggcttcggagagggtataaacggcgggagacgacggcgactgagtcacactgagtcgtttaaatgaagaagaagaagaagaaaaatcagcatcgacccattattatattgggcctcaactggaccgaaaataggcccttttataaacgattccaaagttaattataaagaatagttaatattgaaatagtttgtcatgtgtatcacttattattagatcgaatttttggcttcttgtacaatgttataattcctgtagtaacctattgtataattgtgaatgatatataatatgtgaacaaaagaaacaacttatgtatcttagcaccgtctatggggaatatcaccatgtggtgatgtatttcaggatatatcatttacaattagtttggagggaaattaaaccttaagattcttgggttattaattgttaatagactgtaatgataatatttatttggtttttccattgtttactataaactaaattcactgtatgtgtaaaaagtttaaattttgtagataatgttacgatacaatcatacaaaaaaaaacaatatcatgagatacttgggttgacatcaaatgtttttttatcatcgacaaaatgttggaagtagtgggatgcacttctcctaatacaaagacatatttctctcatatttaatttatttacttagaaacgattcgttgttcattagtttaaaactaactctatgtatttatttaataggattaattggattttttctaaaaagtatttctatattatggaaaacagtaggaggaccctgtcaatatatagattgttagaatcagaactaaatagttgtctacatgttttcaccttgcttcaaatgagcctctccattatcttcagcctcccttacctctccccaaacaatcttctccaatagaggtaaaaataaaaaaataaactctctcaaattctctctagctttctcatctttggatcctaaaacacattttggtcatttaa

SEQ ID NO: 26507 - DNA, 2619 bp, Arabidopsis thaliana landsberg
ggtacttcacttatggacaattttgattctattaaagtattattctttgaatacacttttttgttctttgaactcttatgctatttactaggtatctctctgtttgatccggttacgagcgaacctgaagagccatggaaaaagactcagaatggtgatcagccaacaaatagtgctctttctaagttgagtgtggatgaagcgatgagtgatttgatcagagatacggtctctagtggttctgttgtgatacatggaaggacaaaccatgagcaacctgaaattgatggagctgagtggtcattcccttgcttgcagaacctaattgatcagtacaattcagagaagcttcaattggagagtatttcagggaaacatgtacaaatgttgagtgaatttatggcttcgtacaggcgactaaggttacttcatgagaaaactagtcatctcaggaaaactttacttgaaacagagaaggagatggtttgttgtgaagctgagacattagaatttggagcaagttgcagggaagtggctggagaaatggctgagtctcagaagaggatgcaggaaactgcagataaactaggaaaagaagtagaagtgtttaagcacaatgagtttgttggtctaaagagaagaagaacctgagcatttgcatattagtgcccttgcaagtgttggaaggtaattatcttttattttaactcggcaattccaacattttacacttcttcatcggataacgtgtatagactagttagattaatggattaattgataggtgactgcaaagctcgtgcccctaaattttctcccatgtcaccttcaggtttagatgagccaaaagcagacatactttgtttttaacttttgaatgtggttgagaattatgaatctacttagtgcgctcatcacatggtccgttgattaaaagaggtattagatttaaggcagacaaaagatgtttgtgttaggcaataattagaaaaaggattaattatgttaagcgtccaagaaaatgcctttccacgttgggcgcacatgccttctcttctttcttccctttttttttctttctagtttctactaaactaacacaattagaggcccaaaccctcagataattgatcatcaaattatttgcatcaagaatagttcgagatgagttatagagaattgctagtttcgtcaatttgagactcggaccatagaacaaaacatccttccaatttccataaaactgatatagttaagaattgggatatgcatgtgttcacttgtcagcttgtgtatatctccagttgttcgaggacgttacatacaacgttcgagaatggtattgcaaatgctgaagtcacttaagagtagtgatggtagtgaaaaaggcggtgatctgactgggagggcttaattagggctcttgacctaaatcctaattaagtaggattcgtataaatattttgtccattgatacattttatatagttcttacatgtactaatattccaccgtagaccatgagaacgtagtactaattaagtaaagaaacctgtggtctgtggatatcggagaataataagaggcgatagagaatagaagcggaacgtaaatgtaaacaagattcaatgcatcaagattggactttagaatataaaattaaacgagaaaaatgagagttggtcaaaagtgagggaacataaattatagggcttgtttactccaatgaaattaagattaaagataaaatttcaaaagcataaaagattgctcacatgcaacccaaattcctttgttctcaataatgcatgtttgttttaaaatagtatatagcaaatgaatatgaatggagtattttggtcagaatatatataatttgagaaattgaatttaggaagagacgatatcatattcatagccaagaggacaaacacataaatgattaaattataaggaaatagatagatgccttgggattagaaagtgggagatgaaagaaaaagggtgtggcaatattcattgaagttgcagcctataaaattgggagcacatgcactacccctatattgtttttgactaatctctaattaattaacgctaacacacattgtgattattgtacatgtagacaaatgggacgtatatattataaaagattaagaaatgatacgatccactatcaccgtccataacgttggtcgtgtagccaaacataaacataaatggtctttggtcttcctctgacacaaaataagatcgtcttagaaaggctaccacttgcttccttagatactcatatcaaatatcataatctctctctaatgcatgagacttcaactcttttaattttgtgttggtcaaaagtcaaaaccctactctgacgtattagtaatacaagattaatacacatataatgatataatagctgcttaagtaatgactttcctcctcataatttagtcgactaccttccatcatgcggccatcattgcacccttctttaccaattattaactttaaccaaaacaccaaactcattgtttaaaaatgtgttgtatgattgataagacggaaagtgtatgcgttttcatatatgcaataatcagggatattgcttct
